United States Patent Application Publication US 2005/0228172 A9 - sequence listing, part 30

SEQ ID NO: 95474 - DNA, 540 bp, Homo sapiens
cgtttgtaatacaaaggataaatgcttgaggtgaggatactccatttaccctgatgtgattatgcattgtatgcatatatcaaaatatctcatgtaccccataaatatatatcctactatgtgcccacaaaaattaaaaattaaaaaaaaaaacagaattttcctgaattcagaaaataatagtggtcacccacttccccctaccctcctagaaaaaacataaaaccacactgaatccataytttctgcattactaggagaaagaacatttgctgccttcaccatatgtagaagaaaaaagaaacaaattccatggcacttctaccatcagcccactgctactaccacaaacttcagggtattgaaagtgaggaaagaaaggcttataagattctgtgaaaaagaacagaagaaagcaaaggacttatggaaggcacagacccaaccaccccagaaggaaaaggtgaaacaataaatgcaaaaattctcaacatgggttggatctacaagttcaaagctctggctacagagaaggaattt

SEQ ID NO: 95475 - DNA, 540 bp, Homo sapiens
catcactctccctcaaaactccccacacaatccttcagcaaactgctgtcaccatttaaaaaatgagtaactgtaaaataagaagagatgtatgtgtggaaattgcaaaaaaaggaaaggggtagacatgagggagatgagaacataaaagacagaaaatctccatagcaaaaacttcctaaagaaacaaaagaagaattcagagaaatagttaccccttgtatcagtgaaataaaagaaaccctttttttcattgtttggagaactcaaaagatacggggttgaaagccacactagaagcaataactagaataaataaatttttwaaatgagaataaatacactaaaaaccaactcaagaacatggataagcgacatgaaaaaaatcacaaaaatcaaaatagaaagaacaaatatatacaaataattaattgatgaggagtaatgttttaattcttaaggactgagaaataagtcagacgagcatccagacagaaaaagtaattcatccaataagatgtctttttaaaaaaaattaag

SEQ ID NO: 95476 - DNA, 424 bp, Homo sapiens
aggcacagtggcacatgcctgtagtcctagctactcaggaggctgaggaaggaggatcacatgacctcaggagttcatggccaacctgggcaacatagtgagaccccatctcaaaaaaaaagggtgacagaaaaacagaattcccacaagctaaagaaggaaattgggttcatcttacactatacacaaaaatcaatccaaaatggataaaagaatagatatyggcacagatgtggtgaaaagggaacacttgtactctgctggtgggaatataaattagtacgacttctatggaaaacaatatgaagatctctcaaagaactaaaagcagatataccataagacccagcaatcccactatcctgggtatctacccgaaggaaaataagtcattacataaaaaacacacctgcatgcatatgtt

SEQ ID NO: 95477 - DNA, 594 bp, Homo sapiens
ttgctaatcaaatcttcacacagagctcataattttcaaatatgtaaatatagattttcaaggactcatgatgggagacatggtgaatttaggactaacccagctttgaagagcataaatccatttcaagtttcaagattaacagaacagtattgttcttttttgccaggtaaaacatcttatttttcaaatggtaacaattttattttcaatatagtaatatttgaaatttttgaaaactatagaattaggaaacactgtacatattgagtacatttgggtcaaacactaatttacatattttatcattataatatcrcattattttatcattataatatctcagtaagcagaggtactcaaacaaacccagtgttaaatttttaggaattttttgagccagttctcttactaactttacatcagccatggtggaatatttgcacctcaaaaactggcaaatgccacaaaccagcagcactctgtcctgagagccagttgttatgcatttaccatcacactattgcaaggaagtattattatcctcatcttataaatgaggaaactcagacgcagacaagttactatcctctc

SEQ ID NO: 95478 - DNA, 471 bp, Homo sapiens
gccagggggacttatccagggtaaaaccccaccctctccgccttccccactccctcgcccctgtcagcagtgactctctccacagccactctgctctgggctgtgttgaaagtagaacctataaaagtcatggttgagcaaattccagagagaatgcttcccagacaaactcagcagcagagaacatatctgtatgcaaagagtcaggttacaatggaggcaactacttggataatagcctaaggagaaattcccaccaccccgactcccccgcatccccgacccccttccctgcccctgctttgtttgtcatgctgtcatgcacagatttgaaractgcagtcttgccttgagttttctgcttcaccagcagatgtttcagagcatcactgggtgctgtgctctgtgccaggtaggggtttataaaggaggctcaggtacagtccctgccctgtggagtccactgctgga

SEQ ID NO: 95479 - DNA, 586 bp, Homo sapiens
ggcttaaggcacaagggcataatgtaaatatatggtatcagccaaggttattgactcctctcatagaggtatgtctcaagtgtagtgggaagattgacatggaaacattttctaaaagcctaaatgtgtacaatcagataaaaactcatggagtgggacttttgcagctctaatccagacaccacatttcaatccccaatagccatgcccatctttacagtcaaaaaagaatagttctcagttatacctgccactaattactgacttctttctttgctgtgcaaacaaaaaatcaccggtgacatatgacaaagtcttgactaaaataacctatcactgagaatttaattcaattatgtttactgttttatcctctcctgatggtttcaagttccatcaatatgctaaatctgtatttacaggctgaacctgcttcctgagttccagaygcctaaatgtgatctccttgatttctagatgagtctctcctgcctccaactcaacagtccttgtagaactcatcatctcctttaaccttacataaacctgagcacatcctccattaactaaccacgcagttacacga

SEQ ID NO: 95480 - DNA, 578 bp, Homo sapiens
tcataaggctacagctgccatacatagatagtgattcctctatggatctgggcaaagttaattgaaaactccctggaaaggattcaacattccagatgtcattaacaacagttatgattcatggaaggaggtgaaaatatcaacattagcaggtgtttgcaagcagttgattccaatcctcatggatgactttgagggkctcaagacttcagtggagaaagtaactgcagatgtggtggcaatagcaagagaagtagaactagaagtggaacctaaagatgggaatggattgctgtaatctcatgataaaacttggaagaatgagaagttttatcatgagataaaatagaagctactatgaatgttgttgaaatgacaataaaggatttataatattacatcattagttaataaagaagtagcagtgtttgagaggattgacttgaattttaaaagaaattctactgtaggtaaatgctttcaaacaacattgcatggtacagagaaatcttttgtgaaaggaagagtcaatggatatggcaaactttattattgtcatatttttaaaacttgccaca

SEQ ID NO: 95481 - DNA, 514 bp, Homo sapiens
cctgcacatgctctcttgcctgccgccatgaagacttgcctttgctcctcctttgctttttgccatgattgtgaggcctccccagccrtgtggaactgtgagtccattaaacctctttttctttgtaaattacacagtcttgggtatgtctttattagcagcacgagaacagactaatacaggtttcataggtgtataattatccccaaactggctatggtgtatacattaaatatagggagttttatatgtcaaataagagttccacaggctacaaatgtgtcagaattccataaccttacatctatgatcaaggaaaagattggagttgataattataaagagccaccaggatgatacactcaagagatgaagcattccaatgtcttgccttttcctccttgacccttagcacagaatttaattgatatccaggtttattagttactgtaatacaaattttagaggtggacatgttacctaaatggatattgagatttcagattgcagctgc

SEQ ID NO: 95482 - DNA, 539 bp, Homo sapiens
aagaaacatttcccttttctttttcatgttttagtgatttagcaaattatatcctatttaattcaacctaagacaaataaaagtagataaaagcatctttagatacaatgcaatgttgacaaatatgctcattaaacacaaattgtgacaaaattcaattgcaccttaggaaagcacaacctttcactttctctctggaataactttaaagttccatcctctttacatacaaaagataacatcttgctcaggaaaacaagtgtgtggaaaatctggaaaacagtctacatgaattatgttcatgtgtgttccctacctcattagaaagtaaggagttgagacaggattatgggacatgtaagccggagagttttttctttaagaggaaaagaacaaaaaataaacagcaataacaacaaatgagtaaatggagggatccatgatctccttcattctgccatttgcagaaccaatccacaaataaggaatcrtccttaagggctaaatggaactttgaaagatcatctggtcaagcccct

SEQ ID NO: 95483 - DNA, 599 bp, Homo sapiens
ttgccctgaagaggggatccacagatgctctaacaaaggtaaatgtggagattatggtggattggatgtagatagtggatcccctacagatcatcttctgacctacagattatctaaacaacctgggagctgtctacaaagactgatgcctggccaccatttgccccggatccacttaactggaataccttgggcaagaattcaggcacacgtatttttcaaatgctccctaggattagcgataatacagcaagtatatggaaccactattatgtaccatgttagttcagaccttgggcgctccactatgctccactatgtagagaaaatgtagaaagcagcaactatggatgaatagtcaattccagtccactggtccattggctgttccttgaacatattatctcagarcctttgcacttgctgtgtcctttgactgggacatccttccacaagacatggcttggtctctggcttctttttcataattcctagaatgtcaccttctcttgaggtcttccctggcttccctatttcagattttaaactccctcacccccatcatttcctcctactcccccctacttcttttttcctca

SEQ ID NO: 95484 - DNA, 599 bp, Homo sapiens
ttgccctgaagaggggatccacagatgctctaacaaaggtaaatgtggagattatggtggattggatgtagatagtggatcccctacagatcatcttctgacctacagattatctaaacaacctgggagctgtctacaaagactgatgcctggccaccatttgccccggatccacttaactggaataccttgggcaagaattcaggcacacgtatttttcaaatgctccctaggattagcgataatacagcaagtatatggaaccactattatgtaccatgttagttcagaccttgggcgctccactatgctccactatgtagagaaaatgtagaaagcagcaactatggatgaatagtcaattccagtccactggtccattggctgttccttgaacatattatctcagaacctttgcacttgctgtgtcctttgactgggacatccttccacaagacatggcttggtctctggcttctttttcataattcctagaatgtcaccttctcttgaggtcttccctggcttccctatttmagattttaaactccctcacccccatcatttcctcctactcccccctacttcttttttcctca

SEQ ID NO: 95485 - DNA, 529 bp, Homo sapiens
tcaatacatggtgagtaactttaaaagtggccatttgattaggaatcagtaagaggactgtaaaaggctgcagaaatataaaargggtctgtactcaattgcttgagttccatttagttctcacttgtcttaaagaagctgaagtaaaaatcatagccaatacactgtaagtatggtttaatgcaagaaaggtaatatgaaaccccaattagggaactcatacctaaaggaaagggcttggccctagagaggaagaaagataaatgtaatttacatatgcatgtgtgttgtgggtgtatttaggtaaaataaagactttaaggcatctaaggtatcaaaagatttgtgattcccagaattaactgactttttcaagtatctgaaaaacctaaaagtccctgttgcagctgacgaaaggatcaaaaaaaaaaaatcatgtttttttcggtcattttcaagaaagctgcctttatttagtgagtcttccatgtaatcaggttcttcatccagaatccaaataatttctcca

SEQ ID NO: 95486 - DNA, 546 bp, Homo sapiens
gctttggtatttgtatgtatacatttgcttatatagggtgtttgtatttccagcgttagtagatgctgctaaagtggttgaactaacttttacttctaaaccagaasttagtaaaattcagtcactccatatcttcaccaacacttgatgttctctgtcttctgcaatttagcttttctagtagaatcacaataatatccactatgactttaattttcatttcctttattattaataagatattgcttttcatatgttcattggtcatttagatatcctctttctgaaaagactgtctttcacctattttttattgggttactttttcctttccatgtaatttgtggaatttctttatatatcacaaatatttattagatatatgtcttgaaaatgaattatcccactctgcttttttacttccttaaatttggcttttgatctacaaaaattcttaagttaattcaatgtttcatttttttctgtatacatgcatatatatatatatatatatatatatatgtttttccctttgagttagtgttt

SEQ ID NO: 95487 - DNA, 594 bp, Homo sapiens
tgcttcccaacctgggtgctttgctccacctgagtacttttccagtgacctgggagaactttggatcccccagtacagccagaacccaacactaagccatgggccagtcaacactagagagtgctaagctgagatctgtgccagaactcagactggggaagagccccaactctcagagcactgacaggggtgagacatacaggtttgtgggctgttgtgggagcagggtgtgcctttctttacagggccagtccagaaatggtgtggcctatctcactgcttcagcctctacccaatgagtcccatagccaagaacacctaacataagaaacatgggtgtggtgccagtgattggaggggctcccccaaggtccaggggcagacctggtgaggaggtcaattctctcttccttaccartgtagagcacatctgcaaatatgaggaaatacaaaagagacacatggctaagagcctatcaaacagccattactcttaaatgccaactactggatagcagttcagcctacaccaccaaaaatattctgctaacacctgtgaacccaagagtaagaatccagccacatgtaaaaacc

SEQ ID NO: 95488 - DNA, 534 bp, Homo sapiens
atatgtattatatatagttatatatgtattatagttatataaaatatagtaatatatgtatataactatagtgttttttatatataaatatataaatatataaatatatatatatatatatatatatacacacacacamaacttagattcttaggataaaaccaacttagttttttattccttttacacatcttttgaaaaattttttgccagaattttggattaaaattgttatgtctatgtttttgagatattggtctataagtttccttcattgtactgctttgtcagattttgctttcaaggttatagtgactttattaagtgaatcaagaaattttctgtctgtttgcataaaactggtgtatattccctaattgtttggaccaattcgatagtaaatccatttgaggccaggatttctttgtgagaaggtttttattgaggattctttttttttttttttttttactagatataagaccattcagattttctctcccttcctaagtcagttttaataagttataattt

SEQ ID NO: 95489 - DNA, 534 bp, Homo sapiens
atatgtattatatatagttatatatgtattatagttatataaaatatagtaatatatgtatataactatagtgttttttatatataaatatataaatatataaatatatatatatatatatatatatacacacacacacaacttagattcttaggataaaaccaacttagttttttattccttttacacatcttttgaaaaattttttgccagaattttggattaaaattgttatgtctatgtttttgagatattggtctataagtttccttcattgtactgctttgtcagattttgctttcaaggttatagtgactttattaartgaatcaagaaattttctgtctgtttgcataaaactggtgtatattccctaattgtttggaccaattcgatagtaaatccatttgaggccaggatttctttgtgagaaggtttttattgaggattctttttttttttttttttttactagatataagaccattcagattttctctcccttcctaagtcagttttaataagttataattt

SEQ ID NO: 95490 - DNA, 490 bp, Homo sapiens
ttcagccctcagcccctgagaaggggagccactctggagctggtactaagtgaccatgtccactgcaggtggaaaagtagagaggcctccacggggcacccaacctatttggggaatcaggcctacaagtcaaggtacttatggccaatacaagacataagatgaactaaactgcgggaattgcaggtcacctcaaacatacaggtagcaagaagggaaagattagtgtggactatcacagttagagaagaactatgggggccaggcgtggtggttcacgcttgtaatcccagcacttagggaggccaaggtgggmggatcacgtgaggtcaggagttcgagaccagtttgaccaacatggagaaaccctgtctctacgaaaaatacaaaattagccgggcatggtggctcatgcctctaatcccagctacttgggaggctgaggcaggagaatcccttgaacccaggaagtggaggttgcggtgagcca

SEQ ID NO: 95491 - DNA, 616 bp, Homo sapiens
accaagtttcttttgaagtctcatagtggctgcccttagagacaatagatggcaaatgttttctattcargcctttaaaaggtgctagactttcagttaatctcttcaggatggggagttcctggaagaaaaaaatctagctatgttaatagagattctttacagacgtaaatttccccccacaaaggatggctttgcagggccatttcaaaatatggcaaagaaacatgttttggggtaaaatattttgttttcttctttgtcacgtatgttacgctagagtcagattagaaaggaagtcatgatatagagggttaaataaaacccatctgatgagaatttatggtttgtagggtgtgaaagggaaatatcatggacccccaaaaccactaagctaaagagaaattcaagctgggaactgtttaggcaaacctgcctcccattctattcaaagtcatccctctgctcactgagataaatgcatatatgattgccttctttggaaaggctaatcagaaactcaaaagaatgcaactgtttgtctgtcacctacctgtgacctggaagccccttccccactttgagttgtcctgcctttgcttcgagttgttctgcc

SEQ ID NO: 95492 - DNA, 616 bp, Homo sapiens
accaagtttcttttgaagtctcatagtggctgcccttagagacaatagatggcaaatgttttctattcaagcctttaaaaggtgctagactttcagttaatctcttcaggatggggagttcctggaagaaaaaaatctagctatgttaatagagattctttacagacgtaaatttccccccacaaaggatggctttgcagggccatttcaaaatatggcaaagaaacatgttttggggtaaaatattttgttttcttctttgtcacgtatgttacgctagagtcagattagaaaggaagtcatgatatagagggttaaataaaacccatctgatgagaatttatggtttgtagggtgtgaaagggaaatatcatggrcccccaaaaccactaagctaaagagaaattcaagctgggaactgtttaggcaaacctgcctcccattctattcaaagtcatccctctgctcactgagataaatgcatatatgattgccttctttggaaaggctaatcagaaactcaaaagaatgcaactgtttgtctgtcacctacctgtgacctggaagccccttccccactttgagttgtcctgcctttgcttcgagttgttctgcc

SEQ ID NO: 95493 - DNA, 477 bp, Homo sapiens
gtttataagatatatcactatttaatttttattttttcataaggtcctttgtgggttttggaatcaaggttatgcaggtctcattaaagtagtttggaagtattccctacttttttattctctggaagagttcctgcaagattttcattgattgaacctaaaatgcttgcrcagaattctcttctatatttacctccacaatttcacaaacaaaacagtaaaattaaaaaaaaaaaattcaagcccacatctggaacattaagctccctcaatcatgtctgaatattcattgaagtttgagattaagtaatgtgattttctttttcttaactgggtatttcttacactcaaaaatttcaggttctttcattttttttttcaagttgtcttggaattcttcttaagctttctgcctttcttttgcctttctctaccttcccataccttttctccattctcagcctgatggaaaatatg

SEQ ID NO: 95494 - DNA, 303 bp, Homo sapiens
accggtgagtgcaggagcttgcttcttgtcctccttgtctcctgtcctctgctcttataccattattcttttccctcactcttcgctgaagactccrccaaatgcttcccagaatgacctgaattaggcagtttctgctgtgtatcaaacaacctccaggtttcagtggatttgcacccaagcattttgtttgctctctcatagtctgtgggtctactagttatcttgactttcagctacagtttgggttcaggtgtgctctgcctgttgttctcatgggattagcagctactcatggcagat

SEQ ID NO: 95495 - DNA, 303 bp, Homo sapiens
accggtgagtgcaggagcttgcttcttgtcctccttgtctcctgtcctctgctcttataccattattcttttccctcactcttcgctgaagactccgccaaatgcttcccagaatgacctgaattaggcagtttctgctgtgtatcaaacaacctccaggtttcagtggatttgcacccaagcattttgtttgctctctcatagtctgtgggtctactagytatcttgactttcagctacagtttgggttcaggtgtgctctgcctgttgttctcatgggattagcagctactcatggcagat

SEQ ID NO: 95496 - DNA, 589 bp, Homo sapiens
tgtggggcctaggaaaggatgcagagcccagacccaggctggagccatccctggcctaccacatcacagttttctttcaaaaggaacgtgatgagtgtttaatgggtttatttgattaaccagtaaatattaaacttcaaccatgagcaaaaattgctgctaggcactggtgagggtgggggtcatgaaggacagtattgcaggrtgattaaactcagactttggagtcagatctggatatgaatcttggtaataactaatttatttagtcattgatgtagtgataactaagtaatttgaatcctaacctctctgagcttcatttgctaaataaaaattgtgacaccttcctacgctaggatgtttttctgcaaataacagagaccatccctctgcaaactcaatccagcctaaacagtagagagaaattgctttcatttggtacaaagtccaggggtagagctgcctgcaggggcagagagagggtcagtgacttgatgtctttgtccactgctagcctctgcacttacttcatcctaaggccggttctacctcatggtcacaagaaggttaccagtggcagttgggg

SEQ ID NO: 95497 - DNA, 587 bp, Homo sapiens
ttgttgttactagttcatagtttatctgggaatttatcacttgaaaattttgctgccaaaataattctaacacctggtattataatcaagtacttacttacagtttctctttctttctccctcctcctaccctccctccacctctttatctttttctaacacttccatctcatttgtcccttctcctctactccctctttcttttttagttctctgtctggcctctcttccttcagtcctccctactttctaccttatctctctctctctttcttccttttctcctaagctttcttctctccattttcatcttcttagagctcctgtctaggtaaacagttaatgtacagggaaaactctgtatttagtcagcctgaattacaatratcaatttcttcccttatattgccatcaggaaatgcctcctaaggtatattatactagttatgctttattttcattggcttagaagtgtaagatcttctggggtgatgtcccccagggctattaaagttgcccaagtttgcttcagttgctcctggtttactatagattaagcctggaagaaagaaaaaatgtagctgtga

SEQ ID NO: 95498 - DNA, 536 bp, Homo sapiens
ggttgttgctggaggcttcagttcgttgtcttgtgggcctctccattgggctgctcacaacatagtagtttgctttcctcagagcaagagatccaaggaagagaagaaggaaaagaggagagagagagagagagagagagagagagagagagagagagagaaagtcatctaaaatggaagccacagtcttttctaacccttctgagaagagacacgtcctctcatctgctgttttctttttggccacagagcccaatcctggcacaatgtggaggaggatatgaatcccaggaggcagggatgactgcaggcatcttggaggctgactaccaaccatggrtaggtaaatgagtgccaggagttaggagatcacacctcggtagagagagttccttgagccaggaagactatgcacaggctcaggaaggctggctgggcctaaacagaagtgggtcaaaggttaaggagtatgtctcagtctatttgggctgccatagcaaaatgccatagactgggtaactcataaatagcagaaa

SEQ ID NO: 95499 - DNA, 536 bp, Homo sapiens
ggttgttgctggaggcttcagttcgttgtcttgtgggcctctccattgggctgctcacaacatagtagtttgctttcctcagagcaagagatccaaggaagagaagaaggaaaagaggagagagagagagagagagagagagagagagagagagagagagaaagtcatctaaaatggaagccacagtcttttctaacccttctgagaagagacacgtcctctcatctgctgttttctttttggccacagagcccaatcctggcacaatgtggaggaggatatgaatcccaggaggcagggatgactgcaggcatcttggaggctgactaccaaccatggataggtaaatgagtgccaggagttaggagatcrcacctcggtagagagagttccttgagccaggaagactatgcacaggctcaggaaggctggctgggcctaaacagaagtgggtcaaaggttaaggagtatgtctcagtctatttgggctgccatagcaaaatgccatagactgggtaactcataaatagcagaaa

SEQ ID NO: 95500 - DNA, 536 bp, Homo sapiens
ggttgttgctggaggcttcagttcgttgtcttgtgggcctctccattgggctgctcacaacatagtagtttgctttcctcagagcaagagatccaaggaagagaagaaggaaaagaggagagagagagagagagagagagagagagagagagagagagagaaagtcatctaaaatggaagccacagtcttttctaacccttctgagaagagacacgtcctctcatctgctgttttctttttggccacagagcccaatcctggcacaatgtggaggaggatatgaatcccaggaggcagggatgactgcaggcatcttggaggctgactaccaaccatggataggtaaatgagtgccaggagttaggagatcacacctcggtagagagagttccttgagccaggaagactatgcacaggctcaggaaggctggctkggcctaaacagaagtgggtcaaaggttaaggagtatgtctcagtctatttgggctgccatagcaaaatgccatagactgggtaactcataaatagcagaaa

SEQ ID NO: 95501 - DNA, 583 bp, Homo sapiens
tggctgttgttaccgtgactgattcctgatgcttcggaattcaagggcaggaggcacttggggcactggctgaaccttggctccctgacccctcctcagtccccttcctgggctccacaacatataagatgaacgttctgattgtctatttctcctcccttctcgttttactcttcatttggtggagtgtrtggtagggataaaatcttagagatgtttatctgagccatagagagaccttattgggggtgcatgggaaatacacaagtaatcccaagctcaccttgcctgggtgcctgcggagggcaattgtgcattagcggtagagtgtggtggggacctgggcctgggtgggcaggggagagcttctggacaggggctggtggattaaggtcatgcccataggtgggaagccacccacacagaatcacagcatctcagaagggcagtgccagaaaaatccccagggacctcattttccttggaacacaacccaattccttggcttggccaaccaggcctagcgcatctgggcccaacttcatctgccttcattcctccactgcatcagtagggtcatttg

SEQ ID NO: 95502 - DNA, 583 bp, Homo sapiens
tggctgttgttaccgtgactgattcctgatgcttcggaattcaagggcaggaggcacttggggcactggctgaaccttggctccctgacccctcctcagtccccttcctgggctccacaacatataagatgaacgttctgattgtctatttctcctcccttctcgttttactcttcatttggtggagtgtatggtagggataaaatcttagagatgtttatctgagccatagagagaccttattgggggtgcatgggaaatasacaagtaatcccaagctcaccttgcctgggtgcctgcggagggcaattgtgcattagcggtagagtgtggtggggacctgggcctgggtgggcaggggagagcttctggacaggggctggtggattaaggtcatgcccataggtgggaagccacccacacagaatcacagcatctcagaagggcagtgccagaaaaatccccagggacctcattttccttggaacacaacccaattccttggcttggccaaccaggcctagcgcatctgggcccaacttcatctgccttcattcctccactgcatcagtagggtcatttg

SEQ ID NO: 95503 - DNA, 530 bp, Homo sapiens
acccttccatgagcagcactctaccaatttaggaaaagagctgctggaagatggaccaaggtttgctggccccttaggtccccttgcagtggtttcttaaagggttccaagtgggtttgggcctacctatccacagcaatacctcatgtgtgacactcttcattggcccttttcctttcctatcatgtgagactccctaacagtgttccttgraatcagcttccaaataaattacctgttcgcaagtccccatcaagggggctacttttagaaggaccacaggctagatgcccattaaactccacaaaggccattttggatcctgctggatgcagctatattgctaagtcccgtttcatggaacttacaagggaaaacaatggcagggccccagtggaagttgctgtgaaaactatagccctgggcaccatgttcatccccccacccccatcccatgcattcatctctgtcttctttttcaaatttgattttaaatatttacagcatcatacatcttcccccaccagata

SEQ ID NO: 95504 - DNA, 532 bp, Homo sapiens
attctcccattctgtggatgtcttttcatttttgatagtgtgcttcgaagagcaggatttaattttgatgaggtctaatgtatctrttttctcttttgttccttgtgcttttaataccatagctaagaaagctttgcctaatcacagatcatgaagatttactgctatattttcttctagtagtttcataattttcactcttatgtttagatattgagttactttgggtatatagtatgagtaagggtcaaactttattcttttatctgtgaatatccagttttcccagcacctttccctgaaaatactgtttttccccattaagttatcttggtaccctgataaaaaatcaattgactataaatgtaaaggtttacttctttatttaagactttgtttttttctagctttattgaagtttgattgacaaataaaattgtatgtatttaaggtatacaatacaatattttgatatatgtatacattatgtaatgaatacaaaaatcaagctaattaggatacccaccatccc

SEQ ID NO: 95505 - DNA, 563 bp, Homo sapiens
aacagccaataaacactcaacagccaacatctcatctagatttgttctctgtaatatcctcatcaacctactactctgcatcccaccatcatctctggtctgtctcaaggcctaattaattcagaccagggcccatgtaagaacttcctaactgatggttctgctttctgtctctgttccttcctgtcatttaaccccaataacctatattcctaaagcactactctgagaacagctttcccttaaaatctccctacacaatgaagccaaaacttcttagacaccagatttccttgagaataggaccagccctcctttctaaccttttcaacctacccctttccattaamcctcatgatatcccagtcataaactcataaactgcatacccattttttactttgtcatcacgaaacattgtcaagctgaaaatcttttgtttcctacattaaaaattgggatacctaaagtcatagttccataagtaccttgtgatgtactaggcattgtagtgaatgttctacatgtattatcttcacttaatcttcacaacattttgatgc

SEQ ID NO: 95506 - DNA, 544 bp, Homo sapiens
tgcttttatgagggctaaatacacattgtataaggtaggaaacccagccaaagtggcttaaacctcaaaaataatggattggctcccataatagaaaaatccagaagttctagttccaaaagatgtcatcatggatctagtccttgaggacagctagtttcacctgatattttcagttcatccaggttatttccttgtggtaacaaaataatctaagcaggttcgtgtctcayagggtcccactgaaccacattgttctggggaaaagagtgtctcttcctgaagttctctcacctgtgactcaccctgtcattggctcaaacggggttaaaggtccattcctgaaccaatctcagctgggaagataggcatgacttatcgtcttaacccaatcagaattcctacgctgaagccaattgcactcaaactttccttgctaacagtgggagagctgtacattatacaaaaagaaagccaggagaaggagaaaatggagaaatcataaaatatatctacattttttggagtttaacaaattagaaaa

SEQ ID NO: 95507 - DNA, 521 bp, Homo sapiens
tgtggttatagtttaattttatattttagtagctacttttaaaattagtaaggctaaatcttctcagatttattgaagttccaaatgaataatgataaagggaaaccaaagttattattcccattttacagataaaataatatcaggcctgaaaaatctctctctagaagatgttgtatgcatcttatagcctctggaatggctctcatataaatcatcctaaaatattggttctaattttcaaacactattttcagaaaagcagagtacagaattttccataaaattcaattctaacctctctacctgtatccawatcttttttttttttttttttttttgagactgagtctcactctgttgcccaggctggagtgcaatggtacgatcttggctcactgcaacctccatctcccagattcaagtgattctccctgcctcagccttctgagtagctgagattacaagcacccaccaccacacccagctaatttttgtatttttactagagacatgaattc

SEQ ID NO: 95508 - DNA, 608 bp, Homo sapiens
ttcaaatagaatagagcttgtgtttgtgtaattctaacaagttcttgggtgatgctgacacgtgctgaagtttgacaactattggaaaagtctgatagcaatgcaatagattctggtacaataacaatgcaaatacttttttcactagtagagctgcaaataatttctgtctaattccaagattacagggtttttgctccatagaacattaaccagttttgtatctcacctagcaatcttatttcagcattctttcaggacctatgtctacttggtctttctagttctctttgaaccagttgaaacttatcctgctggctccctccttaaatgaattaaataactttttggcaagtagtcattgtacatttgtatgagattcaagctttcaacttttgaaaattatactttgacaccaggtgataccaatgtgcatccaagattgagattcactgctctagagagaagccaaaatcctggaaggcatccaaagagaaaccactgttttctctatcccaagcagaatcatataattattmttgaaaacttttatgagtcccacctgataacaataaaaattaatatttactgagtgcttactagtgcca

SEQ ID NO: 95509 - DNA, 608 bp, Homo sapiens
gcctcgaacaaagagataggcagtgagcacagtttagactctgaatctcccagttcccaaatgcgayggttagttttatgtgccaacgtagctaggctataggacctaagtatttaaccaaacaataatctgggtgttcccgtgaaggtgttgtgtagatgtggttaacatctccaactagctgactctaaataatggagatgaccttccataatgtgggtcagcatcacccaatcggttggtggcctaaagagcaaaaactgaggttttccaaaaacgaagttgtgcctcaagactctggctttaattcttgcttgagtttccagcctgccagctcgctcagtagatttcttttttataatagcttttagggtacaagtggttttatgtaacgtggataaattatatactggtgaattctgagatttgagtgcaactatcacctgagtagtgcacattgcacccaatgtgtagtttagtgtccctagtctccctcctaccctccatctcctgagtttctaaagtccatttatgactctgtatgcctttgcatactcatagtaatagcttagctcccacttataattgagaacattcagtttttggtt

SEQ ID NO: 95510 - DNA, 608 bp, Homo sapiens
gcctcgaacaaagagataggcagtgagcacagtttagactctgaatctcccagttcccaaatgcgacggttagttttatgtgccaacgtagctaggctataggacctaagtatttaaccaaacaataatctgggtgttcccgtgaaggtgttgtgtagatgtggttaacatctccaactagctgactctaaataatggagatgaccttccataatgtgggtcagcatcacccaatcggttggtggcctaaagagcaaaaactgaggttttccaaaaacraagttgtgcctcaagactctggctttaattcttgcttgagtttccagcctgccagctcgctcagtagatttcttttttataatagcttttagggtacaagtggttttatgtaacgtggataaattatatactggtgaattctgagatttgagtgcaactatcacctgagtagtgcacattgcacccaatgtgtagtttagtgtccctagtctccctcctaccctccatctcctgagtttctaaagtccatttatgactctgtatgcctttgcatactcatagtaatagcttagctcccacttataattgagaacattcagtttttggtt

SEQ ID NO: 95511 - DNA, 664 bp, Homo sapiens
aatagtaataataataacaataataatagcttcatatatcaagcactgactttgtgccagagctgccgcattaattctcatccacgagactggtgccctgtagagttgcagttcacaatcaacatggttttacctgatggtcctacattgtactaagcacttcatatgtagtatctcatttaatcactcttaacaactctgaaaaatatagaattacaggttccatattacaaataaggaagcaagtctagggaggtcaggtgwtttattcaatatcacacagccataggctatgaaatcaggatttgcacctgtggaatctagctctggcttccagtattaacctcgggcaatactttgtagtattactgcaaagttataataaactcctagaaaagaaacattttacaaagagtaaagtcaataaatatatcttttaaaattatttttatcatgacttttccttgatggccaacctgtgatggtcaaaacctgagaggttttataaataacctgggaaaatttctaaggcatctttacaaatgcatattttataacctgaacatgaactatacataagggagaaatagaataaatcccagccattattgatgttcattatcaataataataaatatagaatgattctgagcaaagaggagac

SEQ ID NO: 95512 - DNA, 549 bp, Homo sapiens
gggtcgagcatgtgctaggtgttgcactagtaagtcaggaatagaaacagtaccttcatacagctcacagtccagagggaactacaaacaggcattggtaattcagtgggaaacaagttgtgacatttcttaagaaacacgtggggagatcatgggaaagatacaatcaggatttgggaagtcacggaaggttttctaggggaagctgagatctaaaaaatcacataggagatagccggatacaagaggagtggagaagagtgttccaggcagaggaaaaacctatgctaagacatgaggtgagaaagagcatgacccacctaaaggacagagagaagttctgtggctggaacacaacamgggaaaggagggacacgtttcacaggagggcaggcaaccaacctcacctacagctgcactgttatacaggagcccctggccacaaggggctattgagactcaaaataaggcaaggtttcattaagatgtgttgtaagggcaaaatatgcaccaggttttaaagacttgctatcaagtaagagtactaat

SEQ ID NO: 95513 - DNA, 549 bp, Homo sapiens
gggtcgagcatgtgctaggtgttgcactagtaagtcaggaatagaaacagtaccttcatacagctcacagtccagagggaactacaaacaggcattggtaattcagtgggaaacaagttgtgacatttcttaagaaacacgtggggagatcatgggaaagatacaatcaggatttgggaagtcacggaaggttttctaggggaagctgagatctaaaaaatcacataggagatagccggatacaagaggagtggagaagagtgttccaggcagaggaaaaacctatgctaagacatgaggtgagaaagagcatgacccacctaaaggacagagagaagttctgtggctggaacacaacaagggaaaggagggacacgtttcacaggagggcaggcarccaacctcacctacagctgcactgttatacaggagcccctggccacaaggggctattgagactcaaaataaggcaaggtttcattaagatgtgttgtaagggcaaaatatgcaccaggttttaaagacttgctatcaagtaagagtactaat

SEQ ID NO: 95514 - DNA, 541 bp, Homo sapiens
cagattgcctcctctcttactatgtgatgaggaccaattttaacctttccaagactgactgcaattgtcaaatggagacgataatgcctacagcataggatggttttaagggtatatgtggccaggcagggtggctcacacctataatcccagcactttgggaggccaaggcgtgtggattgcttgagcccaggagttcgagatcactttgggcaacatagtgaaaccccatatctgcgaaaaggtaccaaaacatttgccaggcatggtggtgaatgcctgtaatcccagctactcaggaggctggggtgggaggatcacttcagcctgagaaggttgaggctgcagtgagccatgatcacaccactgtgctccagcctgggcatcagagtgagaccctatctcaagaagaataaaagggcaaatgaagccatgcatacaaggggygccatcccaaacacagagtcggcattcaataatatggttttgctccttctctttgtcttcttgagatattctaggtttccatatcctcatcaaa

SEQ ID NO: 95515 - DNA, 541 bp, Homo sapiens
cagattgcctcctctcttactatgtgatgaggaccaattttaacctttccaagactgactgcaattgtcaaatggagacgataatgcctacagcataggatggttttaagggtatatgtggccaggcagggtggctcacacctataatcccagcactttgggaggccaaggcgtgtggattgcttgagcccaggagttcgagatcactttgggcaacatagtgaaaccccatatctgcgaaaaggtaccaaaacatttgccaggcatggtggtgaatgcctgtaatcccagctactcaggaggctggggtgggaggatcacttcagcctgagaaggttgaggctgcagtgagccatgatcacaccactgtgctccagcctgggcatcagagtgagaccctatctcaagaagaataaaagggcaaatgaagccatgcatacaaggggtgccatcccaaacacagagtcggcaytcaataatatggttttgctccttctctttgtcttcttgagatattctaggtttccatatcctcatcaaa

SEQ ID NO: 95516 - DNA, 621 bp, Homo sapiens
tttatcataacccctcaaactctctgtcctctccatactctccagtctgagtccagtaagttcaaggaatgatagaagccaaaactagaggaaaattgtcccatagaacaaagagggtccctaaagtgggattgtctgcagccaacagcaatgtggaaagaaaagacatgtctgcctggtgaaggactttggacaaagttggcaagttgcccttggcctcagagtggaacaggagagcaatcaaatgtttttcrtgaccctaaatggggagcagcactagctgagggagatcaaagctggaaaagctgggcttcctgaagtgaaggacaacacagcagcctcaatcaatgatccaggccaggtgggacattctcagcaaatgacagccatgagatttgaggatgcaagacttgatacccctcctctataaagctgtaacctcagtagggatccaagaaattagacacagccctaagagaaacatgcagaaatgagcagaatagaccccaaatagatcaaaattctgtcccaccctctgccgtccctctcagaatggaaagtcaacagcaaaattaagtttggtggtgaaaaaataactttacattttcttcacatcaattt

SEQ ID NO: 95517 - DNA, 621 bp, Homo sapiens
tttatcataacccctcaaactctctgtcctctccatactctccagtctgagtccagtaagttcaaggaatgatagaagccaaaactagaggaaaattgtcccatagaacaaagagggtccctaaagtgggattgtctgcagccaacagcaatgtggaaagaaaagacatgtctgcctggtgaaggactttggacaaagttggcaagttgcccttggcctcagagtggaacaggagagcaatcaaatgtttttcgtgaccctaaatggggagcagcactagctgagggagatcaaagctggaaaagctgggcttccwgaagtgaaggacaacacagcagcctcaatcaatgatccaggccaggtgggacattctcagcaaatgacagccatgagatttgaggatgcaagacttgatacccctcctctataaagctgtaacctcagtagggatccaagaaattagacacagccctaagagaaacatgcagaaatgagcagaatagaccccaaatagatcaaaattctgtcccaccctctgccgtccctctcagaatggaaagtcaacagcaaaattaagtttggtggtgaaaaaataactttacattttcttcacatcaattt

SEQ ID NO: 95518 - DNA, 621 bp, Homo sapiens
tttatcataacccctcaaactctctgtcctctccatactctccagtctgagtccagtaagttcaaggaatgatagaagccaaaactagaggaaaattgtcccatagaacaaagagggtccctaaagtgggattgtctgcagccaacagcaatgtggaaagaaaagacatgtctgcctggtgaaggactttggacaaagttggcaagttgcccttggcctcagagtggaacaggagagcaatcaaatgtttttcgtgaccctaaatggggagcagcactagctgagggagatcaaagctggaaaagctgggcttcctgaagtgaaggacaacacagcagcctcaatcaatgatccaggccaggtgggacattctcagcaaatgacagccatgagatttgaggatgcaagacttgatacccctcctctataaagctgtaacctcagtagggatccaagaaattagacacagccctaagagaaacatgcagaaatgagcagaatagaccccaaatagatcaaaattctgtcccaccctctgccrtccctctcagaatggaaagtcaacagcaaaattaagtttggtggtgaaaaaataactttacattttcttcacatcaattt

SEQ ID NO: 95519 - DNA, 634 bp, Homo sapiens
ttgtagcatttaaagatcatgatacttatcacttagattgtacttaatgtgctcaaaacattttcagttctaattaaatattctcccacgtgtatctgtgtagagaaataaccatttacaggaggaagaaatacccagactcacaaataaaaaaatccatcaaaaaaaggcttgtgtccacaccacagggagagcccttatcagccaagaggctacaagatccctctaagaatcaggcctctggcccrgggaaggagggcatgggaaaagtccagaaacatgtttttggtagctggcccaggtggtggcatggcacagcagacaggatactggctttgacgtcagaaacttggggtagaatagaattgatatcacaggataaccatgtgatgtcgagaattcacctcaactcaaacctctggcctccttgagccctgacctccttatctgtaaaatgggtatgagaatacgtttaagaagaaaagaaaaaaaacctgagctcaataagataactgacttattgaagtcatatgccagtccatagtaaatctgggactcagacccggcagtccttactctgaaatgtagactttgaacaaaaatgtcaggtcacaaattgtcagaccagcacagt

SEQ ID NO: 95520 - DNA, 590 bp, Homo sapiens
ccattatcctaagtgaattaacaaagcagaaaaccaaatactgaatgttctcacttataagtggaagctaaactttgggcactcagggacataaagagagaaacaatagatactggggactacttggggcagggaggggagacaagggtgaaaaactaactattgagtattatgctcactacctggatgatgggatcagtcgtaccccaaacctccacaccaggcaacatacccaggtaacaaacctgcacgtgtgccacctgaatctaaaataaaagttgaaattatactatttaaaacagaaatggctgaatgaaataaatgataactaagttaaaaaaataaaatgactaaatttaaaaatgactaaatttttaaaatttaaaaaggatagagagaattaatcccagatcagcacccttacataccctgaagagatgtgagccagaaccactcactagcattgaaacagggrcagttacatcatcagacttttatgtataagctgcagatttttgtccctacctcagtggaatggtctttggggtcatattgtccaaatggactgacttgagcaccagattccattg

SEQ ID NO: 95521 - DNA, 579 bp, Homo sapiens
gtggatgagtcagaacactagaagaagatggtttcagcacagtttgttcaccatcaaacatatgtgttagagtcctgctctgttctggacaccatgttagcagaaggaatacaaagaagagaggtagcagggcatggtggctcacgcctataatcccagttctttggaaggctgaggcagacgaatcacctgaggtcaggagttcaagaccagcctagccaacaaggtgaagccccatctctttaaaaatataaaaattagctgggtgtggtggtgcacgcttatagtcccagctacttgggaggctgaggcaggagaatcatttgaacctgggaggcagaggttgcactgagyggagactgcaccactgcactccagcctgggcgacagagcaagactctgtcaaaaaaaaaaaaaaggtgactcaccctgcaatttatatagcttagtaggggataaaagcctgaaaaagaagttcaaaaggaaggttgggggtaagaatcttagccccatctctgccactaactgtgaaacttcagtaagccattcaccatctctggcctccagccttcccattta

SEQ ID NO: 95522 - DNA, 465 bp, Homo sapiens
ggtggctcacgcctataatcccagttctttggaaggctgaggcagacgaatcacctgaggtcaggagttcaagaccagcctagccaacaaggtgaagccccatctctttaaaaatataaaaattagctgggtgtggtggtgcacgcttatagtcccagctacttgggaggctgaggcaggagaatcatttgaacctgggaggcagaggttgcactgagcggagactgcaccactgcactccagcctgggcgacagagcaagactctgtcaaaaaaaaaaaaaaggtgactcaccctgcaattyatatagcttagtaggggataaaagcctgaaaaagaagttcaaaaggaaggttgggggtaagaatcttagccccatctctgccactaactgtgaaacttcagtaagccattcaccatctctggcctccagccttcccatttacaaaataagggcctaggttaa

SEQ ID NO: 95523 - DNA, 571 bp, Homo sapiens
ccatgtgtagattttcaaccttcagcttattacctcatgatcacaagatggctgctataaccccaggtgttacaacctaacattacaacctccgaggcaagaatagaayaggccctttctttctgcgtctctctctataaccagggcaggaaaatccctccagacacatcattccccttatgcctcattggtcagaacggtgtcacatgaatactgtgatgggttgacttgtgtcttcccaaaattaatatgttaaagtcctaatccctactacctcagagtgtgactttatgtggagatagggtctttacagaggcaataaagttaaaatgaggtcattagggcgggctgcaatccaatatggcgggtgtcctttctgaagagaaaaattggacacagacacgtggagagggaaaatgatgtgaagacacagggagatggcagccatctacaagctaaagagagaggcctggaagaaacccttccctcacagacctcagaaggaaccaaccatgccaacactttgctcttgaacatctaacctctagaactgtgagacaagaatgtcctt

SEQ ID NO: 95524 - DNA, 578 bp, Homo sapiens
gcatgcctggaatcccggctacttgggaggctgaggcaggagaatcgcttgaacccaggaggtggaggttgcagtaagccgagatcacagcactgcactccagcctgggaaacagagcgagactctgtcaaaatataaaataaaattaaaataaaataaaataatataataaaataagatataaaataaataaaataaaataaaataaaataaaaattccttgacccagtatagcmttgcttttcttttttaggctcaagcccgcagagtccaataaggtctgcccgcccctttctaacattctaattgccacatgcaatgtgggttccagcttctgctgcacagtctgagtgcttataaaggagaactttcacataatagtgtctgacccagggtgtccaatactgccttgttttatttagctcaggcattgggggctctttctatgggcaagatggtaagattttcattgaattgtcattgacttttgtcttatatttatgaccatgtcttcaacttctcctttaatttagaaaacaagacctgtgaaatacaccacagccagctcctcaatggac

SEQ ID NO: 95525 - DNA, 632 bp, Homo sapiens
ttttttaacagctgaagcagagatggttctcaaacactctgcccccaccatctccactacccccaccacccttaccacccccactaagaagtcaattatgtgaaaaataagtaaattatgggaaaaaaaagttacagatgaaacaaataatacaaaggtaaaatgttacccaaaagtagtagtttgttgaccccragtgttaataattaacagttaattactattaaatcatcattgcccagccttggctgggatgacaatttatgctcaggagtcaggtctcaatttgtgtttgtgattatctgctctgggacattctcagcaaactcgatacctgtctcctgcttggtggatttgagtcacaatgtttttgttaagatttcagctgcagttccttctaggtctttgtttcatgtatgtaatatacttaaaatgcactaaatgacagtttataatatcattatctacagttaaagatattataacttcaaaaatgaaaagaaagtgtagccatatgtggaaatggtctattttgtgcccttttaaccctcttctctcacagtttcaatagtttcgacgggaccagacaggcaacagcgcaaaaatcataggtctgcaaaatcattttgctc

SEQ ID NO: 95526 - DNA, 603 bp, Homo sapiens
tgaatgggcctagaagatgaaatagcccatttcagttgctttaaaataaacaacttattttggcaatgacttgtggcacattaattgctatcagtgagggggaaagtatgtctcagagcttttctggctcatttttaagagacgcttaggagcttggctctacagggaaactctgagtgaggattcctgtggtcagctagggagtaaaggtgggtgcagggggcttcttagggctctccaaatactccttagccacccctgacctcctggtagggggcagagggtaagaatcattacccagctgggtgcagtgtctcatgactgtaatcccagcactttgggargccaaggtggtatcacaagatcaggagttcaagaccagcctggccaacatggtgaaaccccatctctattaaaaatacaaaaaaaaaaaaaaattagccatgcatggtggcacatgcctgtaatcccagctactcaggaggctgaggcaggagaattgcttgaaacccaggaggcggaggttgcagtgagctgagattgcaccgttgcaccccagcctgggcgacagagcgagactctgtctaaaaaaaaaaaaaaaga

SEQ ID NO: 95527 - DNA, 603 bp, Homo sapiens
tgaatgggcctagaagatgaaatagcccatttcagttgctttaaaataaacaacttattttggcaatgacttgtggcacattaattgctatcagtgagggggaaagtatgtctcagagcttttctggctcatttttaagagacgcttaggagcttggctctacagggaaactctgagtgaggattcctgtggtcagctagggagtaaaggtgggtgcagggggcttcttagggctctccaaatactccttagccacccctgacctcctggtagggggcagagggtaagaatcattacccagctgggtgcagtgtctcatgactgtaatcccagcactttgggaagccaaggtggtatcacaagatcaggagttcaagaccagcctggccaacatggtgaaaccccatctctattaaaaatacaaaaaaaaaaaaaaattagccatgcatggtggcacatgcctgtaatcccagctactcaggaggctgaggcaggagaattgcttgaaacccaggaggcggaggttgcagtgagctgagattgcrccgttgcaccccagcctgggcgacagagcgagactctgtctaaaaaaaaaaaaaaaga

SEQ ID NO: 95528 - DNA, 598 bp, Homo sapiens
gacctcatttaattatctccctaacggtcctatatctggtcatattggaggtgagggcttcaacatacatatcttgaggtggacacagttcagtccatgtcagcttgcctgtccctggagtgctgggcattaagcacttagttgctgatatgggcacmtctggagatccgaggaagggtagggtgcccaggcagtgggcatgggcactgagaggccaacatatttaccaactggcatggaaatattttagcttctaacaacttggtaaggcttcacttgtacagaccccacaaattccagccctgtgtgggccgcatggaacagcatgtggcaagttgtgccaagccaccaggaacaagatgtcatagagccaaaaatcaactggggtggtggtgatggtgttgggagtggcctttaaaatgcagattaaatatttgcttttaaaagtattaagactcagtgcgtggtccatggttgccttttaagagagtaacttggtatttttttttctccttggactaaatatctgtcttgatgagtgtaagggagtcaccgcattgaacatcaaaatcctcattactaacaagaaggaagcatt

SEQ ID NO: 95529 - DNA, 529 bp, Homo sapiens
aaatgagggttgtattagtcactttgggattccataacaaaaattgtagactagatgtctcaaacaacataaatttactttcttacaattctggaggatagaagttctggatcaagggttgccagggctggtttctggtaagggctctctttctggcttacagatagccactttcctggtgtatcctcacatagtgaagggaccatgacttggtgtttcttccttttcttttaggggcaccagccctatcagattagggctcacacccttatgacctaaygtaatctttgtcaccttacaggccctatcttcaagtacagttacgttgaggattatggcttcgacatatgaattttggggagacacaaacattcattctataacaatgtaaacaaaaacagagaaagataaggaatctaggaaaccagagagagaggcaaagggaagcccaggaacacatctttgtagcagggctgcagagcatgcagcctggcctagaccgcaaggatggagtcttcaggagggcaat

SEQ ID NO: 95530 - DNA, 517 bp, Homo sapiens
tataaaagtcattatctcactgagatatggctccttctgagaggttcatttgatgtgcccagctcttccctaaggtgaacttggctgactttggccctctgtatcatggacagagactggtggtctcattcactgaataaataaatgaatagatggatagatggatggttccagtgaagcaaagcaagatcttgtcccttgatgacccatttctggtatttctggaggcttcagggtgtgccgtgacctctttgggcccagtaraaaatgtggctcacattcttcttcaggactagagaggtgggtatcttggagtggtgggtatttctgacagagaaaaaaactttgccaacacatagcagaaaaaaggaaacatgtttcatatgacttgaacaataaaaattaccatttgtacagtctgcaaaatgttaagaatatggaatgtatcctgctcccaaccccatctgcaacatgagattcctggatagcagcccaagctgttccttcatcagggctc

SEQ ID NO: 95531 - DNA, 614 bp, Homo sapiens
tgactgctaatgtagatccagttgttacagactaagataatatttggcctcttgtacttcccctacacctagagcaaagttgcccatttacagtcctgggttccaaatggcacaaaatggatgtggatagaataaaagtgtcaatgaagggcagaacattagtgccccctatatattttaaagccacattttatgatttaatttgtctgaagataatggaaaggtgattaataatttgggagaaaaactagattctgtagaatatttggagtcaagatttatcatacaaagtttaaggttagtcagaactcaagataaaatatgaagcccttatgtgatctctgatgtctccacttttaacatgtatgcatattaattagtttgtccttcatttaaataaaatttagatatccagagttatttaccttgggtggttttttttcccccaaaaaatgacccagcttagaaagaaatcatagatgacacaaacaagtggaaatacatcccatgttcatggatgggaagacttaatattgtgaaaatgmccatactgccaaaagcaatctacaaattcaatgcaatccccatcaaaataccaccatcattcttcatag

SEQ ID NO: 95532 - DNA, 607 bp, Homo sapiens
cagcacacctcttggtttatttgtattcatttcatcagtttcaaggaaaatatgttgggagttcctggcatagagatgtcacaaagacatgttttcaatagtagtgctatccckagggcagagatgacccagagaaagcccaagtggctgctggaacaaagtcagacatcgtgccacctgtccacactccttggctctgccatcatgctgaagatcgctttaaaggactggcttccctccccccaaaatgaaaagagcacaaactgagaaactgaatgtgggagacagcagtggattatgctgttctcagggctcacctcaggtttggaagcattctttcaaattaacccatctcaggccatctgcagagaggaaaggtggtacctaactttttttcttgtcagcatttggtaggggtgttttattgaccaaatatgttcccacaacctagttttttgtgagtaactaaatatagtagagttttaaattttatcatcaaaatctatagacaatttttgatgaaaatagactccatctctatgtcctgcttttcttcttcttattaattacattgctgtataaaagaacaagacttcagaatcaagaa

SEQ ID NO: 95533 - DNA, 607 bp, Homo sapiens
cagcacacctcttggtttatttgtattcatttcatcagtttcaaggaaaatatgttgggagttcctggcatagagatgtcacaaagacatgttttcaatagtagtgctatccctagggcagagatgacccagagaaagcccaagtggctgctggaacaaagtcagacatcgtgccacctgtccacactccttggctctgccatcatgctgaagatcgctttaaaggactggcttccctccccccaaaatkaaaagagcacaaactgagaaactgaatgtgggagacagcagtggattatgctgttctcagggctcacctcaggtttggaagcattctttcaaattaacccatctcaggccatctgcagagaggaaaggtggtacctaactttttttcttgtcagcatttggtaggggtgttttattgaccaaatatgttcccacaacctagttttttgtgagtaactaaatatagtagagttttaaattttatcatcaaaatctatagacaatttttgatgaaaatagactccatctctatgtcctgcttttcttcttcttattaattacattgctgtataaaagaacaagacttcagaatcaagaa

SEQ ID NO: 95534 - DNA, 607 bp, Homo sapiens
cagcacacctcttggtttatttgtattcatttcatcagtttcaaggaaaatatgttgggagttcctggcatagagatgtcacaaagacatgttttcaatagtagtgctatccctagggcagagatgacccagagaaagcccaagtggctgctggaacaaagtcagacatcgtgccacctgtccacactccttggctctgccatcatgctgaagatcgctttaaaggactggcttccctccccccaaaatgaaaagagcacaaactgagaaactgaatgtgggagacagcagtggattatgctgttctcagggctcacctcaggtttggaagcattctttcaaattaacccatctcaggccatctgcagagaggaaaggtggtacctaactttttttcttgtcrgcatttggtaggggtgttttattgaccaaatatgttcccacaacctagttttttgtgagtaactaaatatagtagagttttaaattttatcatcaaaatctatagacaatttttgatgaaaatagactccatctctatgtcctgcttttcttcttcttattaattacattgctgtataaaagaacaagacttcagaatcaagaa

SEQ ID NO: 95535 - DNA, 607 bp, Homo sapiens
cagcacacctcttggtttatttgtattcatttcatcagtttcaaggaaaatatgttgggagttcctggcatagagatgtcacaaagacatgttttcaatagtagtgctatccctagggcagagatgacccagagaaagcccaagtggctgctggaacaaagtcagacatcgtgccacctgtccacactccttggctctgccatcatgctgaagatcgctttaaaggactggcttccctccccccaaaatgaaaagagcacaaactgagaaactgaatgtgggagacagcagtggattatgctgttctcagggctcacctcaggtttggaagcattctttcaaattaacccatctcaggccatctgcagagaggaaaggtggtacctaactttttttcttgtcagcatttggtaggggtgttttattgaccaaatatgttcccacaacctagttttttgtgastaactaaatatagtagagttttaaattttatcatcaaaatctatagacaatttttgatgaaaatagactccatctctatgtcctgcttttcttcttcttattaattacattgctgtataaaagaacaagacttcagaatcaagaa

SEQ ID NO: 95536 - DNA, 594 bp, Homo sapiens
ttgaagctcccaataattggtgccttgggtttggtctgcacagggtctgagttctggggccagctgcgaatggtctgtccctcctggacctgcctttttgtcctcagttgtgtctttgatacccattaacttccccacacaacacaagtagctaccaggcctcacctccaacattggagatgacatcttgacatgagatttggtggagagacagagccaatccatatcagagggcaagagtgaagctctgagattggtttcactcagtggttcactcaggaggtcaaaagccacagctagcctagggtggaagtaaggaagatggggataagaaacagatttgagctaagtttttaatgtaaaatggatatgactgctgagggattggactctggggatgaaagaraaggaggaatcaaagacggttctgatgtgagacagaagcaacaggaaggagagtggaactagtgcctgagatgttgaagattcaggtagatacaggtttgactcctacctgtacaaattgggcctcagctggttccagcaccatggtcaatgaggccaggcttattcatccccaaggaccaaagaagg

SEQ ID NO: 95537 - DNA, 594 bp, Homo sapiens
ttgaagctcccaataattggtgccttgggtttggtctgcacagggtctgagttctggggccagctgcgaatggtctgtccctcctggacctgcctttttgtcctcagttgtgtctttgatacccattaacttccccacacaacacaagtagctaccaggcctcacctccaacattggagatgacatcttgacatgagatttggtggagagacagagccaatccatatcagagggcaagagtgaagctctgagattggtttcactcagtggttcactcaggaggtcaaaagccacagctagcctagggtggaagtaaggaagatggggataagaaacagatttgagctaagtttttaatgtaaaatggatatgactgctgagggattggactctggggatgaaagagaaggaggaatcaaagacggttctgatktgagacagaagcaacaggaaggagagtggaactagtgcctgagatgttgaagattcaggtagatacaggtttgactcctacctgtacaaattgggcctcagctggttccagcaccatggtcaatgaggccaggcttattcatccccaaggaccaaagaagg

SEQ ID NO: 95538 - DNA, 594 bp, Homo sapiens
ttgaagctcccaataattggtgccttgggtttggtctgcacagggtctgagttctggggccagctgcgaatggtctgtccctcctggacctgcctttttgtcctcagttgtgtctttgatacccattaacttccccacacaacacaagtagctaccaggcctcacctccaacattggagatgacatcttgacatgagatttggtggagagacagagccaatccatatcagagggcaagagtgaagctctgagattggtttcactcagtggttcactcaggaggtcaaaagccacagctagcctagggtggaagtaaggaagatggggataagaaacagatttgagctaagtttttaatgtaaaatggatatgactgctgagggattggactctggggatgaaagagaaggaggaatcaaagacggttctgatgtgagacwgaagcaacaggaaggagagtggaactagtgcctgagatgttgaagattcaggtagatacaggtttgactcctacctgtacaaattgggcctcagctggttccagcaccatggtcaatgaggccaggcttattcatccccaaggaccaaagaagg

SEQ ID NO: 95539 - DNA, 594 bp, Homo sapiens
ttgaagctcccaataattggtgccttgggtttggtctgcacagggtctgagttctggggccagctgcgaatggtctgtccctcctggacctgcctttttgtcctcagttgtgtctttgatacccattaacttccccacacaacacaagtagctaccaggcctcacctccaacattggagatgacatcttgacatgagatttggtggagagacagagccaatccatatcagagggcaagagtgaagctctgagattggtttcactcagtggttcactcaggaggtcaaaagccacagctagcctagggtggaagtaaggaagatggggataagaaacagatttgagctaagtttttaatgtaaaatggatatgactgctgagggattggactctggggatgaaagagaaggaggaatcaaagacggttctgatgtgagacakaagcaacaggaaggagagtggaactagtgcctgagatgttgaagattcaggtagatacaggtttgactcctacctgtacaaattgggcctcagctggttccagcaccatggtcaatgaggccaggcttattcatccccaaggaccaaagaagg

SEQ ID NO: 95540 - DNA, 585 bp, Homo sapiens
aatttttagcttccacaaataagtgagaacatgcaaagtttgtctttctgtgcttggcttatttcacttaacataatgacctccaatttcatccatgttgttacaaatgacaggctctcattcctttcatggctgcatagtactccattgtgtatatgtaccacattttctttatccattcatctgttcatgggcatttaggttgtttccaactcttagctcttgtgaacagtgctggaacgaacatgggagtacagatacctcttcaatatattgattttctttcttttgggaatatgcccagcagtgggattgctggattgtatgttggctctwtttgttttttttgaggaaactccaaactgttttccatagtggttgtaataatttacatttccaccaacagtgtacgaggtcagagggcccagtttttagttacagtcccagatatagtacttttcagatcactagaccagctcattttcgctcctctaaacttacaaaaaataattttcaagaccagccagtgctgaggattgatgatttccctctcagcttgaaaactaaaatgaggggctgggcatg

SEQ ID NO: 95541 - DNA, 642 bp, Homo sapiens
aatgatatgcagattttctaaagacttttttttcatacagcagtttctcatgagaaattctttgccaatttgtacttcatagctcataggagagatcttaatttcccccttatttcactaacaccagcagaaaatgtcatgcccttgttttgatttgtatttcttttgttactattgaggttgagccctttttcttmtatttatttccctcccatgtcttatatttttcttttttaaatgcctatttatagctttcatcctttttggactgcttatgtttttcttattgatctgtagtagcttgttatatgttaactgttggaatttcatatgtgttagagatattgtccccagcttgtcatttgcctcctggttatgtttgctgatccagtgcagaaccccatggggtgcagagtaggaggacatgagagagccaaggctggagagttaggcacaggctaggtcacctaagggctagctgctcatgcaaaggagcaaggaggtgctattgacgagggtaggactttaaaatatctagggagtgaagtcttcaggttttgctgactggataagggatgtgggatccaagaaggtgatgcaggcaacaccaactctggcgttggccttgaggtggacagtagt

SEQ ID NO: 95542 - DNA, 587 bp, Homo sapiens
tcttttcaacaaaattttctgtttagttctattttgacaaaattgtcaaaattatttggaaataatatgctgtggtttatgttgactgaatttttaaataaaccgattttatccgccttttaaggagaaatttatggatttcgaaatggtggccattctctactcacatttttgtttctggtccacagtattaattcttaagatratacacattcatgtgtgaccctgctatagaaggctgaattcatcatggaattaggatttttaattccaatgtcatgtgcttataaactatttctttccttttcatcttttgctttcaaggaccacttagtaacagtttctaaagaaagaaactgatttttttttcacatcttgcttaagatgttctcaattgatgtgttattagcaactcagtgattcttgacttttgagaagtcacagtttgttttttttttcattgtttgtttttttgagattctgagagagttgagtctccttttcccggaaaaatgcactcctacctttgcctacaacaggggattctctgcctggggtgcaggtcagtggacaccaggtcaagaaat

SEQ ID NO: 95543 - DNA, 552 bp, Homo sapiens
ctactgagagtgaaaaacaacgagggatgtgtgatacaagctgagttaaatgttaagattgcatgtgccagggtacccacgtagtacccacagcagaggagggcagtgctgctcaaaggaaccagatgggctgaacatctttcaaccaaacaccaacattttttttacatagttgaaatcatggtacacatgttatacatgaaattttgtrttctgctttttctccctatagcacatcattaaacattttcttgttatactacataagcttcaaaaatacttctagtggttgaaaacatttcatcatgttctctactgttggacctatgtttccaatttaaccttataagtaatgctatgtggaacatcttcatgcacatgtgctttctgatctcttgtttctgaaggataaacaaccagtaatgagattactggaccagacagtaacaacattttgtttttctaaaggaaatagaaggcaggaagtagaaaaatcaagaagaaaaactattataaatagaaaacttcaaaagatgaaagacaaaaattcaa

SEQ ID NO: 95544 - DNA, 552 bp, Homo sapiens
ctactgagagtgaaaaacaacgagggatgtgtgatacaagctgagttaaatgttaagattgcatgtgccagggtacccacgtagtacccacagcagaggagggcagtgctgctcaaaggaaccagatgggctgaacatctttcaaccaaacaccaacattttttttacatagttgaaatcatggtacacatgttatacatgaaattttgtattctgctttttctccctatagcacatcattaaacattttcttgttatactacataagcttcaaaaatacttctagtggttgaaaacatttcatcatgttctctactgttggacctatgtttccaatttaaccttataagtaatgctaygtggaacatcttcatgcacatgtgctttctgatctcttgtttctgaaggataaacaaccagtaatgagattactggaccagacagtaacaacattttgtttttctaaaggaaatagaaggcaggaagtagaaaaatcaagaagaaaaactattataaatagaaaacttcaaaagatgaaagacaaaaattcaa

SEQ ID NO: 95545 - DNA, 512 bp, Homo sapiens
gaattcctacctgctagtggagataagtgagcataaagctttggccctgaggctttgagctgtcctgcttttaagaaacaagagatatttccacagtctgtcttgtagtagtagtagctgaacagcccgtgagagttccagaaatgaactgtgctccaaatgcttatcacatgctgtgttgatgtcggtaaaatgcagaggatgagctgggctcccctttaaccctaactttctatggtgatttcattttgacactaatttcaggcataaaccttggcccttagctacagtgtgtaactgttggcatctcactgccacctgggtgcacaatgagartagcaaatggagaacaatatttagcctctgtgatttgccataagaacgcacaacatgcagttggaaagggaaatatttaatcagccacttttctcaatgcagtcgccatcagttgagttggttgaagattttttttcctccatattaacggcttgttttgtcactgtgaagataga

SEQ ID NO: 95546 - DNA, 594 bp, Homo sapiens
aactcaaatgactggggagaggatacagacagataacataaaggagtggaacaggccagaaaccaagtgtgaaaaaaataagatgggtggagactgtagtggacaaggacagggccttagcaataattactgagccaaagaaaatatatctctgagtgacaggcagctagagggtacaggtctacagctcttatagctatctgagcagaaattgcttctgaactcctcccacaaacacagtggcccgtttattcatcaggtacccatccttcccttatgctaagtcatctatatccactacaaacacctaaggcacttcgatttcaaccagtttggaaaagcaagtaactttgaccccagtttaggtgggagayagaaactaagtgttaagttataaaaaggaactctttccttcgagatcccagactggccaagatttatggaatgaactcttctatagcagccatgtctcccagggagaggattgcaagataaaatataagacaccgtgttacatctgaatttatgtgctgtagataaacaacacataatttgttagtataagtatgtcccaaatattgcatgggttatact

SEQ ID NO: 95547 - DNA, 594 bp, Homo sapiens
aactcaaatgactggggagaggatacagacagataacataaaggagtggaacaggccagaaaccaagtgtgaaaaaaataagatgggtggagactgtagtggacaaggacagggccttagcaataattactgagccaaagaaaatatatctctgagtgacaggcagctagagggtacaggtctacagctcttatagctatctgagcagaaattgcttctgaactcctcccacaaacacagtggcccgtttattcatcaggtacccatccttcccttatgctaagtcatctatatccactacaaacacctaaggcacttcgatttcaaccagtttggaaaagcaagtaactttgaccccagtttaggtgggagatagaaactaagtgttaagttataaaaaggaactctttccttcgagatcccagactggccaagatttatggaatgaacycttctatagcagccatgtctcccagggagaggattgcaagataaaatataagacaccgtgttacatctgaatttatgtgctgtagataaacaacacataatttgttagtataagtatgtcccaaatattgcatgggttatact

SEQ ID NO: 95548 - DNA, 594 bp, Homo sapiens
aactcaaatgactggggagaggatacagacagataacataaaggagtggaacaggccagaaaccaagtgtgaaaaaaataagatgggtggagactgtagtggacaaggacagggccttagcaataattactgagccaaagaaaatatatctctgagtgacaggcagctagagggtacaggtctacagctcttatagctatctgagcagaaattgcttctgaactcctcccacaaacacagtggcccgtttattcatcaggtacccatccttcccttatgctaagtcatctatatccactacaaacacctaaggcacttcgatttcaaccagtttggaaaagcaagtaactttgaccccagtttaggtgggagatagaaactaagtgttaagttataaaaaggaactctttccttcgagatcccagactggccaagatttatggaatgaactcttcyatagcagccatgtctcccagggagaggattgcaagataaaatataagacaccgtgttacatctgaatttatgtgctgtagataaacaacacataatttgttagtataagtatgtcccaaatattgcatgggttatact

SEQ ID NO: 95549 - DNA, 591 bp, Homo sapiens
tcgcaagactgtaacattaacactactcaraaaacttgctacaactaacttctgctgttttgttttatctttctgggttcctagtaatgtagattttataatggatatctggagctctggcccagacttctgttatgcctatagaaagatcatggacccctgctgaaaacaatgagaaaacgacaaactccgaatctgacctctgtactaatgtcatgttattttccacatgaaggcattgcatttaaataaggtaccaatggtatactgtagccatttgccttagattacaattgtagtctttttgtgtgtgtgacaagttatctaggactatatgagtcagtgttctggcagaaaaaaacagttcaactccagaggtttgagtgaagcaaatgtaagaggggctattgtgaaaggtgtgagtagggtgaagggagatggtgaggcaaccagagattagcaagagcagaaaaccattatcacctgcagagctgaaaggtaggggaatggtgttcccagagcccactgagaactagaggcctggagagagtggcctgagaagatgctgccttgtcagagcttagcagtgaa

SEQ ID NO: 95550 - DNA, 464 bp, Homo sapiens
attagtgaatgagaaatgtcaacaaatttctggatgacaggaagcagatggaaggttctaggcagataaatagcacagaatttctaaaagaggggctatgattaggtgggagctttaccagtagcaaagtgtggagcaaccacaagcttggagttagtagaaaatagagaaacctggagcagatagcagttctgtgtgtgaaaactaaggtctgcatatgaccttagttacttggcttagttaccctgtgtcccrtctgttcacagagggcaatcagcccagcaacataacgtggaggttaaaagaatggactgtggagcaagttatcttggttcaaagtctgcttctgccatttactaactctgtaactttgggcagattatttaacctctctgtgcctccatttccctgtgcatgaaagcgggataataatagtacctaactcataagatttttgtaagtag

SEQ ID NO: 95551 - DNA, 605 bp, Homo sapiens
ggaacagattgggaaaggtagccaggtgccatggtactttgagttttcagatgcaaatataaattttgagcaagaaattaggacagaatggcaaccagttttaggaaaataatatatgtaaaaactcacctcgaaacaggtaatcaaaacttgcacatagtacagtattggcaagagaggactggtacatcctgataagccaagagtttggagtcactttttattatattcataatcaytatgttcctaatatctatggattcactctcctccctttttttttctttctccttttttctttttaccatcttctgtcttttccagatgtttcatttgagctgctctgctccccactggtggctgagccaggcctgaccagggcaggaagggtgatcagtagcctcacacacagcagctggtagagtctgaaggtcacgcttggccttccaccaagtgtccaatgtgctggggattagcctctgaatcacagcctttcccttctcctgccatgttggcccagccatacaagaggctctctctgcccagcacacaagtcccttgctgtgactggcattctgctgtgaaaaccagattacttattagac

SEQ ID NO: 95552 - DNA, 605 bp, Homo sapiens
ggaacagattgggaaaggtagccaggtgccatggtactttgagttttcagatgcaaatataaattttgagcaagaaattaggacagaatggcaaccagttttaggaaaataatatatgtaaaaactcacctcgaaacaggtaatcaaaacttgcacatagtacagtattggcaagagaggactggtacatcctgataagccaagagtttggagtcactttttattatattcataatcactatgttcctaatatctatggattcactctcctccctttttttttctttctccttttttctttttaccatcttctgtcttttcyagatgtttcatttgagctgctctgctccccactggtggctgagccaggcctgaccagggcaggaagggtgatcagtagcctcacacacagcagctggtagagtctgaaggtcacgcttggccttccaccaagtgtccaatgtgctggggattagcctctgaatcacagcctttcccttctcctgccatgttggcccagccatacaagaggctctctctgcccagcacacaagtcccttgctgtgactggcattctgctgtgaaaaccagattacttattagac

SEQ ID NO: 95553 - DNA, 610 bp, Homo sapiens
atagatagaagtttaatgtaatgtcagatgatgatgattgctgtgaattaaaataaagcacggccagtagagacagagtgatgggggctgctgtcttagattagtggttacagatgacctctcaagggacatgattgttgataaatgrcctatgtaaattgaggtagagagacatgacatatctgagtatatataaagatttgggtgaaataactaaaagagaggcatgtggaattttcttaattaaaaaaataaaacatctccatgtaaagatcaagagtaagcctgtattcagatatcagataacttgtgaaacattaaaatatctcacgaaaaggttcttaattctaattttctttcatcaccttaaaaatggctatagttattctccaccttagctactgtaatagaaataaggtcaatacactcagtgtgtacagactgaaattaatcatgtgtaatgcacagtccattttgagagatgagagagcagcagccagttgactattctgcctaattcggtaggttacctgagccacagtgagaacgcatgggtgtttgatgaactggaatagatttatcatgctggacactttcctgtttgaaacat

SEQ ID NO: 95554 - DNA, 489 bp, Homo sapiens
cacactcacactttgcaatgacttccctgttttcacttttcaacattaattaaaggctttcttatatgagatatgtcttagcatcaccctagtttccaaataagaatgtttcaaggaaaaatttccaaaagattcaggccattcctccactttaagttcaataattcaaygataaaagtaaaatgaagaaataaaaactcataacagtgccctccttgtattactcgagggattatttgccattgtctacttagaaggagacaccagtcacggcaaatgtctaaaatatgtcttgtctaaatccatcatggaggaagaaaggatttctcattttactaattagaaacgggtcagatggagccatgaattaagctcacatcatgacactactatgtaggatgcaaacgtctgcaaaggccattgcccttcaggtacgtgtagaaaagaatgggctagcattttccttaaaagagcagtgctcaaagtgtg

SEQ ID NO: 95555 - DNA, 601 bp, Homo sapiens
ctttcttaaataaagtctttcttattgtctttaacaagtgtcttgaataatctttctttaactcaagatgacacattttatactttctctttaaacttccacatcctctctcctccccttgctcttagctgatcactgtggctcacacttcatttagaaaatgaaagcccgttgtcagtcaagaactcactctcctcttacaccaaatctacacacctagttggctctttattcatcttctctcctagtaacagtgggagaaatgtctcttctcctagcaaaactcaatcctcccacttgtgctctaaatcccttcctttcttgccttgtcaaagagttcagtgctttcctcattttctctttccttagtcctttattgatggattaatctcgttgttaacacattccagaatcttcaatattgacaaaaattaagaaaaccacccttgagccagtcacctctccaatagcttttagactmtctgcttccttttattactaaacttctcaacgatttgtccaaacgtgagagctctactttcttacttcccaatcatccctcaatcccttatgatgtagtttgtacctctagcatttcata

SEQ ID NO: 95556 - DNA, 570 bp, Homo sapiens
agttaagtccttggcaatgcaaggcgttatttttgtcacaaatacagtacactttcctgagtccaaatatgataggaaattcaggaaggtagggcaggaagaaaaggaatcaaaaatctgttctactgcagagagtaaagaaggcttccaaggatgtctgagccaagcctccaccttcaagtcctctcctccctgcctccatatgggatggtgctttaggctctttcaactggaccatgaacatgtcccttcgaatctaatgctgaatggaaggtttctctctgctaaagttctggcattagggtcactcatctccctttcccagataaaaggaaaaaaaaaaaaayagttctgggactggagtggcttccccattcttctcacagagtcaagggtcctgatgagggctctccagggtacagaggcaaaggtggtgctccatgcctaacttagtcccttaatcctcactttaagccaaatttaaaagtcttcaaagtggatctctgatcagaaggaaaatgtttaattgaaaaagctgcttttcaggcacagttagttgatgcatgccca

SEQ ID NO: 95557 - DNA, 555 bp, Homo sapiens
ggacatacacacacaaaatgattaatatcatcagactcaaactgctgaataccaaagataaagagaaaatcttgataacaacaaaagaaaagaacacaaaacacacggctaaacaatgattcaaaatatcacgaacttctcacttgaaactgacagagacgtcggtaaaacactgaaagtgctggaacagaaagctatcaaccaagaattccacatgcagagaaaataaacttcaagaatgaaggcaatataatggcattttcagaggaaaggaaataattgccagcctggaagtctataccagtgaaaatatccctaaagaaagagtgaaataaaggtgttttaagacaaagaaacgttgaaataaygtattgccagtagatctgtaccaaaggaaattctaaagagggttcttggagaagatgaaaaggatctcaaatggagcttagaaatgcagaaagaattaagagccacagaaaaggtatgtgggtaaacataaatgaatatataatgtaaaaactgtaataatcatgtcatggcagttaaaatatacac

SEQ ID NO: 95558 - DNA, 580 bp, Homo sapiens
ataacttttagacaatagctgctctactgcagcaaaacactatggaaaaaattgtagccccaatcccataccagcagaggctgaatggaaagccttgacttcatcctcaataggctgtaatgagatgtcccaacctttctgcttgggattgtgtcagagaaggacaagtaaaggtgacayttgtccctccccaccaggcagtaacaaggtctcttccacagtgtcaatggagaccgtgttagggagcctagactttcacctccaccagcaacaatgagatgcctctactttcccctgaccaaggttgtgtcaaaggaggcttaatggagagtcaagacttcacccttcaccgccacccattggtattgaggctacaacacatctcccatcccatggcattagtagaggctacatgggaagcattaatgaggcactcttaccactctcaaacagggagtataagatcaagagtgtcctaacataataacaatatgtccaggcttcaataaaaaaaaccacttgtcataccaggaagatctcaaactgaatgaaaaatagcaatcaatagacaccaacacca

SEQ ID NO: 95559 - DNA, 603 bp, Homo sapiens
cacatctcccatcccatggcattagtagaggctacatgggaagcattaatgaggcactcttaccactctcaaacagggagtataagatcaagagtgtcctaacataataacaatatgtccaggcttcaataaaaaaaaccacttgtcataccaggaagatctcaaactgaatgaaaaatagcaatcaatagacaccaacaccaagataaatacagatgttagaattatctggcagggattttaaagcagccataataaaaatgtttcagtaagtaataacaaacacacttgaaacaaatttttaaaatctcatcaaagatatagaaaatataaaggagaaccaaatggaaattgtacaattgtaacataatgtacctgaaataaaaatctcaatagatgggctyaacagcagaatggaaggaacaaagggaagaattagtgatgaatttggaaaacagagcaataaaaattatccaatctgaacaacaggtagaaaataggctgaggggaaagaaacctctacagagcctcagagatctatggagctgtaacaaatgttttaacactacatcatcagagtttcaagagaacaagagaaagagg

SEQ ID NO: 95560 - DNA, 358 bp, Homo sapiens
aaactgaatgaaaaatagcaatcaatagacaccaacaccaagataaatacagatgttagaattatctggcagggattttaaagcagccataataaaaatgtttcagtaagtaataacaaacacacttgaaacaaatttttaaaatctcatcaaagatatagaaaatataaaggagaaccaaatggaaattgtacaattgtaacataatgtacctgaaataaaaatctcaatagatgggctcaacagcagaatggaaggaacaaagggaagaattagtgatgaatttggaaaayagagcaataaaaattatccaatctgaacaacaggtagaaaataggctgaggggaaagaaacctct

SEQ ID NO: 95561 - DNA, 582 bp, Homo sapiens
catacagattggaaaggaaaatatgactgtcctttttcacagacaacatgatttctatgtagaaaattccaacaaatctaaagagaattcctggaactaataaatgagttcagcaaggtcataggatatacgataaattgagaactcaattgtgtttatgctatcaattaacatgtggacactgaaatttaaaatatcccatttatatataccatttaaaaatataccatttaaaatatagcattatattgctcagaagaattaaatacttccaggtaaatctaagcaaaacatgtataggacttgtaagctgaaaattatgaaacrtcaatgaaaaaaataaaatttaaataaatggaaagaccgtgttcatagattgaaagacaacatagtaaaatgtcagttctctacagattgttatataggtttaacacaattcctgtcaaaatcccaggaagatttttttttttttagatatagacaaaagtgttctacagtttatatggaaagataagaaactggtatagctaaaacgattttgaaaaagaagactaaagtagaaggaatcaaactaccctattt

SEQ ID NO: 95562 - DNA, 582 bp, Homo sapiens
catacagattggaaaggaaaatatgactgtcctttttcacagacaacatgatttctatgtagaaaattccaacaaatctaaagagaattcctggaactaataaatgagttcagcaaggtcataggatatacgataaattgagaactcaattgtgtttatgctatcaattaacatgtggacactgaaatttaaaatatcccatttatatataccatttaaaaatataccatttaaaatatagcattatattgctcagaagaattaaatacttccaggtaaatctaagcaaaacatgtataggacttgtaagctgaaaattatgaaacgtcaatgaaaaaaataaaatttaaataaatggaaagaccgtgttcatagattgaaagacarcatagtaaaatgtcagttctctacagattgttatataggtttaacacaattcctgtcaaaatcccaggaagatttttttttttttagatatagacaaaagtgttctacagtttatatggaaagataagaaactggtatagctaaaacgattttgaaaaagaagactaaagtagaaggaatcaaactaccctattt

SEQ ID NO: 95563 - DNA, 517 bp, Homo sapiens
tgaacatttggttcagtctaggaaatgcctcttttgagcacaactctggatacttttactttatttttccacctgctacctggggcacttcacccctggtacttacatgaagggaatgataaagttgaaagaactggatctgtcccacccacattcacacatcataaaagcaaaacaaaggaaaattgacctaaaccctaattctccatccagctaccccctctctttagtaccctctacagccaaacctcttgaaagacttttgtgctcactgacccgatttcctcacaatccactcactctttatascagtccagtctgtcctcaggcctcacagtgaattcactgaattcactaatgaacgacaagctgctcagcccaacagtcacttctcagtcctctcctcacctaacttctcagcttcgttcaacacttcgtctagtccctcctacttgaaatacttccattggcttccatgaaccacccaccccagaagctttcctacttagaaaacctg

SEQ ID NO: 95564 - DNA, 458 bp, Homo sapiens
cttctattttttatgttcaaaaccaataaatagctccatgatcaagtttggcataaaatcaacagaggctcttgccttcaaggctcctcatgcacttgaataggagagatattgtggctaccmtgttggactggagacaagacagtcttttttactttatctgagaaccatgttagtctccagaattttagagaagcagagtccccacctcagataatccagagtttgaatttgccagaaattgtgaaggatggagggcaaatccaatatttgtaatttgaggaaaagaaaaacaaatgtggcacatcttgcacatttgagttttattgcaaatttctcaccgatccactaccaatgtcatctgcctatttcttctttatacaaaacaaattcaggatatccatgaagatatttattggcacagccaacctaattacagaaacctctgataatccaga

SEQ ID NO: 95565 - DNA, 675 bp, Homo sapiens
taatatatccatcatatttcctactcattgtattatgtgaatttatgttttgaggagatttgtcaaaaaaaaaaaaacaaaacaagagaataacattcagaccagttaacctgttattcttgactctcaaaakcctggctgtagttgaagataagtcaattgaacagacatgcattgagcatgtagcaaagtgttgaagagggtgtgttgttgaagcagatcatttactttcaaatctcagctccgtaattctagctgtgtgccttagatgcatggcttacctaactttttctcacctgaaaatgggaatagtaacagtttcaatctcataggacggttacgaagattaaataattttttgagaggtggtgcaagtactgacacatagtaagtgttaatgttttctttattatcattgttatcatcatcatcatcatcataccaatcacatgccagtcccatagctagtgctaaatatttattgaattccttgtacaattgaattccttgtacaaactaggcattgttctaggtgttggggatgtaacagtgaaaagatagactaagcctctgccatcattatgtcatattagtcattggtttattcaacaaatattcactgagggcctttgatgtaccaggcacttctaggtactatgacagctgtttattaag

SEQ ID NO: 95566 - DNA, 613 bp, Homo sapiens
gctgtatagtactttatgggccagcaagagcatttctacatcatcactttttctcatttaaactccatgtagtcctgagaaggaggcagagaaattattgttgtgccatttcttcaagtgagaaaactgaggctcagagaggttaggtgacatggccaagatcacatggctggaaaacccccccaaccccacagttcgcctcttagtccaagactctgtgtcatcacgtttcttatacttctgcctgccataagatctctggaaatggttgcatgtggttcaccaggagaaaataattgctgcaatagagatatgaatggagaggggtaagaggacagacatagaccctcttttcagaaatcttccaggacagactgaaatgtttctgcctaatcaaactctacctattgttcctttcattttagattcagaaggtacatatgtaggtttgttacatgagtataytgtccaatgctggggtttgggcttctatttacccatcacccatatagtgagcatagtaaccaataggtagtttttcaatccttgcctccctcactccctcccctatttttgagtccccagtgtcaattgtctccatctttatgctcat

SEQ ID NO: 95567 - DNA, 572 bp, Homo sapiens
gtttaaatcccaccttctcttccactctgctgccatttgtattccctcagataagaaggtaaggagaaagggctgggtgcagtggctcrtgcttgtaatcccagcactttgggaggtggaggtggacggatcacttgaagtcaggagttcgagactagcctggccaacatggtgaaatcccatctctaccaaaaatacaaaaaaattagccagatgtgctggtgggtgcctataatcccagctacttgggaggctcaggcaggagaatcgtttgaatccaggaggcggtggttgcagtgagccgagatcatgccactgcactccagcctgggcaacagaacgagactccatctcgaaaaaaaatggtaaggagagcgggtgccgtgacctggagcaaagggaggagtcctgggtgacatctgcctcccatggcagggaggtcctccggtaaacctgcttagacacgcacagttgctttcaacagtactgccatggacacgaatgatctttaggtacagacaaggcctccttacaagagacatatgttaggaaaaggtagtgccaaaattcct

SEQ ID NO: 95568 - DNA, 572 bp, Homo sapiens
gtttaaatcccaccttctcttccactctgctgccatttgtattccctcagataagaaggtaaggagaaagggctgggtgcagtggctcgtgcttgtaatcccagcactttgggaggtggaggtggacggatcacttgaagtcaggagttcgagactagcctggccaacatggtgaaatcccatctctaccaaaaatacaaaaaaattagccagatgtgctggtgggtgcctataatcccagctacttgggaggctcaggcaggagaatcgtttgaatccaggaggcggtggttgcagtgagccgagatcatgccactgcactccagcctgggcaacagaaygagactccatctcgaaaaaaaatggtaaggagagcgggtgccgtgacctggagcaaagggaggagtcctgggtgacatctgcctcccatggcagggaggtcctccggtaaacctgcttagacacgcacagttgctttcaacagtactgccatggacacgaatgatctttaggtacagacaaggcctccttacaagagacatatgttaggaaaaggtagtgccaaaattcct

SEQ ID NO: 95569 - DNA, 487 bp, Homo sapiens
ggtctgcccacctagcacagcaaagccaaacattgacactgggattgcagcaagagaagtgaggcatttattacaggatgccaagcaagaaggactgggcagctaaagcttaggacctgaactcccagatggtttgcagttaagggtttttaaaggcagggaggaagatgttataggctgctatggtttggttttgtgtctcmacccaaatctcatgttgaactgtaattcctattgttgggggagggacttggtgggaggtgattggatcatgggggtggacttccgccttgctattctcatggtaatgagttctcacaagatctggttgtttaaatatgtgtagcacttccccctttgctttctctcgcctgctctaccatggtaaggcatgcttgcttcccctttgccttctgccatgattgtaagtttcttgagaccttccagtcatacttcctgtctagcccacagaactgtgaatcaatta

SEQ ID NO: 95570 - DNA, 597 bp, Homo sapiens
agtggaatatgaccttggtgctaaaataatttagtaataaaagaattaccctaaaaaagctctaggtgaccagttaggaagcaaaaacacagaataattatttctgcctgcacagctggaagagatgatatttgattttagcagtgaaaacaaagaaataaagaaatagcttctcaagctaaggaaaaaacacagggaagcttgagaacacagaagtattcaaaggcatttagtgaggggtgtcaatgtaactagggagggattgtgggaggatatgaagctgaattttaaggggtcttgaatgctatgtcaagagtttggactttatcaatgtgtatctaactttaatatacatattggtcacctgaggwtctcatcaaattttgatgaagatgaagaaactgcatcaactaatgggcaaaataactagctagcatcaaaatgacaggatccaattcacacaaaacaatattaaccttaaatgtaaatggtttaaatgctccaaataaaagacacagactggcaaattgaataaagagtcaagacccatcggtgtggtatattcagaagacccatctcaggtgcaaagacacacac

SEQ ID NO: 95571 - DNA, 621 bp, Homo sapiens
tccttggaatacctgaattttaagagcagatacttcttaggccaaatatgactctttagttggtggagtatttaatgctgtcttgtatcagcatttatcttcttattcagttaaacaaaattctgagtactgctccatgcaaggcaaaatggtaagtgctggagatgcgaaacgcatacacctggaagaggaccaaggcagaaagaatggatacaacacaggtctggccatcctgcaccctgctgtctaatggggaagcccaacagaaaaccagctgcttggaaagcaaggcagaagaaagtgaggcttagagaatctagaggaaaaagatttaacaggtgatacctgtgggatgaccattttctcagctcstctttgacaggagttgcgtgacaattaaaagtggaaactactcacaaacaccagaaatgcagatttttctatggggttcatttaaaggagaatcattttctcagcataccagctctccaagtagcacatagggtgttttgctctgaaaattaaagagtttaacttctaattatttctgtagtgaaggctacttcctcagcttgtgggtcagctgctggaatgctagagggaagatgggatcagttagaa

SEQ ID NO: 95572 - DNA, 621 bp, Homo sapiens
tccttggaatacctgaattttaagagcagatacttcttaggccaaatatgactctttagttggtggagtatttaatgctgtcttgtatcagcatttatcttcttattcagttaaacaaaattctgagtactgctccatgcaaggcaaaatggtaagtgctggagatgcgaaacgcatacacctggaagaggaccaaggcagaaagaatggatacaacacaggtctggccatcctgcaccctgctgtctaatggggaagcccaacagaaaaccagctgcttggaaagcaaggcagaagaaagtgaggcttagagaatctagaggaaaaagatttaacaggtgatacctgtgggatgaccattttctcagctcctctttgacaggagttgygtgacaattaaaagtggaaactactcacaaacaccagaaatgcagatttttctatggggttcatttaaaggagaatcattttctcagcataccagctctccaagtagcacatagggtgttttgctctgaaaattaaagagtttaacttctaattatttctgtagtgaaggctacttcctcagcttgtgggtcagctgctggaatgctagagggaagatgggatcagttagaa

SEQ ID NO: 95573 - DNA, 510 bp, Homo sapiens
gtaataagcacagtatatgtagtaacttttataggatagatgaagtaaaatgaaacattaatttttattgtgtatatttaagatgcacatgttttgttatacataggcatagtgaaatgattactacggtcaagctactgaacatattcatcatctcacacagctacctttgcatgtgtgcatgtggtaaaagcacctggtrtctattctcagtgaatttgcagtatacaataaaatatttttaattagagtcctatgccatgcattaggttgctagacttattcattccaagtaactgcaactttataaactttgaactacatctctccattacccccttccttaacacctctgccgctggtagccaccattctactctctgtataagggaaatcatacagtatttttacttctgtgtctggcttacttcactttcacataatatccttagggttcatccatgttgttggataaggcaagatccccttccttttgaaggctgaataata

SEQ ID NO: 95574 - DNA, 510 bp, Homo sapiens
gtaataagcacagtatatgtagtaacttttataggatagatgaagtaaaatgaaacattaatttttattgtgtatatttaagatgcacatgttttgttatacataggcatagtgaaatgattactacggtcaagctactgaacatattcatcatctcacacagctacctttgcatgtgtgcatgtggtaaaagcacctggtatctattctcagtgaatttgcagtatacaataaaatatttttaattagagtcctatgccatgcattaggttgctagrcttattcattccaagtaactgcaactttataaactttgaactacatctctccattacccccttccttaacacctctgccgctggtagccaccattctactctctgtataagggaaatcatacagtatttttacttctgtgtctggcttacttcactttcacataatatccttagggttcatccatgttgttggataaggcaagatccccttccttttgaaggctgaataata

SEQ ID NO: 95575 - DNA, 510 bp, Homo sapiens
gtaataagcacagtatatgtagtaacttttataggatagatgaagtaaaatgaaacattaatttttattgtgtatatttaagatgcacatgttttgttatacataggcatagtgaaatgattactacggtcaagctactgaacatattcatcatctcacacagctacctttgcatgtgtgcatgtggtaaaagcacctggtatctattctcagtgaatttgcagtatacaataaaatatttttaattagagtcctatgccatgcattaggttgctagacttattcattccaagtaactgcaactttataaactttgaactacatctctccattacccccttccttaacacctctgccsctggtagccaccattctactctctgtataagggaaatcatacagtatttttacttctgtgtctggcttacttcactttcacataatatccttagggttcatccatgttgttggataaggcaagatccccttccttttgaaggctgaataata

SEQ ID NO: 95576 - DNA, 541 bp, Homo sapiens
atgtctggaggcatctatttcacttattatatttttaatcctcaaagtctgttttctgatttgcaatggtctgcaattacatggtttcacagttaattattttctattcattcactcatgtgtttatttattcaacaaatgcttgatatctcctctgcgccaagtaccatgctaagtcgtggaggttcaaagaagtataaaatagtacttcagtcaaaataaactggttttgctagtgtaactaacaatattaaasttacctgaacggcttatctcaaccaaggtttatttcttgctcacacagtctgggaggtccatatgatagctccatggtagcttgggcttccaaatttgctcagacaggaagaacagactgggaagcatgatgccagcaattaaatatctccatcagagagagacacaagatctttggtttgcttcgccatatctgcctctaagtagaagtgcattccccccaacagtttctttacggaaagaagcagaaacagaacacactattgtctatcatacacagactaca

SEQ ID NO: 95577 - DNA, 578 bp, Homo sapiens
tattatttctgttaacatacagtgggtttgctattttctatttttcaataaattaataaatattstaaatgtatccatttttcattttaaatgtgataagtatcaataggtgtaacccacataaacaaaagctctttggggaccttaataatttttaagaatgtaaagaaatcctataacccacgtgtttaagaaccacagctctaggaagaagtgtgctcactaaatggaccaagacctgatgctagaaggcattcttcctctgggagtagcaattgggagaagcaggccctaccattgctttctgagctctacccactcctttctctctttcaagacatccatactcaaacatttctcagttgctatgtgaatcgccttccttaggcagcttctgtgcattagtcatgatggattaaggtcatctgctcagccacagaagctgagataacaggaagccaaactggaacctctccacatccagtctagctttctgttatcccagcttctgacatgtccctcgggtatatctgtgatattcagaggttccctaggtatgaaacccctgaattcactgt

SEQ ID NO: 95578 - DNA, 603 bp, Homo sapiens
ttcttgtcatttattaactatggtatatatttgtttccctccatatgtccttaaatgaggtcttaggatgagtgtggacatttcaggctgctgacaccctggacatttttgcttggggtcaacataggagattgacttgctcacttggaaaattaatattaaatgttgctcttcttctattgcttgttcctggtgtttagttgtctggttttagtgggtcctgcatcctatcaaagccaaagctctaaaaaagcatgtcagttggaatcatcgtatagtattttttaggtattcatatgtatatccctcttgagagactgacagttcacatctatccagccatatatttctgtagttcttatcaccaaggtamttgaaactcaaaggataaagaccatgtactctcccctcactaggtgattaggatgagctcccccgctaataatgagaaaagtgagaaaatggtcagagactgcttattttttgatgaatgctcttcaaattgatattaacttatataaaaaagcaggtttcacaagggtattaatatacatgacaatataccacacagcaaagagagtttttgcgctttcaaatattctg

SEQ ID NO: 95579 - DNA, 371 bp, Homo sapiens
aatgatatggaacaacttccaaaagatatggttatgtgaacaaagcatggcagagaatggtgtgtatagtgtgtcattttaacttttaacaaaggggayagtaacacagacacaaacacatggatgtgtgtgtgtgtatacacatatatatatacacacacacacacaaaaatatatatatatacacacacaaaaaattcttgtttatgcaaagaatatttctaattggataaacaagaaactggaattggatacataagaaactggtagtagctgttgcttctgggagggcaacgagcagtttaaggtagaagaaagattgaacttttcattgtaaactattttctcactgtctgatttttaccatgtat

SEQ ID NO: 95580 - DNA, 524 bp, Homo sapiens
tcaagtccggaagttaagtggactgaacgattattgaattccagaattaggtagacctatctgctgggtcacaccagtgctggggccagcaggtctcctccatctccatccctgcaggaacaacagaaaagttaagcgaagtatgttccttgctggaagctcctctcaagaggaaaaagagtgagccagcatgcacacacccagtgatgattcttctccaatattcaaggtgaagaatccagrgaagaattcccctcctcatggaaaccaagaatgggaaaatggtttttctatctagcaaagtccaaaggaaatattccttttcttctcctattttctgcttcagatcagtttgtaaaatattttattgtaacttaaggaacttggttcttatacttcggtcttgtatttttgcaactcttgtggttgtatggtgcagtgatttagaataacattagccctttatgagtttgtaccagtaacaaaaggactatggtaaaaagtcatcttgcttttatagttca

SEQ ID NO: 95581 - DNA, 565 bp, Homo sapiens
gtttactttctgtcaagaaaaataatcttcaggcccgagaaggcagaacttatactgagaatagggaaatgactgagcccagaacagataaaagaatataagggaggaagtaagatatataaaaataatattttaatttatttatactctattttttaaaaatagacttaaggtcattttcagacacaraaagagcctttctaacaaggttagaaaaacaggcagaaaaaaaaaaaaagccggttagaaaacttggatcagattatcacttagaatgatatgcaaagggtatatcataaaatccaatacttgtcggaagttaagaacaaatataggcttaagcttatcctactatacatacagttttttctttttttctcactttaatttacatcattaaaaatttagcatttaactacattgccactataataaaattgtaaatgacccaccatgttccagtttacagtgttactggccaaaaaaaaagtgacatcgctcactttttattgcttactttttcttgctcttagttatccaggggataatataaaagagattgttc

SEQ ID NO: 95582 - DNA, 519 bp, Homo sapiens
aggcttaagcttatcctactatacatacagttttttctttttttctcactttaatttacatcattaaaaatttagcatttaactacattgccactataataaaattgtaaatgacccaccatgttccagtttacagtgttactggccaaaaaaaaagtgacatcgctcactttttattgcttactttttcttgctcttagttatccaggggataatataaaagagattgttcaactggaataatcttcgcccttggtatcaaggcaatgtccatttcaagcctgattcaaagmaacattcaccaaggctgtgtaagcaccaataatagagtcttccatagtttcttccctgcttcttccctttccattaccatggaaatccatgcaattaaacggaggaaagacaccatcttgttctggcacccgagccctttctttgtgattccaaaatgtataatgtgattgatatgttcagctttgtgtcttgagcatcgcaaattatgtacaatttatatgccac

SEQ ID NO: 95583 - DNA, 519 bp, Homo sapiens
aggcttaagcttatcctactatacatacagttttttctttttttctcactttaatttacatcattaaaaatttagcatttaactacattgccactataataaaattgtaaatgacccaccatgttccagtttacagtgttactggccaaaaaaaaagtgacatcgctcactttttattgcttactttttcttgctcttagttatccaggggataatataaaagagattgttcaactggaataatcttcgcccttggtatcaaggcaatgtccatttcaagcctgattcaaagaaacattcaccaaggctgtgtaagcaccaataatagagtcttccatagtttcttccctgcttcttccctttccattaccatggaaatccatgcaattaaacggaggaaagacaccatcttgttctggcacccgagccctttctttgtgattccaaaatgtrtaatgtgattgatatgttcagctttgtgtcttgagcatcgcaaattatgtacaatttatatgccac

SEQ ID NO: 95584 - DNA, 511 bp, Homo sapiens
tttattgttttactttttacatttagatctatcattcacctggaatagaattttaagagtcagtgccyatattttccctaaggttgtacaactgatctagcaacatttattgacaagactgttctctccccaactgctttgtagtggtgcctttgccataaggcaggtgcctggataggtttgggtctgatcatatttgttattcatgtcattcaaatctcacatccttattatttgtgtaagtttgttattcatgtcattcaaatctcacatccttattatttgtgtatttatttgtgttatcagttaactgtgacacatgtgttgaaacatcccactatggttatggaatccattatttctccttttagttcttacagtgtttgaagccatattattaagctcattggcatttaggatccttatgtattcctgttgaactgacccctctataattatgaattgttattctttctttttaaaagatggggtcttgctgtgttgcccaggc

SEQ ID NO: 95585 - DNA, 511 bp, Homo sapiens
tttattgttttactttttacatttagatctatcattcacctggaatagaattttaagagtcagtgcctatattttccctaaggttgtacaactgatctagcaacatttattgacaagactgttctctccccaactgctttgtagtggtgcctttgccataaggcaggtgcctggataggtttgggtctgatcatatttgttattcatgtcattcaaatctcacatccttattatttgtgtaagtttgttattcatgtcattcaaatctcacatccttattatttgtgtatttatttgtgttatcagttaactgtgacacatgtgttgaaacatcccactatgrttatggaatccattatttctccttttagttcttacagtgtttgaagccatattattaagctcattggcatttaggatccttatgtattcctgttgaactgacccctctataattatgaattgttattctttctttttaaaagatggggtcttgctgtgttgcccaggc

SEQ ID NO: 95586 - DNA, 605 bp, Homo sapiens
gttaaccaaaaaaaagtgggctgcaacaacaaatacatatattctcacaaagttgccagaaattgttgtctcagtctaggctgatatttaatgctaataagcctgagccttccctaaccattcccaggaagaggctcagccttcaaatggaatccaactattaccttaatgccagcagcaggaacagaggtcatacacaggtgcaccyctttatatggatacctatcatttcacttagccatcatgtggtatggctactgtagaggaatatttcatgtttttgagaacttgtaaaatccccttaccctgcgcaaattttcaaaatactgggaaagtagccatgatacacagagtatacagcggcatttaaattggcaatagagtgaaaacagatgtctgagtatggaggaataacattatttttagaagcctaaacacaactgggtgggtgggcaagttttgacattttctggtcaggacaatgttaatatcaggtttgcaaaccacaaaaaagctccccactttccctgaataaaatgtggcttattaaaaggtgtgatacaacacaccatcatcttcccagtgtctgtccaagaagagcactt

SEQ ID NO: 95587 - DNA, 415 bp, Homo sapiens
gtaagaggctggctacttgcaacaggtgggaggagcagacatagggggcagcacagggtcacgactggcagcacagaggtggagagagaccaacctgggttccaatgcaagcttcaatatcagttgatactcttagaaggaaagttcacctctctaaggccacttcttcccctacaacactgraaagtaatagtattactctctcactggcctgctgtgagggttaaatgacatgatgcccagaaaatgctgtgaacaggacccagaaccaggtgggctcttgtgaggaggcagctgtcgactatgagctttcagtctggagtggcgtcagcattctccactacattcttctaaagttccctcttgaagaaatcctggttcttacaccatgcctggctcccctcaagacatcaac

SEQ ID NO: 95588 - DNA, 415 bp, Homo sapiens
gtaagaggctggctacttgcaacaggtgggaggagcagacatagggggcagcacagggtcacgactggcagcacagaggtggagagagaccaacctgggttccaatgcaagcttcaatatcagttgatactcttagaaggaaagttcacctctctaaggccacttcttcccctacaacactggaaagtaatagtattactctctcactggcctgctgtgagggttaaatgacatgatgcccagaaaatgctgtgaacagracccagaaccaggtgggctcttgtgaggaggcagctgtcgactatgagctttcagtctggagtggcgtcagcattctccactacattcttctaaagttccctcttgaagaaatcctggttcttacaccatgcctggctcccctcaagacatcaac

SEQ ID NO: 95589 - DNA, 566 bp, Homo sapiens
cctccctaccatttcattttcatcaaaaatattttcctggcatataattcaaatccctatcagatttgatctttattgtatttttcattatttattcagctctgcatcagctcctctgctgtgggtgatctcctttgaagtgaagccttcttagaaatggctcttttgtaacagtgttccttccactgtgcccaggattgatctacaatgcagcccgagataagccccgaacctgctgttgctgtctctgttaaattccaaatgtctttcaccggcaccttccagaaagcatttatcgggagccttttaggaaacagaaatgacacatcctgactgctgagatcataagccaactgtctactcacaccctgcggacctgaatatttcaactctgttccggatggagtcaaaaatttccaaataatcataaaaatgtccttctcactggcctgtaattcatatgctttttatcaactcttgaaccgtgaaaagttaaccmcctggcccctttgccccagtcagcatgctcttctctcctacataattatcagctcttaagtagaatt

SEQ ID NO: 95590 - DNA, 618 bp, Homo sapiens
actgagtttcttcttaaaaagagagagagagagagagagagagagagagagagagcgacagagacagagacagaaagttggayagatgatctctaagggtttttttgttgtctgaaataactctaaagtattacaactacacttaaagtaccccgtaatacaaatgggaaaaattacatgtcctaaagcgtatgtttataaattacggtagaaagcatctgtcttatgtagcactgtcctaatgcctaaaattatcacgatctatgtacatttctttttaccttctgcaattctcttaaaaagattgctctacaatgggaccaccaaaattgttcttcccaaggaaaataccattttattctggcattaaacttttagaatgagcctcaaaatcattagggagaaatgctgactttatttaaagggcacatccagcatcttaatgtgaatactgctaaaagatttcctttggatttaattttgaattattgctttgcatgaataacatcattacacctattaagatgaaaactaaatccatttcaataaagaagaatgaagacatagaaatggtgcagtttaaaaaacaagcaaacacagattaattaaacaagtaca

SEQ ID NO: 95591 - DNA, 618 bp, Homo sapiens
actgagtttcttcttaaaaagagagagagagagagagagagagagagagagagagcgacagagacagagacagaaagttggacagatgatctctaagggtttttttgttgtctgaaataactctaaagtattacaactacacttaaagtamcccgtaatacaaatgggaaaaattacatgtcctaaagcgtatgtttataaattacggtagaaagcatctgtcttatgtagcactgtcctaatgcctaaaattatcacgatctatgtacatttctttttaccttctgcaattctcttaaaaagattgctctacaatgggaccaccaaaattgttcttcccaaggaaaataccattttattctggcattaaacttttagaatgagcctcaaaatcattagggagaaatgctgactttatttaaagggcacatccagcatcttaatgtgaatactgctaaaagatttcctttggatttaattttgaattattgctttgcatgaataacatcattacacctattaagatgaaaactaaatccatttcaataaagaagaatgaagacatagaaatggtgcagtttaaaaaacaagcaaacacagattaattaaacaagtaca

SEQ ID NO: 95592 - DNA, 618 bp, Homo sapiens
atttcttctacctgttgacctccgtcacttgctgatgaacatatgttgatgtctgtcacctctctgaatacacaccgtggcccttattctgtgtccactctcccacactgttttgtccacctcccattgtatattccctttctttctcccaactcctaaatttaactttaatttgttaaatgtcaacataatcggtcaaaggtggggggggcggatatcagtcaagttaggagttttaattctactgtgtcaaacatctgattcatttgatttrttttttgaaaggttatacaacatatacgtaactattacagtttaaagatatactttaagagatttttttttcaattcacttaaaatcacaaacatggctttacatttttttgcttgtatttacagttgcttgagttctttgttgtctaaaagaagcctctatcctccacttggttatttcctacccttctaaaggaagatctttacatacacgtttaatttaatagtaattctttaacaaatagttaaagaatatctaatgtcagccacaaatatatatatagtataggttcaatgtaaaaacaattggaaaaatataaaggagcaaaataattaaagttacaa

SEQ ID NO: 95593 - DNA, 557 bp, Homo sapiens
agttacaatttagatgtatgtggtattgccaatgcaaatagctcacctgagttgacaatcagaagaagagataccttgaacatgtggcttggagcacaccttcacaggtgatgccattctggagagctggcatgcttccctttactccaattataaaatgaattgcaattccaggattttccaaatgtggaaaaaaatatgtgttttagaagctaggaaacacagcaagcaatgggagtaaccaggggaactggttatgggagaaaattatcaacaaaggtgtaatacttattttcacttctaggaataacaaatggataatagaatagataacagacaagaagagaatcatctaaatctaccatttgttgagtgtttcctatttgtttggcatgacgttaggtgctttacattyattttcttttcttccaacagaatatggaagtaattaaggtaattaaggtgacttttcaagatcacacagcaggaatgaactgacttacactggttttcctgcggacaactgaaaagcagcaagttacacctgtgagtctggg

SEQ ID NO: 95594 - DNA, 606 bp, Homo sapiens
atcaaccctgccaacaccttgatttcaacttttggcctcctaaactgagagaatacatttctgttattttaagccttgcagtttgtggtgctctaggmaactaagatcgtgtccaggaagggaagagataaagtggcaacggttgtgggagaagtagatgggtaacatactgaggttgcccagcaaacggaagttcaatctacccacttcatgtttgatatatgagctagggagcagtttacgttaagtgaaattcttaacataattttgcaatgtaagtatttgtactgtgcttcagctatttccaggagtgctagcaaaagggagacagaagaagaaatattacccacagcaatattaaatgcaattcattgcctgggataatctgtagaagaatgcacagactatgatgctatagaaggaagtaatagcatgttctgggacttcctgcctgtgagttgagtaactatggtcaatctgtatcccctgagagggctggtaagcgaccgagggccattatatacatttgtggtggctgcaattatataatttacactacaactgcctaacccctgctgatcctttaataaagcattgagaaatcag

SEQ ID NO: 95595 - DNA, 586 bp, Homo sapiens
cagtagtccaagtgaaacataatggtagcattgactgggatgaggaatatgtgaataaaaggatatggaaattctaaacttcaggactcagtgatggattggatattaagggtcagtgcgacagaagtagtggagataattcctggatttatagcttcataacacattgaatgctggttatatgtactaatagaggaataccagaggtaaccagtttagggagaaagggtgagtttamgttgtatatgagacagtcaagtggagatgccaagaagaaggcactttgatatgtcaatcaagaattcagaggaagattctgtcatagaaaaatatttgagcaaatttggtcttcttttttttatttacaactttttggataaagggggtacatgtgcaggtttgtaatacgggtaaactgtgtgtcgtgggggtttggtatagagattattttgcccaccaggtaataagtatagtacctgataggcaattttttgatccttttcctcctcccaccctccactctcaagtaggccccggtgtctattgtttccttctttgtgtccatatgtactcgatgcttagatcc

SEQ ID NO: 95596 - DNA, 562 bp, Homo sapiens
gaccgggttttaggttatttacaaaggatttttcctgtcctacctaccactgctgtgcgattttctctcaaacaatggccattatctgaaataacagttcaatgtcacagataacaggccaccgaaacaaattagtcaccacctyttgtcattttctctcccccaatccctcccttttgctactatttttgtttttaaatcaatattttgggaaaatatagttctactggatttacacgtttatttgcacttggagaaaacaaaaagtgggtggcacttgtgttatcccgtttgcagctaaagtttaaccgtcagcacactttccagcccctcttgccccacctctcccccgcaagtgtccctagactcgcttactttgcttaactttccattgttgagctggggagttggattttgtccatttgtttttatgaatggagttttgtgataaaaacgcgtttacttccatttagccagtgggatttactaaatcttacaaagttggccatgaataaatctgtagacccttttgttttgctatgtatcccctgtattctttctt

SEQ ID NO: 95597 - DNA, 396 bp, Homo sapiens
tgatttttcagtagcagacatatgccctctaggtaagtaaggatgcagatcttcttgtgactctcctgaagggaagtctccttagggttctaatgataatttacctctttcttcccctccagactgcaaatattyattttccttcttatgtctacacaaaaagtgaaagttaccatcccagtaacctgtcatctaagcaataaaaaatgtactaattttaactaagaagacaaagaaagaaaaacaaaaactgacaacaatcaaaacctcagtacaagaagaatattattacatcatcagtgatgagtgcctgcttgaaagtgctcacaaaactgttactgattcactgactacagcttcttttggctgctgctgtagttgaccgtaggccagcat

SEQ ID NO: 95598 - DNA, 396 bp, Homo sapiens
tgatttttcagtagcagacatatgccctctaggtaagtaaggatgcagatcttcttgtgactctcctgaagggaagtctccttagggttctaatgataatttacctctttcttcccctccagactgcaaatatttattttccttcttaygtctacacaaaaagtgaaagttaccatcccagtaacctgtcatctaagcaataaaaaatgtactaattttaactaagaagacaaagaaagaaaaacaaaaactgacaacaatcaaaacctcagtacaagaagaatattattacatcatcagtgatgagtgcctgcttgaaagtgctcacaaaactgttactgattcactgactacagcttcttttggctgctgctgtagttgaccgtaggccagcat

SEQ ID NO: 95599 - DNA, 396 bp, Homo sapiens
tgatttttcagtagcagacatatgccctctaggtaagtaaggatgcagatcttcttgtgactctcctgaagggaagtctccttagggttctaatgataatttacctctttcttcccctccagactgcaaatatttattttccttcttatgtctacacaaaaagtgaaagttaccatcccagtaacctgtcatctaagcaataaaaaatgtactaattttaactaagaagacaaagaaagaaaaacaaaaacygacaacaatcaaaacctcagtacaagaagaatattattacatcatcagtgatgagtgcctgcttgaaagtgctcacaaaactgttactgattcactgactacagcttcttttggctgctgctgtagttgaccgtaggccagcat

SEQ ID NO: 95600 - DNA, 618 bp, Homo sapiens
aaacttaagtggggctaataacaaagtaccaaaatggaaaagtatctactatatacagttttgtgagaaaagggaaacagcttagtaatatttgtagtacgatctcaaacttccatattggaaaggatagattgggagagattttattgcttgatcatatacttcaaaatctaattttgtcatcatgattgaatattatttttgctttttgcatttttctatttttaaaaagtaactctacatctacttctataacttttaaaataatttatttccaggctaatcattgctattccaaccttgtgctcttgsaacagtgagagtttatatttcctctagatgctctgcttatttgcagagaattgtagtccttcctgatctcaagaggaatttgtcttttcctaccctcttcttttggctttcttgctgcagctcacattccctgatgagccccaagcctcttctttcacacaggctaatggagaaatcagcattgggagaatatgaatggttacctcatttgtgctggccctctagggctgaggttggcatttataattttctaatttgtaaatgtgtggccagaaatagctacaaaatatgtcttgcggcacccag

SEQ ID NO: 95601 - DNA, 312 bp, Homo sapiens
cacattcactaccctgaggatagcaccaagccatgaaggatccattcccatgacataaactcctcctacgaggccccatctcccacactggtgattgcaattcaacatgagatttggtgggaacacatattcaaatcataccaagtggyatatttggggctaattaagcaatcttgcataagtgaaatgtgaagcttaaactcttcattctccttccaccaaatcactgtgttcaaccattctttgttgaaaattcatttttttccaactaaattttcagtcactgtggttaacttattaactcctaagtgc

SEQ ID NO: 95602 - DNA, 575 bp, Homo sapiens
tactaacactcatttctagtgctaattgtgggccaaaaatagttctataatctctgcatggcctaactcatttattcctcacaaaccctatgaggtagataataccattatatccaactcacagatgaagaaacggaggaacagaaaggctaactcatgccccataattagtaagcagtagatctgggatacaaaccctgcacaatagctccagcatccacatacaggctgtggcatgatcagagaggaataaccagccagaatggatgatagagaagaatggttgaaataaagaaaagatgtaataggagatatgtaaacagtgtaggaccgggtcattcacagtcttgactatacgtacttgtatgtatgcttctatgcgtaatgacatcaggccattaacatatttgcttaagtactagttgccttactgaattgcaggtttaggrcaggcaaagattatgtcttattcacatcattatttcccatcacatttctcacattgcattgtacgtaacgtgtgtttgacaaacaaaaaacaagtacgtgttccatcaactaaccacagtgaatat

SEQ ID NO: 95603 - DNA, 575 bp, Homo sapiens
tactaacactcatttctagtgctaattgtgggccaaaaatagttctataatctctgcatggcctaactcatttattcctcacaaaccctatgaggtagataataccattatatccaactcacagatgaagaaacggaggaacagaaaggctaactcatgccccataattagtaagcagtagatctgggatacaaaccctgcacaatagctccagcatccacatacaggctgtggcatgatcagagaggaataaccagccagaatggatgatagagaagaatggttgaaataaagaaaagatgtaataggagatatgtaaacagtgtaggaccgggtcattcacagtcttgactatacgtacttgtatgtatgcttctatgcgtaatgacatcaggccattaacatatttgcttaagtactagttgccttactgaattgcaggtttagggcaggcaaakattatgtcttattcacatcattatttcccatcacatttctcacattgcattgtacgtaacgtgtgtttgacaaacaaaaaacaagtacgtgttccatcaactaaccacagtgaatat

SEQ ID NO: 95604 - DNA, 575 bp, Homo sapiens
tactaacactcatttctagtgctaattgtgggccaaaaatagttctataatctctgcatggcctaactcatttattcctcacaaaccctatgaggtagataataccattatatccaactcacagatgaagaaacggaggaacagaaaggctaactcatgccccataattagtaagcagtagatctgggatacaaaccctgcacaatagctccagcatccacatacaggctgtggcatgatcagagaggaataaccagccagaatggatgatagagaagaatggttgaaataaagaaaagatgtaataggagatatgtaaacagtgtaggaccgggtcattcacagtcttgactatacgtacttgtatgtatgcttctatgcgtaatgacatcaggccattaacatatttgcttaagtactagttgccttactgaattgcaggtttagggcaggcaaagattatgtcttattcacatcattatttyccatcacatttctcacattgcattgtacgtaacgtgtgtttgacaaacaaaaaacaagtacgtgttccatcaactaaccacagtgaatat

SEQ ID NO: 95605 - DNA, 575 bp, Homo sapiens
tactaacactcatttctagtgctaattgtgggccaaaaatagttctataatctctgcatggcctaactcatttattcctcacaaaccctatgaggtagataataccattatatccaactcacagatgaagaaacggaggaacagaaaggctaactcatgccccataattagtaagcagtagatctgggatacaaaccctgcacaatagctccagcatccacatacaggctgtggcatgatcagagaggaataaccagccagaatggatgatagagaagaatggttgaaataaagaaaagatgtaataggagatatgtaaacagtgtaggaccgggtcattcacagtcttgactatacgtacttgtatgtatgcttctatgcgtaatgacatcaggccattaacatatttgcttaagtactagttgccttactgaattgcaggtttagggcaggcaaagattatgtcttattcacatcattatttcccatcacatttctcacattgcattgtacgtaacrtgtgtttgacaaacaaaaaacaagtacgtgttccatcaactaaccacagtgaatat

SEQ ID NO: 95606 - DNA, 601 bp, Homo sapiens
tctttattaaagtaatatgtatatatgcattatagaaaaaataaaaaatatgaaaaagctattatagttttatcttgcagagacaaactatgttcccatgtttgtttctttttatatttgtcattttattctatgaacattcacacttgttttcatagtttgggttatactgtagatacattttgtgttctgaactctgacaaaaatttttcgaagcatataatcttaggctgtaaagagctctgatgatgggaagcttgagagccactgactctacccgcaactcagtttgttcatctgaaaacagagataaaatcascaattctgtattatccaaaagattgttgtgagagttgtataattgtatattaatgtgtaaatatgctttgaggacagtaacttgttgtactttttaaaagggatgtacttcccattatagaaattggaggaggaagacgggaggattctgatttgcaagcttattaaggcagaataataaattatgtttaagtccgcctttataagtaattactgcaaattctccagtcctctagccctgggaggcaggcagtcaagctatttgtcaactgaatgaagctgc

SEQ ID NO: 95607 - DNA, 592 bp, Homo sapiens
tttctttttagctcctttcgcagacatgtagtgatatatattatgagacaggattttgtaaaacttgaagtgctacccacctgtggggaattaaaaggtgatacttgagccagaataaacttaaaacacagatataatcaaggcagtaacgttggaaatagattaaacttaattgacccttatttaatgcctactatgttcttactgtgggactggatattttaagtttgaattagttttgctactttgtgacmaaggataaatcacccaatcttatttgataaactacagtttattaaaggggctatggtatcacaggcaatttgcttacattaccttatttagttaataaaacaaagttatctaacaggattagttaatatcattttacaaacgatgattgaatggtcagacaataagcctgagaactcataatttagtattgagcaaggtgaaactggaatttttatctatttgctttcaagattttattttaaattattatataacttggcctcactacaaaatatcataatagacaccatctgaacacacatgaaattctatgctcaatccttataaattttcccaa

SEQ ID NO: 95608 - DNA, 592 bp, Homo sapiens
tttctttttagctcctttcgcagacatgtagtgatatatattatgagacaggattttgtaaaacttgaagtgctacccacctgtggggaattaaaaggtgatacttgagccagaataaacttaaaacacagatataatcaaggcagtaacgttggaaatagattaaacttaattgacccttatttaatgcctactatgttcttactgtgggactggatattttaagtttgaattagttttgctactttgtgacaaaggataaatcacccaatcttatttgataaactacagtttattaaaggggctatggtatcacaggcaatttgcttacattaccttatttagttrataaaacaaagttatctaacaggattagttaatatcattttacaaacgatgattgaatggtcagacaataagcctgagaactcataatttagtattgagcaaggtgaaactggaatttttatctatttgctttcaagattttattttaaattattatataacttggcctcactacaaaatatcataatagacaccatctgaacacacatgaaattctatgctcaatccttataaattttcccaa

SEQ ID NO: 95609 - DNA, 592 bp, Homo sapiens
tttctttttagctcctttcgcagacatgtagtgatatatattatgagacaggattttgtaaaacttgaagtgctacccacctgtggggaattaaaaggtgatacttgagccagaataaacttaaaacacagatataatcaaggcagtaacgttggaaatagattaaacttaattgacccttatttaatgcctactatgttcttactgtgggactggatattttaagtttgaattagttttgctactttgtgacaaaggataaatcacccaatcttatttgataaactacagtttattaaaggggctatggtatcacaggcaatttgcttacattaccttatttagttaataaaacaaagttatctaacaggattagttaatatcattttacaaacgatgattgaatggtcagacaataagcctgagaactcataatttagtattgagcaaggtgaaactggaatttttatctatttgctttcaagattttattttaaattattatataacttggcctcactacaaaatatcataatagacaccrtctgaacacacatgaaattctatgctcaatccttataaattttcccaa

SEQ ID NO: 95610 - DNA, 429 bp, Homo sapiens
tgcattttgctatttcctaatggtacagctcaaagcccactccagtcattgacaaaaacaaactacaatagtgatgacaacaacataacgacaagaatgctaatagctgacttcaaaggagcaccaacagcgggccaggcttgctattaagcacttctcactcactaactcaggttactctaacagcaacttaatggcttctgtctccccactgaacagatcagtaaatagaatcttaggctaagaaatgctygcagtgtaaaaaaagatgcaaacaaattttgactccagagccttaaaacgtaaccttcagaacctcaacttcttatctttgagatgagttaaccataacctttttttacatttagggagaagattaaatagaagaatacctgtaaagcacttagagtatctggcatttagtagcat

SEQ ID NO: 95611 - DNA, 497 bp, Homo sapiens
ccagtttcatttttctacatgtggctagccagctatcccagcaccatttattgaacagggagtcctttctccattgcttatttttgtcaaccttgttgaaaatcagatggctgtagatgtgtggctttatttctgggttccctgttccattggtctatatatctctttttgtagcagtaccatgctgtttcggttactgtagactcacagtgtagtgcaaagttaggtaatgtgatgcctctggttttctttttttgcttaaaattgctttgactattcaggctctttttttgttctatatraattttggaatagttttttctagttccatgaaaaatgacgttagcagtttgatagaaatagcaataaatctgtagattgctttgggtagtgtggccattttaaggatattgattcttccaatccatgagcatggaatattttgtcatctgtttgtatcatctgtgatttctttcaacagtgttttatagttcttc

SEQ ID NO: 95612 - DNA, 497 bp, Homo sapiens
ccagtttcatttttctacatgtggctagccagctatcccagcaccatttattgaacagggagtcctttctccattgcttatttttgtcaaccttgttgaaaatcagatggctgtagatgtgtggctttatttctgggttccctgttccattggtctatatatctctttttgtagcagtaccatgctgtttcggttactgtagactcacagtgtagtgcaaagttaggtaatgtgatgcctctggttttctttttttgcttaaaattgctttgactattcaggctctttttttgttctatataaattttggaatagttttttctagttccatgaaaaatgacrttagcagtttgatagaaatagcaataaatctgtagattgctttgggtagtgtggccattttaaggatattgattcttccaatccatgagcatggaatattttgtcatctgtttgtatcatctgtgatttctttcaacagtgttttatagttcttc

SEQ ID NO: 95613 - DNA, 497 bp, Homo sapiens
ccagtttcatttttctacatgtggctagccagctatcccagcaccatttattgaacagggagtcctttctccattgcttatttttgtcaaccttgttgaaaatcagatggctgtagatgtgtggctttatttctgggttccctgttccattggtctatatatctctttttgtagcagtaccatgctgtttcggttactgtagactcacagtgtagtgcaaagttaggtaatgtgatgcctctggttttctttttttgcttaaaattgctttgactattcaggctctttttttgttctatataaattttggaatagttttttctagttccatgaaaaatgacgttagcagtttgatagaaatagcaataaatctgtagattgctttgggtagtgtggccattttaaggatattgattcttycaatccatgagcatggaatattttgtcatctgtttgtatcatctgtgatttctttcaacagtgttttatagttcttc

SEQ ID NO: 95614 - DNA, 599 bp, Homo sapiens
tgtgctcagtttttggctgggagccacctgtgggaagagtgtctttggtacaaatggcatgatggatttcagcacatagcagctgagaatttgawcaagacactccccagagtcagagtctgaaaggagccttcccaatgctgccacacacagcattttcctttgataccttgaatccacacaatcttgggatccccgagaagggtcaaacactttccatgtctgatcattacccttgaaataatgacttcattctggaagaaggttaaagttcttgaaatattttccatcacatcaactgatcctagataccagcttgtggaattagaaaagaagaggagatgcccaagtgaaattttataggaacaaaatgccccccacagaccttctggaaaactttctgaaacaaaatgtaacacatcctgttcctggcaaagagcctaccttagaggcagcccagagagaaggaaaaagcacacccattgttctgacacctggtccccttcctactctgcctggagcacctgggagcccatctctgggcttgtttcttcaaggtgagagcctgaactcaataatcaatattcacactgggctca

SEQ ID NO: 95615 - DNA, 596 bp, Homo sapiens
tgagtggctggctaataaaaatagccccaaaatggttcaaagaaaatgctactctgtaggtcaaaagtagtctttgaacagagcattattttttcttaccatctcaaaaattttttatccttgaaaataaagtgaaggcagtgaaatagattgggtcacaactactaaacatgtgctaatcctttgaacattttgacattctatcagagtctatgaaacattttcaaaatgcacttgtgagaataaggaacatagtaccatccaggtctccaaatgtgtgatgtgctactggctggaaaaataattgtaccctcttaataatccaaattaacatgagatttaataatttcaccttttaaataatctaaattaacattgtgagctgagaaaactgctaattgttaaaattcayacagtatcattttctctcactgaaacgtgtacttcttgggaaaataccagaatctttattatctagtgcagtaaaacaaacaaatcaaattgatgaataaatgctgccacgtcttcaatagtttattgtggaaaagatcaattccattttatcacatattgtctggacactttctttatgcaag

SEQ ID NO: 95616 - DNA, 594 bp, Homo sapiens
aaagtcactcttgctatgctttagcaaagagacagggagtattgtgcccctgctctagaaatctgtggaactttgaatttgagagagatgatttagggtatctggtggaggaaatttctaagcagcagtgttccagaggtgtcctagctacttctaacagcatgtactcatatgcgttcaccaatacatggtctgaaattggaacttacatttaaaaggaaagcagagcatagcagtttaaaacatttgtagcctgaccatgtggcagaaagacccattttcttgggaaaaattcaagccagctgtagaaatttgcataagtagaggagccaaatgttaatagccaagacaatggkgaagatgtgtcgagggagtttcagaggtcttcatggcagcccctcccatcacaggcctggaggcctaggagggaaaatggtttcatgggctaggcaagggccccactgtcttgctcagcctcaggacatggcaccctgagtcccagtcgctccagctccagccatgactaaggtccccaaatacgtctcaggctgctgctccagtgggtgcaagccataagaagccttggtggctttc

SEQ ID NO: 95617 - DNA, 526 bp, Homo sapiens
gagggtaactttcagtgaagaaacctgacaaacactccctcagctgggtgatgaaggccaacagcaacagtgatgagtcaggctggtatcatgcacccttgacatggcctgatgaggaagcaccttacccctgtgggcttcctccccaatagcccccatctaaccatgagaaaaccatcagacgtaccctaattgaaggacacaaaatacctgctcagtgctgctcaagacttttgatgactcagtgctggtcatcaaaaaccagaaggygggagaacctgtcacagagaagaaacagagcagaggggctaaggagacaggaagtttaaatggaatgtggcaccctggatgggaccaggacatttgggggaaattagagaaatctgaataaaatgtagactttagttaataacagcatgtcagtattggttcgttaactgtgacaaccataccatagtaatggaagatgttaacatttggaataaactgggtatggggagtttctgtaatatccttgcaactttta

SEQ ID NO: 95618 - DNA, 609 bp, Homo sapiens
cccaaaaccagagcatgaagacttgtcaccatatatgctacaccaygtagccatgtgatcgtgcttcaggagtgctagctcagggtccttcagggccctccctggtccctgtggcacctagtggtcagtcactacttgtcaatgggctgctgagctggttcaatgacaagggaggttttcaggatgcaaagggggtggggagtcacttattattagcgacggtcatcctcagtttaggttctcaccatatattgagcatctcctctgtgtctcgctccaggagggcagtcagagaagctggagccctagccctgtcactgaggagcttacagcctacctgtgtgatgactttagaaggaattcaccatctaattcagttcagctgctggcttgcaccagcactttctctctacctgcatggatactgtatccctggatgattcctaacatcacttgggattttccaccaaaacttgtggccatggcatagctctagccagcggggtgaccaagggcccctgtggcacagagccgcagagccagagtgggctggcggcagaggctcagcccagacacctgacaaggccttaggctcccccagctgccctg

SEQ ID NO: 95619 - DNA, 554 bp, Homo sapiens
cactcccgtcccccaggcagaggttcacatccaccccttgaggctggcaggggcccacactctatgagttagctcctccagcctgaagaggcctgtgttccacagcctggccgactgctggcctgggtgcatcgtgcctttgaggctttgtcacttcaaaattcatagtccccgcgtagggagatgctaggtaaaatatgccgtcccctaatccacggccacagttttggggaagcggatctctcacaagggtggtatacccaagggagtttgttttaaggcctgacccgaaggatgcttgtttagcatggtttcattccaaagtcagttgtgcagcaccaaccagttcatccccctgaagctcacgtctagaagaaggacagagatacctggacagggatagagcacctgccaagagccaccaccacagagcacaaaggagggagcagtgatggggtggccttcgagctgggtgraaggggcattcctagtggggtgcacagcaggggcgaaggcgcggaggcccatgggaactgtggctctggtacagaacg

SEQ ID NO: 95620 - DNA, 598 bp, Homo sapiens
cttcatttgatgctcagaatgaggttcataggctttgtctcctaataaagtggaagtgtggaacttcagcagagacagccaaatgtcaggccacaggccagatgcagactttagacagtttccaaatagtgctaacatttaaaaatgttaaaatatcacagaaatcaaaattyctggttccccttgaaaaatcaggacctcagacaacactactctaggattccctagagctactggcaggcagagtggaggagcaaccacctcctttgaagaagtctcgtctcttgcagtctcacacaaatgggcagttcagttgcagtcatgtaccatcttcctcacacctatgacacaggggtttgtgagccctgtccttctgcaaactctaaggcctctaagtgtgtcctctgtgtgcaggacagggtgacagctgtcccactgggaaagcaagggagttcccaagacactggtctttcatgcaacaacagggagagtcccaggaaacctgggaaaaaatggtcaccctatctgtgcagatggttcccaagtctacaatccaagtgtctctcctatctggtccctgtttccaagtaccatgaga

SEQ ID NO: 95621 - DNA, 598 bp, Homo sapiens
ttacataataacctttctgtaaagcttggatggcacaaatgattttgtaagacattcaagtcacatgtcattaatcagaaatgacagtctttattcacatatatttgactgagctgcataattttagactccaataggtctagataaatgaccctaagtattgtactatttcaaattgacaatgattgatgatagaggaaaaaaacgaatgctgaaaagggaccctgaagtaaacattgaaaatcagttgtactactttggggaaaagaaatttgggaattttcttcttcaagacctttcctctttcttaacatctctatctacttaactctcagtttaatcagttagatattgtcaggatttcaaaccacaatgaaaaacagactcatttagttatttttgttcaaataggtagaagagaagataatgattaataaaaatgtgtctattctgtaaatatttcctgaaccttttatacatccggcactgttctaggcactagggcttcagcagatacagtttttgctttctaggaatgctcatcttagtggaargggataggcaatatccaagtgaacaaataaataaatgagattat

SEQ ID NO: 95622 - DNA, 618 bp, Homo sapiens
ttatttaaaatcctgtgactctcattgtcctaaattgctcgcctacatgaaatcaggaggtagagaagggtggagaggaactggaggtaaaaacrttgatgtcaataggactgattttttttttaacaggactgattttaaaggctagaatggtcttctcctgactattacaactaggtttgagggtgccatattgatttcccatatacattttattgaagatttactaatatgaagagttaggatgggagaaattgcattttttgtttgtttgtttggctggtcggtttttgaggcagagtcttgctctgtcacccaggctggagggtagtggcgcaatcttggctaactgcagtctccaactcctgggcttaagggatcctcccatcgcctgagtagctgggattataggcatgaaccaccacactcagttaatttttttaccttgcagagatgaggtcttgctatgttgcccagggtggtcttgaactcctggcctccagtgatcctcctgccttggcctcccaaagtgctgggattacagtcgtgagccatggtgcccagccaagaattgtattaaagtgcaagaactggcaccctagcaacaactaaaaggac

SEQ ID NO: 95623 - DNA, 669 bp, Homo sapiens
ttgtagctcttgtaaaaggggttgagttcttgatttgattctcagcttggtcactgttggtgtatggcagayctactgatttgtgtacattaattttgtatcctaaaacttgctgaattcatttatcaattccaggaactttttggagaaacctttagggttttctaggcctatgatcatatcatcaacaaatagtaacagtttgacttcctcttgaccaatttggagccctttatttctttctcttgtctgattgctctgcctagggccattttcttaataaatggccttttattgatattgataccacttgatattgtcttgttgcactggggcccatagtttcaggtggttccttctttcatttcactaccatgtctccaagagatagattcaccttctaaaatgccccctttttcttccagaagtgcctttccaaagctgccacctctggtcctaatctatctttcaatccccttccttttacttcccctgtagctaatgctctggtccaccagccctcagatcagttctcagtatttccccactcagagtggcccttctccttctgtgggcaccttagttgatattatttgtgttctgccataactagaatgctgccacactctccccttatgctcaatccttaccttgcctccccatctggtg

SEQ ID NO: 95624 - DNA, 580 bp, Homo sapiens
ccagtgacagaaatcactctggctcggctgctttcagtggctcatatctgtaatcccagcactttgggaggccaaggaggggagaccacttgaggtcaggagttagagaccagcctggctgacatggtgaaactccatctctactaaaaacacaaaaattagccagaaattgcttgaacccaggaggtggaggttgcagtgagccaagatcgtgccattgcactccagcctgggcaacagagagatactctgccttaaaaaaaaaaaaaaaaagaaagaaagaaatcactcctgctcatctaaactgaaaataaaaaacaaaaacttctaataagaatatgggattgctcataggaagwacttgacagtgagcctggagatggaccaggccggttctggtgggtgagggaacagggcctctgtttaaggcactcctggtggcacgaaccatcagccagtgcttttggcccttgtgtccctctgctcaaggtccacattgtcatgagagagagattaatggggctggttgtgatttgcctggccctttgctggaattactttgactggcatttccacccaa

SEQ ID NO: 95625 - DNA, 447 bp, Homo sapiens
ttgaattgttttggcacccttgtcaaaatcaattgtccatagatgtgtgggtttatttctggagtctcaattccattagtctatatgtatatccttatgtcagaatcacattattttgatcactatagctttatagtaaattttaacatcaaaaagtgtgagttcttcaactttgttctttttttccaagattgttatggtgatttggggtcccttataattccaaactaatttgaggattagcttatccatgtctcataaaaaggtccttgggattttaatagagagtgcattgattcattttgcagatccccttgggtaatattgacatactaacaatattaagtcttttgatccataagcataagatgttttgccaattatttaggtcttgttcaatttctttctgcaatgttttgtagtyttgggcttcttttattacattta

SEQ ID NO: 95626 - DNA, 595 bp, Homo sapiens
tgctgattttacacccccaagaccaccatggtgcttttcttgcagtcggattgcaaaaggggmagccccatttctctgagcccttgccttacctggccacaagggggcgtaaaagagaccctttttttttttttttttttttttttccctctgcgtgcagaggtaacctgtgaggctgcgcacctctgggccaggtgtggctgatggatgactcggtccgctgggtttgggcggactaaaagggcgctggacatctgcctgctcatgggagtcagcctcaccccaaatctgaaaattcattatgctggggcaagacaggcttccgctgtacaggaaataaatggatgggaggactgtggcgggtgaaagtgtgggctttggaggctctgggacttatttgctgtgtgattttaagtgcactagttagcttttttgagtctcaatttcgtaaactataaaatggggataataatctcactttataaggttcatgagaggagtccatgaaattataaatataataagttggcatgaaagtgacgggtactcaatgcagaatggtcattatgatggctctgtccctccgcagccccac

SEQ ID NO: 95627 - DNA, 595 bp, Homo sapiens
tgctgattttacacccccaagaccaccatggtgcttttcttgcagtcggattgcaaaaggggaagccccatttctctgagcccttgccttacctggccacaagggggcgtaaaagagaccctttttttttttttttttttttttttycctctgcgtgcagaggtaacctgtgaggctgcgcacctctgggccaggtgtggctgatggatgactcggtccgctgggtttgggcggactaaaagggcgctggacatctgcctgctcatgggagtcagcctcaccccaaatctgaaaattcattatgctggggcaagacaggcttccgctgtacaggaaataaatggatgggaggactgtggcgggtgaaagtgtgggctttggaggctctgggacttatttgctgtgtgattttaagtgcactagttagcttttttgagtctcaatttcgtaaactataaaatggggataataatctcactttataaggttcatgagaggagtccatgaaattataaatataataagttggcatgaaagtgacgggtactcaatgcagaatggtcattatgatggctctgtccctccgcagccccac

SEQ ID NO: 95628 - DNA, 595 bp, Homo sapiens
tgctgattttacacccccaagaccaccatggtgcttttcttgcagtcggattgcaaaaggggaagccccatttctctgagcccttgccttacctggccacaagggggcgtaaaagagaccctttttttttttttttttttttttttccctctgcgtgcagaggtaacctgtgaggctgcgcacctctgggccaggtgtggctgatggatgactcggtccgctgggtttgggsggactaaaagggcgctggacatctgcctgctcatgggagtcagcctcaccccaaatctgaaaattcattatgctggggcaagacaggcttccgctgtacaggaaataaatggatgggaggactgtggcgggtgaaagtgtgggctttggaggctctgggacttatttgctgtgtgattttaagtgcactagttagcttttttgagtctcaatttcgtaaactataaaatggggataataatctcactttataaggttcatgagaggagtccatgaaattataaatataataagttggcatgaaagtgacgggtactcaatgcagaatggtcattatgatggctctgtccctccgcagccccac

SEQ ID NO: 95629 - DNA, 633 bp, Homo sapiens
ataatacttctgggacaccatgctggaggaaatgggatgaacttgttgctgtggaaaatcccggaggggatgcagcacaaggtttgtggctgaagaggacttgaattcagacccaaagaatgagaaaagcaatctcttgaggtgtggttgggagatgcattccacccccayctcaccaaaagacttgactggtctttcaagttaaagatagcaagcattttaggcttagaaatccagacatgaaaatggaagcataaagagagaggggtgggctgagagacgggcactggctttcatttgggaaggaggaaggggcatgttttgcaaagtagctcctgggagctggcaggagggaaggttcatgctgcctttggagctgttcttcctggaccgcagggccacagaacaaaaggtcttaaggcctgaatttgtgcgctttggctggcataaaaaaggaccacaggtcgggtggcttaaacaacaggacttcatcttctcatagctctggaggctgggaggccaagatcaagctgtcggcagggctggcttctccgaggcctctcaggtaggcttgtagctggccaccctcttaccatgtcctcatatggtcttccttttgtacagtctacgtcc

SEQ ID NO: 95630 - DNA, 625 bp, Homo sapiens
ttgctatctttctctgccaccccactgtctgacttctaaggcctgataaaaagcctgtccaaaacggagctctgatggtgtcactttcaatggctctccactgcccctgtgcacctggccctggtccttctctccggtcacatttctctatgcttcctttgtatagaacatgctgcagccacactgaacttgcccattccttccctccacgatgcctctacttggtctgtttcctcttgctgtgacttccctctctacctctttaagtccagcttctatcaatgtgttaaggcattgattagtttctatctcctccatgaggtcttccttcatctctttatagaaagcctctggattccatgacactttgggaggtattaagagtgtggttaagggtgaagccctaggaaggacatgacttaggatcagacaccagtttcattactgactggctatatsgccctggacaatatacttaactcctctgtgccttcgctggctgtcaaatggattataataatataattactttgtaggctgtggcaaaggttgaatatttagttacacattaatatccaagaaggcctggtacatgctaagtgtcaacttttattattgttatttt

SEQ ID NO: 95631 - DNA, 574 bp, Homo sapiens
ctctgcccctgattttcaaaccctttcctctaccccacatggctctatggtccacaggatgcctccaagaaaggcggagaatactttctaaagtcaagaccacccccttcagaatccagcacttgtacaaaactagattttcttttcagagacagggtcttgctstgtcacccaaggtagagtgaagtggcacaatcatagctcactgcagcctcaaactcttgggctcaagtgatcctcccacctcagccccctgagtagctgggactgcaggtgtgcaccactatgcccagataatttttaaatgttttttagagacaggagtctcactatgttgcctaggctggcctcaaactcctagtctcaagctattctctggcctcggccccccaaagtgttggaatcacaggtgtaagctactgtgcctggccctaaaactagatttttatgaattgctggtgttcaaattgtggcatgtgagtgtaggataacctttgcacaacagctgaatatgggatcatcatttatgctacatgaaattcttcaactttacagctttcaccattggctttgc

SEQ ID NO: 95632 - DNA, 574 bp, Homo sapiens
ctctgcccctgattttcaaaccctttcctctaccccacatggctctatggtccacaggatgcctccaagaaaggcggagaatactttctaaagtcaagaccacccccttcagaatccagcacttgtacaaaactagattttcttttcagagacagggtcttgctgtgtcacccaaggtagagtgaagtggcacaatcatagctcactgcagcctcaaactcttgggctcaagtgatcctcccacctcagccccctgagtagctgggactgcaggtgtgcaccactatgcccagataatttttaaatgttttttagagacaggagtctcactatgttgcctaggctggcctcaaactcctagtctcaagctattctctsgcctcggccccccaaagtgttggaatcacaggtgtaagctactgtgcctggccctaaaactagatttttatgaattgctggtgttcaaattgtggcatgtgagtgtaggataacctttgcacaacagctgaatatgggatcatcatttatgctacatgaaattcttcaactttacagctttcaccattggctttgc

SEQ ID NO: 95633 - DNA, 623 bp, Homo sapiens
tcttacacctcattataatgggctagtgccagcttctctgtgcaggccatgatgttccactttttgtcctgggatcttctctgacagtgtgggagccagcttggcccgtgctcaaccagaacccagaagtgggtgggtgtcacctgaggcagctctcaaccactaggggcagaaccaggcggatamgtgctctgctggtggagagttctgggtggtggtctggatgcctctcaggggtctggcagaattgaaccctagttgtccatggcagtagctggaacaacaccccaatgtactggcttcttctccttcctgggccattctctttactccttcatacctgcttactgggatcatgtcccaaataagccacctgcacccaaatccttgtcttaggctccacttttgagggaatcgatctgccataccttattctctagtacggcctgggtagggggtagctctgcaagagaagttttcccagcagagctccgttctcagagtcaggagatcatggctctgaccttttctgtttcagcgacctcagaaaagtctgcccttcagtctcagtttcccaactggactagccactctttgtgtgatgtccttcaattcagttataa

SEQ ID NO: 95634 - DNA, 623 bp, Homo sapiens
tcttacacctcattataatgggctagtgccagcttctctgtgcaggccatgatgttccactttttgtcctgggatcttctctgacagtgtgggagccagcttggcccgtgctcaaccagaacccagaagtgggtgggtgtcacctgaggcagctctcaaccactaggggcagaaccaggcggatacgtgctctgctggtggagagttctgggtggtggtctggatgcctctcaggggtctggcagaattgaaccctagttgtccatggcagtagctggaacaacaccccaatgtactggcttcttctccttcctgggccattctctttactccttcatacctgcttactgggatcatgtcccaaataagccacctgcacccaaatccttgtcttaggctccacttttgagggaatcgatctgccataccttattctctagtacggcctgggtagggggtagstctgcaagagaagttttcccagcagagctccgttctcagagtcaggagatcatggctctgaccttttctgtttcagcgacctcagaaaagtctgcccttcagtctcagtttcccaactggactagccactctttgtgtgatgtccttcaattcagttataa

SEQ ID NO: 95635 - DNA, 567 bp, Homo sapiens
ttgtgagaacgccagaggatcattcattcattcattcattcagttcttcagcaaattatttattgaatgcsttttattggtcagaggttattctcagcaccggggatgcagtggtagaaaggagacaaatcccatgctcttcagagcatctattccagatgaagaagacaggcaatgagtagaaaaagtaaattattgagtgtgttagaagttaataacgtaaaagtggccaataaacatgtgaaaaagtgctcatcataactaatcatcagacaaatgcaaatcaaaaccacaatgagatatcatctcacaccagtgaaaatggcttttattaaaaagtcaaaaaattacagctgttggagaggttacatacactgttgtttggaatggaaattaattcagcccctgtggaaagcagtttggagatttctcaaactaaaacaagaactactattagatccagcaatcctatccctgggtatgtatccaaagataaataaatcattctacccaaaagacacctgcactggtatgttcattccagcactatttactatagcaaagaca

SEQ ID NO: 95636 - DNA, 543 bp, Homo sapiens
tcctgcagaaaccttctgtctatctttagaaaacagtcctggatgatggaagggcggagagtaacggagcggacacgtgcctgcaaactaggaaacaaatacatcatgtctttaatgccatctgtaatagacaattcaggagccagccaaaactcatttgcacctttgtttgtgccttccccaatcaatagcagcagttaaaccaggatttactgacttctataaagggttacaacagcaatatttaaagaaatgaaactcaacagaaatatttcaatctttctgggcccttcaccaaccattgttgtttggaggtcgcttgatgggaaaggttcattctttttggtgtactctctgtagggggkgtgtgtgtgtgcatggtatgtgtaaatgtgtgcacacccatgtctttgagtacccacacatgagcaggctctcagtctgaacagggctgaagagcaattttgccatccaaagtcactggcccaagctcctgaaatcaatcggaggcctcaagaagtaaggagcaatttaatatagcgt

SEQ ID NO: 95637 - DNA, 595 bp, Homo sapiens
ggaggagaaacgcctctgcaggcgaagtctcttctgatgggagttatcactgagtcaccactcttcatagagattcctgcaggattcccggaactcagggaatgaaccccaccaagggccagggctgctgcctgagccccagagcccctcttctttggtctgggcaggcaccagyggagtggtttttcaggctctggattgaagttcccacctaaataacatctctgggccctggggacacttcctcctcaaaggcccttctatcaaaattatgtactcactgccttagaagccagagagaaacaagggctctctggtgatgctaaagagtcctcaaggctaaggatgcaatttcagctcccagctatcctcccacacagcaaggtcctgtcctgcccagcatgggtgtgagaaacatgggggcatgtaatgttctccccatgtcctgagtttctgaatcactgctggctcagaattagtctcaggagaaccacatggaattgtaagtcattttactttgtgctcagatggttctctgcctcctttaattgttctccctccatgcttctcttctgctccagaataatcgtgccat

SEQ ID NO: 95638 - DNA, 430 bp, Homo sapiens
tcctggtgccatgcctgagtctgatctgtatgtgaagctgttcccactctcagcgttcactgaattgtatttcttccttccatccaacatcagtttctctgggggcaggttaacataacccagtgtttccagaccttcctcatcctcayattccctggggaaggctcgataaaaatgcagatagcctgccccagctctactgaacctgaatctgcaagaagaggtgctaggaatttgtatttttaaaacaaatattgcaggagattctaatcggcaaagcttgggaagtactcatctaataaatgtaacattttctctcgatattttaatacaaaaaatttcaaacatacagaaaaatgcaaaacatttaaagtgaacatgagtatttccacagcctagattctaccactgacatttgaaggtacttgtt

SEQ ID NO: 95639 - DNA, 629 bp, Homo sapiens
gttttgccacttctttccagtggaaaccacaatcaaggctgttgctgccmttcctcactgcctctgcctcttgacccaccctggtgcctccctgtgtggcccctgtgccatggtatgccccctcctcttgggaaccatgaataacgagctgtctctttagtggcagtcatctcctgatttgcttgccttgttaccccttctcacgaatagtgctacaaatgtaagttattatccatttaccctacctgcaggggacagaaatgatcaagtgtttaccaactttgcgctcagtattttacatatataatttcatctaatcatcactactgctactattaaaactaggaggtttttttaaatttagatttggggatacatatgcaggtttactacatggttatattgtgtgatgctgaggtttggtcttatattgattctgtcacccaaatagtgaacatagtaccctataggcagtttttcaacccttgcctcccttactcctttctttcagagtccccagtgtctatggttctcatctttatgtccatgtgcacctaaacttttgtccctactagtaagtaaaaacatgcagtatttggctttctattcctgcattaatttacttaaaa

SEQ ID NO: 95640 - DNA, 635 bp, Homo sapiens
caaggctgttgctgcccttcctcactgcctctgcctcttgacccaccctggtgcctccctgtgtggcccctgtgccatggtatgccccctcctcttgggaaccatgaataacgagctgtctctttagtggcagtcatctcctgatttgcttgccttgttaccccttctcacgaatagtgctacaaatgtaagttattatccatttaccctacctgcaggggacagaaatgatcaagtgtttaccaactttgcgctcagtattttacatatataatttcatctaatcatcactactgctactattaaaactaggaggtttttttaaatttagatttggggatacatatgcaggtttactacatggttatattgtgtgatgctgaggtttggtcttatattgattctgtcacccaaatagtgaacatagtaccctataggcagtttttcaacccttgcctccctyactcctttctttcagagtccccagtgtctatggttctcatctttatgtccatgtgcacctaaacttttgtccctactagtaagtaaaaacatgcagtatttggctttctattcctgcattaatttacttaaaattatgactgctagctgcattcatgttgctgcaaaggata

SEQ ID NO: 95641 - DNA, 546 bp, Homo sapiens
gtgatgaggaactcccacctcccagcctcttctgaaaggcaggcccttttccactcttcggttacacttcccgagtggggtcccttaggggtaatgcttgaactgtgtatttagagccctctgtctggtctcacatttgatgagaacccttaggagttaacgtatttgaggaggcagcatgtgctaccactcagcagaagtgggatggcttatccaggggtagggcaagaaagggctattatttagaggtacccaaataatctccacctgtacaatagaagcataacatgtagcacacagaaggtgactgtcatggtgcttttgcctgctctctatcctctctgyggtcttagcagctgtctcttgctcttgggaaccactttcattgctgtgatttcagtagggttgacaacacccctgacccctaaacctccagtaccagcactgacaaattggactattgcagtttctttggttgggcacatgactgattcaagtcaatgatcagccctaggattttaaaataaataattgggaaagaggtgc

SEQ ID NO: 95642 - DNA, 546 bp, Homo sapiens
gtgatgaggaactcccacctcccagcctcttctgaaaggcaggcccttttccactcttcggttacacttcccgagtggggtcccttaggggtaatgcttgaactgtgtatttagagccctctgtctggtctcacatttgatgagaacccttaggagttaacgtatttgaggaggcagcatgtgctaccactcagcagaagtgggatggcttatccaggggtagggcaagaaagggctattatttagaggtacccaaataatctccacctgtacaatagaagcataacatgtagcacacagaaggtgactgtcatggtgcttttgcctgctctctatcctctctgtggtcttagcagctgtctcttgctcttgggaaccactttcaytgctgtgatttcagtagggttgacaacacccctgacccctaaacctccagtaccagcactgacaaattggactattgcagtttctttggttgggcacatgactgattcaagtcaatgatcagccctaggattttaaaataaataattgggaaagaggtgc

SEQ ID NO: 95643 - DNA, 546 bp, Homo sapiens
gtgatgaggaactcccacctcccagcctcttctgaaaggcaggcccttttccactcttcggttacacttcccgagtggggtcccttaggggtaatgcttgaactgtgtatttagagccctctgtctggtctcacatttgatgagaacccttaggagttaacgtatttgaggaggcagcatgtgctaccactcagcagaagtgggatggcttatccaggggtagggcaagaaagggctattatttagaggtacccaaataatctccacctgtacaatagaagcataacatgtagcacacagaaggtgactgtcatggtgcttttgcctgctctctatcctctctgtggtcttagcagctgtctcttgctcttgggaaccactttcattgctgtgatttcagtagggttgacaacacccctgacccctaaacctccagtaccagcactgacaaattggactattgcagtttctttggktgggcacatgactgattcaagtcaatgatcagccctaggattttaaaataaataattgggaaagaggtgc

SEQ ID NO: 95644 - DNA, 684 bp, Homo sapiens
tgtccgttggacccaaaatagtctgtactaattcactgcaagtccccctctgagctgcacaaggtggaccctctgctgcagccacactgaccctggttttcctttgttggttgtcccagtcttgtctcttgaagctatctttattaggaatgttctcctgcactcccatgttgcctggataacttctattcrctctctggatctcagctcagacatcatgtccaccagaccaaggcaggcccttctgtgacacattctacacacccttaagctttatttacttcagcacatttagccgttgtaataatgtatttattttggtaattttctggttgtcctctcctcactagattggcagtcccacaagggaagagattctgttttgttcctcagcagatccccaatacctagcatagtgccagacacacagtggaggctcagtaagtctttgatgaataactgtatatgggaaataagtattgtatccctgtgtggactccctacagtaatgagaggcatgagacatattggagtggggccaggggagacaaggcagtgatgcctcatctcgggggagtgggattgctgccatcaaatacccaagtcgtgggcctttggatgagggaggcagtctctgtgtgtgtgaatttatgggctacatgtacaattttgttacacgcatag

SEQ ID NO: 95645 - DNA, 684 bp, Homo sapiens
tgtccgttggacccaaaatagtctgtactaattcactgcaagtccccctctgagctgcacaaggtggaccctctgctgcagccacactgaccctggttttcctttgttggttgtcccagtcttgtctcttgaagctatctttattaggaatgttctcctgcactcccatgttgcctggataacttctattcgctctctggatctcagctcagacatcatgtccaccagaccaaggcaggcccttctgtgacacattctacacacccttaagctttatttacttcagcacatttagccgttgtaataatgtatttattttggtaattttctggttgtcctctcctcactagattggcagtcccacaagggaagagattctgttttgttcctcagcagatccccaatacctagcatagtgccagacacacagtggaggctcagtaagtctttgatgaataactgtatatgggaaataagtattgtatccctgtgtggactccctacagtaatgagaggcatgagacatattggagtgsggccaggggagacaaggcagtgatgcctcatctcgggggagtgggattgctgccatcaaatacccaagtcgtgggcctttggatgagggaggcagtctctgtgtgtgtgaatttatgggctacatgtacaattttgttacacgcatag

SEQ ID NO: 95646 - DNA, 594 bp, Homo sapiens
tggatctcagctcagacatcatgtccaccagaccaaggcaggcccttctgtgacacattctacacacccttaagctttatttacttcagcacatttagccgttgtaataatgtatttattttggtaattttctggttgtcctctcctcactagattggcagtcccacaagggaagagattctgttttgttcctcagcagatccccaatacctagcatagtgccagacacacagtggaggctcagtaagtctttgatgaataactgtatatgggaaataagtattgtatccctgtgtggactccctacagtaatgagaggcatgagacatattggagtggggccaggggagacaaggcagtgatgcctcatctcgggggagtgggattgctgccatcaaatacccaagtcgtgggcctttggatgagggaggcagtctctgtgtgtgtgaatttatgggctacatgtacaattttgttacaygcatagattgtgtagtggtgaagtcagggcttttagggtatccatcacccgaatagcctacattgtacccaatcacttatttctcatcctctaactccctcctacccccttac

SEQ ID NO: 95647 - DNA, 502 bp, Homo sapiens
tccattgccatttaggtattggttctttttccccaaacatagacatcacctcattgctgtggctaattgcatttttcttcctagcctttgacaaccagacctttgttaatgctattcaccaatatatcagactcaggtcatccatccaaaacatgacaaaagacccagatgctcatgtaaattgcactccccaaaagtactgccctcttcctcagggcagatagattcatgaccccctcccatttttgttcactccctttgttttcacttaatctgtcatgcttgaaaaaagtggttatttatggactgtaagaaacattatgcttttttacactgtaaatcaaataatcaagatgattatgaagatataattttctattcaaaattgtaaaacagcctgttytagttgaacttcaaaatgagtccctttccagaatgaagacttccttctattcatttttttcaccccttcttgaactcttgagttaaaaccaagttcaat

SEQ ID NO: 95648 - DNA, 514 bp, Homo sapiens
gagtgatccagctctgaagaatctagccatgctccccaggtcccaagagactgatttgttagctagatgccaatatagccacatacaatagaagatgcttctaagtgtggcccaggctatttccttcctaatagcaggaccatgagaaaaccaaatgagtggtcaaagataacctgtgggcacagtgtcaggattaatggartgggacagacagtcttgtgaaatgtgccattcaggctgcaacagagacaagagaactcttccaaactccacccaagaacacttttcaggttaccagaatagttgtgtccttcaaaaacagggtcttgttctctctgtttcgctagtggtgaagaaactggcaaattattttgggaaaagatggagactttatctagtctttatgcagcccccatcttccttagggtattattctaggcatgttataatactcaactcatagcctatcttacttgtgtcagtgacatcttgtccaaagccccttaccaaatct

SEQ ID NO: 95649 - DNA, 557 bp, Homo sapiens
ctttataacaagtgtttggctattctattttgtaggaaccaatgtcacagtgatattttaatatttgaggctaataacaaaagcaatgcagcatatgtaaatgaagaataggagcaaaggatttcaaatgatttagtttttcatgcagttagtgacccacatcacaaggcactccctttgatgccctctggaaagcagcaattctatgttgttgcattctacacagaactaagtttgactgctacatacaacaactgggaaaacttccttttataaagaaaatgtctccctcaagggtgccaggtratgatgatgatgatgatgatgatgatgaagatgaagaaaaaggaggaggaggaggaagaggagacagaggaggagggagggaggggagaaggaagaaagaaaatatcaaatgattactgacttagattcttggattgtttcatttatcttctacttcctaggaagattaataattgatattttctctcaggcataaagaggtaggaaaacattaaaggtttttaatattcatgcatcagaatgaagtttaa

SEQ ID NO: 95650 - DNA, 564 bp, Homo sapiens
gaattctgaggggaactagtctcaacttcagcatctcctgagaactgctgggaggcttgcatatctgggccaccagcccccatcccacagcaggtacagaggcggcccaggctcagctccatcttctcctgctgcagttggggaactggcctggaagcctcgcctgtctgggcctatgggacaggcttccagacttgrgtccctggccaatattctcactcaacttgggtacatgccttggatcttcaccaggtccatctctgccagagtgcatgccaactatggaacttttgtgaaactgacaacaaatatgggcttagggcaccctctagtgtcggaacagctgcactggtcagagtctttcataacagtcggcttggataactgaacaggcccactgaagaagcatgggaacatttaaagccagactgtgaagattaaaataaatacctaatttttcgatgtgcagacatcgaagtgcagccacaatcaccaagtacaatcggaattatgacctcactaaacaggcaaaataaggggctagtgacaaatcccaaagagaag

SEQ ID NO: 95651 - DNA, 562 bp, Homo sapiens
tgtaagtcatattttattattgttatagcccaacaaattcttcttgcctgctgcacagaaaaagcaaatacatggaaacatcaggtattatagtagagaaagaatttaatcattgtgtggtgtgaagcaagtaggatgggagatatttctcaaattcacttccttgagaactgagaggctggggtttttaaggataatttggtgggcagggggctagggaatgggtgcggcygattggttgggaatgaaatcatagggatgttgaaactatcttcatgtcccgagtcagtttctggctggcaggggtgggtaacaggacctgtggacctgtcgagtcagttctttggtatgggtcatggattcaggtggcatgagttggtctacctgaatgcaaaagtttgaaaatgatctcaaagaccagtcttaggttttacaatagtgatgaatatacaggagcaattgagaaagttacaaatcttgtgacttctggttatatgattcctgagcagtgagcagttatggaaaagcaatctagggaacaatggctggttagtgtttaact

SEQ ID NO: 95652 - DNA, 562 bp, Homo sapiens
tgtaagtcatattttattattgttatagcccaacaaattcttcttgcctgctgcacagaaaaagcaaatacatggaaacatcaggtattatagtagagaaagaatttaatcattgtgtggtgtgaagcaagtaggatgggagatatttctcaaattcacttccttgagaactgagaggctggggtttttaaggataatttggtgggcagggggctagggaatgggtgcggctgattggttgggaatraaatcatagggatgttgaaactatcttcatgtcccgagtcagtttctggctggcaggggtgggtaacaggacctgtggacctgtcgagtcagttctttggtatgggtcatggattcaggtggcatgagttggtctacctgaatgcaaaagtttgaaaatgatctcaaagaccagtcttaggttttacaatagtgatgaatatacaggagcaattgagaaagttacaaatcttgtgacttctggttatatgattcctgagcagtgagcagttatggaaaagcaatctagggaacaatggctggttagtgtttaact

SEQ ID NO: 95653 - DNA, 494 bp, Homo sapiens
ctgtcactgcccttttaagataggaggatccaaaagttgtcaacttgccactaaattgttgtaatctccctgagaaacagagctataatttttatctgtgttgtcgctggctgatcgatcagtcagatagcgtaccagattagccttagtgagtagtattccatgatgttgagctcatagtctcaatatctgccactctgatcaatccttgtttgcttggaccaacactgaagtggatgatgacaaaggctgacaggtytattggctgatttggttttttttttttttttttttgtctacttggatttttagtgcaccttccatggctggaggcttctgtgggtattaagttataaagctctttatactttatacaaaatcttatatatccacacacatgcctttactccagactactttgtctctgatcttccaatccactttcattgtcccttgatcagctgcccaagccatttgccactgctcatgaattc

SEQ ID NO: 95654 - DNA, 562 bp, Homo sapiens
cttcaatgttgggtgtgtatatgtttagaattgttatatcctcttgctgaattgagtcctttatcattatataatgacctatgacctttgtctctttttacagttttttacttaaagtctgttttacctaatataagtatagctactcttgcttgcttttggttttcatttgcatggaatatctttccatccctttactttcagtctacatatttctttacagataagatgagtttcttgtaggcagcctayagttgggtcatttttaaaaatccattgaaccagtctatatcttttaagtgaaaaattttgatccatttacattcaaagttattattatgtaagggcttattcctttcatttgattaattgatttctggttgtttatacatcctttgttcctttctttcccttgtttttcattatggtttgtggttttctgcagtggtaacctttgagacccttctcttccctctttgtgtgattgctttactagtgggtttcatactttcatgtgttttcatggtggtagatgacatcctttcacttccaggcgtaggac

SEQ ID NO: 95655 - DNA, 674 bp, Homo sapiens
ccagtgtcagagttaaacaaaagcaagattttctaattcctaattttgactattttgttttccagggcattaaaccatcttcttaactggttaataatttgagagcagcctatgaataccagtttctaccgaggcatgctttctgtcattaagtgttccagcaaactgttaattaagattgttttgagctgtttaccaatttaggtgatgtcagatacttcccttggattctgttagcctcttgggatgggagaaaatattgttgactctgttctgtggtttgaccatctgttctaaatcacaattgtgaccgtcatttggaaatctataagctgacactgttaccagaaytgtacattaaaaatgcattaagctctttatgggtcatgagccctttcataagctctccttaattttataggaagttcacagagagcactacattttgtagttggaaggtataggttaaaagaatgaagcagttccactcttgttctcatccccaggcattataaaagctatcttgttaaagaggtctgagttggaaataaagcactggaaggtgcaatgtgatggccaagcacaaaacactcagaaagagttgcaagtaggaatgataccatttgtgttgccagttatgcttacaaagttcccctgtaaggcacactgggtgc

SEQ ID NO: 95656 - DNA, 399 bp, Homo sapiens
ttcaaagtaaaatatagcataagactttagaagcaggttctacatattaagtaattatttgagaatatgccattgataaagctcttgagtgttagaggcgagatttcccttcaattttaaaaaacttttaaartcttttaacatcttagcaagtctggataaacaaagtcaaagtcatatagaactacttttgttctcttaggcttttactttttgtgtttaataaaaaggtttgcaaaatactctaggaaaaataataaaaggattattaacttgacattaatgtaaaccatctaaacattacagaaatcaagaaatacaaatagatgacattattttattcttaggtttttaattatattgctttaaacatgtaatgtgggcagtgtagatgttaat

SEQ ID NO: 95657 - DNA, 422 bp, Homo sapiens
gcccctgcttttgcctcagcccacatsttctctattagtaagagttaggagaggccaacctcacccagcacagttttccccctttcttttctcctcagggaggcctcagccaactgccacaactcctgagtgaaagggattgcctgctcttcggacattctgggggagggtgaagacaaaggtgaagtctcagcctccagtgtctctgaaacttaaattgcctcaagtgctttcaaaccagcaaggagctcatttagaatttggggataagccatggccctcatttggggaaatttagaggcacatttgaaggagtaaactcatgtactataactggacatagggccaaattctgtctttggaaaagtcagtgaagcagacacaccctgtgccctctaagtgaattaatgtactgtgttcca

SEQ ID NO: 95658 - DNA, 614 bp, Homo sapiens
cattttggtatgttgtgtttttagtttcattcatctcaaagtattttccagtatcccttgtgatttagtttttgacccattgattattaaagaatgtactgtttaattttcacaagtgtgtgaattttccagatttttctctgcagttgatttctaacttcattctctagtggatgaagaatatactttgtatgattttcagcccatttaaattgagacgtgttttgtgatctaacatatggtctcttctggagaatattccatgtgcacttgagaagawtgtgttttgctgtttttgggtggaatgttgtacagctatgtgttaggtctagttggtttatagtgttgttgagtcttctgcttctttatcatctgtctagttgttttacccgttattgaaagtagggtgttgaaggtcaggtattactgttcagttgttttttttacctttcattttcttagctttgtgcaatttggggactcttttattagggacatacgtgcttaaaattgttctatcttctcaatggattggtccttcagtcagtataaaatatccttctttgtggtaacaatatgtcttttaagtctgtgttttctgatattagtgtagc

SEQ ID NO: 95659 - DNA, 614 bp, Homo sapiens
cattttggtatgttgtgtttttagtttcattcatctcaaagtattttccagtatcccttgtgatttagtttttgacccattgattattaaagaatgtactgtttaattttcacaagtgtgtgaattttccagatttttctctgcagttgatttctaacttcattctctagtggatgaagaatatactttgtatgattttcagcccatttaaattgagacgtgttttgtgatctaacatatggtctcttctggagaatattccatgtgcacttgagaagattgtgttttgctgtttttgggtggaatgttgtacagctatgtgttaggtctagttggtttatagtgttgttgagtcttctgcttctttatcatctgtctagttgttttacccrttattgaaagtagggtgttgaaggtcaggtattactgttcagttgttttttttacctttcattttcttagctttgtgcaatttggggactcttttattagggacatacgtgcttaaaattgttctatcttctcaatggattggtccttcagtcagtataaaatatccttctttgtggtaacaatatgtcttttaagtctgtgttttctgatattagtgtagc

SEQ ID NO: 95660 - DNA, 619 bp, Homo sapiens
ttcttgtgcatcttccaggaatattctatgcataagtacaatttacataattcattcaaaattcattcaatatacactgaacaccaacattagctcactacgcatctattccatgctttattttttttttttacttartgatatctagcagaaagctccccatcttagggcagtttggtctgattcttttttcggtccatataatattctattgtctggatgtatcatgttttatttagcaaagactcggtgaatattaaagatgtttttcagatattctttatacatacataatttcttatgcatgcaagtagaactgtatatgctaacaaggttcaaaaggaatataatatgaacaacatatgtaagtttcaatgttctagcagccacattttttaaagtaaaagaaataagtaaaattaatcttaacagtatatttaacccattatatccaaaatatgtcatttcaacatgtaatcaattaaaaaatgaaatattttacattattttacttatactaaggctttaaaattcggtgtgtattttacacttaaattacgtatcatttcagatatgccacatttcaagtgatcagtaaccaaatgtggtcactggctac

SEQ ID NO: 95661 - DNA, 672 bp, Homo sapiens
agagtgtgtgtgtgaggagtgagactgataggcacaataccagctggttggattcaaatttggaggacctaaagcaacctggagaatgagctataagtcttgaaaaccactagcataagctgacattatatttrcatataatatgatcattacttcagagtattcccctaaaatgtacctgcttattactccatatgactgctacagcattataatttattgtaataggggatgaggctatccacagaacatcccaagagggatgtttgttaggcaattggatacatgtatgtgcatgagtatgtatgtatatacatccatatatatgcatatatctgtgtgagattgataggtagatggatagagagatacacatagagaggggaaagagagagaaattggagtcagttgattgactgttttgctcattttctgtggcataaatttaagcatcatcttacctggattaaattagcaatattttcttgcttgctcctcagttaattacactttaattagttaaaaaaatattttttgagtgcttactgaatacagatgccattccaggcatggagatagagcagtagaaagacagcaggggggctcctgctttcctggagcttacagtccagtgaggaagacaaacaccaaatacattaagcacataagtat

SEQ ID NO: 95662 - DNA, 496 bp, Homo sapiens
agaacagggaccaagtttgttttagacactgctttaacatcttcctctataagagtacctggatcatagtagatgctcaatagatacgtgatgaatgtatgaatgattctrtcaagaggtaatctgtttataggccatatcagtattgaaaacttcacttgtccatctgtttaaccaatatgtcatttcttgaattttcctgatcaatactaatgactcattcattgccttgcatttatgttatccatgaaacataactgtatatttatatattaagtatatatttatgtacagttacattttatggataacattttcacaggcagaaatgtgtatataaaaataatttccaaagccctatataaaatgtccaaagagatatctctttgtaacatagttacaagtgtaactacaaagaaatgaattaatttctccaagccacacaggaaaatcagcctcattatttcaatagcacagtgttaccaaaatagcaagc

SEQ ID NO: 95663 - DNA, 553 bp, Homo sapiens
taatgatgctagatattagcgattttattagtaatacttgaaataatgagcaagggttctatatgatgaatctttatawttcagtcctaaacaatcctgtattgttaaattacttggtcttatcaaagcctaatcagagaatatgtgacattagttgtcagatttgagagcttgaatgcaagattctaactatgaggaatccaaagcaggaaacagcccaggtatctgactggcaatgctaaggcaatagattcaaaagcggaatgaggagcaagtcttgggaaacaactttatttgctaggtagataaaagctagattaatataatggtacatctggaactttggattggactttagtaattattatatcccaattccattagttcacaaatgagataaccaatttttttttaattaagagatttgtccaaggtataccaataaataaatagcattaataggacctaaatctttttactccaaattcaatgttttttctactttactcctttgcttcatctaaataattagacaatatcctagcatgccaat

SEQ ID NO: 95664 - DNA, 599 bp, Homo sapiens
cattaagaaatatcaacggataactgacatcgttttgttaagaagttaactgtatygtagctcactactgccagagcggcaatggatgtacaacgaaagagatgaaaaatacaaaagttattaagccacctgattaaaagaaaaccaatatttaaaggcatttaatagatatcaagtataactttgaggagaagaatcaatctgtattaccaaaaaaaaaatgttttgattttctgtaagatacaatgaactggtacattaaaagtcaattttgtgttactgcagtatcttttaattcttctgagttgtagaatcttagctatttttctttgtgtcaaactctgtcaatacattatttccaagaaaggcatttaattcattcttgttctgatacatttgacttcaaattgtaaatacgtacaattttcatttcctagtactcttgcaaagtcaaaaaaaaaaaaagagcatttatatggtgtcgctaaatcaactatagtattatcccaaaatatattgacttttttctctttgtatatgactcaaagcataattaattttgcccaccagttcagcaatcccagaaatctattgtgttg

SEQ ID NO: 95665 - DNA, 599 bp, Homo sapiens
cattaagaaatatcaacggataactgacatcgttttgttaagaagttaactgtattrtagctcactactgccagagcggcaatggatgtacaacgaaagagatgaaaaatacaaaagttattaagccacctgattaaaagaaaaccaatatttaaaggcatttaatagatatcaagtataactttgaggagaagaatcaatctgtattaccaaaaaaaaaatgttttgattttctgtaagatacaatgaactggtacattaaaagtcaattttgtgttactgcagtatcttttaattcttctgagttgtagaatcttagctatttttctttgtgtcaaactctgtcaatacattatttccaagaaaggcatttaattcattcttgttctgatacatttgacttcaaattgtaaatacgtacaattttcatttcctagtactcttgcaaagtcaaaaaaaaaaaaagagcatttatatggtgtcgctaaatcaactatagtattatcccaaaatatattgacttttttctctttgtatatgactcaaagcataattaattttgcccaccagttcagcaatcccagaaatctattgtgttg

SEQ ID NO: 95666 - DNA, 599 bp, Homo sapiens
cattaagaaatatcaacggataactgacatcgttttgttaagaagttaactgtattgtagctcactactgccagagcggcaatggatgtacaacgaaagagatgaaaaatacaaaagttattaagccacctgattaaaagaaaaccaatatttaaaggcatttaatagatatcaagtataactttgaggagaagaatcaatctgtattaccaaaaaaaaaatgttttsattttctgtaagatacaatgaactggtacattaaaagtcaattttgtgttactgcagtatcttttaattcttctgagttgtagaatcttagctatttttctttgtgtcaaactctgtcaatacattatttccaagaaaggcatttaattcattcttgttctgatacatttgacttcaaattgtaaatacgtacaattttcatttcctagtactcttgcaaagtcaaaaaaaaaaaaagagcatttatatggtgtcgctaaatcaactatagtattatcccaaaatatattgacttttttctctttgtatatgactcaaagcataattaattttgcccaccagttcagcaatcccagaaatctattgtgttg

SEQ ID NO: 95667 - DNA, 538 bp, Homo sapiens
ggactgcagtatagactcaattcagtcagccagaaatgaaacccaagtcaccgttcctccaagaaagcagacatgtgtcccatcacatgccctctcagctcaktcttccccagactcaactcaggtcccacccctaatgggcgaagatattcaacttggcaggagcagatgatttgctacatgtggttataaggtggcttctgggcaaaaccgtgactccagaaatgtgttcatgacaccttgagtttatttcagagtaatgtgtgttcagatacctttctttaccggagatacagcagctttcccagactggggttaccatgtttacacactgagggcttctgctggcagcaattgtcagcctgcttagcacagactggcacgctccacaaacccagtaaagagttaaacgttctttgcacttgactcagtggcttctcttcaccacacactcccagatcccaccattctctgagccacccgtgcagccaatcaaagcaaaggaaggaaattatcctggccggctgacagccacagc

SEQ ID NO: 95668 - DNA, 618 bp, Homo sapiens
ggatattattcatgatatcctggggaaayatttctctttgaaaatcacagtgggtgtacaccacgtgtgtgcaccctctgatattattcataatatcagagggagatattatccgagggagatattattcgtaatattgtagggagatattacagctaatatcacagtaaatgtacaccatgtgtgtacaccctgtgatattaataatatcctagggaaatattactcctaatagcacagtgtgtgtacaccatgtgtgtacagcctgtgatattatttgtaatatcctagagagatatttctcctaatagcacagtgtgtgcaccccttgtgataatatttgtaatatcctagggagatattactcctaatatcgagtgtacaccctgtgatattattcataatatctttcgaatatattgcttctaatatcacagtgagtgtacaccttgtgatattatttgtaatatcctctggagatattacttttatatcacagtgggtgtacaccatgtgtgtacactctgcgatattattcatattatcctccaaagatattactccaaatatcaaaatgggtgtacaccatgtgtgtacactctgagatattatttgtga

SEQ ID NO: 95669 - DNA, 553 bp, Homo sapiens
ataatatcctaagaagatatttctcctaatatcacagtgggtgtacacgatgtgtgggatagtatttgtaatattttatggagttactactcttaatatcacagtgggtgtacaacgtgtgtacaccctgggatattattcatartatcttgttgagatattactcctaatatcacagtggttgtacaccatgtgtgtacacctaggatagtattcataatatcctggggagatattgctgttaatatcactgtgggtgtacaccatgtgtgcacaccctgggatagtatttgtaatattttgggagatattacttttaatatcatggaatattattcataaaatactggggagataatgtcactgtggatgtacaccatgtgtttaaaccctgagatagcattcataatatcctgtggagatattagtcctaatatcacagtgtgtgtacaccctcggaaagtgtttgtaatatcctggagcgatatttctactaaaatcacagtgagtgtataccatatatgtacaccctgggatagtatagtatttgtaa

SEQ ID NO: 95670 - DNA, 534 bp, Homo sapiens
ttcaacaaacactgcctggtcacctacttcatgtcaaaccccgtgctgaatgctggaggggcatcggggtcttcgcaagtgctgtttcctccaccctcctcccacgtattcacaaggctcccctcctttctgcattaaggtctctgtgcaaaagtcctcatgtcagagagggttcctgtgcattcattaatgctgtccaccccacagtccagttttcctctcgttccaggcacatggcaggagagccctttcctggccccttgaatcagttgtggcaatcaaatgtgagctgaagcccttaagagccagcgtatgactcaccacatccccctccccacctacaccacaacaaccagccatgctccatctggkcccacaagtgaggcgatatggcgcagaagtcgtagccaaccctcggtgggcacgttgcatgaacgagaaataagcctttattgttataagccattaagatacaggggctgtttgtgcagcagggcctcatccatcctagctgatccagctttcctgaaaccc

SEQ ID NO: 95671 - DNA, 535 bp, Homo sapiens
gtggtcagctgtgtagcagaatataaattttaaaaacccaaacgattaaactgtcacttcctattagacaaagcacattccaagatgcaactaatgagggaagagaaataaggaaagaaagtatgtttgacagaggcagtgtggctatagctttctccacttctgattgacgacaagatggtttctcctgcaagtaggcacagatttgctctttcaacccacgtatactgggcactgaggggaggaagatgaaaatggctacagcaagggtatagaagaggaataaattcacagtcatgtggggaggccattctgtctgtcttctggcataaaaaaagactgagtgcataggaggcagaaggcgattgcttcaagcctaagaaatggaaaaggcaccttggagaacttgacacttaaaacttaaaggacttaaaggcaaagcgggactaacaatgacatgtttcacacttgtatttcttcttacagttttcagggttttcatacaccttayttcattcgatcctaataagaaccc

SEQ ID NO: 95672 - DNA, 535 bp, Homo sapiens
aatacaatcctggacctagccccttctcctaactcactattttgtttgaacatctactaagtacctactctccctcaaaacaatgttctgagtgctggaagtatagaatgatgaagtcatcaatacaagcgggatatggtctccccaaaccaagagaacaggagcacacagcacaagtgggcgtggaccaagggcatgtgaactgtggatgggwtgtagacttgagcaagttcgtttctagcttctaaattccaccccagcaagtaccccagacctggctttaggaaccacgatatggcagcatgaagtggggacctcatgacaacacattctaagtaggattttggtaacaagaaggatcaaagccccatctgcatctctcatgtcatctctgcattgttgatgattcatctttttcatacaactgcttggagggcatcagagactttcccacattcagcggagccagagattttggctgttttaatgaattcttctaaccggttgcaccgccccaaattgaccgtaaaagtta

SEQ ID NO: 95673 - DNA, 565 bp, Homo sapiens
gtgtggatcactattttatcccaaggtgcctgggattcagcaaagaccttgtttaaggaattattgatgacaggcagcgactctcatgtgctgagaatggcagacaggggatgggcgtttctggtctagcttggggtgggaaaaaagccatatttggccccatgttgggcatctttgccctaagggattgcagggagcaggcctacatgagaatgttctcagatgctccaagtgcagtattgcaatatctgcttgaacatgagtggacatgcttacacgtcagtctccacatgggctgtttgcctgcaatgattctccccagataccccatggcacccttcctcacctccttcacgtcttacccaaatgtcacctgtggcagatgttgtccctgcccatgtgccctggacctctaagtgtttcctggccatcttacaactgccttatctgcatccgtgcccaagggctctgcacacctccataargaccttcacagactagagagcagccctcaaacaatgactgctggggcatcaataccccacctcctctgccattgggtggg

SEQ ID NO: 95674 - DNA, 567 bp, Homo sapiens
tagggaggatgtggagaaattagatgtgaagaactgacacggtgctagagggagtttcaattggtacaaacactttagagaatggtttggcattgcttgataaagctaaataaatacatactctacaaaccagcaattcactcctaagaataaaccctaggaaaactcttgcacatttgtgtaggtgacatcctaaagcgtttatagacagcattgttcaaaatccaaaaagaaaaaaaaactggaaacaatccaaatgtccttcacagttggatgaataaataaattgttattattcatacaatagaatkaatataaacaacactgaaaacaagtgaactgcagccaaccccatcagcaaggatgaatctcagaaacatattgggccaaataagtcacagaacaatatctgtagtgtgattccttttacataaaatttgaagaagaataaactaacaatgtattgtttagaaatatattcatagatagtaatattataaagaaaaaacaaagaagtggtgtttgccaaactcaggatagtgtttattttagagcagggaacagggg

SEQ ID NO: 95675 - DNA, 567 bp, Homo sapiens
tagggaggatgtggagaaattagatgtgaagaactgacacggtgctagagggagtttcaattggtacaaacactttagagaatggtttggcattgcttgataaagctaaataaatacatactctacaaaccagcaattcactcctaagaataaaccctaggaaaactcttgcacatttgtgtaggtgacatcctaaagcgtttatagacagcattgttcaaaatccaaaaagaaaaaaaaactggaaacaatccaaatgtccttcacagttggatgaataaataaattgttattattcatacaatagaatgamtataaacaacactgaaaacaagtgaactgcagccaaccccatcagcaaggatgaatctcagaaacatattgggccaaataagtcacagaacaatatctgtagtgtgattccttttacataaaatttgaagaagaataaactaacaatgtattgtttagaaatatattcatagatagtaatattataaagaaaaaacaaagaagtggtgtttgccaaactcaggatagtgtttattttagagcagggaacagggg

SEQ ID NO: 95676 - DNA, 568 bp, Homo sapiens
tcagctttagtagctattccccaataggagaaatgttcacttttgtctcagtctctagaccaggtattctcagattcagcaatatggaccttttgggcaggatcattttttgttattggagactgtcctgtacattgcagtatgtttagcagcacccatagtctctatgccagtagcaccacctctcctcaagtcatgacaatcaaaaacatctcagatattgccaaatatcctccggggtgggggtcagggacaaaacagtcttccctcctgctgagaactgctctttatagtgtgagttctgtgaggacagaaaccttccctatttattactccaaggccaggcgagcaataggcacttaagagatttttgtcttttaaaagcagccatgagcgtggaatctccccagatgatttgcctcttctaggacagagtggtcctgggcacaggccatggctgaccaggtcrggcccatgtggtgcatggcagtggctagggtccctgagttaggggagagtggccaggtcctgtctccatcagcatgcatttgcagggactggtctgtgg

SEQ ID NO: 95677 - DNA, 380 bp, Homo sapiens
ttgaaaattccttcttttatggagccaaggtcctcattttgattgtgagccattggcttgaatttggtaccctggaaccacacarattatccatagaaataccagcaggtatggatttaaagtgatagaaagcagtgacctcccttagggactaaggacatttgccaagaccaatgggctgctcattgctttcttgatgttgtgctcaaaattggaccaagtctaggttctcatggccagagctgtgttgcaagttgaaatgctgagagctgagaagcctggggtggagatgacagagcccaagcctttcttctgtttacccattgtgcattcagggcacatttgagcatgagtgaactgttagccaaagatccaggaat

SEQ ID NO: 95678 - DNA, 584 bp, Homo sapiens
tagctgttgcgtaggggagacagktgttgacttaaccctcaccctctcccacgtagtttctgagttctgagtttgcctgagaacaggacagaaatgtgacgagaggatggggaaggaaggacgtgctgatttctcgagagaggcaaggcagcctacatgagtcctgggctgcaggaggctctaggaaccctggggcctgagactgaggtccagggagaccctaattcctgcaccccacccctcctggttccctccagatgggaggcatggaggctgtcatcacgggcctggcagatgacttccaggtcctgaagcgacaccggaaactcttcacatttggcgtcaccttcagcactttccttctcgccctgttctgcataaccaaggtgagtaggggctgggctctgggtcacctgggggcctctgaggccgcatttcaataaagtcaaacattcctagccttagaactggggctgagctcagggagaacaatgcaggatccagcatcctcaattcagcggcctgacccactagggttaggcccagtagtcttcttccatctctgatgctgaggattccattca

SEQ ID NO: 95679 - DNA, 515 bp, Homo sapiens
gcagttgcaacactggctggccatctgagcctgcctggaggagaaggaggaacccccatgccaatgtccaggtcacaggcatccgctgcgctcccacctcggacaccatcttgggattcctcccctggaagttgtcctttctgatcctctcttcttttcccatttacaaatgatttcgtgactgtagtttttgttcaccttctgtgcatctggcctgggggctgttagctcagaggagaggagcaaacaggaaaatgacttctgttctgtccccgctgttttgggggaagtctctcccactttgggatcctgctgaagctaggttcatgaggtcggaaatccccaccacatttgcctagactttgggcacaggagttcttagtccaccaaatcagagagaggatgggcttttgatcagatacccccccccaaaaaaaaaaaaaaacwaaaactaaagcaaaaatcaaacaaaatctggctgagtttagtggggtggttggggaaggtacatagac

SEQ ID NO: 95680 - DNA, 559 bp, Homo sapiens
gtacaaaggaccctacaggcatcagagaagaccccattcatctcagcagccaggcatttggagggtttccagcagcccacctctagctgccttcttttctttccttttttaaaaaataatatttactgtttttattttctgactgcaaatgtaatgcatacttattacaaaaaaggtaaagtattatgatttaaattttgtttgtattccagtttttctgcctgttgctatactttcttcctttaaaatggaatgttaagttcagataatttggatgcttgctttgctcattaagtatatcatgagcatcattctatgccattaaatagcatagcctgatattagcagctgcatcacatttggtattgcaccacaattaatttccccaagcttttatctggggtcattaggttacatatgaagtttttgataatatagagagcactgtgrtgaatattttatagtgaaacctttatgcccattcataattattttaggataagttcccagaaatgacatttctgagtcgaaaagtgtatatcttttgttaaaattcctt

SEQ ID NO: 95681 - DNA, 574 bp, Homo sapiens
attgcagtgagctgagatcgcatcactgcactccagcctgggtgacagagtgagaccctgtctcaaaaaagaaaaaaataaattatcacaagacaaaatttgtrcttatcaggagttcacagttaagacatatataagcttacttggtgaaattagaaaaagttatcagataaaacattcaggtttaaacactggtgagggtgtgggaatttgtggagccttggaaacacactcattgaatgacctcatctacctggggatgtgaagagggaaatcctgtgattcctccattgtctgacttgatttccttttttccttggctgtggcaacatgttgaagtgctgtgagtcaccaaaagggggaacgtgagcaactctagaaatgccagtgccagtgagttacagacaataaagcattgaccgcctttagctcacccctcatcaagtctgttgaaaacttgtaaaattggacagctagagctaccttgattttttggtttccttttaacagctgactctcttcacaggacagttgggctctacatcaggattgcacccaaaactggaatatcact

SEQ ID NO: 95682 - DNA, 524 bp, Homo sapiens
  misc_feature (1)...(524): n = A,T,C or G
agatttccaagcaaactgtggaaggtatgggctggtttcttcttgctgctaaaaagaaaaaagattaagaaaagaactgttaagcaggccaggcgcagtgctcacgcctgtaatcccagcactttgggaggctgaggcaggcggatcacctgaggtcgggaggntcgagaccagcctgaccaacatggagaaaccccgtctctactaaaaatacaaaaattasctgggcatggtggcacatgcctgtaattccaggtactcccagctattcaggaggctgaggcaggagaatcgcttgaacccagaaggtggaggttgtggtgagccaagatcatgccactgcactccagcctgggtgacagagcaagactccatctcaaaaaaaaaagaaaaaagaaaaaaaaaactctaagagatttacttacaagaaagcatgctccggagaaaaagctgaaggtaggactgcacatattgctaatatctcaggaaaatcaaaatgccagagtattgagtattcagtcaca

SEQ ID NO: 95683 - DNA, 569 bp, Homo sapiens
tcagccacgtgcaaccagagaatagttacacaaaagacaaagcaggcaggaaactcaaacccactcagcaaaggtgtgtgatgcccccacctctgccagaaccggcggacctgagggctatcccctcgcctcccctccccacatgctctttgctcattttagatccatttctaacagatcagtcttcactctgcgatgcccagattcacaggctcaacttctcactgccatccataaacagggaagaagatatgttagcaaggtgtggagagacagckttcgtgcggttgtgggtctggagaagggtcagtcatccaggtgcagtcatcagctcaccctccccaaaccaaaatccttcaaatacctgatcaagatggatttggaggaaaggttgtatgggggagtgaagagaagggggacccctggtggtgactgctatccacagcaatccagctttgaccccaaactcatccccaccccaaagagccaaacctctgggctctgcgtggtggctcatgcctgtaatctcagtgctttgggagattcacaagaagccaaaagtcagagac

SEQ ID NO: 95684 - DNA, 606 bp, Homo sapiens
tgtaaataatcctgtagtagtgtgggggtaaggtgtcggggagggaggcattctacagtcctaggactaggtctcagtctcttagtgagccctgtgcctctggaatgtgaacttcacaagtgtttcttagttccctctccccctgcccggtggaatatgatggctgaagtggactagggttgggtattttctttcctcaggtcagttaggctctggtaaaacccaagcaggttatgatctggtaaaacagttcctcctgagggcagatcttattaagaacagaatactgtgatatatttcaaaatggttctttttctccctccttctaccagaagcaggtggcaatttttgtccaatattcactgtaagaactggtagagctccaggagaagagagtcacacaaaaacrtgggggaacccagtgactcggccctcctcatctattagacttgtctacatggaaactccagcaatttgtcaattacagttccagttttcctaccctggcactggctcccacagaagtttccactcatgagtttctgctccgaaaagtattgattctcagtattttcctgttggtctctctaattttgtggatatcag

SEQ ID NO: 95685 - DNA, 585 bp, Homo sapiens
tgtggttgggaaatcatctttacttaataatttacttaatcattatttgcctgctatgtgctaggcactgacctaagcacctgggatatatcagtgaacaaaggcaaatttttgtagagcacacatttaaatggcaggtggggggaatatgataaaaaaaaaccrtaataaataaatgtatagtatgttagaaagtgatgaacactgtactaattgagtgtggtgaggatgtaaaagaatggaggaacaggttgcaattttaaatagggtgcccagcatagtcctcatggacaaaatgttgtttgagcaaagacttgaagatagggaggctgctgtgcaggtctctagggaagagccttccaggaagacaaaacatccagcacagaggccctgaggcaggagcatctctgcacatttgaggacaagcaaggtcagacagctccaacaaagcaggagaaggggaaaaaggtatgtggtgaggtcaaagaagcatgtaggcctctctgaggacttcagactttactctgaagccacaggaggatcattttaaaatattagtacagcgtatgctgttctaggtttagc

SEQ ID NO: 95686 - DNA, 572 bp, Homo sapiens
ctttgttaagtgaaaaaacaaggtgaggagcagtgtttatagcatgyaatattttgcagaaaaataaaaacacatatgtttatttctttatataatcatgagattctgaaaacagactcaagaaagaacaaaagaacaagttattggtaggagaacttgttagatggggcacaaaagtgaaaggaaactctttactataaacccatatatatataattttattttaagttctgggatacatgtgcaggacgtgcaggtctgttacataggtaaacgtgtgtcatggtggtttgctgcacctaccaacccatcacctaagtattaagcaccacatgcattagctatttatcctgatgctctccctcccccgacaccctccaacaagccccagggtgtgttgttcccctccctgtgtccatgtgttcttgtcgttcagctcccacttataagtgagaacatgtggtgtttggttttctgttcctgaattagtttgctgacgataatggcttcaagctccatccatgtccctgcaaaggacatgatcttcttcctttctacagccacatagtatt

SEQ ID NO: 95687 - DNA, 572 bp, Homo sapiens
ctttgttaagtgaaaaaacaaggtgaggagcagtgtttatagcatgtaatattttgcagaaaaataaaaacacatatgtttatttctttatataatcatgagattctgaaaacagactcaagaaagaacaaaagaacaagttattggtaggagaacttgttagatggggcacaaaagtgaaaggaaactctttactataaacccatatatatataattttattttaagttcwgggatacatgtgcaggacgtgcaggtctgttacataggtaaacgtgtgtcatggtggtttgctgcacctaccaacccatcacctaagtattaagcaccacatgcattagctatttatcctgatgctctccctcccccgacaccctccaacaagccccagggtgtgttgttcccctccctgtgtccatgtgttcttgtcgttcagctcccacttataagtgagaacatgtggtgtttggttttctgttcctgaattagtttgctgacgataatggcttcaagctccatccatgtccctgcaaaggacatgatcttcttcctttctacagccacatagtatt

SEQ ID NO: 95688 - DNA, 575 bp, Homo sapiens
aaataatagccatttgttgtttgcagtagctgagctttggagttacttgctatactgaaacagacaactaacatagcctcactttatttggtggaaatgggacagagtggagggttgtgatggtagatcttttggagtattgggttgagcctcaagttgcagtcctggccacatttctctagcctgattaagatttgccccacttaaccttccatctacatcttctgcttggcctgcttcactggatttctgcatttagaagctgctttgaattgtctttaaacagaatcgtgttccaagccatcaagcaacaaaaaaaaaaaggtgtttgctgtgggggaaaataaaagggttcttttcatttacatgtcaactgaggagaacaacatgaaagcattttgcaagctttcttgaatttgggcttgtattttgattttcttyaagtgcaaatcagcatccaagctcaaaccttggggtggcagaaaaatttaattagaatgtggggtgtttcacataaatttgtttcttcctgctattttcttaaggttgacaggatcacccatctgcttaaaata

SEQ ID NO: 95689 - DNA, 550 bp, Homo sapiens
gtaaaataaacttcttgttaactcctcttccacagttctgcagccaccattgcagtacagccaccrttgcagtatagccacactgcagccaccattgcagtacattcctttcatacctggtcttcctgtttctagtacctcttcccttccagcccgcccactagctccacattttcattgggaagatggagccctggtcccagcagtttctgcagaagtctcaggtctgactatctttccctaagcttggtcacatgatcttccatgaaccaatcactggacaggtggaaggcatgtccatgtcagctaaacagagagaagatggaagacttatctatttattttgataaatgtaaaaatagtgcttctgattggttgggctttagtcacatctcatccttgaaaccagaagtagggtcagccagaaagtgagtgaagggtagttctccaaaggaaaaacaagattctgtttttaaaagtataaggaatgaatgttgtagagaggaaaaaagcaagggtatgatacacattcctttcattgtctctcctg

SEQ ID NO: 95690 - DNA, 550 bp, Homo sapiens
gtaaaataaacttcttgttaactcctcttccacagttctgcagccaccattgcagtacagccaccgttgcagtatagccacactgcagccaccattgcagtacattcctttcatacctggtcttcctgtttctagtacctcttcccttccagcccgcccactagctccacattttcattgggaagatggagccctggtcccagcagtttctgcagaagtctcaggtctgactatctttccctaagcttggtcacatgatcttccatgaaccaatcactggacaggtgraaggcatgtccatgtcagctaaacagagagaagatggaagacttatctatttattttgataaatgtaaaaatagtgcttctgattggttgggctttagtcacatctcatccttgaaaccagaagtagggtcagccagaaagtgagtgaagggtagttctccaaaggaaaaacaagattctgtttttaaaagtataaggaatgaatgttgtagagaggaaaaaagcaagggtatgatacacattcctttcattgtctctcctg

SEQ ID NO: 95691 - DNA, 626 bp, Homo sapiens
ggagtggagagtgaaaaaaagaccaagcctaattaactcccagtcactgcaatctaaatataaagttactgaaactgaggttgtcccctgttgatgtaacctttatccctcttcttttatacctgctgggaggaagcacaattttcttgagtttgattgggacttaatcccaggccgctgatcacaatgccatatccagatgctttgcaggtgtgcaagatagcagggcagtaggcctaatacacctggtcctagaccatgaaagaaacatctttttacctcagaggctgggtgtgatcggttcctgggaggtcawgctaggagagccttatcttctcagaactgtggagtgattcaattttaattttgctccttcagtccttttgtacatatgctttttcttttctgtatcttctatcttgtttcctctctttccttttctcttctttcctatcttttctctcatatttctagttcctcttctttttatttctcagatctcttctttctctatccctatttctccctctttttttgaaaaccagactttaagaagaaataggattcgatttatctaaacctttgagtttggtgtgggactcagcttattcactggaaatgtgcct

SEQ ID NO: 95692 - DNA, 626 bp, Homo sapiens
ggagtggagagtgaaaaaaagaccaagcctaattaactcccagtcactgcaatctaaatataaagttactgaaactgaggttgtcccctgttgatgtaacctttatccctcttcttttatacctgctgggaggaagcacaattttcttgagtttgattgggacttaatcccaggccgctgatcacaatgccatatccagatgctttgcaggtgtgcaagatagcagggcagtaggcctaatacacctggtcctagaccatgaaagaaacatctttttacctcagaggctgggtgtgatcggttcctgggaggtcatgctaggagagccttatcttctcagaactgtggagtgattcaattttaattttgctccttcagtccttttgtacatatgctttttcttytctgtatcttctatcttgtttcctctctttccttttctcttctttcctatcttttctctcatatttctagttcctcttctttttatttctcagatctcttctttctctatccctatttctccctctttttttgaaaaccagactttaagaagaaataggattcgatttatctaaacctttgagtttggtgtgggactcagcttattcactggaaatgtgcct

SEQ ID NO: 95693 - DNA, 605 bp, Homo sapiens
ggagtcatgacaggaagtaggtgtatgagttagtgtaggctgggctgcagtaacaaacagacccagtcatgtaatggttcaaaacaatagattttatctctttctcacacaatagcccaaggtaggtccaggttggtgagtggtcccttccccacacagttactcaaagacacaggttaagagtgactctgacatcttcaatgaatgtcttccaagatggacaggaggtgaaagaagcataagtaggagatttttaaggaccagacctggaagtgccatacaccagcttccactcatgctccattggccagaattcagtcatctgccacaaataactgtaaaggatgttaagaaatatattaaaccatgtgtcataaaaaccagaacctgatattggtgaccatttagcaatctctgccaaatgagacacaggaaagagayggtgaagaaagtcattggcagaaaagtgaagaaccaagagctgtgtccacacgacagcagacgtgcaagtcttggcacagaacttgtcctgggaaacggtaggagacttgtttagacagctaggggccacttctggccaatcaagatgctctctatggtgcacc

SEQ ID NO: 95694 - DNA, 548 bp, Homo sapiens
ctttccagcttgcacatagctgcttctcactgtrtcctaacatggtggagagagagaatgagctctctagtgtctcttactacagtaacacaaatcctatcagatcagagccccaaccttatgacctcatttaaacttcattacctcctgaagaccccatctccagatacagtcacattgggggttaggacttcaacatatgaatttgagggggatggaattcagttcatagctgtatgtactcaataaactgtggctgctacgattattattagcattgctcaaagaagtacgtggctgtgctggaatcaaactgataccttaagtctgacatttcagtggtctttccacaccttcggaatcactgcaccaacttccagcaaataccttttactgctcagaaccgtgcttgcttcctttcagctgaagctgacactattggagcgccatccaaattcccacagatccattttttcatgtgtgtacccccagattggatgttcttttgactacaatggcctgggcctgcacctcctttttcaaggact

SEQ ID NO: 95695 - DNA, 423 bp, Homo sapiens
cacattgcaaagccacaggaatcacattggtaggggtasaggtctttctgcagacttggttgtggaaggctgttaaggaaaacaagtccataaccctatattcaccggcatcattcctaagaacacgggatgggaatcggtggtgtgcacatcagccaaggcttcagaaccgtgacagccggttcctcaccacaccaagattgaaactaacttacccagattgcaactcaggactttacactctcagtacggcatccaggccacaggggaaggtggaccccaaagtcatgaggcaggaaaagtgagtactgttggaaaggagaagtgatgctggggagtggaaggcgttgtgaggtggttctgctaaaacattatgtcagctggtgggatttggacgtttctctttctctaccctatctcatt

SEQ ID NO: 95696 - DNA, 438 bp, Homo sapiens
gaattctgattagcttaggaggataactgaatagtggtggtatcacttagcggcactgaatccaattctatgtgtccccaggcacaactggaggggaaaggaagaaagattatttaaacaggtcactgacttcagaccttcacataatttgttattgttgtaataaagcttcaaataggtttaaggttcattcagtgatcctttgtctgcctgtttctttttagtaggccaagggctgactgttcaacctgtcccttacctcacagtgactagtagaaggaaagtctgcccgcctgcgttgaattgtatagttaaatcctggaatcccttagcatgtggtcaatttccagggttgtctctctgttttgtttttaaaagaactactgtgggaattaatttttttttcagagataagastaaatgttccttgtttggcaa

SEQ ID NO: 95697 - DNA, 533 bp, Homo sapiens
gttagattttttctgatgccttttctgcatctattaagatgatcatatggtttttctttatagtttagcaatatagtggattatattgatcattgattgatttttgagtgttaaacctattttgcattcctgagataaactctgctttaccatgatattctttttggcgtattgctggattcaatttgctaaaattttgtttagaatttttctaggttcatgaggatattggtctgtcttctttgcttgtaatgtctttgtccagttttagtattaaggcattgctgacctcatagaataaattggaaaatatttcttcctttccaatttcatggaagagttgtgtagagttggtattatttcttctttaatacttgatataattcacctctgaagccatttggcccagagttttctttgtgaaagagtttyttttaaattacaaattcaatttcttttatagataaagggctacaaggttatctaattcttcttgagtaagctttggtaatttatgtctttcaaggaatttg

SEQ ID NO: 95698 - DNA, 492 bp, Homo sapiens
taccctccccgctctggtttgcaggtcactgtggataggtggtcagttggtggtgtgcccgaagctcttcggggtcagggagaggaggtgataggggaaaggtgtrtgttctggaagggccagtcatgcttcagggaccaggctagttggaccttcactggttttctacttcccgacagtggagctgatgtcactggctgttggactgagcagtggtcactgggaaatctacagtttgtggaagccacggggtcttccaagctcctaccagtcttcccaaagaggatgcctccctccccttggcctggtgcactggtgctggttcaaagactgtctgaagcccagcttggggtcctctttaggaaagccatgatttgccttaatgtgtgcttggctgcttcatctgccctctcaccccctgccttctcagagtgactctttttaggacttcctatttaggactaacccagatgcctacagagagaagtgcag

SEQ ID NO: 95699 - DNA, 492 bp, Homo sapiens
taccctccccgctctggtttgcaggtcactgtggataggtggtcagttggtggtgtgcccgaagctcttcggggtcagggagaggaggtgataggggaaaggtgtatgttctggaagggccagtcatgcttcagggaccaggctagttggaccttcactggttttctacttcccgacagtggagctgatgtcactggctgttggactgagcagtggtcactgggaaatctacagtttgtggaagccacggggtcttccaagctcctaccagtcttcccaaagaggatgcctccctccccttggcctggtgcactggtgctggttcaaagactgtctgaagcccagcttggggtcctctttaggaaagccatgatttgccttaatgtgtgcttggctgcytcatctgccctctcaccccctgccttctcagagtgactctttttaggacttcctatttaggactaacccagatgcctacagagagaagtgcag

SEQ ID NO: 95700 - DNA, 663 bp, Homo sapiens
ttccaatagcctcatgttcaaatctgactcgttagcaaatccacccaactcaacatcggtcatcttgacattgcaggatattcagcaagtctgaagtttttaatcgggaaggattttctaccgttactgaacaaataaaggttctttgtagcaatggctggaaatgcaacatgagccctttcttcacaccaaaagaactcataaatagttcaccgggtgaaccaaagactttatttttcaaaagcaggtaacaccaaagtactatgtggtatccatattcgttgcaaaaatgataattactggaattttccaaacatcaaatgaagggggatcaatggttaccactatcgttttcaaccaatatacagatgttcgctcaaggtctaggttttatttctacatagtagtattcacatgagttccctattctgaagtattatcaaaacgaggacccttgaaggtcgagcccagctttgtcttgacttcaaagatgacacagcagccaacctagaatcctggcttgctgcttgagtcctagaaatcatgtcttctcatgttttacaacaagctgtgtctctgaaaactaaaatcagacttyagattcctctgaaacagttctggttcccaagcatccgcaccatggtacccagacatgctcaaaat

SEQ ID NO: 95701 - DNA, 614 bp, Homo sapiens
caatctcgagagacaccgtttttgttttctctgcaagaggaaagaagggggttgtgtagggaggtggaaatctgcacagacagcctcctccatctgcacagaattaaaatgaagttcacaagtgtgcggtctgcaagtggctctcccgtgattgctgcctcttcccgggggcwctccagccatccggggtttgtttttcctgggcctgagctcagatgtcaggcaggcagaggggtcttgggatatctccccacccagggagcagggggaggccgcaggcggcttggggtctgtgtgtttgggaaagcgttcaggctgtttactctgggtctcttgacagcccgagggtggccgtgccaggcggtccagatgcttccagctggggtctcatgagcaagccatgccgcctggcttatggtggcacctcctctgagctgtccccaccaggctgccagggcgggtcccccaaacacactctctaaccacatccccactgcctccaccctcatcagccaccgacagctctgaactgggaaggccaagggctggagcgggccctgcagacgtgttttgtttcattttgttttgcattgtttaatttgagctggcaatga

SEQ ID NO: 95702 - DNA, 564 bp, Homo sapiens
gagtggaacttgggctgagactccatctattacagggggaccataagctcctactttgactggtgggacacaatgatgtcatgagtccttaggaattagcagcatctcagagccaatgtctagtgatccctaaggagtctgagtagttccctttctccagtgcttggtcactccagtaagggactgcaaatctcttgagggaagtcttggaggaatattaactgcatatacaatagcaaagcttcagagtcctgccccttcaaccatgggactcttggcctgtaaattggcttaggactggaaactgggtgagagaccatgacttttcattgcagtgactcaatccaaatcttaaaaaaaattttattattattattatttgttttagatttagggggtacatatgcagattttttacatgagtatatattgtsatgttgaggtttgggctccttatgatgccattgctcaagtagtgaacatagtggctgatggtagtttttcaacccttgcttctctttcagaacccccagtgtttcttgtttccatctttgtgtccatgcg

SEQ ID NO: 95703 - DNA, 562 bp, Homo sapiens
tctcagagtgtagtgggctagtttttctagatttatggtccttttttttctctagggtctccacacatattatctttttcttttttgaaagggagtttactttctagaggtgttttaggttcatagcaaaactgaacagaaagtacatagaattcccatacgccccctgcaccaacaccatgtacagcctcccccactgtcaacatcccacaccagagtggtatatttgttacaaccactgaacctacattgatatagtccatagcttacattagtgttcagtcttggtgttttacatgctatgggtttgaacaaatatataatgatatacatccaccatggtagaatcctacagaagtttcattgccttaaaattctcagtgctttgccattcatccctccttcccctggtaaccactgatctttactgtctcaatagttttaccttttctagagatcayatagttgaaatcaaaccttcccctgggaaccactgatctttttattgtctcaatagttttaccttttccagagatcacatagttgaaatcgtagttgaatt

SEQ ID NO: 95704 - DNA, 529 bp, Homo sapiens
gaattctaatactctacctctacaaaaaccttattttccattacctatcacatgttgaaccaccattcaggcctgcttaccttctcccttctaccttctacccttaaaggggctctgatctcttctagactccatttagaattgataacagagttaagtgttgaaatgcagtaggtctcccttaccactcacctggggcagggatggcactgtgagtgggtgaggcagccaatcccaggtgacttcctgagactggcaaggcattgctcacagaggatgaagtcagctgctccatccccactggactcaggttcatttcattcatcctagaaaagagcacamacaactagttatgcaaaaatttactccaatgactctgtattaagatactgaagaaactgaaacagtggggatggggaaatgggacttggccaactattagttcacttttacgctcaacaattctcttagatagctagtgccatattctttctactgataagaaaactgagattgagacattaaaaac

SEQ ID NO: 95705 - DNA, 655 bp, Homo sapiens
actgtgtctcaaaaaatacatataaataaataaataaagagaagaaagcagggacaggcctgcgttgaaggtgtgtcagaagaagaaatgtctttgaagagagctgagaaataggagccagagaagttggaaagagaatcaagctggtatgaaattgtggcaattaaatgaggatataattgtataagaaagagggaatgagtgacagcatcctatgaatcagaggtgtcagatggttgaagtatgaggggatcttattgggttgagcccttcactctggccccagtttctctgcaatgtgctgcrtgaggcagggcctggattgctgtcctgactttagcactgtctattgctagagacctctgtaagagcagaaatagcacagtggattgaagaaatgagaagtggaagtcaacttgaagactgccttttctggatacttcacagtgaagggagaaagagagctgggctggtgtgacccaaatggaggaaaagatgggataccaaagatacttctgagcctgaggtcttacaggtaaacaggtctagctgattcagaggctcagaggtgacaaggcttcaaggagtctgaaattaggtggaggtgaaggtcttaggaattggagagattaaataactgggagggcagagggtt

SEQ ID NO: 95706 - DNA, 508 bp, Homo sapiens
aaaggaacctttaactctgagatgaatgcacacatcacaaagcagtttctcagaaaggttatttctcgtttttatctgtatatatttcctttttcaccataggactcaatgtgctcccatgtatcacttcatrgattctagcaaaacagtgtttccaaactgctgaatgaaaagaaatgttcaactctgtgagatgaatgcacacatcattaagcagtttctcagatagcttccttgtgcttttatcctgggatattcactttttcaccattggcctcaatgagctcccaaatgtccattcgctgaatgtacaaaaaccgtgttaacaaagtgctgaatacaaagaatggtttaactctgcaaggtgaatgaacacaacacaaagcagtttctcagaaaccttctttctagtttttatctgaatatatttcctgttcaccatagacctcaatatcctccgaaatatctcttcacagattctacaaaaacagtgtttccaaactgctga

SEQ ID NO: 95707 - DNA, 658 bp, Homo sapiens
tttaacccttctagatgaatgcacacatcccaaagaagtttttcagataacttccttctagtttttatcctgtgatattcgcttttgcttttcacctcaatgagctccccaatgtatattccaaggaaggaccaaaactgtgtttccaaactgctgaataaaaagacagatttaattctctaacatgaaggcacacctcgtgaaccagtttctcattatgcttgtttctagtttagttgaagatatttcctttctcacaatgggcctccatgtgctactgaatacaccttggcagattgtaagacaacagtgtttctaaacagctgaatgaaaagagagacttaactctgtgacatgaatgcaaacattactaatcrgtttctgggatcacttccttcaagtttttatactgggagattagctatttcaccattggcctcagtgagctcccaaatatccattcgcagaatggacaaaaacagtatttccaaactgctgaatccaaggaaaggtttaattctgtgagatgaatgaacacatcacacagtagtttctcagaaagtttcttgctagcttttatctgaagatatttcctttttcaccatgggcctcaatgcgctacaaaatatctcttcacaggttctaagaaatcagtgtt

SEQ ID NO: 95708 - DNA, 615 bp, Homo sapiens
ttgaggcctatggtgaaaaagaaaacatcttcagataaaaagtagaaagaagctttctgacaaaattctttgtgatgtgtgcattcatctcacagttacaccattctttagattttgcagtttggaaacactggttttgtccattctgcgaayggaaacttgggagctcattgagtcaattggcgaaaaagtgaatatcctagaagaaaaaatagaaggaagctatctgagtaattgctttgtgatgtgtgcattcatctcacagagttaagcttttccttcattcagcagtttggaaaaaactgtttttgtagaatctgtgaatgcatatttgagagtgaattgaggcctacagtgaaaaaggaaatgtcttcagataaaaactagaagaaaactttctgagaaactactttgtgatgtgtgcacttatctcacagagttaaacgtttctttggattcagcagtttcaaaatactctttttgtccattcagcaaatcaacatttgggagttcattgaggccaatggtgaaaaagcaaatatccaaggataaaaagtagaaggaagctgtctaagaaactgcttggtgatgtgtgcattcagctcacagacttaa

SEQ ID NO: 95709 - DNA, 585 bp, Homo sapiens
tgtgatgtgtccattcatcttgcagattgaaaactttcttttcattcagcagtttggaaacaatgtttttgtaggaccagtgaaaggatatttggagagctttgaggcctatggtgaaaaaaaaatcttcaaaaaaaaaaaaaaaactagaaagaagctttctgagaaactgcttcttgttgtgtgcatccatatcacagagttaaacctttctttccattcagcagtttggaaacacgttttcgtagaatctgctaaaggatatttgggactgcattgaggcctaagcagaaaaaagaaatatcttcagataaatactggaaagaagctttytgtgaaactgctttgtgatgggtgcattcatatcacaaggttaaacctttcttcgtattcagcagttaggaaacactgttttcttagagtctgcagagggatatttgggagctcattgaagccaatggcgaaaaagcaaatatcccaggataaaaactagatggatgcaatctgagacaccacgttgtgatatgtgtattcacctctcagagttaaaagttttctttaattcagcatttggaaacactgtat

SEQ ID NO: 95710 - DNA, 554 bp, Homo sapiens
cagattatgggttgcagtgagtactccacttatacagggaggaaagaagtcaagcatgggtggaaggttccaagctccacagctagaataaaactttgagatgcgcattgaagaaagaaagcagctgacacgtgaaggcagcccaggctaggaaagcagccaacaaaggcacagatgcaagagtgagcacagcttgcgaggacacagaagckagagcaatattctacagaggaacatgggtcatcccatgttcccacattgtatttttcacacagtgccaaacagcattagagcctgagacagactatgtgaaataggcatttcatcccgttctcagtcaagttataaaaagtgatcttcctatttcaaaagaggaaatcaaagaaatggcaagaagattccagccaatgtaaaaatatgtcaccgatactgtggaaaactgcaaatatattatttgaggtggagataactgtggtgcctgacaaagatgggcaggggatgagcccatgggcaagcagggtctggatgcaggagtacccaggtcagctgcccca

SEQ ID NO: 95711 - DNA, 592 bp, Homo sapiens
gcacttggggaggcctaggagagtggatcgcttgaggccaggagttcaagaccagcctggccaacatggagaaaacccaggggtctctattaaaaatataaaaattagccaggcatggtggcacatgcctgttatcccagctatttgggaggttgaggcatgagaatcgcttgaacttgggagccggaggttgcagtgagccaagatcacaccactttwctccagcctgggtgacagagcaaggatctgtctcaaaaacaaacaaacaaaaaaaacaagaacaaaaattgcctaccctgtgatcagttacatcttctgacttaaacaggtgctgagcatttcctagcaatatataaaaataaagtaataaaaacaacaaacttgaatcctgccagaattcagacttaaatgtctatagacactgacagaccgagttggccccaatgaagtcaggaggtcaaatgctccaaatgcccctttgacaatttgctcctttttcaccagtacttggcgtcctggtttccttgtgggagcagtttttgtgagttttgtgagtccaagtcgctcagatagtagaaaaaaataaatgatc

SEQ ID NO: 95712 - DNA, 599 bp, Homo sapiens
agttctcaaaggtgagaaacaaaataatgaaaaaaagaaaatatttaaagatagttgtacttcatgattcagctaaattttacttcttagaagatgtctttcatgattctttccttgctcccagatgtttcagggtactcccttatctatctatgcatgttttctttttctaatgtgcaattgttttgttttctacctgtcttttctatgaggctaaaaatccatgaggacaggtgcatttctttctctattttgtgttattsttattgttgttgctcctatctttgcattcctacaacacaagcacatgtacgaatttggtaaaacattcactaaataaatagatgattagtcaaatgaataaatttaatgaaaatttcagaactgtgataccttgcttaagttccccgaagtaatgttgaggatccaaaataatgtatgcaaaagaaaaataacaaaatggaaagtgccagagagtggaagattgtgttattctttccctcttctgaagtcagtttatcccttttagatgcagactacctcctgctagcataaataacttggaagtttacataaaacaatctgacaatgtttgtgca

SEQ ID NO: 95713 - DNA, 625 bp, Homo sapiens
cggcactattcacaatagcaaagacttggaaccaacccaaatgcctatcaatgatagactggataaagaaaatgtggcacatatayaccatggaatactatgcagccataaacaaagaatgagttcatgtcctttgcagggacatggacgaagctggaaaccatcattctcagcaaactaacacgggaacagaaaaccaaacaccacatgttctcactcataaatgggagttgagcaatgagaacatatgggcacatggaggggaatattacacactggggcctcttggagggtgaggtaaaggggagggataacattagaggaaatacctaatgcagatgatgggttgatgggtgcagcaaactaccatggcacatgtataactatgtaacaaacctgcacattctgcaactgtatcccagaacttaagagagagagagagagagagagagagaaatatatgtataaaaatatataaacatatatgggaatatatatatatataccacaatgggatattattttacacatattagaatgactattcaaaaaccaaaaggaaacaagtattggtgaggatctgtgtactcttttacagtttggtgggactttaattgttacagcc

SEQ ID NO: 95714 - DNA, 625 bp, Homo sapiens
cggcactattcacaatagcaaagacttggaaccaacccaaatgcctatcaatgatagactggataaagaaaatgtggcacatatacaccatggaatactatgcagccataaacaaagaatgagttcatgtcctttgcagggacatggacgaagctggaaaccatcattctcagcaaactaacacrggaacagaaaaccaaacaccacatgttctcactcataaatgggagttgagcaatgagaacatatgggcacatggaggggaatattacacactggggcctcttggagggtgaggtaaaggggagggataacattagaggaaatacctaatgcagatgatgggttgatgggtgcagcaaactaccatggcacatgtataactatgtaacaaacctgcacattctgcaactgtatcccagaacttaagagagagagagagagagagagagagaaatatatgtataaaaatatataaacatatatgggaatatatatatatataccacaatgggatattattttacacatattagaatgactattcaaaaaccaaaaggaaacaagtattggtgaggatctgtgtactcttttacagtttggtgggactttaattgttacagcc

SEQ ID NO: 95715 - DNA, 288 bp, Homo sapiens
tatattattgtgttttctttaacatgtttaaatttgcgttactgttttgttaatgtctaactttatctggctttcaaggcagtaaagactatcacccctgaaaccacaatgcatccaaacactstccattagcaacatagaggccctgcaaaggtgaaagaaagagttttagttgatgcatcaattatggtcacgaatagccctttaaactgaaagtgctgcatctcaaaattctcttcttcactttgccttcttaattgcatctttcacctccaaactagattaagc

SEQ ID NO: 95716 - DNA, 541 bp, Homo sapiens
cgaatccttccttattgtccagagaatcttaaatctttctatttgctactctgtgttctacatctacattatcatagatgactattaaccctctcatacaaaatctatagcttgcaattctatagtacaaaagggaatttagggaaaatttttaactgtgcttatggaatctgaaattcatctggtcatccccatctagttatgaatcatgttctttcaacctcagcatttaatataggaataataaggctctctaatycccaggagctttttgcaaactttgtctcaacagttaatacatttttaataatcattctgcattctcaagttatatattaaacaaaattttcttctcgttttcttcatttctccattttgaaaaattctgaacatcctctgagcacatttgcaataatgaacacttttgaatattttctgtaattaaaaatggaagatttgttgtgtattttatttttccatgtccatgccagaatattaaactccttaaaaaaaatctcagctagaaagaagtaacctgcat

SEQ ID NO: 95717 - DNA, 541 bp, Homo sapiens
cgaatccttccttattgtccagagaatcttaaatctttctatttgctactctgtgttctacatctacattatcatagatgactattaaccctctcatacaaaatctatagcttgcaattctatagtacaaaagggaatttagggaaaatttttaactgtgcttatggaatctgaaattcatctggtcatccccatctagttatgaatcatgttctttcaacctcagcatttaatataggaataataaggctctctaattcccaggagctttttgcaaactttgtctcaacagttaatacatttttaataatcattctgcattctcaagttatatattaaacaaaattttcttctcgttttcttcatttctccattttgaaaaattctgaacatcctctgagcacatttgcaataatgaacacttttgaatattttctgtaattaaaaatggaagatttgttgtgtattttatttttccatgtccatgccagaatattaaactccttwaaaaaaatctcagctagaaagaagtaacctgcat

SEQ ID NO: 95718 - DNA, 592 bp, Homo sapiens
ctgacttaattgattcggataagttgaatattgatatttttttttcaaaactccttaggtggttctaatgcaagaaccgccgtctattctatgatctaacaactgacttctctttctttttctctgatctattctctttcctattaatgttttatattgagagttcattccttcttcccattggttagcaattcatatcctgtttcctgagaaatcacaagcctgggaagcagccatccaccgtagtgggactaaacatagaggcagtcctcctccaaggctgagaagccaacaggagaccctgaggaatccatgattgaagtgtattcctggatctggtcacagagtcatagagggcgagggcttgaagagacttcaactgttgcacaactcttccattttgctgatgacaaaacagaagcatgaaggtgacaggatcaaagaactagtgctgatrgagctagatgagaaccaaggcctcgggtgcccaggctttctctgtctccactccatcctggggctacccctctcacaggagagtatttgagtctcttcacataagtgtccaggcagagaaaagccattccattca

SEQ ID NO: 95719 - DNA, 596 bp, Homo sapiens
ttgaacacacaactgatttcagagtccaactcccatccactgtctctaccactccagatagaaactccaggtcctcaagtcactcccacctccccaggagagggtgggcacgaggaacaaatgttagaaaatgacctcttcctctttcctggaaacccacccagcccattctgatcaagggtggcaacaagacagagacgctgaaagcagagaaatgatcagacctggttcctcctagggcatccatcccaagggaygtattagctgggacaagttatacccgcctctgtaacaaataactgccaaacctcagtagcttaacacaatagaggtttatttcccacttgggaaaaggggtaaagtccactggagtggggagggctgagctctgttccacacagtcattcagcggcccaggcaccctccatccgtggctctgctcttccctggggcctcagagttctctgtagaaggggccacacagatcagccctaggagtacttcacttccagcagcattcagtcacatgggtcagactcagccacatgactacatctgcttgcaagggagactgggaatgaaggaggaaaaggaaa

SEQ ID NO: 95720 - DNA, 460 bp, Homo sapiens
ctctcatttataatgtgatagtttaacttttgcacaaaagatgttcgtttttaaggtgattttttttttttttttttttttgagacaggatctccttctgtcacccaggctggagtacagyggcatgatcacggctcactgcagcttcaacctccaaggctcaagccatcctccttcctcagcctccctagtatctgggaccacaggcacatgccaccatacccagctaatttttgtattttttgtagagatggggtctcccccgtgttgcccaggctgctcttgaactcctaggctcaagcaatcctcccacctcagcctcccaaaatgctgggattataagcgtgagtcaccgcactgggccagtattattagtattattttttaagcatactttttattgaagcataacacatatacagaaaaaaatgtcaaccttaagtgttcagcccaaagaatt

SEQ ID NO: 95721 - DNA, 471 bp, Homo sapiens
tgattgcagcaaggctgcagtatacaagattaatatttaaaagccaactgttaatgagaacacatgaacacaggaaggggaacctcatacactggggcctgttgtggggtgggggtagtggggagggatagcattaggagatatacctratgttaaatgacgagttaatgggtgcagcacaccaacatggcacatgtatacatatgtaacaaacctgcacgttgtgcacatgtaccctaaaacttaaagtataataataaataaataaataaataagaatattttaaaaataaataaataaataaaagccaactgtttccctatatattggcaatgaacaagtggaatttaaaataaaaaacacattaccatttacattagcactcaaaactacttaggtataaatataacaaaatgtgtacaagagctatataaggaaaactgcaaaactctgacaaaagataacaaagt

SEQ ID NO: 95722 - DNA, 218 bp, Homo sapiens
agtgttatggcagaattaaggattttgtaatagctttatctctctgasaggaagcactcaattcttgtacacacttcaggaacacattataaaacacataaaaacaggcacatcgccaaaaccagataaagaaatcacaatgaaagaaaactatagactaattactcttgtgagtatagaggcaaaaatcctcaacaaaatgctagaaaactgaattc

SEQ ID NO: 95723 - DNA, 364 bp, Homo sapiens
gaattcaattcaaagaaagtagaacatagacacacccagcctactctggctgctatgtaaacaacataccccctatggcagggggatatggcaagaagggagatcaattaggagactattacaataatccaggcaaagataatggtagcctcaactagaatggtagcagtgaaatttataaaatgtgtttggattcagaatataatatgaaaatagaggctyggcacagtggctcaggcctgtaagatcccagcactttgggaggccaaggtgggcagattacttgaggtcaggagctcaagaccaacctggccaacatggtaaaaccccatgtctaccaaaaaatacaaaaattaactgggca

SEQ ID NO: 95724 - DNA, 466 bp, Homo sapiens
ttcctctgtgtttccacggaacttctgacatatgcttaagggccctaaccctccctagttctaccgtattatctgcggcagatctctttctccattggagcagaagcctttgggtcccctgtgcctcgcctggtaggagctcactacatattgtaattgaatgaaataatcagaaataattttcactattattaaagcattcttcttctaccctgggaaaacggaaaagccaataaaaagttaaagtaaaaataagatttctccctctccagagaagtcacccatactggccaaagcaaatttaaaatctcactgaaaataactgtaaattaaatgccgcatactaaggatcaaaaaatgactttgctaaatagatctkattctttaatatgtggcttaggtaatagggacagaatttccaagcacagaagccccaagcctagaaaagtttcaatgacttctgatg

SEQ ID NO: 95725 - DNA, 520 bp, Homo sapiens
tcatttcttctcaatatacaatatgtggaagactaatataycccaataacataacttaatgtcaggaatgccagtgctagaaacataaatcatagaaggatgtaccacaacacattgaaaaggggaaatgatggtataaaatactaaccaaaataatcttgaaggtaatcaaattacaaactttatattctacatagccctggtgtaaaaacgggttatagctagagaaagtagggagagtggttctccatattctctggctagaaaaggaggaagagagggagtcacagttagatgccctggggttatatttgtcctacaactcaatgataattgctctcccttaagtgaatagaaatatgaaagtttaagaatttggaaggacttagaggctagctaatacaatgttaatcttaatctaaaaaccttccctataaaaccctgatagttggtcattcagctgctgctggaatgattttaccaacaggagaataaccatattccaagagaaaccaatgcc

SEQ ID NO: 95726 - DNA, 520 bp, Homo sapiens
tcatttcttctcaatatacaatatgtggaagactaatataccccaataacataacttaatgtcaggaatgccagtgctagaaacataaatcatagaaggatgtaccacaacacattgaaaaggggaaatgatggtataaaatactaaccaaaataatcttgaaggtaatcaaattacaaactttatattctacatagccctggtgtaaaaacgggttayagctagagaaagtagggagagtggttctccatattctctggctagaaaaggaggaagagagggagtcacagttagatgccctggggttatatttgtcctacaactcaatgataattgctctcccttaagtgaatagaaatatgaaagtttaagaatttggaaggacttagaggctagctaatacaatgttaatcttaatctaaaaaccttccctataaaaccctgatagttggtcattcagctgctgctggaatgattttaccaacaggagaataaccatattccaagagaaaccaatgcc

SEQ ID NO: 95727 - DNA, 611 bp, Homo sapiens
gtggttttaaattgttttaacttcacataccttctttttcaagattctcttctgacatttccattgtttatattgtgtacacaataaatatttaaattcatctctattttaattttggcattcaccagtactttttcgttcttgagtattttttttgtttgatttgatcttttgcttatccttaggctgattaaagtccatcatccagtaattttatttttcaaaaagaatatcctagtgatatatcttctgaggctttgcacattcaaaaatgtcattctgttgcctttacacatgaaggaaattgtaggtataagattcttaggtcacaacactttggcctaaaacacagcacacgttaagtttctctattgttttatgacatttaggtttgcaaataagaagactaaagtcatctaaactttgctttcccctccccctggggtctggacatttataaaaatcattctytttgtactgtaattcaaacattttttaatcttgtattgagttttagctgataaagagtgaaatctttaaaattacatacacagaccttctgaaaagttttctcatatctttagttatttttgtgttattttattctgagc

SEQ ID NO: 95728 - DNA, 557 bp, Homo sapiens
tggacatggattttggcttgggtacaatttgctgatcttgttttccaccttagtctgggcatctctcacccaagcctgctagcctgcatttagactagagcttaccagttactcaaaagatgggacttctgacaatcacatttttaaaacaccacattgaggtataatactttctactgtatttgtttgtttgagatggagtcttactctgtcaccaggttgcagtgcagtggcacgatctcggctcactgcgacctccacttcccaagttcaagtgatyctactacctcagcctcctgagtagctgggattacaggtgcgcgccaccatgcccagctaatttttgtatttttagtagagacggggtttcaccatgttggccaggatggtctcgatctcttgacctcatgatctgcccatcttggcctcccaaagtgctgggattacaggcgtgagccaccatgcctgactaatactttatactgcaaagtttatctgtttaaagtacagcattcactgattgtcagtatatttacagaattgtacaaccatcataa

SEQ ID NO: 95729 - DNA, 585 bp, Homo sapiens
gcttaaaagcaaaatggtagaaaaaatgcacttgttcaccamcaatgtaaatgatacatgaagtataaaatatataattcaattgaaaaatgtaaaaatattttataggcaataatacaggtaaatgactagaatgagaaattgagtgaaaaaaggcaacttctataaaacatacagtattatttcaaaaccagaatgattcagagggcttgtttgtgaatagattattcagaatagcaaaggcatagaaaccagaagatgtggtgctgacagctaacccagtagtagctaagctgttgctatccctaggctgaagggggaggagagaaagaatagagtcatcactggaactggaagaaaggagacagatagtggaggctgccttgagagatgtagttactttcagtccagcgacacaggcagcagaacagagggggaatcagcaatacaagcaacctgccttaaatgcacttaccctctcttatcttttcatggtggtgccaatccatggaaaacaactcaaagccccaggggcagaaggacctgtgaaaggattccccaaaggtcagtttcctgaagcaggaa

SEQ ID NO: 95730 - DNA, 541 bp, Homo sapiens
acttggactcagaaacaaacagttgacgtgttcatagtttatggactatggattacgaaggatatcataaaacagaagttttgaaagtttaaaaaattaatttttaaaatstcttttctataggatgatgaaacagtggagtatagttgaaaaaacatagcctctcatatcagacagatttggatgaaaaatctacaccactttctagtttgtgatttttaaaatgaattgtgtgtgtatgtgtgtgtgtgcgcgtgtgtgtgtttgtctttctgggtgctttctttccttacgttttagcttcctagttttaaattaaaaggaaaaaagattgacattgtgttttaaataaaaatagataaaatcaaaaacaaccgacatgtaataagttgtcattaaatattaatcagcttccttccaaaacagttccctttgcttatgccatttgtttatttttatttatttaaaacatttactgctgcaggctttcactaggtgctggacctgcaaagataagacaatttttttttctatttttctc

SEQ ID NO: 95731 - DNA, 597 bp, Homo sapiens
aaatctcagatcgctggcaccaactcattatgtctcatcaagtattctgaaagagacctaatgatttcttatttctaacaagttcccaggtgatgatgatgctgctgatccagaaacctggatgtccaaactaggcaacatatagactaatcgtaatgctaagcaccagtgcaaaatattatttgaatgttgtcyatttgattctgcttgtgtttcccttatttaataaatgacacagctttggttaaattaagtatttgtttataatttaaaaaaaaaactttccacgctaagactgcagagcttatttaacttggtaaggggtatgtattaccaatttgctgtaaatatatatttagtaatagaacagataaaattctcatttaattgaaagattagcatctatttgttgtattagggaaataagaaaatgtaaaaaactagaaaaagtcatgagatgtatgtaatggaaaataataacaaatctgttttacctataaatgatacatatatcttcccagaacatccaagataatcaacaggagaaggattagaacgaacatgagatttgaattgaggtactcacatttaaaaaaa

SEQ ID NO: 95732 - DNA, 648 bp, Homo sapiens
tatttttatcctactagtaatagctattttgctcctcaaaatcatcagtgattctgccatggacatgttggtagtgttctcatggatctttgtgaaaagttttttgggatgtggatgtaagaagagaatcacctgacaagtgcagcagaatagtcctcagtatattctccgaggtcgtatgtgcgggttcactatacccaaatcttattctacacttggcattatctagtcattatcttttgtttttcagaagttcagtaggtatagtatatcatttgtgttattttatttttgcttttattttagcacatgattttgaaatttcttattatatgtttaactttggagattttaacttctatcaattgtttttttcatcttttttgcactcctatccttgtycatttgtggatcattttctgtgtattactttgtatatgttttaatcacatttcagttttagataatgaaaatatcatttgttactgcatctctattgttgtataatttattattgcatatagtaggtatacattaagttttattaatagaataataaatgaataaattataccatatactagacactccatatttgtgctgaactaaacttaactcaaagaatgtactgatatatttggctatttt

SEQ ID NO: 95733 - DNA, 648 bp, Homo sapiens
tatttttatcctactagtaatagctattttgctcctcaaaatcatcagtgattctgccatggacatgttggtagtgttctcatggatctttgtgaaaagttttttgggatgtggatgtaagaagagaatcacctgacaagtgcagcagaatagtcctcagtatattctccgaggtcgtatgtgcgggttcactatacccaaatcttattctacacttggcattatctagtcattatcttttgtttttcagaagttcagtaggtatagtatatcatttgtgttattttatttttgcttttattttagcacatgattttgaaatttcttattatatgtttaactttggagattttaacttctatcaattgtttttttcatcttttttgcactcctatccttgttcatttgtggatcattttctgtgtattactttgtatatgttttaatcacatttcagttttagataatgaaaatatcatttgttactgcatctctattgttgtataatttattattgcatatagtaggtatacattaagttttattaatagaataataaatkaataaattataccatatactagacactccatatttgtgctgaactaaacttaactcaaagaatgtactgatatatttggctatttt

SEQ ID NO: 95734 - DNA, 559 bp, Homo sapiens
ttctgctacctcctagttttctttcagggaattgttgtccagctggtagtttctgtagaaaatgagtgttttaagttcttgtttctaacatgaggtcttagtgaaacaccagaaaaaaaaattaaaaattcacctaacattcttttacatgtttgtatatacatacatatgtaaacatataaatatayaacagatatatgtttaaattcttctctccagctcctaaactatggacccagcatattttagctaactcgttaattaaattggtaaatgtaaacgaacatttttttgagtcttctatgtttctgttttatatttgtcgtctcatttaatccttatagtaaccccgagagatagaaattaccacccatatgcatatgaagtaaggaaaatgagattttcttttgcaaattgtcttttatttatcacacttctcaaccctctaagagtacagagagtaaaactgtggctcacggagattacagaagttgctcaacactgcatgaattataattgaaacagattaagaaataggaaaatgactgtgagaaatgtc

SEQ ID NO: 95735 - DNA, 401 bp, Homo sapiens
gaattctttacatgaatgattcaaaacttcattcttacatcctcaacccaaggcaatactggttgtattgtgttgctgtcattatccattaattttcaatattggatttcatacccaagaggatagcctgtgttacagatagaactgtgtttcccaaaagatatgttgaagttcttaaacacaccctgggcttgtgaatgtgaaattcacattcacagtatgtggaaatagggtatttgcagatgaaatctgtaacgatgaggttacactggattaaggtgtgaacttgtccagtggctagtgtscttataagaagaaaagcagaacaatgtcagcaggaagttgcaatggaagacctcatcattattcctcccaacaaaagtacaactagcaactaccaa

SEQ ID NO: 95736 - DNA, 589 bp, Homo sapiens
tggacgtacaggcatgtccatacatcatttgaaatctaggtagatgttccaaaacctcaattcttgacttctgtrcacctgcagcctcaacaccacatggaagctgccaaggcttggggcttgcacactccaaagccacagcctgagccataccttggtccctttagccatgggtgggatgcagggcaccaagttcctagactgcacacagcaggaaggccctgggtttgactcacaaaaccattttttcctcctagacctccaggcctgtgatgggaggagctgccacagacttctctcttgtgctctggagacatttttcctattgttttggcaattaacatttggctcctcattactttcacaaatttctacagccagcttgtatttcttctcagaaaatgggtttttctttactattgcattgccaggctgcaaattttctgaacttttatattctatttcccttttaaaactgaatgctttttaacagcacctgaatcacctcctgaatgctttgctgcttagacatttcttccaccagataccgtaaatcatctccctcaagttcaaagttccacaaatctct

SEQ ID NO: 95737 - DNA, 557 bp, Homo sapiens
ttaatgggggtacattctaagtgcatgtatttctatcctacataatatctgaattgtatcacaaaaggaaacaacacactagtgaacaatgcaggctttgcaatcatgaaggttttgttttaaataattttactaattgcatagctttgggtaagtcatctatttaaggggatgtcttaggaataattaagtgacaaaaatgtacataaaatacctgagacatcaaaaaaagaatatatatatatatatatacacatatatatatayacatatatatatatatatatatatacatatatatatatatatgtatatatatatatataaccattctttcattgctataaagaaatacctggggctgggtaattcataaggaaaagagggtcaattggctcacagttctacaggctgtgccagcatggctctggcatctgattccagtgacagcctctggagccttacaatcatgatggaaggtgaagcaggagcaggcaaatcacatggtgagagcaagagaaagggagagaggagggaggtgccacacatttttaaaa

SEQ ID NO: 95738 - DNA, 557 bp, Homo sapiens
ttaatgggggtacattctaagtgcatgtatttctatcctacataatatctgaattgtatcacaaaaggaaacaacacactagtgaacaatgcaggctttgcaatcatgaaggttttgttttaaataattttactaattgcatagctttgggtaagtcatctatttaaggggatgtcttaggaataattaagtgacaaaaatgtacataaaatacctgagacatcaaaaaaagaatatatatatatatatatacacatatatatatatacatatatatatatatatatatatacatatatatatatayatgtatatatatatatataaccattctttcattgctataaagaaatacctggggctgggtaattcataaggaaaagagggtcaattggctcacagttctacaggctgtgccagcatggctctggcatctgattccagtgacagcctctggagccttacaatcatgatggaaggtgaagcaggagcaggcaaatcacatggtgagagcaagagaaagggagagaggagggaggtgccacacatttttaaaa

SEQ ID NO: 95739 - DNA, 539 bp, Homo sapiens
gactatcatgtgtcatggagaaggcctttgcactgcatattcctgaagattgctgagactcctctatctgaatttctaaatcttttgcaaacttgggaagctttcatctatcattttattaaataggttttcttttttttctttttttttttctgagacagagccttgctttgttgccaggctggagtgcagtggtacactctcagctcactgtaacctccacctcctggggttcaagttattctcctgcctcagcctcctgagtagcagggactacaggcatgcagcatctcacacccaggtaatttttgtatttttagagatggggtttcaccatgctgaacagaatgatcttgatctcttgacctcgtgatcggcttgccttgacctcccaaaatgctggaattacaggcatgagccaccaygtccagccttaaataggttttctaatccttcctttgtctcttcattctcagtgatcccaataattgtaatattaaattactttatgttgttctaaatgtcagaaaggctttgct

SEQ ID NO: 95740 - DNA, 603 bp, Homo sapiens
aagggaaatgagggatgcctattttcctatctttaagaatgggcaaccagctatcttcaccacccccagtctatactcctctggagtatatcctgaatcactgggactgctttgaccctcagactctggaggaaaaatgccttatagtcctctgcacaatggtttggccaarttatttatctgcgggaaggactgggttggcctcaggaaggaactattcatttcgataccatcctgtagttggaccttttctgtaaacgtgagggcaaatggtctgaggcctcatatgtgcaggctttttttatcttgcagggtaatccatactttcccaatggtataagattgatccagccctcctgtttgccatttcaggagaggctgcaaggggcaatcccagggaactaaagaaatgaaccccagaggctcctccaaccggtaagccagccccctctagccctcctctgggtccaccccgtcctccctatccagattctctctctctcacttgcctcctcctagaaatcctcaccctagactagcccaagtctcactcttgcccctccaagatatgccaggtccgggtctccttctctctacaggact

SEQ ID NO: 95741 - DNA, 603 bp, Homo sapiens
aagggaaatgagggatgcctattttcctatctttaagaatgggcaaccagctatcttcaccacccccagtctatactcctctggagtatatcctgaatcactgggactgctttgaccctcagactctggaggaaaaatgccttatagtcctctgcacaatggtttggccaaattatttatctgcgggaaggactgggttggcctcaggaaggaactattcatttcgataccatcctgtagttggaccttttctgtaaacgtgagggcaaatggtctgaggcctcatatgtgcaggctttttttatcttgcagggtaatccatactttcccaatggtataagattgatccagccctcctgtttgccatttcaggagaggctgcaaggggcaatcccagggaactaaagaaatgaaccccagaggctcctccaaccggtaagccagccccctctagccctcctctgggtccaccccgtcctccctatccagattctctctctctcrcttgcctcctcctagaaatcctcaccctagactagcccaagtctcactcttgcccctccaagatatgccaggtccgggtctccttctctctacaggact

SEQ ID NO: 95742 - DNA, 527 bp, Homo sapiens
gaatactcaaaatattgttttatgtttataaattgcccttgattaagccaaaaatgtatattaactctaaagaataaatatttctgagttaaggaagtgttcttaataaacaagcataccaatgagatgctatttttaagtaaatacaaattcttctctttttcactttattttgcatgacattacattagctagcctgagttatccagctgacayaagttatatgacgttgtgattagggttttttttttttgagatagagtcttcctctgtcgcccaggctggagtacagcggcacaatctcggctcactgcaacctccccttcctgggtccaagcgattccactgcctcagcctcctgagtagctgggattacaggcatgcgccaccacaccaggctaatttttgtatttttagtagaggcagggtttcaccatattggccaggcttgtcttgaactcctgacctcaagtgatccacctgcctgagcctcccaaattgctgggattccaggcatgagccaccgt

SEQ ID NO: 95743 - DNA, 645 bp, Homo sapiens
tagtctgattatatccttccaattctatggcttttggaagcccaattcattcccccaaatttcctcatatttggtgcatagccctgaaaaaattcttatagcctcctttatctttagtttcctttagtaaattccgatgtctccataagtcacatgattccagatacagagttctctctttcttctctctctctcattctctcattatctctcatactatttctatgtctaattttgtttctgttctatctctaatctctatatttttcttcttctaactctaactctagtctcacctctacctttctaccttaaaaagggtccataaatacagtagactttgtatgaatatgtgccaagaaaattacaatcatattgtagcttgtgatatccatgagaatgtaccttgcaaatytctaaatttaggaacatacttacttgactaaaggccctagctgctgcactctgaaattcattgcatacatgtgcatccaatgatcatgacagcaacaggcagttttactaaggtaggcccactgccagcacgcatgggaccccctgtgggagccaattttggttagaggacaccctcctaaccaaaggtgattgctgaatattcctggatggcattctagcatactttta

SEQ ID NO: 95744 - DNA, 585 bp, Homo sapiens
ccgactgtttggaaaatagttaaacatatatgtctaacttcaatatctcaaaactattaaagctgtcagctgtactattggaaatatataataaaatagtagctctaaaatagagaaactaaataatagccactatgcacacatatgttcaagttaagaattatctataacattgaaagtaaatrgaaatgtcttaagtggactactaaagcatttagattccttctctttggtaaggagtgccaagtagatataaggtattgtttcctatgcaatgagaaagaatatatattacaaacataataatttaaaagaaatcagagagctatagaataaagaagtctatgaactaaaattctacaaagtgatgagcacttgtaaggtgaactgatattaagttattttattccccgaggctgaggcttaccataggtactattgtaaacatatcagtggattttttgacagactggaatgtagcagttcttcaacacagggccaatttactatgtgggcattttttaaaaattattattcagggggagggtgccatggatttagggggctcatctagaaaagtagagt

SEQ ID NO: 95745 - DNA, 585 bp, Homo sapiens
ccgactgtttggaaaatagttaaacatatatgtctaacttcaatatctcaaaactattaaagctgtcagctgtactattggaaatatataataaaatagtagctctaaaatagagaaactaaataatagccactatgcacacatatgttcaagttaagaattatctataacattgaaagtaaatagaaatgtcttaagtggactactaaagcatttagattccttctctttggtaaggagtgccaagtagatataaggtattgtttcctatgcaatgagaaagaatatatattacaaacataataatttaaaagaaatcagagagctatagaataaagaartctatgaactaaaattctacaaagtgatgagcacttgtaaggtgaactgatattaagttattttattccccgaggctgaggcttaccataggtactattgtaaacatatcagtggattttttgacagactggaatgtagcagttcttcaacacagggccaatttactatgtgggcattttttaaaaattattattcagggggagggtgccatggatttagggggctcatctagaaaagtagagt

SEQ ID NO: 95746 - DNA, 585 bp, Homo sapiens
ccgactgtttggaaaatagttaaacatatatgtctaacttcaatatctcaaaactattaaagctgtcagctgtactattggaaatatataataaaatagtagctctaaaatagagaaactaaataatagccactatgcacacatatgttcaagttaagaattatctataacattgaaagtaaatagaaatgtcttaagtggactactaaagcatttagattccttctctttggtaaggagtgccaagtagatataaggtattgtttcctatgcaatgagaaagaatatatattacaaacataataatttaaaagaaatcagagagctatagaataaagaagtctatgaactaaaattctacaaagtgatgagcacttgtaaggtgaactgatattaagttattttattccccgaggctgaggcttaccataggtactattgtaaacatatcagtggattttttgacagactggaatgtagmagttcttcaacacagggccaatttactatgtgggcattttttaaaaattattattcagggggagggtgccatggatttagggggctcatctagaaaagtagagt

SEQ ID NO: 95747 - DNA, 585 bp, Homo sapiens
ccgactgtttggaaaatagttaaacatatatgtctaacttcaatatctcaaaactattaaagctgtcagctgtactattggaaatatataataaaatagtagctctaaaatagagaaactaaataatagccactatgcacacatatgttcaagttaagaattatctataacattgaaagtaaatagaaatgtcttaagtggactactaaagcatttagattccttctctttggtaaggagtgccaagtagatataaggtattgtttcctatgcaatgagaaagaatatatattacaaacataataatttaaaagaaatcagagagctatagaataaagaagtctatgaactaaaattctacaaagtgatgagcacttgtaaggtgaactgatattaagttattttattccccgaggctgaggcttaccataggtactattgtaaacatatcagtggattttttgacagactggaatgtagcagttcttcaacacagggccaatttactatgtgggcattttttwaaaattattattcagggggagggtgccatggatttagggggctcatctagaaaagtagagt

SEQ ID NO: 95748 - DNA, 570 bp, Homo sapiens
attagtccattttcacactgctataaagaaccacctgagactgggtaatttataaagaaaagaagattaattaactcacagttccgcatggctggggaggcctcaggaagctcacagtcacgtagtgggcaaaggagaagcaaggtaggccttacatggtggcaggagagacagagccaggggaacatacttttgaaccatcagatctcgtgagaactcactcaccatcacgagaacaggaaaactgccctcatgatcctatatatatgtacacacattcacacacatatatgtgtgtatatatttatatgacattatataagtatacatacacatacataagacattatatataatgtctactatttcaccgtttcagcraagtttgtaccacatcacatttgtgatctccatcatatacattaacaacttaattttattcatgtttctttatgattcaattaaatttaagtacctaaaatatttttgagataccaggcttaaactgccacatatatatgactaagaaaaatacttttatattttgcatgtatataatgacttttaaaa

SEQ ID NO: 95749 - DNA, 634 bp, Homo sapiens
atatcctagtagtactatgaaaatagttttgaccttgcagatcccctgagagggtctcagagaccacagagccctggaccagtcttggttctgagcagcactactccagacaaccatcgtctcccatgtgttcctgggtctgcttcattagataaccactcttgaacctggctcacgcactccaggctccctcacaccaccaccaccaaatggcccatcgtctctaacctaaaacacaacagaaaacttcctccttatgctgttttttaattccttctgtcatttcaccaaacttctaagaaamagtagttccctctggctctaccgcctcaccactcctgctttttgctatcttaattaccaaagtaatacacagatacttttttttaaatcaaacaatatggataaatgaccatccacaatcccaatctcctccccactgataaccactgttagccctagaaaatacctatttttctgaattaaatcaatatcagattgaaatttttgtttccttgtgttttgccccctccaaatttttactttttttttaattctgaaaaacttctatttagttagattccaattcttttggtgacctatgttatggatcaaattataagggctgtcaatt

SEQ ID NO: 95750 - DNA, 629 bp, Homo sapiens
gaacctaactgagaagggctaaagctaacttgagatgtcattttgatcccagatctactagctatgtagccttctttatttttcagtttcctcataggataaatagaggtaaaactcatttttcctgctacttacaaaaagtggttataaaaactaactaatagacgcaaaaaatagcraaaaaatagaaacgcaaaacaaaatttaagatacaatggggagtgtattaatatattcaaggaaacttgaatctgtgctcccaggtgaaagaaagaaaaagatacaatgacagtaattaaaaaattatacaattagggaatatttgttatttcctcactttatagatgagacaataaatgctagtttaaaaagtgtaagacagggtattcgatgaaattattgtaatttttttctctaacattgtgaaattacagtggtaatctttcgaaactatataaattatttacatatgttaacattttaaaaattaagatggtaaaaccaatgtgtatccttaaaaagcaatccatcaggtataagggtgataattatacttacactgatctcactgatttactttcacgtttcaaggtaaagaaatgaaactttgctattgtatacatctgttg

SEQ ID NO: 95751 - DNA, 609 bp, Homo sapiens
tcggctctttcactcaacctgttttctggatgagtggaggacaccaaaccattcagtaccttgatgaaaggaagtgggctagatgcacttctgttttatagggatacatcagactgaagcccatattttgatttttktgtgtgtgtgatagtactgtaaattctcctttttcattttctcaatctcattaacttcattctcggttgcttcattattttcagaactatcttcttgtagctgcatttttttttctaagtcactaatctgtcagctgttacagtatttttaattatatttttccaatatttcttttcttgtcatcatttttaatttacatgcatatattatttttatgatgaagcataggggtggctgtatgttatatgctatatagttacaaactttatagagattttgcctcttgaatttcacaatgcaatagcaattcttctacgctgcccagatttatgtagagaagaggccattaggaagaacttggacccatgttggtaggctctgaaggttgtatctcaatcaatcattgccacagaaaatctagttctgattttgagcctttgtattttacactgctatcctgggcagcagaat

SEQ ID NO: 95752 - DNA, 617 bp, Homo sapiens
attacatgcaaattcacccatgttttcttctagtactttcatagtttcatttttaacattagatctctgatccatttggagtttgtgtattgtatgaggaatggatctaatttcaccttttcttttgcttttgagatggagtctcactctgtcaccaggctggagtgcagtggcaccatctcatttcactgcaacctccatctcccragttcaagcgattctcctgcctcagcttcctgagtagctggggctacaggcatgcgccaccacgcctggcaaaatttttttttttttttgtattttagaagagacagggtttcaccatgttggccaggatagtctcaatctcctgacctcgtgatccacccgcctcagcctcccaaagtgctgagattatgggcatgagccagcacgcctggccctaattttactttttctaaagagatatcccactgtcttaacatgatttattaagaataaagaagacagtctttatctgaatttcttgggataccacatttatcatatactagatttctgtgtataattgggtctatttaacccaattatttgctattttaaagcaaacttaacaaacttctgagcccagagtggtg

SEQ ID NO: 95753 - DNA, 522 bp, Homo sapiens
gaagaaataaattgcaactcagccggtgtggaagaggttttcaaacayagcatgcacaagatgctattctatgtttgctttcaggatttgaaaagaaatcctgtgtaggtgttttgtgagaactagaaactgccaccactgtttaatttcatataacaacaaattccttccctatgtggtcatattaatattgctgcttaagagattgatgcttttacctactcacgcacacctgaatgtgtgagtaagtgaaacctacacaaacctacacacaatgatattcagtttattggaagacatggcattaaaagccatcaagcccaaactgctattcagtttataagacaatgtgatattaaaagccatcaagcccaaatacaaaagaacattggaagtatagaagtgttacaaatagagaggagaaatcaaatgtagaagagaaattgtgaagcaagagaaagcaagacttcggcaagatagaaccaacatttgataccagaaatacctgacaagagtgattgc

SEQ ID NO: 95754 - DNA, 522 bp, Homo sapiens
gaagaaataaattgcaactcagccggtgtggaagaggttttcaaacatagcatgcacaagatgctattctatgtttgctttcaggatttgaaaagaaatcctgtgtaggtgttttgtgagaactagaaactgccaccactgtttaatttcatataacaacaaattccttccctatgtggtcatattaatattgctgcttaagagattgatgcttttacctactcacgcacacctgaatgtgtgagtaagtgaaacctacacaaacctacacacaatgmtattcagtttattggaagacatggcattaaaagccatcaagcccaaactgctattcagtttataagacaatgtgatattaaaagccatcaagcccaaatacaaaagaacattggaagtatagaagtgttacaaatagagaggagaaatcaaatgtagaagagaaattgtgaagcaagagaaagcaagacttcggcaagatagaaccaacatttgataccagaaatacctgacaagagtgattgc

SEQ ID NO: 95755 - DNA, 563 bp, Homo sapiens
ctgtctcagaaaaaaaaaaaaaaaaagttggtagttgcagatacaaaatgctactgcatgagatctgtccagtagcctcaactatttttartatgcagtcagagagacagaaatgtatttcagggcagctgctaccaatttctttttttttgttttgttttgttttgacatgatactttttgccagatactgttcttttctatagagtaatcctaaatcagaaaaccatgtcatgatatcaggcttaattttaacagccagaaaaaaaaaatcgccaccaagatataaaacattttacaaaatgaatgagggaagagattttgagcacagtattggtaaagtagagttcaaggggtgagagatgtgatacaccacaccgtccccacggaaaaacagcaatacaaaatgaactgtatcattttttactgacttgttctgttggtgattgaggcatttcagtgcacaaccaggaaaataataggttactttcacaatggtagaagtttaacaaatgctcaattattcaccctacatcatcgctgtcattggtgagagttttactg

SEQ ID NO: 95756 - DNA, 585 bp, Homo sapiens
ttttaattttgataatgttactttttcacaagagttccttcagattcacttaccctctctgatctttcattatctcacctgtagaaaagtgttgagcttgatcatctgtaagattatctcaaaagtcctgttaagctgtaactagtctgtgactctatgatactctgaatgttataatcctctctaatgttggtaattcttcacctttttgtgtcatataccccactgagaatgcggtgaaagttttgaatcctcctccatttaaaattgccactctgcacaaacacatataatgtttcatgcaataccatctggggatcaagaatcttttgccctaagcacaggaaagaaaaatttatggaaatgacatagaattcagaaagtattccccacctaacaggtgggagacwttatgtggcttattttactctaatattatgcaaccaagaaagtagaaaattggaagatattctgaaaagcatgtataaaacacattgcaaggttacataaaatagtgacaaaaatgagttcaatatatctggatctgatctgattatttagtttaggagaatcgctgttgtcaaa

SEQ ID NO: 95757 - DNA, 560 bp, Homo sapiens
ttcataattctctcttgtggcatcagactcttgtctgtgatttcattttatgaatacgaataaagaacaaggctggaagagaaagatttaatagcatattttgctgaaaatgtgagcaattaaaatgggctgacccgaatgtcaaagatttagaatgtggattgctgtggagagaagttctacctaataagtgcagttgacaaaatgaggaatttttttaggacaaagggtaagtttaggaaaaacaamatctgttgtgagtatctgaaaataatgagcaaaggaagagagaaaaggacaaatctacatcaagtcctactaaaccgagatgtgcatctgacccgtgcatgtggggaaatcaataaaattagagcaaagtcatttctcaattttcatagatgagtgtattctttcaaaaattattaggtcctgtaagaaaatcaattttctgcatttttctacaggaaattatacttgattcaatgtaaaaaggaaactacaggaagaaaatgaatatgacagtattgagatcatgtgagaaaaagagaaggaaatgcgtg

SEQ ID NO: 95758 - DNA, 614 bp, Homo sapiens
ccactgtgcccagctgtaattcctatctgagcaagaacacacatctgaccgttgtaaaacaaaatgttttttattgtgagagctgtgaattcaccaagttgaagttcatatggggtgatctttacccattttgcctgagtggtatcaggggtggaggagtcatgtcttcctaccctagcgcccaggattccagcttcttgtcaaggctccctgcaaaggacaatacaagtgtctcatttctgctccgtttcctgccctacttcctctccaagagcaccttcaggaagggtggaggatgagggaatctgtttgcgatgggcatctggacttaagtggctttaaattttggggcacactctacaacaagaatttaaaagcttaagcaggatacaaaaaagctgagataacgcttggaaatggtaatgaaggaaaaggatacaaaaggacctgaattagctttttcttggagaaaataaattgtaagagcgtacttgacagtacgcgtaaagagactcctcattgtgactcagatatgactttcygaagcttctctcccaggtgcacattaggtggaaggaagaagggagagaggaccaggtttctttaaaaacaga

SEQ ID NO: 95759 - DNA, 583 bp, Homo sapiens
tttaatcattgggaaaatgtttaaggaagacacctgtaggcagaggacmgccatcaggtgtgcagaaccactggcttgaaggatctgcaagccaggagggaggtgctggcatgacagtccaagcctccggctggggtgggatacaggtgtggagaagtgacagaggctgaggatgggagagtgtgacaacccatgagcttgtgccagaatatcgggaccattctacccaggagaggtggacacttacctcagtttttctctgtgctttctgttcctatcacagaattgggtttaatgtttgttgaaagaataaagagatataatggattagagaagaaaattgggtagatggcatccaaattttatcagtttgtgaaaaacgatggggttacccatttttttattggctttttttaaattattatactttaagttctagggtacatgtgcacaatgtgcaggtttgttacatatgtatacatgtgccatgttggtgtgctgcacaccattaactcatcatttacattcggtatatctcctaatgctatccctcccctatccaccaaccccatgacaggcccct

SEQ ID NO: 95760 - DNA, 600 bp, Homo sapiens
ttcaagcgattctcctgccccagcctcccaacaagaagcttttttacaccaaaactcaaatcagttatttgctgcctaaaaggttcttgtaaaccaaaggctagctgctctggccggaactgagagcatactatatcccatagaacacccaatttctctttctgaaagaaagcaaaacttctttattaatgaatgtatggataattcaaggtctatagacctatgctgtggttaggctcatttatgagcagtagccctgctcagttaatctctggtcattagtctttcttccaggagacyggactcttttcctggacctcaacttgtcaaactgtgattttactcatttgtaaaagacagagtgccttgagtatgttgctcttgtcaatgaagaagggcaaccttagctcatcagaaactgcagaagacatactggggaagctttccctgccattaattcccaagaagtgattcaacagagagttgacatcatgaagctaatttgcatctcaaaatatctacgagttattgagcctttcaatgtgctagaccctctactgtacattttacctatagcaactcatttaatcttcctgaaag

SEQ ID NO: 95761 - DNA, 313 bp, Homo sapiens
tttttttgttaaagtactgttgcatttatgaaaatctttctggatgcctttttatcaccctgtgcttgctttttttyccttttattgttttttatgttgtttcatggagcttggggatttgtgaagcagccaaccagagggaactgaagtcattgatagtgaacacacagtgacttcctaactgatgccaattttccctccccctccaataaaaacagtcatatttgtctgccgttggcatcaaagacaatttttatggcatggtctgtaccactatctcaacatgatggtagatttctgagcattaaaatcc

SEQ ID NO: 95762 - DNA, 584 bp, Homo sapiens
gtgactgtcttatagaacatgggcatctcagcactgcttggtagggcttttatgtttatatgatttactttttggcattagtggtataataaaagtttcagattatcctgtatgaaaaaaacatttatttgaaaatatgtaatacatctagtcctgaatgtatgacctatattcgaaaagttcctttacaagtcagttaattagaactcagaaagcattttcccttggaagtaatattgtaagtggtggtgtggtttccagactggcacataaaaacccatttaatctgtcgtatatctgtagtatcgccctggtttcaaatctagtttagccacagtccatttgggtgatcttaggcacttaygttacttaaattcctagtctataaaatgaggagaaggtgtttgtgaggactattttagataatgtgtatgaaatgctttatgaagtataaaatgctgcataaaagtggcagatatattgttttcacccaccaaacaaataactgttaaagggcagaacatggtatatcactggagcttcaaaatggaaagtgtacaccccaggaggtgtgcaggtgtgga

SEQ ID NO: 95763 - DNA, 584 bp, Homo sapiens
gtgactgtcttatagaacatgggcatctcagcactgcttggtagggcttttatgtttatatgatttactttttggcattagtggtataataaaagtttcagattatcctgtatgaaaaaaacatttatttgaaaatatgtaatacatctagtcctgaatgtatgacctatattcgaaaagttcctttacaagtcagttaattagaactcagaaagcattttcccttggaagtaatattgtaagtggtggtgtggtttccagactggcacataaaaacccatttaatctgtcgtatatctgtagtatcgccctggtttcaaatctagtttagccacagtccatttgggtgatcttaggcacttacgttacttaaattcctagtctataaaatgaggagaaggtgtttgtgaggactatttkagataatgtgtatgaaatgctttatgaagtataaaatgctgcataaaagtggcagatatattgttttcacccaccaaacaaataactgttaaagggcagaacatggtatatcactggagcttcaaaatggaaagtgtacaccccaggaggtgtgcaggtgtgga

SEQ ID NO: 95764 - DNA, 613 bp, Homo sapiens
tatctgcttaatattatctcttctgaaaggtagctgtactccataaatcagattgtgaatcagcttcttgtttgataagcgaagatatcaaacatcaaattggttgttgcaaatcaaatgttcacatcaatatgttttttgttccacatctaatcaggagtggtggtaatctgtctagaataatttccaaagctgtgtttaggtgtggatttatttaatgcatttgagagcacaaaacttctcagggtagatatgtagaactaataacataattggaaacttattaaggagtgacgttttatttagatattctttagtctacagaaaatgagtgaatagaaccacatattactaatttaaaacaattatccagctaatttgcttttttgaatagtgtgagtttaagttttgatatttattagtgtaatatccctatggaaccatttaatcatagaagactaatctttccctacaacattctctcctaaataagactttcctgagaaacaaactagaatmtttttattcttgaaccgaggactcacttatcttatctaggctgacttactggataaggccatagcatcagtctatgtgaatcacccaattttca

SEQ ID NO: 95765 - DNA, 529 bp, Homo sapiens
tactatgaattctattgcattgtgtcaggaggtgtacagtatctggtgtctatttctttgcattctgaactttctaacagtgaatgataattgcctgcacaatacccattctcctacagtatctacttttcaggaatagaactacaattttattttgggaagcaaaatgcctgaaaaaggtctgtatttgactggtctcaaattccygatctcaagctatctgcaacatcagcctcctaaagtactgggattacaggcttgagccaccactcctaacagaaacatccctcttctatctcttgcaatacttcttgtgttaatataaccacatcagcttccttttggttagtatctacatggtgtatctttacctaaacttttattttcaacttttcagtgtatatatttagaatgtgctcttataaacagtgtatcatttattttctgggctaatttccctcttctgtctccactttctgatttccatcaccatagaacaattttgtctgtctttgagtttcatataaat

SEQ ID NO: 95766 - DNA, 518 bp, Homo sapiens
aataaaaaggaaggagcagaaaacatatggaaaaaccagtggccaaaaactttcagaatttgacttaaaaaaaaattaaatacacatccaaaatgttcaataaacctcaagtaggataaatatgtagagatccacacctagacaaatcayaggcaagcagtcagaagacagaaagaaatagaaaaacaagcaagagaaaaatgacttattactacaagaggcaaaaatgcagttaacagctggcttcccatataaaacaatagagggcaaaaagcaatcaaatgaaaaaactgttaaccaagagttccattatccagaaaatctttcttcaagaatgaaggtaaaataaagacattaccatataaacaaagacaaaataattcattatttctaaaatcttacaaatatattgcaaaattaataaatccagatgtaaaatatcacatgcatattatttggtttatatttaactcaataacaggaagaaaaagtttgatattggataataaggccggaca

SEQ ID NO: 95767 - DNA, 518 bp, Homo sapiens
aataaaaaggaaggagcagaaaacatatggaaaaaccagtggccaaaaactttcagaatttgacttaaaaaaaaattaaatacacatccaaaatgttcaataaacctcaagtaggataaatatgtagagatccacacctagacaaatcataggcaagcagtcagaagacagaaagaaatagaaaaacaagcaagagaaaaatgacttattactacaagaggcaamaatgcagttaacagctggcttcccatataaaacaatagagggcaaaaagcaatcaaatgaaaaaactgttaaccaagagttccattatccagaaaatctttcttcaagaatgaaggtaaaataaagacattaccatataaacaaagacaaaataattcattatttctaaaatcttacaaatatattgcaaaattaataaatccagatgtaaaatatcacatgcatattatttggtttatatttaactcaataacaggaagaaaaagtttgatattggataataaggccggaca

SEQ ID NO: 95768 - DNA, 563 bp, Homo sapiens
gtttaaaccacttagaatgagaggatttacaaagatcctgtttaatgttcagctgacacattgtcaaaaacgtttatcatgcaaccttttgaagtttcttccactccctcctagttattaaagcttggattgcagttagttatcaacaacaaagcatacacgtgatggtgtttttagagtcagcctttcagtttgatttctgaactactaagcaaaattcagttctcctgatcagaaaaatgattagtgacctacttttcatgctgaatgcacaaaaccgttgatttctgaaatcacttctatatggacctagggataatgcaagggacatggaaatttcatttgtatcataatgctccaaactgcaagaattttcagatrtaagaatctgccacttcaagtgaggctgtgattctttcagtgcaaatgaggaaatagtgacctacattattgagaagattcctctggcaacttaattcctaatgtaaatttcttcagattgagaataagcttcagttcgtgttttggcaagaggaataaaactctttctgaataattcaagc

SEQ ID NO: 95769 - DNA, 563 bp, Homo sapiens
gtttaaaccacttagaatgagaggatttacaaagatcctgtttaatgttcagctgacacattgtcaaaaacgtttatcatgcaaccttttgaagtttcttccactccctcctagttattaaagcttggattgcagttagttatcaacaacaaagcatacacgtgatggtgtttttagagtcagcctttcagtttgatttctgaactactaagcaaaattcagttctcctgatcagaaaaatgattagtgacctacttttcatgctgaatgcacaaaaccgttgatttctgaaatcacttctatatggacctagggataatgcaagggacatggaaatttcatttgtatcataatgctccaaactgcaagaattttcagatgtaagaatctgccacttcaagtgaggctgtgattctttcagtgcaaatgaggaaatagtgacctacattattgagaagattcctctggcaacttaattcctaatgtaaatttcttcagattgagaataagcttcagttcgtgttttggcaagrggaataaaactctttctgaataattcaagc

SEQ ID NO: 95770 - DNA, 382 bp, Homo sapiens
gaattcttttccccaaattcctttctctccttgttttaatcttagatgtgactacaaattttggcaaattcgcctgtgacaaagtacagagaatgtcatgaggtttgagaacacggatcctgagtcaagagaatcagtattctcttgatccagtactggaaacatccttgcagccattctttacraggacccatgtcagcctggccttggtttctcttttgttaacagctattcattttgctgctttcaagtgcctgctggggcagctttagaactgagggcaaacccgtacctctaaaatccaccagcagtcttctgcaactgcagacattccagacaaggggctcagaccactcgcaatgcctcaccttttaattctcgg

SEQ ID NO: 95771 - DNA, 558 bp, Homo sapiens
atcatctgtctcattgggtgctctctttctttagatttaaaaggcctgtgagcaattgggacaaggcaaatattttaccatcaaataattcaagattttttctcacacctaacacttgtgagatgacttatcacttaaatcctgagagtcatcatcagattttccctttgtcctctattccaatctcaaatattacatactgataaaaaaatccaaagtattattaaaaatagtttaaattgcttaagtttatcattcttaacttctttaatagttacacacatatatatttataattattttatgtacatatgtatatataattatatctcatttatataagtatataattaccatgtatgttcacatataaaataattacatacttataactgattactgaaataaagtacaaattacattatttacrttaaggtatagttcagcttgtctgtcatgagcttcttgatgaagaagtagatagacacatctctctccggtcctgtcttgctagtgtcatgggtcctttcctcctgttccatgttactgcttccatcc

SEQ ID NO: 95772 - DNA, 506 bp, Homo sapiens
acaaaataaaccacaaagctcttgctaatgtacaattgtggagagttttggtgggaatatttcaaaagtagtgtgtattttcccttgattacttccccagatccttagggattcaatccaatagtggtgtactcccttaggaaaatatgtttcatttataaacttttttcccctatgtaatgaaaacagttttggcttagcacactgttctggtcaaattatgtggccaaattctgcggaaatgatgagggggcgacacacagacaaagcagcccctgggcaccgagaggctctgggctccgagaagcttgtgggtgtggggaagatgactcccgtgcagacttttcaccctgcggggyggttccacgttataccaatatttaaatggttgagtatttcagattgagcgtacaacgtataaagatacataaagttgcaatgagcagagcctaatagcttttttagactctagagagatacaaaaagacacaaatatagataaatga

SEQ ID NO: 95773 - DNA, 616 bp, Homo sapiens
ggcaataccatgtaagtactctgcctgatgtggtgtgaagtatgagattttctactcgggatcrcaagctgttgctgggcctgtgtgagttgaagcgattggcctctgtaatccttttgggattttttggcttttttccgggccttgggtagtcttatcacatgcatacacccatcagtgctcacccactggctggagggccccttagcaggtctctggtgctctctctctctgtgtaactctcatctctgcggttccctcccctgcaaactctagccactttggcctccccatactcccagcactgtctcctgaaccatctgtttctgcttccctcctttccaggaagtgagctgggcgagcagggctcaccctgttggtgtcctctagctcaggggtcagtgtcctgcactgcttgacgtccaatgtctgaaaaccattgttttgtgtattttgtcctgttttttagacatctcatcttgactagaagtgagagtttagaatttactgtttatactgattctgctttacacaatcctgtcttttttctgcttgcccgtccacttctaatcaggtgttaggattttgttaagccaaagccatattcagtgggaac

SEQ ID NO: 95774 - DNA, 616 bp, Homo sapiens
ggcaataccatgtaagtactctgcctgatgtggtgtgaagtatgagattttctactcgggatcgcaagctgttgctgggcctgtgtgagttgaagcgattggcctctgtaatccttttgggattttttggcttttttccgggccttgggtagtcttatcacatgcatacacccatcagtgctcacccactggctggagggccycttagcaggtctctggtgctctctctctctgtgtaactctcatctctgcggttccctcccctgcaaactctagccactttggcctccccatactcccagcactgtctcctgaaccatctgtttctgcttccctcctttccaggaagtgagctgggcgagcagggctcaccctgttggtgtcctctagctcaggggtcagtgtcctgcactgcttgacgtccaatgtctgaaaaccattgttttgtgtattttgtcctgttttttagacatctcatcttgactagaagtgagagtttagaatttactgtttatactgattctgctttacacaatcctgtcttttttctgcttgcccgtccacttctaatcaggtgttaggattttgttaagccaaagccatattcagtgggaac

SEQ ID NO: 95775 - DNA, 526 bp, Homo sapiens
gtccatagacccctggaacagtaatgtgtaagcctggttacaattggaaaccaagaaggaacatttcaaatttgcagatatccccaccacttgttctaccattgtaagatggggagcaaactatttcttccagacagctcagatacttaaacacacttgggactcactgtcttagggagaagcagtaggggaataaagaccttaagaccaggtgaaactcactgaatctctaatcagaatcctgaaaattgttcayactgagagtaggatagttaatgggcatgtcaggaaagcagatttcaaatattttgaagcagtgataaataactagttccaatcccaagagaatgggtgtgagtttttggaattcattagtcatcatagacttctcaggtggatgtgtttaaagcaataaggcaatgatgaatgacgtcagtcgagtcattagtggggcaggcttttctctggtggtttctggtgccaagttaataaatggaaagtgaaactcattgaggtaactagaagc

SEQ ID NO: 95776 - DNA, 612 bp, Homo sapiens
aaaaatagtacccaaatacaaattgatgctacacgtagtcctatctagagagactgttgtgttcaaagaaacacaatctaagaatcataaacattttaaaagtaacaatcattaaagaacgtgcaaaggaatcacgttcataatactcctctttaatgcttttccaaccctctttctttcttgctccaccagctgcttcagggcctcccactcttagctccacactttttccctgtacctgcaaagccctagaatccctgctctcctcctccctgactctttgggctgggaactagctgcagaggcagtgcccccatcgagacagagagagagagagacagacagacagacagagagactaaacaaagattagcctctctcaaagtcagtagtgaggagttcagaaaagactgtgaaatgcaagttttaataaattttgtcccagctacacatataggactttgaactttttaaaacacacttgtgttgtattctcagatgatcttcaaaccaccacctctttgagattgatggagctgatatcagtgtctccatttctagacaagaaatctggcattgtaagtgcccttcawgcataaacaagggaactta

SEQ ID NO: 95777 - DNA, 434 bp, Homo sapiens
aacataagttgtttattactgtaatcaagtattctatactgtacataattatactcaacttttatgactagcagctcagtagttttgtatccacgagtatcaccaccaacatggagtaatgccttgcactacaacattacaacctcactgagcaatagaattttccagtttcattatattcttatgagatcaccatcctacatgtggtcttttattgaccaaaactgttatatgaggtactgtgtgtatacacatattatataatatgtayatacgtgtttatatatgtctatatgtgtgtatatgtgtatatatatacatatatatgtatatttgtgtgtatatacacacttttccaaatggttaaccagctgtatggacaacatttagtgaatagtccattttgacgatttgcaatgctacatatatcatgt

SEQ ID NO: 95778 - DNA, 673 bp, Homo sapiens
accctacacagttgtctcctcgtggtgactaccagctatggaatcgttggatacaacctacctgactcaccccacagacttcacagcacacatggacagcacccacatgccacagtaaccagctcrgttgcagcgggagtcaagaaatgtgcctgctggcactcaccctactgactagtaccccgtggaaaacttatttgggtaatgttctgggccaaataatggctggagtcccacagaccccttttctgtctcctgctccccactcatcttccccattttgttcagccctatgaggtgtgctactgtatcagtccattttcacactgccggtaaagacatgcccaagactgggtaatttccagaagaaagaggtttaatagacgcacgattccacatggctgggtaggcctcacaatcatgccgcaagctgaaaggcacatctcacatggcagcagacaagacaagagagattgtgcagggaaactcccctttataaaaccatcagatcttgtgagacttattcactatcagaagaacagcatgggaaagacctgcccccgtgattcaattacctcccacctgttccctcccacaacatgtgggaaatcaagatgagatttggctggggacacagctaaaccctcttctcagctaccctcttctctctgga

SEQ ID NO: 95779 - DNA, 673 bp, Homo sapiens
accctacacagttgtctcctcgtggtgactaccagctatggaatcgttggatacaacctacctgactcaccccacagacttcacagcacacatggacagcacccacatgccacagtaaccagctcggttgcagcgggagtcaagaaatgtgcctgctggcactcacccyactgactagtaccccgtggaaaacttatttgggtaatgttctgggccaaataatggctggagtcccacagaccccttttctgtctcctgctccccactcatcttccccattttgttcagccctatgaggtgtgctactgtatcagtccattttcacactgccggtaaagacatgcccaagactgggtaatttccagaagaaagaggtttaatagacgcacgattccacatggctgggtaggcctcacaatcatgccgcaagctgaaaggcacatctcacatggcagcagacaagacaagagagattgtgcagggaaactcccctttataaaaccatcagatcttgtgagacttattcactatcagaagaacagcatgggaaagacctgcccccgtgattcaattacctcccacctgttccctcccacaacatgtgggaaatcaagatgagatttggctggggacacagctaaaccctcttctcagctaccctcttctctctgga

SEQ ID NO: 95780 - DNA, 673 bp, Homo sapiens
accctacacagttgtctcctcgtggtgactaccagctatggaatcgttggatacaacctacctgactcaccccacagacttcacagcacacatggacagcacccacatgccacagtaaccagctcggttgcagcgggagtcaagaaatgtgcctgctggcactcaccctactgactagtaccccgtggaaaacttatttgggtaatgttctgggccaaataatggctggagtcccacagaccccttttctgtctcctgctccccactcatcttccccattttgttcagccctatgaggtgtgctactgtatcagtccattttcacactgccggtaaagacatgcccaagactgggtaatttccagaagaaagaggtttaatagacgcacgattccacatggctgggtaggcctcacaatcatgccgcaagctgaaaggcacatctcacatggcagcagacaagacaagagagattgtgcagggaaactcccctttataaaaccatcagatcttgtgagacttattcactatcagaagaacagcatgggaaagacctgcccccgtgattcaattacctcccwcctgttccctcccacaacatgtgggaaatcaagatgagatttggctggggacacagctaaaccctcttctcagctaccctcttctctctgga

SEQ ID NO: 95781 - DNA, 580 bp, Homo sapiens
tagatttctcatggctctgtgctgtccttgtcatagtgagtactcacgagatctggtggtttaaaagtgaagcatayccctccctgatctttcctgtttcaactcctaccatgtgagattcctgcagctctttcatttttcatcatgattataagctactttagatgttaatattgttacaaaatttcactgaattttcttgtaaaattacctgacaaagtttatgttattataccattaatgtgataaataaatatattatgacattacaacatattatgatatcataattcatatgtattatgacatcacaatatattatgacatcataatgcacacacaacatgacatcataatatattatggcatcataatttatactacaacatcacaatatatcatgacatcataatgcacatgtattatgacatcaaaattcataggcattatcacgtcacagtatattgtgacatcatcatcagtatgtgttatgacatcacaatatattatgacattatacttcatatgtattatggcatcacagtacattatgacatcgtactttgtatataatatgatg

SEQ ID NO: 95782 - DNA, 499 bp, Homo sapiens
ttggtcatggtgtacattcattttgatatattcttgattcatttcacttttttgagaatttctctgtgtgtattcatcagggaaattcatccatacacatatttacttctgatgcttttgtctgcctttagtatcagggtaatactggcctcacagaacaaattgggaagtgttcccaataactgtcccrtattttctggaaggccttgtaaagagttggcattaattcttcattaaatgtttagtagaatttaccagttaagccatgtggctctgggcttctctttttgtgaagatttttaattaattgaatctctttacttgttatatgtgtattcatatattctgttccttcttggatttgcttttataattggtgcctattgaggtatttatttctaatttgtagtatttcatgtgtttaggttttctagacagttggcacagaagattcaagaagtttaatgtaggagaatgtttaatgtaggagaatgaggct

SEQ ID NO: 95783 - DNA, 604 bp, Homo sapiens
tttcaacctataggctatttttcaattctaggttatccagtagattttgaaatgttatgattaaatatctacttctcaagcattcatctttgcaaatgaaacaatcccaagctcttataatgcacatcctataaagggcagattagtcaatatatggttcagaaataattatgtaatatttataagaaaattaaaaatttagatctttaactcagataacaataatccaaattaaaatgtgatttcattacrtaatttaaaatgacaccagaatactagtaaaaattatattaaaaagtttatgtaatcttttttagctgtaggactttattagcataaattcaaatacaggaaccaaagtaggattgagacctgtagtcaaaggttaaaatgtacacattataggggcatgattaaactaatttaaagcataataacatggagaaatgttgcaaaacatacattttactgaattaattgttagtatctaatcattttgtgagaaccaaattaaaaagtagctacacatgcacacacccacacagaagtgcaatattgtcaaataaacgatgttcagctacactagaaatcacaactgtgtttt

SEQ ID NO: 95784 - DNA, 604 bp, Homo sapiens
ctactgcctgctttttatcttgtgtatttattacattttcacgtgtcttcacgcatctcttgaattggaaattgtgccctggagactgtatacaagactggattaaaaagactggattctgttttgtccctgtgaagagtgttgtttttaaaagatggtgttaaatgggctggattctatcttcaatacttatctctcctatggaagtcatagccaawatatgcattcagtttttatatacacatatttcatgtatgtattgtatatagaaatgtttctataatgatatataataatttacccaggattcatcatttttctgtgtgagagtgttagttcagttagctacttcatcattagtggaagccagaacctcagttttgatttttgagtgtaatataaaaaattacacagtatggatacttttacatcaatttttaatgcaatattatatttgtgatatttatgctgttacagatatctacagtttgttcatttaaaaaagtccttttttacattgtggtaaaatatacataaaattaaccattttaacaatttttaaaagtgcaggacagaggaattaatcatactcacattgttctac

SEQ ID NO: 95785 - DNA, 624 bp, Homo sapiens
ttccacagctgacctccaaagatgctaagcacttcttagttacctctatggtgtgattttaataaatcacaaagtcagatcgtccccaccctcactcttcgtctaatctactctgagcctagctctcccaggccctttctctagtctctctaatgaaggcattccaagcattgtggccacaggagggcagggctggaggaggaagacacccwggtctcttgatgtggagaactccagctgggagggaggagccctgtccttgactctctggagcccctccctaccataggccaattcacctgctgctgcagccccatctggactctttaaaaaggttcctacctagtagagtcagaaacagggtcagtgagactgtgcctgtctcacagttacactccagccccagcgacctcagatcttggataactgcctgagtcagccggtgtaatgctcccaccagctccagtgagtcctgattctagatttactcccagctttaacactcactgtgtgtgtaaccttgggcatgcagccaggccttcctgaaactgttttttcatctaggaagtgtgatgagaacaacaccttcctcacagtacctcctgaggactcagttgcatgtgg

SEQ ID NO: 95786 - DNA, 526 bp, Homo sapiens
aaatcactttactaattcttcccctgtgaaaccaagagcaagaattcaacaacaaagacactgtacagagtcctagtcctctgaaaaccttcaaaaaaagaaagccaatagactatactcaatttataccccaattagaggtataccagttctctcagatgagaaagaattggctcaaaatctctggcaatgcaaaaagccagagtgtctccttcaagagagcccactagtgccccagtgatggtttttaacagtctgaattgtctaaaatgacagacatggaaaaaagagcagggaaactcatttaaattgagaagaaagttgaaacttaacccaaggaagccaagcaatccggttaaatgattcaaaacctgaaagataaaatagcaatcttaaraaatatctaaactaaaaaattcttgagctgaaagatttactgtgaggattttataataaaatcagaagtatttccagcagaatagactaaactgagaaaagaatctcagagctcactgttttattgaat

SEQ ID NO: 95787 - DNA, 641 bp, Homo sapiens
ttagtattttttatataacaaatwgtgtaaatcaaaaagtctcaatgtcattataaactatcttggcaggggttgatctccaaagaataatttctatcctaaaatatacccaatccaaatttcactctaccgtaattcttttaatcagtttcagaggaataataaatttcaaaattgttcaaggtacttcttttagttcaagtaccttttgacaggtgtaaaactgtagacagactgatacatacatattctaattgactcaaaattatatgggacctattttaaaatctagattttaaaatgtgtcaacatacacatgttctccttgtgaaataattgctttttattctctggatagaataatttaatctttaaaccttccattcactcttagaaacaaaatactacataaggatatgcttataaaaataattcccaactagcttttcagttcagaaatatatgtgaagaatcatcaaacatctaatggatttcaaggagaaatgggttagtaatttattccatatgtctcaaattttcctagactcaaggcttccttttaaataattgtaggcgtttaagaaaccatgtaaactaaaaagaagaaattgtgacgctgccgcttaggctttttaagtctt

SEQ ID NO: 95788 - DNA, 641 bp, Homo sapiens
ttagtattttttatataacaaattgtgtaaatcaaaaagtctcaatgtcattataaactatcttggcaggggttgatctccaaagaataatttctatcctaaaatatacccaatccaaatttcactctaccgtaatwcttttaatcagtttcagaggaataataaatttcaaaattgttcaaggtacttcttttagttcaagtaccttttgacaggtgtaaaactgtagacagactgatacatacatattctaattgactcaaaattatatgggacctattttaaaatctagattttaaaatgtgtcaacatacacatgttctccttgtgaaataattgctttttattctctggatagaataatttaatctttaaaccttccattcactcttagaaacaaaatactacataaggatatgcttataaaaataattcccaactagcttttcagttcagaaatatatgtgaagaatcatcaaacatctaatggatttcaaggagaaatgggttagtaatttattccatatgtctcaaattttcctagactcaaggcttccttttaaataattgtaggcgtttaagaaaccatgtaaactaaaaagaagaaattgtgacgctgccgcttaggctttttaagtctt

SEQ ID NO: 95789 - DNA, 641 bp, Homo sapiens
ttagtattttttatataacaaattgtgtaaatcaaaaagtctcaatgtcattataaactatcttggcaggggttgatctccaaagaataatttctatcctaaaatatacccaatccaaatttcactctaccgtaattcttttaatcagtttcagaggaataataaatttcaaaattgttcaaggtacttcttttagttcaagtaccttttgacaggtgtaaaactgtagacagactgatacatacatattctaattgactcaaaattatatgggacctattttaaaatctagattttaaaatgtgtcaacatacacatgttctccttgtgaaataattgctttwtattctctggatagaataatttaatctttaaaccttccattcactcttagaaacaaaatactacataaggatatgcttataaaaataattcccaactagcttttcagttcagaaatatatgtgaagaatcatcaaacatctaatggatttcaaggagaaatgggttagtaatttattccatatgtctcaaattttcctagactcaaggcttccttttaaataattgtaggcgtttaagaaaccatgtaaactaaaaagaagaaattgtgacgctgccgcttaggctttttaagtctt

SEQ ID NO: 95790 - DNA, 641 bp, Homo sapiens
ttagtattttttatataacaaattgtgtaaatcaaaaagtctcaatgtcattataaactatcttggcaggggttgatctccaaagaataatttctatcctaaaatatacccaatccaaatttcactctaccgtaattcttttaatcagtttcagaggaataataaatttcaaaattgttcaaggtacttcttttagttcaagtaccttttgacaggtgtaaaactgtagacagactgatacatacatattctaattgactcaaaattatatgggacctattttaaaatctagattttaaaatgtgtcaacatacacatgttctccttgtgaaataattgctttttattctctggatagaataatttaatctttaaaccttccattcactcttagaaacaaaatactacataaggatatgcttataaaaataattcccaactagcttttcagttcagaaatatatgtgaagaatcatcaaacatctaatggatttcaaggagaaatgggttagtaatttattccatatgtctcaaattttcctagactcaaggcttcctttwaaataattgtaggcgtttaagaaaccatgtaaactaaaaagaagaaattgtgacgctgccgcttaggctttttaagtctt

SEQ ID NO: 95791 - DNA, 232 bp, Homo sapiens
atgtagaattgttggttttgctaagtggacgtgcacagttcaaacccctgtggtgcaaaggccaactgtatagccattgaatagcaayttatttttagaaattaacctcactaaaatactcttagaaggatgccaagaaaaaaagtgaataagtatttttggttcatctattacatcatttcatttcattatttcatttcttttcatcatttcatttcatttcctcatttca

SEQ ID NO: 95792 - DNA, 232 bp, Homo sapiens
atgtagaattgttggttttgctaagtggacgtgcacagttcaaacccctgtggtgcaaaggccaactgtatagccattgaatagcaatttatttttagaaattaaccwcactaaaatactcttagaaggatgccaagaaaaaaagtgaataagtatttttggttcatctattacatcatttcatttcattatttcatttcttttcatcatttcatttcatttcctcatttca

SEQ ID NO: 95793 - DNA, 232 bp, Homo sapiens
atgtagaattgttggttttgctaagtggacgtgcacagttcaaacccctgtggtgcaaaggccaactgtatagccattgaatagcaatttatttttagaaattaacctcactaaaatactcttagaaggatgccaagaaaaaaartgaataagtatttttggttcatctattacatcatttcatttcattatttcatttcttttcatcatttcatttcatttcctcatttca

SEQ ID NO: 95794 - DNA, 232 bp, Homo sapiens
atgtagaattgttggttttgctaagtggacgtgcacagttcaaacccctgtggtgcaaaggccaactgtatagccattgaatagcaatttatttttagaaattaacctcactaaaatactcttagaaggatgccaagaaaaaaagtgaataagtatttttggttcatctattwcatcatttcatttcattatttcatttcttttcatcatttcatttcatttcctcatttca

SEQ ID NO: 95795 - DNA, 554 bp, Homo sapiens
accatcaattagaatggtggctttctgatcccaaagtcactcgttctgaaaacaatatttttcataaatttgaaagtgagaaattttgatcttgccattcccaagtaactctcttaataagaggcatcagcatgcttcagtgacagctgtcaccttccattgctgagagtcatctttgagttctctatttcactccctacactccaatttagctgcagttctcttggccagtcctatgaaatacatccatggcctaacgacttctcaccactactaccactcatcctgacagcattctcacctaagtcactaccttttttcgctggattagagtagcctcccaatttatttgctcacataacctatttattctacacagtgcaccagatacacccctttgaaatgcaaacacaatcatattatwctctggtgaaattatctcatatattcctatcgcatttaaaattaattcagaatcatcccatgattatcaaaaccctacatgctcttccacaacatggtttacttccaagatatctcttcaacattttttt

SEQ ID NO: 95796 - DNA, 595 bp, Homo sapiens
ttttctacctaatattaataaytttaatcattcattattccattactatgctctatagtgtatacaatttctgttctttgtcatgttattaactaaattatttattgggtccagtaacgtattccataaatattgtacacataaaaattgtgttatttttattcctgtatgctcagctgcccaataacagtctgaggattaacatatttgttaaatgcacaaatacattctttcacaaatattagtttaataattttatattaaactccctctatacttacaatatgaattagataattcagaataaacattccattggaaaaagctacacaatttgttataaaacatccttaaaagcatcagaaagttaatacagcaatgaagaattacaggaccaaattaagaatggtatgaaagcctgtttgtgacgcttatgtttgggttatctctttatttgagtgactataaatctcaaaagagaactaaagggagaaataaccatatctactaacatggtaagggtacttaaacatctcttagtaattgagaaaattgaaagaaaagaaaaaggagaaagggagaaagagaaacagtg

SEQ ID NO: 95797 - DNA, 595 bp, Homo sapiens
ttttctacctaatattaataattttaatcattcattattccattactatgctctatagtgtatacaatttctgttctttgtcatgttattaactaaattatttattgggtccagtaacgtattccataaatattgtacacataaaaattgtgttatttttattcctgtatgctcagctgcccaataacagtctgaggattaacatatttgttaaatgcacaaatacattctttcacaaatattagtttaataattttatattaaactccctctatacttacaatatgaattagataattcagaataaacattccattggaaaaagctacacaatttgttataaaacatccttaaaagcatcagaaagttaatacagcaatgaagaattacaggaccaaattaagaatggtatgaaagcctgtttgtgacgcttatgtttgggttatctctttatttgagtgactataaatctcaaaagagaactaaagggagaaataaccrtatctactaacatggtaagggtacttaaacatctcttagtaattgagaaaattgaaagaaaagaaaaaggagaaagggagaaagagaaacagtg

SEQ ID NO: 95798 - DNA, 575 bp, Homo sapiens
  misc_feature (1)...(575): n = A,T,C or G
agagttttttttcctttgcatcttttgaatatattattctactgcctcttgcttccattgtttctcttaagtcagctgttaatcttacaaaacataggtgctcaaaaaataaacatgtgcatgaatatttacagcagtaatattcatacagtcaaaaagtggaaacaatccatatgcttgttgactcataaatggacrcccaattttcagctataacaaagaatgaagtacttatatatggtataatattggtgaaatttgaaagcattctgttaagtgcacaaaaggacaaatattacttgattttattcacatgaaacattaggaattggcaaatcaattgggatataaatcagattagtggtcattagggctcagggaagcagattagggtgtaacaactttatgtataatgggtttttggaagggacatgatgaaattgccctggaacattgtgaatatgctaaaagcaagtgcattgtatgctttaaaatggtgggtgttaattntatattatgtgatttttaccttaaaaaacaaaaaagaaaaaatagccctactctatacataataa

SEQ ID NO: 95799 - DNA, 627 bp, Homo sapiens
  misc_feature (1)...(627): n = A,T,C or G
aatatattattctactgcctcttgcttccattgtttctcttaagtcagctgttaatcttacaaaacataggtgctcaaaaaataaacatgtgcatgaatatttacagcagtaatattcatacagtcaaaaagtggaaacaatccatatgcttgttgactcataaatggacacccaattttcagctataacaaagaatgaagtacttatatatggtataatattggtgaaatttgaaagcattctgttaagtgcacaaaaggacaaatattacttgattttattcacatgaaacatyaggaattggcaaatcaattgggatataaatcagattagtggtcattagggctcagggaagcagattagggtgtaacaactttatgtataatgggtttttggaagggacatgatgaaattgccctggaacattgtgaatatgctaaaagcaagtgcattgtatgctttaaaatggtgggtgttaattntatattatgtgatttttaccttaaaaaacaaaaaagaaaaaatagccctactctatacataataaactcaagatatgttacaaatttacatgtgaaatcctaaatactaatatatttaagggaatagctaagtagaataacact

SEQ ID NO: 95800 - DNA, 575 bp, Homo sapiens
  misc_feature (1)...(575): n = A,T,C or G
agagttttttttcctttgcatcttttgaatatattattctactgcctcttgcttccattgtttctcttaagtcagctgttaatcttacaaaacataggtgctcaaaaaataaacatgtgcatgaatatttacagcagtaatattcatacagtcaaaaagtggaaacaatccatatgcttgttgactcataaatggacacccaattttcagctataacaaagaatgaagtacttatatatggtataatattggtgaaatttgaaagcattctgttaagtgcacaaaaggacaaatattacttgattttattcacatgaaacattaggaattggcaaatcaattgggatataaatcagattagtggtcattagggctcagggaagcagattagggtgtaacaactttatgyataatgggtttttggaagggacatgatgaaattgccctggaacattgtgaatatgctaaaagcaagtgcattgtatgctttaaaatggtgggtgttaattntatattatgtgatttttaccttaaaaaacaaaaaagaaaaaatagccctactctatacataataa

SEQ ID NO: 95801 - DNA, 631 bp, Homo sapiens
tgacgttccacattaaggcactggaacgattagcaaactaaacctaaagcaagcagaaggaagaaaattaaaattagagaaattaataatttataacaataatatttgttagtgttgaataattgatattacttcttgactagcttttttaaaaaagagaaatattcacttcccaatttattctgtggggccagtgttacyttgatacaaaaattagtccaaatagcatagaaaaataaaactactataagtataaatgcaaacttccttaaaaaatactaacaaatcagatctagcaacatataaaagaattatacactatgacaaagtgaaatttatacaagtaatcccaggttggtttaacagcccaaaatccattaaggtaatacatcttatccatagaataagaaacgagaattgcatgatcacgtcgatagattcggaaaagacatttaacagaatccaaatgctttaatgactaaaaataaaaataaaaactcaatgaaccaggaatagagaactttctacacctgatacatggcacctgtgaaaagccaacagcaagcatgcaacttaatgctaaaagatgctttcccgctatggtcagagatatatactttgataggatata

SEQ ID NO: 95802 - DNA, 631 bp, Homo sapiens
tgacgttccacattaaggcactggaacgattagcaaactaaacctaaagcaagcagaaggaagaaaattaaaattagagaaattaataatttataacaataatatttgttagtgttgaataattgatattacttcttgactagcttttttaaaaaagagaaatattcacttcccaatttattctgtggggccagtgttaccttgatacaaaaattagtccaaatagcatagaaaaataaaactactataagtataaatgcaaacttccttaaaaaatactaacaaatcagatctagcaacatataaaagaattatacactatgacaaagtgaaatttatacaagtaatcccaggttggtttaacagcccaaaatccattaaggtaatacatcttatccatagaataagaaacgagaattgcatgatcacgtcgatagattcggaaaagacatttaacagaatccaaatgctttaatgactaaaaataaaaataaaaactcaatgaaccaggaatagagaactttctacacctgatacatggcacctgtgaaaagccaacagcaagcatgcaacttaatgctaaargatgctttcccgctatggtcagagatatatactttgataggatata

SEQ ID NO: 95803 - DNA, 529 bp, Homo sapiens
actaaaaaaataagagtcacccatactgaacaggaagaaataaaactttatttgaaaataacattcttgtatatagaaaattttaaggaatccaccgaacgatagaactcgtaaattatttcagcaatattacagcaaacaargtaaatgtacaaaaatcaattgcacacatctgcaatgaaaaccccaaaatgaatttaagaaaacacttcaatttaaaatagcatcaaaaaaagaaataataattaatttggaaaatgtgatacaagattttactctgaaaattaaaaattattgtttaaagaatatttaaataattagcaaacaccttacacccatgaattggactatttaatattgtagtactttacaatttgaactacagatttgatgaaatccctgcaagtatcccaacagacttctgtctagaaactgacaagctgattctaaaatacacatggaattgtaagggactcaaaatagccaaaataatcttgagaaaagaaaacatgttaggataattcacacc

SEQ ID NO: 95804 - DNA, 595 bp, Homo sapiens
tttctgtttaatgtagaaagtggcattttcattattttaagcttctagcacaatgaaagaatttctctttttcatgaacaggatcatacatgaaaaggaggaagagtgtcctatatcatakttattgttcaacaaaacactgctccacggcttaaattcagtttaagaaagagaatttgttgaacatctaacacatacataaaaggcagtaaagacacatgagaagagggcaggatattgaagtatacagacttcaatgctgagttttatatcttagggagttactccaccttacagaggctcaatttcccctgatttaggaaggcgatgctaatgggtattgcataggtgtaagtataaaaatgttgtattgaagagaatcccacaagcttggtataaggcagaaaataaattgatgtgacatgaataagtagtttattacatttgtatgctacctgcggactagaggaagcaagaaacacagccactatgcttgattagcattatagggatggtacaatgattgttgccagaagctggggggaggaagaaatggggaagtattgtttaatgggtatagagtttcagttttaca

SEQ ID NO: 95805 - DNA, 679 bp, Homo sapiens
tcatttcatcatttcatatcatttcatcatttcatcttttcattccatcatttcatcatttcacttcatcatttcatttcctcatttcatcatttcatttcatcctttcatcatttcatctcatcatttcatcctttcatttcattatttcatttcataatttcttctcattgttgcatttcgtcattccatcatttcatcatttcacttcatctcaycatttcatcatctcacgatttcatttcatctcatcatttcatctcatttcatcttttcatctcgtcatttcatttcatcatttcatttcatttcatcttttcatctcatttcatttgatcatttcatcaattcatcatttcatcatttcatttcattacatcatttaatcatttcacttcatttcatcacttcatttcatttcatcatttcatatcatttcttcatttcaccatttgatcttttcatttcatttcatcatttcatcatttcatttcatcatttcacttcatcatttcatcatttcatttcatttcctcatttcatttcaccatttcatttcatcattccatttcatcatttcatttcacttcatctcatcacttcatcatttcatctcatgatttcatttcatcgcatcatttcatcatttcatttcattatttcatttcatttcatcatt

SEQ ID NO: 95806 - DNA, 626 bp, Homo sapiens
aatctatcatgtgagataaaaaatattaaacattcatttattgaataaatgaatgaaaatcataattacctcgatcactatatttaaaatttaaatgaagcaggaaagtaaatcttcctaattatcatatacttagctgtttaaaatcactctaatgacaagtaatatgctttcactcttgaattatacttttaaaatgcctgtattgtttcattcactcatgcttccattagttcagtgaacaaatattgattacttacccactatgtgccaggtattatgatagattcagggagtacaaaaatgattaaatgaggggatcagttggagtgactgttttctagaaacaatgcctatttcagttatgaactagtctgttttgaagaaaatggtgagggaaagctaaaaataatattttcactttattcaacaaatcttattgaggtcttattatgaatcaggggctctcctaggtacgggcatacaaaattgattaagaccatrcttgcgtgcagaaaacaaacagaaaagcatctctataataaaaaggaaaaagaggaatcccctttgtaggtttcatagtttatactgatatttctgatgtcgtctcagagaattagtcacaa

SEQ ID NO: 95807 - DNA, 600 bp, Homo sapiens
ggcctcataaaactcagatactttatctaaaawtgttattttcatcataggaatgatcaaagcatgagtccacaattgcattaaaatgtgcttgtatcacaagcacaaaaggaggggaaaacatccttactgatattttcaacgtatgctttacttttcatcaatatgaacctcaacttgatatgatgcagattgaaggaaatcacccataattccgtaataaatataatttattgtccagtaaagggtatattaaaaatcatattaaaagtcatgcagtgaagttgtccagggaaatcaagacttaacagtctcactctgacaataatgaacagggggattccctcaagatagactaggacatgaccccacactggcaggtagtagtaccagaaaagaacgcatggaaaaactttaccttatgcttgaggtagggaccaggctaaagtgaaagccagacctaaaattctatctaaaataaatccacaattgaagaaaatatgtggtgtacaggcatagaatgtctttactggatcattgaaatagtaagataaattcaactttttacattgttttcttttcctccagttagggcttgag

SEQ ID NO: 95808 - DNA, 583 bp, Homo sapiens
ttttcaacctataggctatttttcaattctaggttatccagtagattttgaaatgttatgattaaatatctayttctcaagcattcatctttgcaaatgaaactatcccaagctcttataaagcacatcatataaagggcagattagtcaatatatggttcagaaataattatgtaatatttataagaaaattaaaaatttagatccttaactcagataacaataatccaaattaaaatttgatttcattacataatttaaaatgacaccagaatactagtaaaatgtagctaagtttatataatcttttttagctgtaggactttattagcataaattgaaatacaggatccaaagcaagattgagacctatagtcaaagattaaaatgtacacatcataggggcatgattaaactaatttaaagcataataacatggagaaatattgcgaaacatacattttactgaattaattgttaatatctaatcattatgtgagaacaaaattaaagagtagctacacaggcgcacacccacacacaactgcaatattgtcaaataaacgatgttcagctacactag

SEQ ID NO: 95809 - DNA, 530 bp, Homo sapiens
gaatccagatgttgaaacgattagagggagatataaaaataactgattaggccgggcacagtggctcaagcctgtattcccaccactttgggaggctgaggcgggtggatcacctgaagtcaggagttcagaccagcctggccaacatggcaaaaccccatctctactaaaaatatgaaaattagctgggtgtggtggtgcatgcctataatcccagctactccagaggctgagacctgagaattgcttaaactcaggaggtggaggtcacagtgagctgagatcatgcaactgtgctccagcctgggcgaaagagtgagactgtctcaaaaaataacataacaacataacataacataacataacacaacataacataacaaaaataaaataactgattaacatgttaaaggatctaatgaaaccgaaatctcaagagagaaattgaaactataaaaarggaaacacacaacaggtccaagaagtgcagaagaaactcaagcatgatcaaaaacacacagaacttagac

SEQ ID NO: 95810 - DNA, 581 bp, Homo sapiens
ctaactatagtgaatagaaagatacatttaactaagtcaaaataaaaaaatcatcaacatcataacccataatatgatgcactgagaataacagaacattacttctgtagtattcttgccaaatatgcataaccttaacctacttgaatgctaaattgggagacatttgacgtgataactgaccagtcctcataaaaagtgtcaaggttgagaaagactaggaaagtctgaagacctataacagattsggagacagtaaagagatgtgacaactaaatgcaatgtgggaccctagattggatcctgaaacaggaaaaaaaaaaggttaagggaaaaacttgtgaaatttgtacaaaacctgtgctttagctaattactcagtgtgaattttctgattttgataattttactatgcttatgtaaattactaacattaggagctgggagatgaagcttataagtgaattctctctactatttctgcaatattactctctgtactattctgcaatattacttctgcaatactacttctgcaatattactatctgcactatttgtgtaattttgctgtgtctaaa

SEQ ID NO: 95811 - DNA, 648 bp, Homo sapiens
ctacccatttctttgccctcactagaagcaaaatttattcagttttctatactgtatattttgaattctccccttccctgtttttcttaaatctaaattattcatgcttctgacctcactactccaacaaaatgtctcttatcaaggtctccaatgactttcataatcctaaagcctatgatcacttcttagccctcatcttcttagccctcatcttctttgacatgttagcacaattgacacagttcatcactctcttcttcttaatagagattattttcttgtcttctaggccagtgcttctcaaactataaaatgtgaacaaaccacctagagaatcttgttaaaatgcaacactgagtcaggtaaaatgcaattctggagcacagtctaagattctagcctcccagcgatgctgatgctgctgttccatagacmacactctaagtagcaaagttcttgggcactttttggtttcttttacttgttttctattgaaattcaggaagtttggtatttgattgtattctattttctatgtacactaactctgttagtgaccccatgacgaagtcaacaagtcaatgtatagctcaattccaggtctttttcccaaactccagcctcaaaacaccaactcctacttgg

SEQ ID NO: 95812 - DNA, 598 bp, Homo sapiens
tttctgtggagttttcaactccatgaggacacaaattttcatcagcttggttcacaaatatattctaagtacctaggccagataggtcacaattaaatatttgttgaatgatttaaagaattttccacctgtacacttgagtgggtatgcatgtaaatagagaggtaatgtrcagacccatacaaaacaattacatagttaggcatcatataagtactaagagtgaattattattgttaatgtgggagaagcttgtctaaataagtgactgtggtatcagaaaaggaagaatgagcattttactggcgtcatgctgattacagagagtatattttatatttattccaagagtggtagaacaaacttcaaaatctggttcaaatattttaaaaatcacattttcaaagtctcaaacgtatgattacaaaataatcagaccaattttatgtgcatgtgtataatttcatagcatcatttctttagagacacagtttgtagttaataaacagtgatcattctaggtaaggcattgcaatgaattaccagaattcttcagtataattcttcattaaaattctgatgatcatataaattgaat

SEQ ID NO: 95813 - DNA, 597 bp, Homo sapiens
caaatggtcaagatatgacagtctttagcattcatgagaaaacatgattgcttctggctgcaatatgtagagactgatttatgatattttcagaaagtaatgcttatttaaaagcatacacatttttcaaactggtgggactgataacaataagagccctgtaataactgaataaggcagaccttgtggctcttctttaccaatgggaccactttaagaaacagactcttgtagctcctgggtcagagcaagcttattattattcttcattatattttgcttggaacaaagaaagaatttctaaaggtgataaatattaatccttttaatggtggarggctacagtctgtcattgttctagagaattaggtgactttaagaaagatagctaagtttggaatagtgttgtgtagagtaaaaatcatttttataaatcattttcaagaggtagaggagtttaaggtgagtgaaaatagccactcacattagtcaagcaggctcttcataggcggatgctgaaggaaaaccaacgcaaagatgagttttcatcaggaggctagcaaacaataacagcaaaactcaagtagcacgtaagca

SEQ ID NO: 95814 - DNA, 597 bp, Homo sapiens
caaatggtcaagatatgacagtctttagcattcatgagaaaacatgattgcttctggctgcaatatgtagagactgatttatgatattttcagaaagtaatgcttatttaaaagcatacacatttttcaaactggtgggactgataacaataagagccctgtaataactgaataaggcagaccttgtggctcttctttaccaatgggaccactttaagaaacagactcttgtagctcctgggtcagagcaagcttattattattcttcattatattttgcttggaacaaagaaagaatttctaaaggtgataaatattaatccttttaatggtggaaggctacagtctgtcattgttctagagaattaggtgactttaagaaagatagctaagtttggaatagtgttgtgtagagtaaaaatcatttttataaatcattttcaagaggtagaggagtttaaggtgagtgaaaatagccactcacattagtcaagcargctcttcataggcggatgctgaaggaaaaccaacgcaaagatgagttttcatcaggaggctagcaaacaataacagcaaaactcaagtagcacgtaagca

SEQ ID NO: 95815 - DNA, 656 bp, Homo sapiens
aacccagagatgatttaaagagtacaggaggatgtacataggtatgtgcgaatactatgtcattttatatcagggacttgagcatcctgaaagttttgtacatgtgggaggtcctggaaccgatccctgatgggtagaaagggaggattgtacttgtgccaaatgaggggtacatgtgagtgctttacacattgagtcttctggaggaggaaatcaccatgggagggtcattaaaagagttttagaagaaagatttgatatgggttttgaggggtgggtaaattgggatggggctagtgcaggagaaatgtgtgggtaagagctcagagacggaaatggcatgttatgagggtaatggtcttcagatactctgtttgtctccgctataarggaattttgataaattatactttcctgcacatttttagcgtgacatctaatatttttcatcttaagattaagtagatgcaaagaatataattcctaataatgttgtcattatttgtactttaacatataattattttaccactttaaagataaaatcaataaatataaatgctgtagtgatgctgggtcacacagcattgatatttttctaacagttggaaattttttagttatttttattcctttttatttatttttttaatagg

SEQ ID NO: 95816 - DNA, 597 bp, Homo sapiens
aaaaggataaaaagaaatgaacaaagcctccaagaaatatgggactatgtgaaaagatcaaatctatgtctgattggtgtacctgaaagtgacagggagaatggaaccaagttggaaaacactctgcaggatattatccaggagaacttccccaacctagcacagcaggccaacattcaagttcaggaaatacagagaatgccacaaagatactcctcgagaagagcaactccaagacacataattgtcagatttaccaaagctgaaatgaaggaaaaaatgttaagggcagtcagagagaaaggtcagcttacccataaagggaaacccatcagactaacagcagatctctcrgcagaaactctacaagccagaagagagtgggggcaatattcaacattcttaaagaaaagaattttcaacccagaatttcatatccagccaaactaagcttcataagtgaaggagaaatataatactttacagacaagcaaatgcagagagattttgtcaccaccagccctgccctacaggagctcctgaaggaagcaccaaacatgaaaagaaacaaccagtaccagccactgcaaaaacatg

SEQ ID NO: 95817 - DNA, 594 bp, Homo sapiens
cagtcattaaatcttaaagctccaaaatgatctcttttgactccactaatcatgttcagggaatgctgatgcaaggagcagctctgcttctgtgccgctgcctgtatagaccctgcagctgctttcatgggctgacattgagtgcctgcagcttttccaggtacacaggscaagttggtggatctaccaatctggggtctggaggatggtggcccttttctcacagttctactaggcagtgcccagtagggactctgtgcaggggctcaaacctgacacttttcctccacattgcccaagtagaggttctccacaagggcaccgtccctatagcaaacttctgcctggacatccaggcatttctatacattctctgaaatctaggttgaggtccccaacctcaactcttcccttctgtgcacctgcaggcccaacaccatgtggaagccaccaaggcttgggtttgtaccctctgaagcaatggcctgagctgtacttggccccttttaggcacagttggagttggagcagctgtgatgcagggtgtcatgtcccaaggctgcacagagcagtggggccctgggcctagtccat

SEQ ID NO: 95818 - DNA, 638 bp, Homo sapiens
tcattctttgaatgattcaatctatcaccataggaaggttcttacatatcactctcttgccctgggactaggacttacattctctggatgttaagctcagtgtatgagttttctagggccaccataacaaagtaccacagactgggtgccttaaacaacagaaatttatttttttgcaattctagaggctagaagtctgaaatcaagatatggttgtgttgactccttctgaggtcccactccttggcttgtagatggccatcttctccctgtgtcttcacatggccttccctggtgtctgtgttcaaatttcctcttcttataaggacaccagtcrtattggattaaggcccaccctaatgacctcattttaacttaattacctttttaaaggccttaactgaatatacagtcacattaataggtattgggggttagaacttcaacatatgaaatggtggtagtagtggcagaggatggggggagatcagcccataacactcataaatgattttgattaagtaaacccttatatttgtctattcattttactagacaattttcaaagctcattttctcattaacctttactctaccttttcttggtaaactttgtaagcattactagttctttttta

SEQ ID NO: 95819 - DNA, 589 bp, Homo sapiens
gtctgtgttcaaatttcctcttcttataaggacaccagtcgtattggattaaggcccaccctaatgacctcattttaacttaattacctttttaaaggccttaactgaatatacagtcacattaataggtattgggggttagaacttcaacatatgaaatggtggtrgtagtggcagaggatggggggagatcagcccataacactcataaatgattttgattaagtaaacccttatatttgtctattcattttactagacaattttcaaagctcattttctcattaacctttactctaccttttcttggtaaactttgtaagcattactagttcttttttatagatgggaaactaaaaatggagaattacactacttatccaaagttgaacagttagtagaaaactgggtctagactcgacaactcttagctcttagttcagtgcaatgtttccctgtctcctgtgctggctttttcccccaaacctaaatcctctttgaaataagctgagtggtcatagcatatttagtaacttctgcatctaatagcctcatgccttttagacatcttgagatacagcaagtggac

SEQ ID NO: 95820 - DNA, 580 bp, Homo sapiens
ttccctgtctcctgtgctggctttttcccccaaacctaaatcctctttgaaataagctgagtggtcatagcatatttagtaacttctgcatctaatagcctcatgccttttagacatcttgagatacagcaagtggacaagaatgcaagtatttttaaacatatagcagccccaggcaaarcacgtcagtgggacagcctgacgcttgcctggacctactttaagcttacacctaaatgatgtcaaattaggcaaaaataaattgaaaattgttttaacacctggttgttttgccttcactgtgccagctacctggctcactggaagcacagtgaaggcagaactcatgggaatttttagcagagaataacaagtcatgcaaaaagaatatattattgaaagaatatgctgcataaatactaagaaagaacataggtgatcttgaatagcttcttctgtctttcatcctttgagcccaacaccccctcctcagcccacttaactcactcagcagatcatcttttgtagttcaaggactgcatatgtacaacacttaccacctgcctattaccctgctgtg

SEQ ID NO: 95821 - DNA, 658 bp, Homo sapiens
cactgttaagttgcaagtgggaatgacacacgtagaggtctcaggtatgattcccaggttttaatctaagtaacttggmgaatggtggtgcagggtgggtagagacgagtacagaaatcaataggtattctccagacatgttatgtttgggatgcctactagatttttcaagaagagatgttgactaagcaattggtcactgggctcagggaaacaattgcactggagatacagatgtgagagttgtcagagtctaagtggtatttcatcataggtatagatgtggggatgtcggcgtataagtggcgtttcaccatagatatagatgtgatgttgtcagaatataagagggtatttcataccacgagaccggatgcaagggagtgggtctagagtaaagtggagaaatgtgccatttttttttaagttaaaatatgtttgtatgtcattgagattgattcagtaaaagggaggtattgatgctgcaggagaaaagtggcagcattattggagcaaagtgctcgattaggctagagcagaggaagctggtatgcaagtggactggtgaagcttcacaggagcatcacaggcctcacttggctgaggtgcaacaagggaacttgactgagttgtaattgccatttccttgttagcattc

SEQ ID NO: 95822 - DNA, 658 bp, Homo sapiens
cactgttaagttgcaagtgggaatgacacacgtagaggtctcaggtatgattcccaggttttaatctaagtaacttggagaatggtggtgcagggtgggtagagacgagtacagaaatcaataggtattctccagacatgttatgtttgggatgcctaytagatttttcaagaagagatgttgactaagcaattggtcactgggctcagggaaacaattgcactggagatacagatgtgagagttgtcagagtctaagtggtatttcatcataggtatagatgtggggatgtcggcgtataagtggcgtttcaccatagatatagatgtgatgttgtcagaatataagagggtatttcataccacgagaccggatgcaagggagtgggtctagagtaaagtggagaaatgtgccatttttttttaagttaaaatatgtttgtatgtcattgagattgattcagtaaaagggaggtattgatgctgcaggagaaaagtggcagcattattggagcaaagtgctcgattaggctagagcagaggaagctggtatgcaagtggactggtgaagcttcacaggagcatcacaggcctcacttggctgaggtgcaacaagggaacttgactgagttgtaattgccatttccttgttagcattc

SEQ ID NO: 95823 - DNA, 553 bp, Homo sapiens
aagggagtgggtctagagtaaagtggagaaatgtgccatttttttttaagttaaaatatgtttgtatgtcattgagattgattcagtaaaagggaggtattgatgctgcaggagaaaagtggcagcattattggagcaaagtgctcgattasgctagagcagaggaagctggtatgcaagtggactggtgaagcttcacaggagcatcacaggcctcacttggctgaggtgcaacaagggaacttgactgagttgtaattgccatttccttgttagcattcctcactagattgtaagcccagtgagggcagggaccctccgtaatgtgttcaacattatactgcaattcctgacacaacgtctggctcattcgacaaagttgataactgtttgctgtattaaatggacaaatacacaaattatcctatttggccaaatgtagttcataaataaatatctgttcacttgcatggaatataaaaatgaaaaacttaggcaaatataaccaaagtaggaggaaaaagtgacattttaaatatctttggtttgttag

SEQ ID NO: 95824 - DNA, 615 bp, Homo sapiens
gtgagtgcttatatgtgtcacgaattcttcccttaagcctttgtatttatcatctcacttaattcttatatcatcccttagatatctactactattattattattattatactttaaagatgaggacctgagccacagagatggtaaggaattgccctcagattagacagcagctacttggtggcagagttggaattgaaacccggacaayttctctccagagcccaggtaactagtcactttcaggccttctaaaccccaatctagtactccttagttatttaaaaagtgaagaataaattaaatatgaaagtaactccactaaaacataccacataaagtcaaaggaagaatgacaaactgggaaaaatatgtgtaattcatatcagagacaaagactaatttatgaagtgatcatagaaatatgtaagagaaagacaggagactcaatagaacaatggacaaaggaaatgaatagttcgcgaagaaaaacatatatatggcctttcaatgtatgaaaaaaatgtgcaatctgactcaataagagaaaggcaaattaaaaccgtgccaaaatacctattttttttttaacctatgaagttgacaaatatcaaa

SEQ ID NO: 95825 - DNA, 615 bp, Homo sapiens
gtgagtgcttatatgtgtcacgaattcttcccttaagcctttgtatttatcatctcacttaattcttatatcatcccttagatatctactactattattattattattatactttaaagatgaggacctgagccacagagatggtaaggaattgccctcagattagacagcagctacttggtggcagagttggaattgaaacccggacaacttctctccagagcccaggtaactagtcactttcaggccttctaamccccaatctagtactccttagttatttaaaaagtgaagaataaattaaatatgaaagtaactccactaaaacataccacataaagtcaaaggaagaatgacaaactgggaaaaatatgtgtaattcatatcagagacaaagactaatttatgaagtgatcatagaaatatgtaagagaaagacaggagactcaatagaacaatggacaaaggaaatgaatagttcgcgaagaaaaacatatatatggcctttcaatgtatgaaaaaaatgtgcaatctgactcaataagagaaaggcaaattaaaaccgtgccaaaatacctattttttttttaacctatgaagttgacaaatatcaaa

SEQ ID NO: 95826 - DNA, 615 bp, Homo sapiens
gtgagtgcttatatgtgtcacgaattcttcccttaagcctttgtatttatcatctcacttaattcttatatcatcccttagatatctactactattattattattattatactttaaagatgaggacctgagccacagagatggtaaggaattgccctcagattagacagcagctacttggtggcagagttggaattgaaacccggacaacttctctccagagcccaggtaactagtcactttcaggccttctaaaccccartctagtactccttagttatttaaaaagtgaagaataaattaaatatgaaagtaactccactaaaacataccacataaagtcaaaggaagaatgacaaactgggaaaaatatgtgtaattcatatcagagacaaagactaatttatgaagtgatcatagaaatatgtaagagaaagacaggagactcaatagaacaatggacaaaggaaatgaatagttcgcgaagaaaaacatatatatggcctttcaatgtatgaaaaaaatgtgcaatctgactcaataagagaaaggcaaattaaaaccgtgccaaaatacctattttttttttaacctatgaagttgacaaatatcaaa

SEQ ID NO: 95827 - DNA, 633 bp, Homo sapiens
gcagtggaaagctcagaggatgagcaagggagagacccagattttagcccaactgtgtgaacctggacagatcccttacgcagtttcttttttgtaaaatgaaggaccttggttcgctaatgtttaaggattttttcctttctcaaacgttgtgttctaaaccttgtacaggcttctaattgaaattgttctacctttaaggcccatttgtctcctttctttttaccaaagcccagggccaagcatgtcccaggtgtttattatatagttgctgactgataagaagtgattgttgkaatgctctctattggtcactaggaataaaccaagaatgtctttgggcaggaatgaaaatccagtgggaagctctggaagtcaaggaatatttccccatcagaagctggtctggggtttctctgataaatttggaaagctcagtggttgtcttgtttttctacctctgctaatcagcctctctaaacagataagaaaccaggaaaatcatttagctatataaattcaatacataaccttgttaatcacgttgctgcagcctgcgccttgtgagttggtcagagcagtggatgactttgcttctaagtgcaggtgaaatgccaccaaattcacatgctg

SEQ ID NO: 95828 - DNA, 627 bp, Homo sapiens
cccactccagcctgggggacaagagcgagattttgtttcaaaaacaaacaaacaaaccattagctctcataattcactcactatcacaagaacagtacaggggaaaccgtccccatgatcccatcacctcctagcacgtccctccctcaacatgtggggattacaattcgagatgagatttgagtgaggacacagagccaaattatattatatattacatattataattatataattataatatatgtaattatatattacatataatgcataattataatataaaatcataaatattatataaatatataaaatatatgaataatatgctccacatttttatgcttttaactctttcttgtccttaacatctatcatgtgtctgaggtgttttgaaatgrggcttatgtttctgtgtgtatgtcagagaaataaagcatcatcatgcattagactagagcagtgaaaatagtaacattttcatttgtataacacttaaaggcttccaaataacaaaataaatgtttattgaacttctaatatgtgtcaggccatatttatatatgcaatctcatttaatcctgaaaataatctgttttacagctgaggaaatggagacacattgag

SEQ ID NO: 95829 - DNA, 628 bp, Homo sapiens
gttgctgcagcctgcgccttgtgagttggtcagagcagtggatgactttgcttctaagtgcaggtgaaatgccaccaaattcacatgctgcctgtgacyaatgcctaactcagtctttccaagccagggataatcccagctgggatgtcacctctaatatggcaacaaatggtggtgcagcaaaaaataatcatgaaacagtctttcttcccttcttcctaaacttcatccacatagactgttggatatttatagaaatccagcacaaacacagggaggggaacgacacacactggggcctgttgcagggcagggggagagagagcatcatgataaatagctaatgcatgtggggcctgatacctaggtgatgggttgagaggtgcagtaagccaccatggcatgcatttacctgtgtaacaaacctgcacatcccgcacatgtatcccagaaagaacttaaaataaaatttaaaaacaaataaacaaaagagtgaacaaaggagggagctgcgggtagaattttaacaacatgcataccactatttttatattagagatttctaatatatgctaatataaatatatgcaatattaaaaatcgtattatacacacacacgaaaaaagt

SEQ ID NO: 95830 - DNA, 634 bp, Homo sapiens
cagagtggtgagtggcttaccattgatcttgctcaatagttgattagcatcaaagtcatcatggtctgcattctcctgaggaatgccaaccttgctgttgaaataactggcaaaggcactcaaagtcccagaagaagtctgctctcccttccgcgcgggcacagcaggtggctgccgcagttggaaatccttaaacatttctttcacatccttgatctctttatccccaagtgggtctaaggcagtgaaggcatcactggagatgtccttgggagggccagctctgggaggtggctgaggaggagtgaccaggagagaggagtgcatggatgggggctgagtggacacagcaggagctggaaaaatattgctctgaaaaggattccccaaagggcttgttrttgaccaagcattgggtgccacagatgcagaagggccccagacaacaggcactggagggggagttgaggctgcaaagggtgaaggctggttccaacctgaaacagctggacttgtaccaaaaatgacgggctgactaaaacctgaaggttgaccacccatcatggctcccggagccattgaaggggactgattgaagaccaaagatgctgtgttccatggtcctgcctgaggg

SEQ ID NO: 95831 - DNA, 606 bp, Homo sapiens
cctctagaggtgggagagaggcttttcttttatatcacggccttcaggtatgtctcttaatatttaaggctcttgctgaagctgatagtcaagtaggatctcawcctcatcatcccagtctctcctctgggcttaccctttttgtctatgtcctctgaaagagacactcaatactgatctaatttagtcaatcacacattaagatctcctatttgtacatcttttcataacattgcttagagttgcctgtgttgtgacagtaatctcatctatttagtggttaaagtcaaccaacaactgatctttaatttatatacagtagtccctccttatcctcagggaatatgttccaaggcccacagtggatgtctgaaatggcacatagtgccaaaacctatatacagtatttttctcatatacatacacatgataaagtttaatttatcaattaggcacaataagagattaacaagtaataaaatagaatgattataacaatatgctgtaataaaagttatttgaatgtggtctctctgtctctcttctctcaaaatattatattgtaccgtactcacttattttcagaccaaggttgaccacagactt

SEQ ID NO: 95832 - DNA, 649 bp, Homo sapiens
ccttttttaacattcttattgaatttttaattatggtaaaatatacataatataaaatgtgccattttaaccatttttaagggtaaaatgtggcattacatacattcgcattgttgcgcaaacattgccactattgatttcaggaacgttttcttctttcccaactgtaactctatatccattaaacattaattgcctgttccctcctccctccagcccctggcaaccaccattctactttctgcctttatgaatttgactactctaggtacatcatataagtgaaatcacacaatattttttttttgacacagaatctcgctctgttgcccagactggagtgcagtggtgcgatcttggctcactgcaacctccgcctcccaggttcaggtgattatcctgcctcagcctcccaagtaaccygggattacaggcttgcaccatcatgcctggctaatttttgtatttttagtagagatgggttttcaccatgttggccaggctggtcccaaactcctgacctcaagtgatctgcctgccttggcatcccaaaatgctgggattacaggcatgagccacagcacccagccaatacttgttgtttcatgactggcttatttcacttggcgtaatgtcttcaaggtttctc

SEQ ID NO: 95833 - DNA, 649 bp, Homo sapiens
ccttttttaacattcttattgaatttttaattatggtaaaatatacataatataaaatgtgccattttaaccatttttaagggtaaaatgtggcattacatacattcgcattgttgcgcaaacattgccactattgatttcaggaacgttttcttctttcccaactgtaactctatatccattaaacattaattgcctgttccctcctccctccagcccctggcaaccaccattctactttctgcctttatgaatttgactactctaggtacatcatataagtgaaatcacacaatattttttttttgacacagaatctcgctctgttgcccagactggagtgcagtggtgcgatcttggctcactgcaacctccgcctcccaggttcaggtgattatcctgcctcagcctcccaagtaacccgggattacaggcttgcaccatcatgcctggctaatttttgtatttttagtagagatgggttttcaccatgttggccaggctggtcccaaactcctgacctcaagtgatctgcctgccttggcatcccaaaatgctgggattacaggcatgagccacagcacccagccaatacttgttgtttcrtgactggcttatttcacttggcgtaatgtcttcaaggtttctc

SEQ ID NO: 95834 - DNA, 621 bp, Homo sapiens
tatgtactgagctctggcttcacaggagatatactcacatatgtgatgtttgacatatatttttcaaataacatgattatgccttaaaaactaaatatgaaaatatacttgtggactacaagttatagttgggagtttcaactcaacttttytttttttttccaaggcagaagaatttttcttagtacagaacaaaatgaaaagtctcccatgtccacttctttctacacagacacagcaaccatccgatttctcaatcttttccccaccttttccccttttctattccacaaaaccgccattgtcatcatggcccgttctcaatgagctgttgggtacacctcccagacggggtggtggccgggcagaggggctcctcacttcccagaaggggcggccgggcagaagcgccccccacctcccggacggggtggctggccgggcggaggcgccccccacctccctcctggacagggcagccggccgggtggggaacttctttttttttcttagccaaaaatacttttcttaaatatatgtgtttgaaagaccactaaatttatttcaataacaactaaaaattaccttaatctgcatttggaaataagcacaacttgaaat

SEQ ID NO: 95835 - DNA, 594 bp, Homo sapiens
acaagtgctatatacccaagatagaaaacttgaaaaactccaaaaagtacaaaaaaagaattatttataataatatatycactcaagtcaaatgctattcacattttggtgtgagtctttcatagataagagagagatggagacacacacacacacacacacacacacatatgtatccaaaaatatagaagttatataaaacattaataatgtatagcaaaatttaatatctaggtacttctaaaaaattttgtgtcaatttttcagtcttcaaagctacatctatacctgttcctgtattattgaaaaataataacaagataaacctggccagctatacaaatgctctgagggttgagataacatgcaaatgtagcctcacatatcaatgtgtgaaagctggacagaccacacagctcagaaaaggaagtacactctgcatagctaacttgcacattcactatccaagctgcaccatcttcggggtcattgtgtgccaggcatatcaactattttcaataaaaatggtaagtaatagattttataactctccttggtctcctggcaaatgtgctactcttctctgcatagaac

SEQ ID NO: 95836 - DNA, 562 bp, Homo sapiens
aacctggccagctatacaaatgctctgagggttgagataacatgcaaatgtagcctcacatatcaatgtgtgaaagctggacagaccacacagctcagaaaaggaagtacactctgcatagctaacttgcacattcactatccaagctgcaccatcttcggggtcattgtgtgccaggcatatcaactmttttcaataaaaatggtaagtaatagattttataactctccttggtctcctggcaaatgtgctactcttctctgcatagaacagtcagagttgagggtgcttcacagtcaggtcctctgagcctttgggattttgcttggccactttttccttgtgctgatgaagctgctgagtcttgttcatgccagttgagagacatggcttcaagagttccctttttttgattctagccttcagaataggggaagagcactgtcttgcagaaagaaaatatgcattctttgtctttgcctcataggatagcttggtgccagccccagtaatttagtcgagtttcctgttatgagcagtttggatcccaggaaaggactcc

SEQ ID NO: 95837 - DNA, 609 bp, Homo sapiens
tctcaggctggtgaccatgtctggtaggcttgaggatcagctgtcatgtctgcttctgctatggtcactatgagttttcctactttcagaaagtgcactttattgaaatgttgcagaggccactgggatgagagactgaaggaatgcctggctttgtggttctttatcccaggatccagaaagcggggcttaatgactacataactcccttctccaccccaagctcatstgctgtgtcaccactgtgaccaatccccacctcccccacttcctgaactgtccaggaagggagcaagccaaaaggggaccaagtggttataaggaaattcacgttttattgccctttccctgtaacttattggtaaggaaactgtggaaatgtgtgagaatgaagcacaaaggcacttggtgttttatgaagatagatacattagatatttagattgatgggcattggacacacgacactgggctcatcttccaacctagcaaggggtgctgggttccagctcaaccttcccatttctccctgtggaatcttgaccctatctcttcagccctctttcaagaggctcagtcaagatacagagttggcttaggtgttcccct

SEQ ID NO: 95838 - DNA, 637 bp, Homo sapiens
tttggaaaagcataaaatgatggagaaacttgtccagattaaaatataccaaaaagatataaaaatcaagtgtaatacataactcttggttggactctggtttgcacaaaaaaagttgataagataattttggtacaactggagaaatttcaatatgggcaattaaatgttatgaaattattatttttcataggggatgccaatagtattatggttaaactagagaatgttcgtattcttaggaggtgcatgctgagatctgtgagaatgaattgtcatttgcacaacttgtattcaagtggcttaggaaataatttatatacacacgtaatgtggcaacacattaacaatttggtgtaaatctagatgaaagggatatagatgtgtgctgtgttattgtttaagcttttctgtagattttaatttttaaaaatgataaaatataaacactaaagtgawttcatgtaatgatggaaatttctagctttccatgcaaagtctgattctctgatgcaacaatttgctggagctctgaaaagcctccagagtttgccataatggcttccctcattgaagtcacctgcctgaatccagtaggcctttggtttgcaatccatggaagaaaaaatttcaactc

SEQ ID NO: 95839 - DNA, 637 bp, Homo sapiens
tttggaaaagcataaaatgatggagaaacttgtccagattaaaatataccaaaaagatataaaaatcaagtgtaatacataactcttggttggactctggtttgcacaaaaaaagttgataagataattttggtacaactggagaaatttcaatatgggcaattaaatgttatgaaattattatttttcataggggatgccaatagtattatggttaaactagagaatgttcgtattcttaggaggtgcatgctgagatctgtgagaatgaattgtcatttgcacaacttgtattcaagtggcttaggaaataatttatatacacacgtaatgtggcaacacattaacaatttggtgtaaatctagatgaaagggatatagatgtgtgctgtgttattgtttaagcttttctgtagattttaatttttaaaaatgataaaatataaacactaaagtgatttcatgtaatgatggaaatttctagctttccatgcaaagtctgattctctgatgcaacaatttgctggagctctgaaaagcctccagagtttgccataatggcttccstcattgaagtcacctgcctgaatccagtaggcctttggtttgcaatccatggaagaaaaaatttcaactc

SEQ ID NO: 95840 - DNA, 458 bp, Homo sapiens
aatgctgacagccaggcccgtgtggttcaattaaatcacagtacttgagtgaggtgcctgggcatctgtactcttcagagctctcagatgattctaatgggcaaatcaagatcgggaatctctgaactactttatactgyttccaacataactaaactcttcctatagtgaggtaggcaaaataacgtccccatcttccaaaagatgtccacctccatatcccaggaactgtgaatatgctaccttatatagcaaaggggaatttgcaggagagcaattaggttaagaatcttaaaatgagaagattactctggattattttgggaagacccaagtaaccagaaggatcgttatacatggaagcagatggcaggaaggccagtgtcagagtgatgcagctgagaaagacttgatcagctattgttggctttcaagctgaaataaggccatgagccgag

SEQ ID NO: 95841 - DNA, 566 bp, Homo sapiens
ttccaagtctttgctgttgtgaataatgccgcaakaaacatacgtgtgcatgtgtctttatagcagcatgatttagagtcctttgggtatatacccagtaatgggatggctgggtcaaatggtatttctagttctagatccctgaggaatcgccacactgacttccataaacatttcattttaaaaagtttgcatgcaactagaaagagctagcaaatatttggctgggcaaataaatggtttggtttacaaggaggaagttagacttagatgtagcccccaaagagctgtgggtaattagttgactggatgaagaaccatggtgagcatccttagcagtgtctcctggccagcttagaaacagagttctattggctttattctttcttcagttaatcattgcttacaagtccagttgttttatatttgtactcaccatcttctagagcagtggttctcaactctttggtttcaagaacattgaatgcttaaaaatgatcggcagactccaaaatgcttttgttaacgttggtaataagtgagaaaactttaatttacttattaat

SEQ ID NO: 95842 - DNA, 566 bp, Homo sapiens
ttccaagtctttgctgttgtgaataatgccgcaataaacatacgtgtgcatgtgtctttatagcagcatgatttagagtcctttgggtatatacccagtaatgggatggctgggtcaaatggtatttctagttctagatccctgaggaatcgccacactgacttccataaacatttcattttaaaaagtttgcatgcaactagaaagagctagcaaatatttggctgggcaaataaayggtttggtttacaaggaggaagttagacttagatgtagcccccaaagagctgtgggtaattagttgactggatgaagaaccatggtgagcatccttagcagtgtctcctggccagcttagaaacagagttctattggctttattctttcttcagttaatcattgcttacaagtccagttgttttatatttgtactcaccatcttctagagcagtggttctcaactctttggtttcaagaacattgaatgcttaaaaatgatcggcagactccaaaatgcttttgttaacgttggtaataagtgagaaaactttaatttacttattaat

SEQ ID NO: 95843 - DNA, 566 bp, Homo sapiens
ttccaagtctttgctgttgtgaataatgccgcaataaacatacgtgtgcatgtgtctttatagcagcatgatttagagtcctttgggtatatacccagtaatgggatggctgggtcaaatggtatttctagttctagatccctgaggaatcgccacactgacttccataaacatttcattttaaaaagtttgcatgcaactagaaagagctagcaaatatttggctgggcaaataaatggtttggtttacaaggaggaagttagacttagatgtagcccccaaagagctgtgggtaattagttgactggatgaagaaccatggtgagcatccttagcagtgtctcctggccagcttagaaacagagttctattggctttattctttcttcagttaatcattgcttacaagtccagttgttttatatttgtactcaccatcttctagagcagtggttctcaactctttggtttcaagamcattgaatgcttaaaaatgatcggcagactccaaaatgcttttgttaacgttggtaataagtgagaaaactttaatttacttattaat

SEQ ID NO: 95844 - DNA, 591 bp, Homo sapiens
caagttattaaccggcaaattaaaagactggaaataaatgttgtaaattcagaggaagctaagctcacattggacaagggggctgmgatagctctctgctgcttagccagtttttatccttggccaaattgcttgacctgagtttcaatgttgtcatctatcaaacagagatattagctaatgtaaggttgctatgaagactggcacaaggcctaacacgtagcaggtacttaagactacaagactactcaagtagttatgactattcactactgccaccaggaacttctggaagttgcacaaatataagaaatgtacttatggtggtggtaggcagtgagtaagtgaatttaatttgaacagaggttgatgaaggaaatagtagaaagcaaatttaacaagtaagttgggcccaaataatctcttttccttgaaatcccgacaaaacaatttgggtttgactgtcattggtaactggaaaaaattgtaggctcatgccaaaaacaacagttaggtagattagccagaggcaccacaaaagataaatcgagtcgaaaggcaaggaaggcagttagggggatgttacaataa

SEQ ID NO: 95845 - DNA, 662 bp, Homo sapiens
tatggtggtggtaggcagtgagtaagtgaatttaatttgaacagaggttgatgaaggaaatagtagaaagcaaatttaacaagtaagttgggcccaaataatctcttttccttgaaatcccgacaaaacaatttgggtttgactgtcattggtaactggaaaaaattgtaggctcatgccaaaaacaacagttaggtagattagccagaggcaccacaaaagataaatcgagtcgaaaggcaaggaaggcagttagggggatgttacaataatctaagtatgagatgacmggcttgctgaagatattaggtgcatacatggaagtaaaagggcaaatacgaaagatattttgaagaaagaatgaattaaatttgggcttcgcagtctgtgggtccaggtgttataaatgagttgagattgatccactaaggccttgggggctgtggggaacattctaaccttcatcaagcaactacttcccaccaagatgcaaatagaattttttgcttactcaatcaataagatatcatcatttcttgcataggctataatataaaaatttctgataatcactgaactaaggtgcttagtgccagactggatataaggattgaaagtaaaaaagagttaaaatgactacaatacttcaagacaaaatgaga

SEQ ID NO: 95846 - DNA, 560 bp, Homo sapiens
atgacacttacaaatcatacaagtatgggaggaatagctaatacatcggtggatgtaatcaaaattcagaatggtttattgaccccaaactgagaagatacaaatgaacaccaccatgtgaatgtactttatgccactgaactgtacccttaaaaatggttaagatggtaaattttgttatgtgtattttacaattaaaaagaacaatatttattgagaagttctgcatgtatatgtgtgtatatatatgtacatatatattatatacatcctataatatatctgtgtgtgtgtgtatgtacgtgtatgtgcataaaattcctgtgaggataaatcttaaggaagcctgagtgggagaaagaaaatgcattatatttttttaggtgaattttttactttcttcctttgagtttctcctaaagaattcactctaggggaaaaaaatcccccagttataacttggcaaatatcaaaatatttaattaaggtgagatcaatttttttgcagtacttttgtggrccaacccacctgccttccaaagaagggacaataaagagca

SEQ ID NO: 95847 - DNA, 639 bp, Homo sapiens
aagcttacagtttacaaggaagggagctcaatagatctgcaagatagaccctctcttataacatttattttgtgtccaagctccattcagttgagtacaagtctactggcaggggttatctattgtgttaaaacaattgctaagctatagagtattaaaatctaatactgaacaaaatctgggagtaaataaattctagttaaatataattctttcttttttttttttttttttttgagatagggttcgctttgtcacccaggctggagtgcagtggtgcaatctcggctcactgcaacctccacctcctgggttcaaatgattctcctgccccagcctcctgagtagctgggaggtgcgcaccactatgcctggctaatttttgtatttttggggtttcgccatgttggccaggctggtcttgaactcctgatctcaggtgttcagcccrcctcggcctcccaaagtgctgggattacaggcatgagccaccgcacccggtctggttaaatagaattctgtgaaagaataaacttgagaagctaacaaaaatttatattacttttgtactccaaatgagagaatggcaagcagactggcttctgtcttcatggagcttatagtggtatttacaaaaca

SEQ ID NO: 95848 - DNA, 618 bp, Homo sapiens
ttaaaactaacttgtcatagtacaggattttttttttttaacacagtgggatagatcttgctgcagaaggtaggtgtcctcttttgcaraaggagaggatatgaataggccagggatggcaacagggaagtgtgtggagtgatattagcctatcactcaggactatgattggcctccacagcttacctaaaagaaaaaaaaatcacctctctaattgaaggaagtggatcagaactccagccctcacagggaaccttctagctccgtttccatactctcagatttccctgggacaccagttctcaactggggcttccatcatggcctacagtttatttattttcacatcttaggacctgttcccctcagaaattctgtacttactttctaacttggatgtagtcaaatttggggccacacttttgagggagaacaggaacaaagccaatatttaaggcccaagccaggatcaaggctatctggagaggatgcacgtcacttcagaagtagccctaccctcaaaatatgaagcaggtaatggcacccactcctcagctcaggtgtctccagtggctgctctggtgaacagtatgatcaaattccaggtctgaatgtttg

SEQ ID NO: 95849 - DNA, 575 bp, Homo sapiens
gagtcttcaggttcagagttgaaatatatttacagaatggtaggggtaggctaagatgatgatactcaggccttagccatatgtgaaatgaatgagatgcttatggccagtaccatgagtttctcatccttcatcctcactgaattaaattaaggtccagaaatcaactattttgtagggatccattttttcagtttaaaacaactttgccttttaccaacagcaaagccccaagagaagggatctagaagaaaatcactttagctgaagtttccaagtacaggctgtttatgagttcccyacatgcaacataaacctttatcttttttaacatggaagcaactctatataatttaaagagtcagggcttagaatcagaagatgtaagttggaaccctagtttgctccttatagctgtgtaacattcagctctctactcctcagtttatctgagaaacagaaataatgtcagccttgtggtgaggattgagtaatgtgcattaatataatctagaagataattggcataatctagaatataattttccatagaaatttgtctccagcaaaggcaa

SEQ ID NO: 95850 - DNA, 610 bp, Homo sapiens
ctgagtaactggaaaagggtgtgggtggtggttacatggttatgttcagcttgtaaaaattaatcaattatcaatttgtgacttatacatatacttaaacaaaaaagtaacaaaaacaaaatgaaacaaagtgcagtctctgccctttagcaacttatgttctattaggagggccagcaagaaaatctccatttctgttactcttccttyctttgtgtagagtcatttttgcatttggcatcattttccttctgcttgaagaacttcctttaccatttcttgtagagcaagtttgctggtggtgaattatttcagctctcatatatctaaaaaccctttattttgtctttgtttatgaaactttctttttttttactaaatatagaattctaggttgagttttttttcctttcaacatttgagagatattgcagccactgtttttctgcttctgttgcttctgatgagaaacatgctgacactcatacctttcttattttgtatgttatgtgtcccccctcaacccctgctgttcttaagcttttctttttcacactggttttgagcaattttatttgatataccttgtgtagttttctttgtttcttgt

SEQ ID NO: 95851 - DNA, 622 bp, Homo sapiens
aacttatttcaaatttttttttaaaataaataattccayaggataatggtttagagcagcagttcccaacctttttggcaccagggaccagttttgtggaagacaatttttctcagacttgggggatggggggatggtttcgagatgattcaagcacattacatttattgtgcacttcacttctattattatattgtaatggataataaaataattctacgactcaccataatgtagaatcagtgggagccctgagcttgttttcctgcaactagatggccccatagggttgggggcaagtgatgggagacagtgacagatcatcaggtgttagaatctcataaggagcgtgtaacctaggtccctcgcgtgcgcagttcacaattgggtttgcgctcctatgagaatctaatgccgctgctgatctgacagcaggcagagctcaggcagtaatgccagcaatgaagagcagctgtaaatacagatgaagcttcgctccagtgtcgccgccctctgctcacctcctgctgagtggtgtggtttctaacagacccctggtccgggagttgggaacccctggtttacagtgggaaagaaaaaaatcacctgttagttggaagct

SEQ ID NO: 95852 - DNA, 622 bp, Homo sapiens
aacttatttcaaatttttttttaaaataaataattccacaggataatggtttagagcagcagttcccaacctttttggcaccagggaccagttttgtggaagacaatttttctcagacttgggggatggggggatggtttcgagatgattcaagcacattacatttattgtgcacttcacttctattattatattgtaatggataataaaataattctacgactcaccayaatgtagaatcagtgggagccctgagcttgttttcctgcaactagatggccccatagggttgggggcaagtgatgggagacagtgacagatcatcaggtgttagaatctcataaggagcgtgtaacctaggtccctcgcgtgcgcagttcacaattgggtttgcgctcctatgagaatctaatgccgctgctgatctgacagcaggcagagctcaggcagtaatgccagcaatgaagagcagctgtaaatacagatgaagcttcgctccagtgtcgccgccctctgctcacctcctgctgagtggtgtggtttctaacagacccctggtccgggagttgggaacccctggtttacagtgggaaagaaaaaaatcacctgttagttggaagct

SEQ ID NO: 95853 - DNA, 622 bp, Homo sapiens
aacttatttcaaatttttttttaaaataaataattccacaggataatggtttagagcagcagttcccaacctttttggcaccagggaccagttttgtggaagacaatttttctcagacttgggggatggggggatggtttcgagatgattcaagcacattacatttattgtgcacttcacttctattattatattgtaatggataataaaataattctacgactcaccataatgtagaatcagtgggagccctgagcttgttttcctgcaactagatggccccatagggttgggggcaagtgatgggagacagtgacagatcrtcaggtgttagaatctcataaggagcgtgtaacctaggtccctcgcgtgcgcagttcacaattgggtttgcgctcctatgagaatctaatgccgctgctgatctgacagcaggcagagctcaggcagtaatgccagcaatgaagagcagctgtaaatacagatgaagcttcgctccagtgtcgccgccctctgctcacctcctgctgagtggtgtggtttctaacagacccctggtccgggagttgggaacccctggtttacagtgggaaagaaaaaaatcacctgttagttggaagct

SEQ ID NO: 95854 - DNA, 622 bp, Homo sapiens
aacttatttcaaatttttttttaaaataaataattccacaggataatggtttagagcagcagttcccaacctttttggcaccagggaccagttttgtggaagacaatttttctcagacttgggggatggggggatggtttcgagatgattcaagcacattacatttattgtgcacttcacttctattattatattgtaatggataataaaataattctacgactcaccataatgtagaatcagtgggagccctgagcttgttttcctgcaactagatggccccatagggttgggggcaagtgatgggagacagtgacagatcatcaggtgttagaatctcataaggagcgtgtaacctaggtccctcgcgtgcgcagttcacaattgggtttgcgctcctatgagaatctaatgccgctgctgatctgacagcaggcagagctcaggcagtaatgccagcaatgaagagcagctgtaaatacagatgaagcttcgctccagtgtcgccgccctctgctcacctcctgctgagtggtstggtttctaacagacccctggtccgggagttgggaacccctggtttacagtgggaaagaaaaaaatcacctgttagttggaagct

SEQ ID NO: 95855 - DNA, 471 bp, Homo sapiens
aagccattcttgtgcctcagcctcctgagtagctgggattacaggcgcgtgccagcgcgcttggccaatttttgtatttttagtagagatggggttttgccatgttagccagggtgatttygaactcctgacctcaagtgatccgcccccctcagcctcccaaagtgctaagattacaggcatgaatcaccatgcccggcctgttttttgtttttaaatcctggtcttgcctcgagtaattcccctggaaattcaggctgtaaacttggtgagggatgggttggctagatcctgggtccccagtgcacagcacagagtaaaatatatagggttccacaaatgaatgtatggatgctggcaggggtgctcaggcagaccttgtatctctgctggtgaatagttcaaatgcagccgtgtgaaaacagaaggaagccttcaaagacactgggatcccataggaagtagcagtgg

SEQ ID NO: 95856 - DNA, 604 bp, Homo sapiens
agcttatgtgatctctgcaatttatggcttaaaaatagctataaattgaattccaagtgctcaacagtgccatacagaagagagatgattatctcaacatcctaggtgacaaaatcaccaatcagtggttttaaaatactttgccaacagatgaaatacttccagtttcatccaaaccaatagatgttggggccaagaggaacttgggatgtaactagcagctgccaaatatcacagatggcacaaagttagagacatgtggaaaggacaggatctatgattaaatctgtccagcaagggaaagatgtagataagaaggttcctaaaaccatccaggactctcaagtacatcctgccatgaagaggaaaagaaaaggatgcaaaaattcacccaataccagcatgtatttgatacatgctcaggccaygggaatttcactgtgtgacaatagctgtgcagtcaacactgggccatgtgcaatctatttacttatctcttattagcccctttattaggaccatgggttactctgatatctactactgacacaaccccaaacagaaaagtaacaaaaagaaaatgaaagcaaccactgagaaataa

SEQ ID NO: 95857 - DNA, 528 bp, Homo sapiens
aatcaatagaaggaaacagtttttttcccaaacctctatctgtagaacaaaaagaatgataactgatatgggttatgaatgtgtagcttataaggtgttaacttttgatttcagagagatgaacaaagagtggacactagtgagactagataaaaagagggaacaggggccaagagagactgacagggggaaaacctgtggatagaccacataggaaaaggtggtctgaagaataaactgcattcagtcatgattctacatctcataaaaaagagaataatttaatattcaacagccttcagtgctagtcagcagtaattaacagtgtacatcttgatatgccaaaactcagagytgttaattatacagcaacatgaaatgtgaccccactctgtatataagaccatcagaggccctctctgttctaagctgttgcaaaacagtattaaaacaacttaacgactgcatcctatctgccacgaccccattcacaaacatttatagaatccattatttatgaccgggaag

SEQ ID NO: 95858 - DNA, 303 bp, Homo sapiens
ctcaaacaatcctcctacctcagcctcccaagtagctgggactacaccacacctggctattttttccaatttttttgtagagacaggatcayataatgttgcccaggctggtctcaaactcctggagttgatccccctgcctcagccacccactcaaagtgctgagattacagggatgagccaccatgcctaaaactaaactcttgggaagaatctgaataggctgaagggagcgactccttctcccttccagctctgagcctgagtcaatcagagctttccctccctggtcagtgattagtt

SEQ ID NO: 95859 - DNA, 539 bp, Homo sapiens
cccaacttcgtcttccatgagcatgggcaagagacagaaccacagatagagaatctcctttcttattccaagtctgcaaatgaggttttgaatgtaaataaaaagctagaaatagtaaaatagtcaaacaaaattaaacaaaacccacttaaatatcctgcggtggggaggagttgatttagttacagtgtttccatacaatgagaataatttaggtgatagtgaataaatacatttatatactaaaagatgttataatacacttgatgaaaaaatgttataaatatgacataaacattatatatgctgtcactgatatatgcttaaaattatacatacatgcactcatggcaatatagctaaaaagattacaaacatttttattaaaatatttcaaaatgtttgctgtggtgatcaagggtgatttctgtttatttttttgcwttgttttctgatgtgcttgcaaggaacatgcatttttttgtagttgacttaattaaaaaaatagcacaatgacattttaaagggtctgcaatgag

SEQ ID NO: 95860 - DNA, 528 bp, Homo sapiens
ttttgcatgaaacaatagtaaaatcaaaagaattaaaagcagggattcagggagatatttgtacaccaatgtttatggcagcattactcataatagcttaaggatagaaaccacccaaatgttcaattgacagatgaatggataaacaaattgtrgttatatacatataataaaatagtattcagccacaataaggaatgaaactctgacacgcgctgcaacctggattaaccttgaggacattatgctaagtgaaataagccagtcaaccccaaaaggataagtgctatatgattcattctctcattctctctccacccaaccaacttagggcacttagagcacgcaaactcacagagacagaaagtagaatggtggttgccagaagctggaagtgtagagagagaataaatagtaattgttcgatgtgtacagactatcagtttaggatgatgaaaaagttctggagataggtggtagtaatgattgcacaacaacgtacacatactttatgtcatcgaacgaaca

SEQ ID NO: 95861 - DNA, 528 bp, Homo sapiens
ttttgcatgaaacaatagtaaaatcaaaagaattaaaagcagggattcagggagatatttgtacaccaatgtttatggcagcattactcataatagcttaaggatagaaaccacccaaatgttcaattgacagatgaatggataaacaaattgtagttatatacatataataaaatagtattcagccacaataaggaatgaaactctgacaygcgctgcaacctggattaaccttgaggacattatgctaagtgaaataagccagtcaaccccaaaaggataagtgctatatgattcattctctcattctctctccacccaaccaacttagggcacttagagcacgcaaactcacagagacagaaagtagaatggtggttgccagaagctggaagtgtagagagagaataaatagtaattgttcgatgtgtacagactatcagtttaggatgatgaaaaagttctggagataggtggtagtaatgattgcacaacaacgtacacatactttatgtcatcgaacgaaca

SEQ ID NO: 95862 - DNA, 528 bp, Homo sapiens
ttttgcatgaaacaatagtaaaatcaaaagaattaaaagcagggattcagggagatatttgtacaccaatgtttatggcagcattactcataatagcttaaggatagaaaccacccaaatgttcaattgacagatgaatggataaacaaattgtagttatatacatataataaaatagtattcagccacaataaggaatgaaactctgacacgcgctrcaacctggattaaccttgaggacattatgctaagtgaaataagccagtcaaccccaaaaggataagtgctatatgattcattctctcattctctctccacccaaccaacttagggcacttagagcacgcaaactcacagagacagaaagtagaatggtggttgccagaagctggaagtgtagagagagaataaatagtaattgttcgatgtgtacagactatcagtttaggatgatgaaaaagttctggagataggtggtagtaatgattgcacaacaacgtacacatactttatgtcatcgaacgaaca

SEQ ID NO: 95863 - DNA, 600 bp, Homo sapiens
taaaagattattgtctgcattttatttaattattccgtatgaagtaattatgagagaataatcagccagttcgccgataatagacgtttcataaaagaacacaaaagaygctaataaaggcagagccagccctcatcgctgtcattattactctacatctttaattttcatacatttttattgtttgcctgaaattaattgtccatttcttttcctaatcaggtttattgcaagtgggccacttctagataactataccatttgtgtgtttatctggcgaatgtcccagtagatcttgtcaacattgaaatatctatccaggagactagaaggaaaagaatcataaaatcattgtgccttggcactctaaaggactttgtgaggatttagccactcccctccaccccaaccccacctgccattttggtttataagaaaagaatctgaattactgggaggagttgacacagctagttagtgacagagttgagaccagagtcagatctcttggatgaatctagaatagtgaagctgtagcaagacttaatcatcttaaatgaaattcagtttctatcacaggtatgaatcatttcagagagt

SEQ ID NO: 95864 - DNA, 601 bp, Homo sapiens
tgtgtataattatctgtttatacataagcattagctccccatccaggaccataaacttctttcagatggaccctaggttctatttttcttatactttaactacactcttatactttaaacagaaacacacataaagcaagattatgtattgattggcaacaatgatgtgataagaagcttgcaggaacctaaccctgtattcccttacgagcaatagttcagaattcactaattcagtgtttgcagcaactttataaaacataatgattgcaaacattgagaactgactctgtgtgctatgtgtgtgtgtgtgattaagtgctagacatggactacacaggagcttaatgtgtaaatttatccagtgcttttgtatttagcctggtaatctcaccagaaattgctaatttaaattagttcctttgcttttattaagataaatggaatctcatcaactcagtcttaggacwcaaaggaattagccttagaaataaaactttattttgttaaaaactctagtgaaggaaattatacaacagaagcgcagtgaagggatatcgtttttcacctttgtgagcacaaaacagatttgagtcttccc

SEQ ID NO: 95865 - DNA, 601 bp, Homo sapiens
tgtgtataattatctgtttatacataagcattagctccccatccaggaccataaacttctttcagatggaccctaggttctatttttcttatactttaactacactcttatactttaaacagaaacacacataaagcaagattatgtattgattggcaacaatgatgtgataagaagcttgcaggaacctaaccctgtattcccttacgagcaatagttcagaattcactaattcagtgtttgcagcaactttataaaacataatgattgcaaacattgagaactgactctgtgtgctatgtgtgtgtgtgtgattaagtgctagacatggactacacaggagcttaatgtgtaaatttatccagtgcttttgtatttagcctggtaatctcaccagaaattgctaatttaaattagttcctttgcttttattaagataaatggaatctcatcaactcagtcttaggactcaaaggaattagccttagaaataaaactttattttgttaaaaactctagtgaaggaaattatacaacagaagcrcagtgaagggatatcgtttttcacctttgtgagcacaaaacagatttgagtcttccc

SEQ ID NO: 95866 - DNA, 546 bp, Homo sapiens
gacatttaagttaattggattcaaactaagaggatgtgaatgttgcttaagatcagggcatttaagcactcattattgatgagaccaaggctagggaatgggtatggagatcctgagtggacactgaggatgacaatagttttaaaaagaaaagaaagtgtggcttttcctctcctggaagggggaagatggatggtggccacatagacacaggaagggccagtgttagtctggtcaacttctcactgccttcagttcatcccatgctcataatacttactcagggctcctgtgtcttccctcaatggcagatagtcctttacacctaatataacttcatccccatctctgagggttcttctgggtttaggagaccattccctcgactccttatttctcccatctctgaatcacagggaaccctatggtctgaacatccccctacccttaactgtagattgtyccatattgttctctctctaaagcatgaaccctcagaggcagacaccatattttcccttcctttgcttgattcatggccagcca

SEQ ID NO: 95867 - DNA, 546 bp, Homo sapiens
gacatttaagttaattggattcaaactaagaggatgtgaatgttgcttaagatcagggcatttaagcactcattattgatgagaccaaggctagggaatgggtatggagatcctgagtggacactgaggatgacaatagttttaaaaagaaaagaaagtgtggcttttcctctcctggaagggggaagatggatggtggccacatagacacaggaagggccagtgttagtctggtcaacttctcactgccttcagttcatcccatgctcataatacttactcagggctcctgtgtcttccctcaatggcagatagtcctttacacctaatataacttcatccccatctctgagggttcttctgggtttaggagaccattccctcgactccttatttctcccatctctgaatcacagggaaccctatggtctgaacatccccctacccttaactgtagattgtcccatattgttctstctctaaagcatgaaccctcagaggcagacaccatattttcccttcctttgcttgattcatggccagcca

SEQ ID NO: 95868 - DNA, 570 bp, Homo sapiens
cgccctccagccgcaccagcagttgttgtgttgtgtgcttactatgcactgcctaagctccaatctcagcaggcagttgtgttgagtgctcactatgtcggacgctgtgctaagcacatcctcgatgtcttggccctcaaaaatcacttgttgtttcccattttgttgataagaaaattgaaacctgaagaggataattaacttcttggcagataataactccaagtatgaggattcatattcatactgagcaaaatacatgctcttaatgtatgcgataccctgctgtcttccaaaggcctagaaatcttgggttataaatatacttacccccttgacttcctattgcccttctatctacagtcatacatccaacaaaacatttattaagcccttactatatatgagggtctgtgcttggactgaaactgtrgaagggaacatcagaatggtgatctcaacgacatggagaggcaaaaataaagactttcagtaagtatacaatgtagtaagttcttaactatggtaggtactcagcgaatatttgttggatttgattgattaaattat

SEQ ID NO: 95869 - DNA, 352 bp, Homo sapiens
ttttagagagctgtttctaggcgaccaacagattggtcatagatcatgtgtgctccagcctcatgctgcagaarcctccttctgacctcttaatcaagctgagagctgggacacagagaagagatacacgatcacttacagaaacacccagctggcatcggtcccatgaaccatctgcctgtctcactatggtcagactgtctgctaatgcccgcttcttctatgaaccatttatatatttccccagccttttttaaaaagtggaaaacaaatagcattattggatgtgctctgcctggctgcagctgtgaatcacaaaactggaaatcagtccaagacagagtcagacagc

SEQ ID NO: 95870 - DNA, 551 bp, Homo sapiens
cacaaagtgtctttctggtagcctcaggccctcactccaaactccattcttagcctaagcccaggatgacatcacagggcaggcctgctttcctgtttccttttgaagaacttccactggacaacagtccctacattcacttcacggctatcatgggtcattctcttgttttgactcctgcctcccataaccagattcctgagtttcccgacatcagaaatcaagctggcaccaggctgggcccttggaatgttttgagtaattgatttcttggraaagactccaagtcctgggctacaaagtcctatttgaacccattctcctagccgacgctgcccacctttcagtcttaccctcctctgatcaccccaggccaacccttttgctctttgggccctcatagactttctcattatctgtctgctgtgcagcccttctgttctccaaagtctctttctataaaaacgtcttcctgggccagatcaatactgggcttcaacttcatttcttaactacaattccttacagttatgtaagtattttaccagcca

SEQ ID NO: 95871 - DNA, 551 bp, Homo sapiens
cacaaagtgtctttctggtagcctcaggccctcactccaaactccattcttagcctaagcccaggatgacatcacagggcaggcctgctttcctgtttccttttgaagaacttccactggacaacagtccctacattcacttcacggctatcatgggtcattctcttgttttgactcctgcctcccataaccagattcctgagtttcccgacatcagaaatcaagctggcaccaggctgggcccttggaatgttttgagtaattgatttcttgggaaagactccaagtcctgggctacaaagtcctatttgaacccattctcctagccgacgctgcccacctttcagtcttaccctcctctgatcaccccaggccaaccsttttgctctttgggccctcatagactttctcattatctgtctgctgtgcagcccttctgttctccaaagtctctttctataaaaacgtcttcctgggccagatcaatactgggcttcaacttcatttcttaactacaattccttacagttatgtaagtattttaccagcca

SEQ ID NO: 95872 - DNA, 607 bp, Homo sapiens
ttgctaattcaaactcacttcaggcagactggtttctatctttttattcatgataaaaaaaatcacaatctcaataaaagctccacataccaactctctggaaaacaagtatcccgaacaagtatgtcagaattatgttttgaaaagtggagctctaggttgagaaatctactatttgaagagttatggagtcttactactaaattcagagtttagagatgtttgaataaatgtatgaataaatggacgaataacacaccacagaacaaacatataaatggaaatatttgaaacactgttgcagttcctctagccacgaattactttggagcacattttcactctttcctcaaaaaaggtttttttttttwaaaaaaaattaacaccacacacacacacacacacacacacacgtgtgtgtgtttattacgtatgtaggaaatatcctacatgttagcctattcatgataacaaggatcagcaataactaagacaaaaatagtgtatgagctaagtatttgttagtcacaaatacttgttatttgcagtaatatctcagctttgccgtctgcaggatctcagtagaccacagattgaacacacttga

SEQ ID NO: 95873 - DNA, 510 bp, Homo sapiens
cccctcccctaaaaaaactgtacccattaatattatttcaataactccccttacaaagactttgtgatctagttaagcaacccttcctgcaatccccaatacctgtgggccagggggttgggggttataagaaacaatcaatgaaaccaccatacactccagaagcattatctatatactgaataatttatatattttgaaaatgtatatgcrtgtgtgcatacacacacacatatttgcaattgcaagtataattttaaaatgtatctgattaatcaaataaaatattttacttaaatatgtaatagtgtttctgaattcatactagcatttttagtcattttccattttctcaatagacaccaaataaacaactacaatgatgtacatgaattaaagccactgtattgaaagccattgagatttgggtttttttttttcttatcaaagcataacttagcctatcctgaatagatcaggatagcaaatcaattttatttcaggtactac

SEQ ID NO: 95874 - DNA, 616 bp, Homo sapiens
atttacgcttctaacagaaatgcatgagaatttttattggttcatatctttgtcaccattttccattgtcaaactcaaaagcttttgccaatttcatgcacaagaatttgaatgcagctttaatttgtgcattccttataactaataatcttcaacatcttttaaaatatttggaagccatctgagttctcttttccgtgaaatatttcttcaaacatattgaacattttcctacttggatattctttctttcttattgattgctaggaaatctttataatttttgatagtaaaattttatccacttatatttacatgttgaaaatatcttctcccaatctgaggtttgtattttygttgttggtggtagtgctgtttttatgttgctctgttttatttgtttgctttacatactatggtatttgctgatattcagaagtctttaattttaatttagccaaatacatctttattttgctttgtagtttgtgcttttggggactttaaaatcagctttattgaggcataatttacatgcaatgaaatttaccacttataagtatacaacttgatgagttttaacacttttctacaatcatctaatcatcaccacaat

SEQ ID NO: 95875 - DNA, 616 bp, Homo sapiens
tgaaacatttgaattcccaagtaaccttggtacttttacttattttaaaagtaattgaatcttcctctcctttcatatatttttggcctgattttttgcagcatttgctytcttattatatttgattggaattttgctcagaaataagatttgtttctgatgatttatttttggatgatttgattccatctataggattacatgacttaataactactagcatataaattcactcatgaaatagagaacctaaaacatttgattgtcaattttagtggaagatgcatacaaagtttcgtctcagttaccaccttatttcttgtggtcctacatattattttgcgagtggctattgctattaactgaaagataactttttgaatttttattttgtctagtagtagcactagtataaatattactgtcatctgcttctcattttaatttgaaagaaaacatcttttaatgattcctgccttataaaccctataatgattttctttcctaatttttctatgagactgcttgagaaggacggagaaggaaaagctctcgacactgtgaaatagcttactggaagagtaagcatttaagctcgtgcaaaaataattgtttc

SEQ ID NO: 95876 - DNA, 611 bp, Homo sapiens
aatctctaaccctcagtttccattttataatgggtgcaaaataagcrgctcctatggttgtcatgatgactaaatgtaatcctgccgtgaactttccaaatgtcaggaattggcatgacatcatgacatctacacaaatgtgtgccataccttcctgccagttctactattatttctctgagacttccccctaattgctttgctttttaaacacgggcatctctcaaagcaatgctgcttgaaaaacagggtttattttacaggttattgtttcctaatctacttaaaataaatagacaattactaaagtaagaaaaaaacagactggctcttgggaaaaataaccacactactattatcagaaccaaaataaataacaatgatttgttaatatcatccaatacacagtgttcaaattttcccaaattgtcttataaatatcataattttgttttataatttgtttgaaacaggcttcaacttagatttgtcccttgaaattagttggaatgtcttttaagctcttttcatctataggagcgctctccatctttttctcttttttgtttgcaatttgttaaagaaaccagggtttccctacaggacagcat

SEQ ID NO: 95877 - DNA, 611 bp, Homo sapiens
aatctctaaccctcagtttccattttataatgggtgcaaaataagcggctcctatggttgtcmtgatgactaaatgtaatcctgccgtgaactttccaaatgtcaggaattggcatgacatcatgacatctacacaaatgtgtgccataccttcctgccagttctactattatttctctgagacttccccctaattgctttgctttttaaacacgggcatctctcaaagcaatgctgcttgaaaaacagggtttattttacaggttattgtttcctaatctacttaaaataaatagacaattactaaagtaagaaaaaaacagactggctcttgggaaaaataaccacactactattatcagaaccaaaataaataacaatgatttgttaatatcatccaatacacagtgttcaaattttcccaaattgtcttataaatatcataattttgttttataatttgtttgaaacaggcttcaacttagatttgtcccttgaaattagttggaatgtcttttaagctcttttcatctataggagcgctctccatctttttctcttttttgtttgcaatttgttaaagaaaccagggtttccctacaggacagcat

SEQ ID NO: 95878 - DNA, 602 bp, Homo sapiens
tatttttggatcagatattggcaattgatttaagtaacaggtatccaatatgaattcatggttcagtccagccagctgagaatgcaccaaaagcaaatcagttccgctgcagtatcagtgaaccagacatgaactcaaatacctatcgagctttgaataatggtcatgtgagtagatctccttgcctgtcattttggatttctttaaaagttagtgatggtgagccatttttgtgcagtatggttggccttccctgaagagggttttatgcacatatcttgcaaacaaacacaggatatataatacraatttcccagaaacagagaatatctttggatatcacttcattgcagaatatctgaatttcctccaaatgataatatgaaactttcatatgatatggtctattaaaaatcaagacctcaagagtcaaatggatgcacaaacatttgaaaccactgctaacacagtatctccctgcatacctatataactaatctaagctttgtgacccacaaaatgtccacagattggaggccttcccgggttaaaccactgtacagaaaggaccttctaaagatccaaacaaaaacagactaaat

SEQ ID NO: 95879 - DNA, 548 bp, Homo sapiens
taagaaataaatttctttctgtcttctttgagccactgtagttttaggtctcttcgttgcaacagctaagcctgttttcctttctatgataacccagtaaatataaaatggtggaggatagcttcaaggaaaacttttattggaagaaatagacaatgagaaaacagtacacagtggtctctgattcactgtatgtatttttccctgcttgacaggaacagtgaagtgttcttgccttggtaatgcagtgarttccttggttagccaatctgacaaatcctagatgtgctgtctggaaacgtctcccttgtccgttgtcctcttagcccatctgagatagatattggcacatatgccctttttgggatctgtacttctttgaagcccattactttttggtgcaaatttgaggggcctggaaattacctcaaggattgaagaatcacaggctgttgtcagccaggcttgggtttcttggactgaaccaaattccttaaaaacctgaaggcttcctgtctatttgccttccaccaattccatgagctgat

SEQ ID NO: 95880 - DNA, 548 bp, Homo sapiens
taagaaataaatttctttctgtcttctttgagccactgtagttttaggtctcttcgttgcaacagctaagcctgttttcctttctatgataacccagtaaatataaaatggtggaggatagcttcaaggaaaacttttattggaagaaatagacaatgagaaaacagtacacagtggtctctgattcactgtatgtatttttccctgcttgacaggaacagtgaagtgttcttgccttggtaatgcagtgaattccttggttagccaatctgacaaatcctagatgtgctgtctggaaacgtctcccttgtccgttgtcctcttagcccatctgagatagatattggcacatatgccctttttgggatctgtacttctttgaagcccattactttttggtgcaaatttgaggggcctggaaattacctcarggattgaagaatcacaggctgttgtcagccaggcttgggtttcttggactgaaccaaattccttaaaaacctgaaggcttcctgtctatttgccttccaccaattccatgagctgat

SEQ ID NO: 95881 - DNA, 472 bp, Homo sapiens
cttggtgcgtcagtccactatgggcttggcaaaatgtctccactcgtccacagtgctgacttgattgagctgttattgctatgatgtatgagtgtgagtgtgtttgtttatgagtgtatgtgtgtgtgcactgactggtggtgattaaacatatttcgtgacattaactcagactaggggtaggcttcacttctctgtagtcagatcaactggctgacttagtgtgagactgaattgaattcctcctatgacttacgctgtgctgggttttatccacctgtcaaccaggagcagaaaaatgwgaagcaaggcttctcaaaaacaggaggaagaactcaagttctgggagttctcccagcattcttcacttcaggcagctttattctcagttgggaagagggtatacaggagaccactaggtcaagtccactctcagcatggacaagtgagagaaatcgtcgctattacttca

SEQ ID NO: 95882 - DNA, 638 bp, Homo sapiens
tctgtggcctgagggttggggatccctgagctggagagtttcaaggttctagcaggagaagatggtggctaggagcagagtggtagtggtttaaatggtaaaatatacatggtctgattgtttgggatatattttgaaggcaaggtcagtatgagtcccaaattacatgtcaggcataagagaaacaagacttcctctagcctttggttgtctttgatttgtaatatacaataaggttttcaatgmatctataataataactatcttgtgaataattatctatattttaaaaatatgtcctctttctatagaacatctccctagaagaggaattatctgtcattaggaaatttttagcaaatcacttataagaccattggcacacaattgcttttctggcagtatttctttggtaacatttactttttgttctttatttacttgtttggatatactttctttttcttgaccagtttagatattaactcataagtttttccatttaattgagatatttcacattttttaaactgtaaattagaaacctattttcatctagtgtattatctgcattgacatttgtggttatagttcatttgttgttcctaaattttctatcctttctttgacttgattag

SEQ ID NO: 95883 - DNA, 622 bp, Homo sapiens
tggacaaatattcaagacaattttgcatgaaaatatttatttgcattaaatgtaacagaggtcaaatatggaaagtcagtcaagtattctggacctgtttgctgattatctgtaagttgtccattttcagaggactctgcagcagctttgggagcccctagtgctatgtggaatgcagtttgaaaaccactgaattactgtataaaagtggtgtcattgtaggaaaagtttagaagtagttacagcccctgcttggaaaaaaaatctctgagaagaccattagagggaaatagagaagacacatatatggatgtgtacatatgtgaaaaagtggaaatagcatggtctctttagcatactgtcgcattatcccraacaattacgttaagttctctgaatttaagttttcaacacatgcaattaagaatatgatatctacttcaaaggggtgttataaggggaattgaattaatgtaggttaaaaatgctttgtttttaagaatacatacttaacaaatgtaatgcaatagtatcctattacaaatacatacttacacatgtaaggcaatagtatactaagtattggggaaactatttgctgaatatgctgttattgttccta

SEQ ID NO: 95884 - DNA, 557 bp, Homo sapiens
cataagggatctgcctcatgattctaacacctcctaccaggccccaccattacatttcaacatggaatttggacggaacaaayatccaaaccttatcagatagcaaatgagcacataaaaaggtgcttaacataatttgtcattaggtaaatgcaagttaaaaccagagtgagatgcccctatatacctatgatggcatctaaaatcatacagacgaatgatgccaagtattggcaagaacatggaacaactggaactctcatgctttgctgatgtaaactgctaaaataactttggaaaatagtttggaaatttcttaaaatattaaatttatgcctaccatatactcattcattccattccacttatgagaaatgaaagtatacatctatataaaaatattttaaaaatttgaaaatttttgccttttaaaaataatctaaatctggaaagtacccaaatgtccatcaacatgtgaataaagatttgtgaactacccatacaataaaatactacacagcactaaataggaaagaactattgatccacatacaaac

SEQ ID NO: 95885 - DNA, 550 bp, Homo sapiens
gcttaattgcattgtggtaagcaaacattctgtataattttaatcctgtgaaaattgtgtatgattttcaaccctgtgagatttgttgagacttactttagagcccagcatatggtcagttttggtgaagattccatgcgtccttgaaaagaaaatgtattcagcagttgttgggtgcagtattctgtatattctgtatatattaaatatatattctatattctgtatagaaatccagtttattaattgaattgttcaaatcttctaaatttttgctgakttttttgtctgctcaattctatgtttccaagagaaatacaggatattagctacaagacttctgtacatgctaaataacagtgacttaaacaagacagagagtttatttccccttggtgtgaaagtctcagtaggtgggtgaacaaggagtgtatgtgtctctgcaacttactattattcagggatccaggttattctatctgtggcttcagcaacccctacagggttgttcacatctaccaggtagaaataggccaatcatttgcatgac

SEQ ID NO: 95886 - DNA, 620 bp, Homo sapiens
tgatagttcatccattagataagaagaggaggctataaaaaaagaagcattcaaaaaacaagagagatctcctggaaattaggaatataatagtagaaactaaaaattcaacagaatatttcaaagataaagttgagaaagtctccaataaagtagartgagagagagagagagaaaacagagagaaaagaactatcaaggaaataattcaagaatatataagatatttatggagacaaaatctcgaattaagaaaataaaggaagaaacatttgcttctacccgggatggggtaacaggaaccacatttacactcccgcctcaaacaaacaagcaaacaaacaaatcaagaccaaatatatgaaacaatgggttttaagatattggacatcaggcaacaaaaagattaatcctgaaagacaggaaacagatgaggtgagccctatggttgtaccaacttactgccttgagagagttcccaggctacagcattggaagaggaaaccccagcacagcctagcagtctccgtgagtcacagtcagaactgagagtcccaggtagataaaagtggctgaagttcttaagacaaagagagaaacacagatatttgtagatggtc

SEQ ID NO: 95887 - DNA, 505 bp, Homo sapiens
cgagcccaggagtttgaggctgcaagtgagctatgattgtgccactgcactccagcctgtgccacagactgagaatctgtctctaaaaaaactcgttcttaaaaaagaggtatcgcagttccaattctaagctgggtgataacaagtgaaaaacagaatatataaattaagcttacagtggacacagaaagtggcttccattgtcttaaaacgaaactgatagtttctaatgtcgttggttaccttgagatgaaaatggaatgatattcagtaaggaaatgtacagaataacagctaaaaatgaaaggcattcataccaattttgaaaaaagtatgatagtgaacaastacagcaaggcaaaaattccagcatgtagagggtatagcaattttgcattgatttgtacatcttaacaaccttaagctgtacaaatagaacaataatatctaaatggtgtgatgatcagcccacagtacacatcattgatgagaatttcactggtct

SEQ ID NO: 95888 - DNA, 550 bp, Homo sapiens
aataagactaggcatggaatataaaatgcaatgaaaatccaaagtacatgatgatttggtctgcatgaaatcccrtcaacagattatatatttattcttgattattgtatttcctggagtgtatgtgcatcagtctattaaaaaatttgtcaggaaaatatattatttgagggattttatgatgtcattgaaaaccttagaataataagaccagtaccagtgacttctgtatattttctcacaacaaccgatcacttcttatttctatgatatatggttccgaaagatgagaatttgatgctttcaccacataggagctatttcctagatcaaatcttaatatgcaacaaaaatcaatctgaccacagggtatctactgttagacaacttattcctctttattctagattgaaagtgtccgtgacaatataacctgcttcccagaggtgatattaagaccgttcacgtaatttcttcccattcttcaaagaattaacatgtgccaggttgaactttaatcacaagcccagtatttattaagaaatgtcat

SEQ ID NO: 95889 - DNA, 550 bp, Homo sapiens
aataagactaggcatggaatataaaatgcaatgaaaatccaaagtacatgatgatttggtctgcatgaaatcccatcaacagattatatatttattcttgattattgtatttcctggagtgtatgtgcatcagtctattaaaaaatttgtcaggaaaatatattatttgagggattttatgatgtcawtgaaaaccttagaataataagaccagtaccagtgacttctgtatattttctcacaacaaccgatcacttcttatttctatgatatatggttccgaaagatgagaatttgatgctttcaccacataggagctatttcctagatcaaatcttaatatgcaacaaaaatcaatctgaccacagggtatctactgttagacaacttattcctctttattctagattgaaagtgtccgtgacaatataacctgcttcccagaggtgatattaagaccgttcacgtaatttcttcccattcttcaaagaattaacatgtgccaggttgaactttaatcacaagcccagtatttattaagaaatgtcat

SEQ ID NO: 95890 - DNA, 550 bp, Homo sapiens
aataagactaggcatggaatataaaatgcaatgaaaatccaaagtacatgatgatttggtctgcatgaaatcccatcaacagattatatatttattcttgattattgtatttcctggagtgtatgtgcatcagtctattaaaaaatttgtcaggaaaatatattatttgagggattttatgatgtcattgaaaaccttagaataataagaccagtaccagtgacttctgtatattttctcacaacaaccgatcacttcttatttctatgatatatggttccraaagatgagaatttgatgctttcaccacataggagctatttcctagatcaaatcttaatatgcaacaaaaatcaatctgaccacagggtatctactgttagacaacttattcctctttattctagattgaaagtgtccgtgacaatataacctgcttcccagaggtgatattaagaccgttcacgtaatttcttcccattcttcaaagaattaacatgtgccaggttgaactttaatcacaagcccagtatttattaagaaatgtcat

SEQ ID NO: 95891 - DNA, 629 bp, Homo sapiens
atgtattgaattaatttttgatgaattagtaatgatttaattggatagggaggctgtgatagtttgcctctttgcctacttggccaggccatggtacccagttactgaattaaatgctgacctaagtgttgccatggggtcttttgtagatgtggtgaacacctacgatcaataagacagattacccttgataatatgggttggatcagttgaaagtcttaatagcaaaaactgaaatttcccagaaaagaggaaattctgcttcaagactgcaacatgccctctggcctgagtctccaggtgctggtctgccctgctgaatgcacacctgaccgctcctgtggtggtctgagccagtctgctgctggctccgctcctctggagagccctggctcattcagagggcctcggctttcctccaagttgctcctggaactctagcaccaagctcaagwcctccaggcaacagactgaaaaatgctgttctggggaacctgaccagcccaagaggaaatttcctaaatacaggtagtggtgctagtgggtccccaatgacacagcccagcagatcaccccacgagaaccctacacccaccaaacccatacaaatcctcacatctttgatcagc

SEQ ID NO: 95892 - DNA, 618 bp, Homo sapiens
ctgcctgctgtccactcagaccgcagccagccaccaaaatcctccctcccctggagatggatttgcccagtgaccttcccagcatcaagtctgctactcacatgcagagtggcaggctggggcctggaggtcaacctcacaaattaggacttgcccgagacccgtaagggasgcactggtagagcgggggccagaaagcaggtctccccatgtgcctggggtctcactctgggagccggcttcaggcacacagagtacacccaggcactggcttccaggaccaacctggagcatgtcagacgcacgctgtgagagaaaaagggacaaatcccaacaccatgagaaaatgaaggaaagaaaaatgcttccagactatcgctaacctaatattttcttatttcttaaacttggaaaacctttgcccattttcagatctctgggcatgttcccaagaaatcctgctacttccagtgattaaaagccccctgggacagcactcttgggcacttaagattcgaatttctatattacggtctcatgtttcccaactggaaataccacagttaatatatctaggtttaaaatacagcactcgaagtatttgctaatgtttcactt

SEQ ID NO: 95893 - DNA, 614 bp, Homo sapiens
tttctgattgacattgtcacatttatatttataccttcatttgtcctaacctcatttggaaatagatgttcacagcatgggaaatacttgatgtataagactggctgcttttagaagaaagtttatgacagacaggtatattgctatatgtttgttgggggtttgaaaacaatacataaagttayagaggaataaacaaggcaaatacatgggcagttggaagtgaaaattgtaactaatataagatgtcttattagagcattcatttatatactgcattctaactacttttggggagtaggactacaaaaacagtagagccatagatggagaaggggaagataaaataccagttcagtaaactccgatggtctcatgttttaatgagtgcccagaccacttggaagttataggcaaattctcagtatattatagacactaagaaattcatcaaaattttgtcttaagttattgttcaaacaaatattccattggcccattctgtttcattaaataggatgttagtgacagccttttgatggtgaaatggaagtatccaagaatattttttatttctagagtcccaatttttggaagttgcttataaatattta

SEQ ID NO: 95894 - DNA, 590 bp, Homo sapiens
gcagaagcagtggattctggtatattcaattaatatttgttaaataaatacacaaatgagtgaatgaataggctttatatttcctctgagatctaatgctgaacaaggttggaggtggttactgttgaaaaggaaaaaataaatattacatgtttatctaaaacaaaagataaatgaaaaacactaaaagtatwtctttatatcccgtacatttcatttttatttaattttgtttcctacatattttcagtctttcatttaatttaatcgtgttagatttttattttaaaaagactatcagatgatagcatttgtttcttgaaaattattatctagtgtattttttccagaaattacaatttatactacctaatagaaacactctttgagtagaatattttcacattaatgtaagtataaattgttttacatgaaacagtggcaagcaataaaattctagtgttactttaatgtatcacaacattaaatttttctctctgatttcacaatgcaacttacaattatataaaaaggaatatttaaaatgatttttgtattaaaataatgtcaagggtttttattttataata

SEQ ID NO: 95895 - DNA, 598 bp, Homo sapiens
tctgcttaaagaaaaaagaatgcttgactcattttcatttggggttctctcttttttggagccatcctcgccgttggacatgcatgttatttgctgctggatgctgaaaatttctaaagactagcatttcacagttgttaggaaaaaagcctgccaatttagtaatatgtttaattcaagagaaaaagttgggaagcccaaatgtatgatcacagtagtgagccaccttcttcaacatctgtaacaaaactggtatatattgatctgcatcactgtgttttctccatagtttccaaattctaaaggaaggttctggctgaaaccccgacactagccagtccaggcagtgcctgccctttgtgtccggaacctttctgcccttctttcatgttggccctgcattttgacatcmgtgatgccctcttgcatgaagcactttacttctctacattctctatttgaactagatagaaaggtcactcattacataaagtgcagaggaggatcaaggaatccaaaggatatagaaatttaccctcaggtgatgctaagcactttattaaaactctcaccagctccgattgatgacaaatatcaa

SEQ ID NO: 95896 - DNA, 602 bp, Homo sapiens
aagaaataaaaaaaaattacaacatggactatactactttcctcaatgttaattactttaataaatgtgtgacgaatgattaccaacattttaaaatctatgtgcatttttctccaatgagtggcactggttttctttgcacttttagagtgctcagtcctggcatatgtaggtcactgaccgggaaattaccatctcaattcactttctttcttctttgctatttcttatctgatctcgaagttaaggcattgaaactattgcaaaaccctcattattttttcccaaattaaaatggtaatatttaatagctgcatattttgatgcatgcttttggctctggtttcctttttttatgtgtttttttttattgttgttgttatgaagggkttttttttattgcttttttgttaaagaacgtagcaaaaaaaatgaagtatactaaaagctatttcacccagagaaacataatttgttgggtttttaaaaatatcattttcatctgcttctttgggaaacatcagaaataggcactgagggatggcaaggtttatgctgaactctaagtaatgcatgttgtcacttgcagccagtcactgaac

SEQ ID NO: 95897 - DNA, 621 bp, Homo sapiens
ttaaaaaattaaattaaatcagcatcttagaattcataaaatcagaggacagaattccagagcaacacagggttagccacacagaattataactacactgggattatacagtcaaattatttggcaaataatgtatttaacagcaaatcaattactctttaatttaagtaactcactttcatgatagggtcaaagaggagattcgatgttttagagtttggaaagtctagcgtagctgtttgtttttgcttgtgttttgtaattgggttggcatcatagacatagcatctctagaggaccagctccacaacttcccaggcgtggagagaacttgggaagaattcaaaggagaaccacaaataggtttaacacattttaagaactgcgaagtaagacctagcctagtaggaaatgtagttctcactcttaataaacaagaaaatcagaaatatggctaggcatcaaaaagaagttatctgtgatactagatgctatctttgcactcaggccaggacccatgatgaagcccccygaggccccagaagaggctcagcccctacctccagctccaatttacctggatgaatggctcctttgcattaccgtggcccaaataccaaa

SEQ ID NO: 95898 - DNA, 638 bp, Homo sapiens
gagctactgttactaagggacagtctcaataattattaaaatgtgctaaagtatatcttcaaatattttaataagcattgcagctaataacctctattatcacctgtcatgtgtcccaaccaaaatttactgatgaaggaatgagcacagagtatgtttagctaacgaggtggtggcagtgacttagtagctgaacaaatgctcaacttctcaacagatcctcatccagaaatgtatctcacatccgggggtccatcacaaggccgatttccttaggtaagtaaatgtattaggactagagtataatattatttattagaggagagtaaatgtcaggcaaatactgttgtacaaaggaaaataaaatgtccctttgaacagggtctctyagaacaaatagaagaaaagaccaaaaagacttaagttaggaaaaggcaaatcaatcaacaataacattactataaagcagacataaccaatatgattatcttcctacaacagaacattgctgttaacacttccatttcatgggtgctctttagtggtcataattaaatatataattcagaaacatatcttgatattacctatgtttaaagtgataactcaaagtaatggagaaaatatttttaaattca

SEQ ID NO: 95899 - DNA, 638 bp, Homo sapiens
gagctactgttactaagggacagtctcaataattattaaaatgtgctaaagtatatcttcaaatattttaataagcattgcagctaataacctctattatcacctgtcatgtgtcccaaccaaaatttactgatgaaggaatgagcacagagtatgtttagctaacgaggtggtggcagtgacttagtagctgaacaaatgctcaacttctcaacagatcctcatccagaaatgtatctcacatccgggggtccatcacaaggccgatttccttaggtaagtaaatgtattaggactagagtataatattatttattagaggagagtaaatgtcaggcaaatactgttgtacaaaggaaaataaaatgtccctttgaacagggtctcttagaacaaatagaagaaaagaccaaaaagacttaagttaggaaaaggcaaatcaatcaacaataacwttactataaagcagacataaccaatatgattatcttcctacaacagaacattgctgttaacacttccatttcatgggtgctctttagtggtcataattaaatatataattcagaaacatatcttgatattacctatgtttaaagtgataactcaaagtaatggagaaaatatttttaaattca

SEQ ID NO: 95900 - DNA, 563 bp, Homo sapiens
tgttctcactcacaggtgggagttgaacaatgagaacacaaggacacagggaggggaacatcacacactggggcctgtcggggggtgggggactagggcaaggatagcattaggagaaatacttaatgtagatgacaggatgatgggtgcagcaaaccaccacggcacgtgtrtacctatgtaacaaacctgcatattctgcacacgtatcccagaaattaaagtataataataataataataataaaagaaatcacattatctttctctcatcttattcttcattgaatatggtcccaaagtgggctgtgtaccctaacccacatttgttattgcccccttgctgatttctctgatttgtttttcttttaagtggaataatagattaaaatcatgcagtaataaatgaaatagatttatagtgacattttaaacggaattaccattataattgtctttaagaaaaagaattctagggccgggcgtggtggctcacacctgtaatcctagcactttgggaggccaagacgatggatcacctgaggtcaggagttcgagaccaa

SEQ ID NO: 95901 - DNA, 565 bp, Homo sapiens
tgctaaggccacaaatatttatccattttactgctaatgcaatttgagctgttttcaactttttcctattaaaacattattgctatgaacattcttataaaagcttcccagtgcacgtgtgtgagatctttctagtgtgtatgctagcaggagaattactgagttktaccgtacatgtatcttcaatcttattagataacactgacttgtttttgaaattggctcttccaatttacactgtcaacagcagggttatgtggttgccctgcaagttcaacaacatttggtattgtcagactttaatatttttgtcaatctggttggtataaaatggtatggtgtggtgctttttatttgcatttccatgattactaatgaggttgagcatcttttcacatgtttatgggccatttacttttcctcttctatgaaattactattcaagccctttgcccatttttctgttatgttgtttgtctttttcttatcgaggtggaggagttctctgcagtctgaatacgaatcatttttcagttatgtgcattgaaaatatctcctcccagtg

SEQ ID NO: 95902 - DNA, 422 bp, Homo sapiens
aacaccgtggtgaaaaccctcctacctagtgcttcgccctcatcacgattatccatgtggtgagtctttaaaggccaggtgacggcccttccccctctcctgggaaatcacgccagcgctgatcctgctaggagaggggagaggggagagaatatgaatgagaccttgaaagcagaagcctcactttggggtcatatttggaaaagcccctgtcttcagcagccacagaagstccccctgggacctcctcaagccaggagcaggctgtgagaggtttccctggaatgggggtctgggtgccccccacccccgtttccacctcccgcctgcaccgccgggagctccggaggagttcccggggacctagaaacagcggcgagagcgtgagaggggaagagctgggggtccgggccaaaaggagg

SEQ ID NO: 95903 - DNA, 593 bp, Homo sapiens
gaaaatccttttcagcagacgcttcccttcccttcccctagggaatgtgtccctactatagtaaactcttccttaagagagttttatgttttctctgtcagaycaatttgtttttcttaatgttgttcctatcaaaaaaaaaaaaaaggaagaaatacagtcctcagacctgacagtttcatttttccccccaagtagaagcaatagaaaccttagcagttccaagactcctggcactcacttttcctctccatctttaggtctaacccagctcagcccagagtaaagacataaaagcctcacatgtgatttcctcttgcattttttctgctagaagggtccacagtacttactttatgcctcatctcaattgaagctggatgatgaggatagtgggcagtgattgcaattggggaatgcatgtactggatcacataaggtcatgaaagtccttgaaacagagccttgccaagcagaacccttgccactcatggtattcgatacagtctacccatctgacatgaaatgatattcttaatgagccattcctatggaagatagctattgccaggcacattcagtctcctggtctc

SEQ ID NO: 95904 - DNA, 656 bp, Homo sapiens
gacctctctttccaccttctcctagcccccagtcctcatcccctgcttccagccaagatccagaggtctggcccccagctcaccccaaatctgctgttccccactagggactggggtctctagaccttagcctctggctccctttccccctcctcagcctttgctcccctccgggacccaggcgtcctgcccactccmttcaccataacaaccattcttttggagttgcttaagactttaatatcatttcattaagtcagcaagttcagagaaggttgggggcacaaagagactgggggtgggcaaaagagggccaaagtaggggggaggcaaggaaagatcccccacccccctctccgtggagatggctctgagaaatcaaatattgacaatgagggaacagaacttattaaatctgggacagggatgtgtgtggggagctgtgggaatggccggatgcctgggttcggagggtaatgaaggttctgggaggaggaaaagggccgtggctgggaggtgcagcaaggctgaggctcgaggtcacaactcttctgccctttcctttgggatgtacacggtcttgcaaccctggctgtttctctagccccgaagagcccctggggaaaagacccccatcatagctagctgtggttgcc

SEQ ID NO: 95905 - DNA, 343 bp, Homo sapiens
gtctcgaactcccagcatcaagagatcctcctgcctcagcctccccaagcactgggattacagccatgaaccactgtacccagccaaaaatttattttaattgaatgtcttggtccatttgtgctctataacaaagtacctgagattggataatttataaaaaacagaaatttatttttcacagttctagaatccgggaactttaagatcaaggcaccagyagactcagtgtctagtgagggcttgctctctgtttccaagatggtgccttcttgttgtgttttcacatggcggaagagagggaagggccaagcaagtctctgaagccttattttaaaaaatt

SEQ ID NO: 95906 - DNA, 518 bp, Homo sapiens
tcttgtgtcttgtagagaaataggaaatagaaaatttccctacatcgatgttagtgttttgtctattttccccatgcttatttctagacattttgtgttttctttttacatttaaatctgcaatccatctggaatttatytgtaagaagtaaggtaaaaaatccagctttttttttcaggtagtgaccaaaggtagttatttaaacgctatttattgaataactcatcttttcccctgctgattcaaattgtcacttctaccataaaccaaaatcccatatatatctgtgtcaatgtctagactcaatattttatgccatcgacctttgtgtctattcaaagtcaactacaggagctttataatatgtttaatatctggggctactcttcgctcagcattcttaatttgcaggtgttttctggcagtttttggatgtttattttccacaagaaagtcaatggcaacctttctaatttaaaaagtatcttggtatttttggaaggagctcaaacatgat

SEQ ID NO: 95907 - DNA, 518 bp, Homo sapiens
tcttgtgtcttgtagagaaataggaaatagaaaatttccctacatcgatgttagtgttttgtctattttccccatgcttatttctagacattttgtgttttctttttacatttaaatctgcaatccatctggaatttatttgtaagaagtaaggtaaaaaatccagctttttttttcaggtagtgaccaaaggtagttatttaaacgctatttattgaataactcatcttttcccctgctgattcaaattgtcacttctaccataaaccaaaatcccatatatatctgtgtcaatgtctagactcaatattttatgccatcgacctttgtgtctattcaaagtcaactacaggagctttataatatgtttaatatctggrgctactcttcgctcagcattcttaatttgcaggtgttttctggcagtttttggatgtttattttccacaagaaagtcaatggcaacctttctaatttaaaaagtatcttggtatttttggaaggagctcaaacatgat

SEQ ID NO: 95908 - DNA, 518 bp, Homo sapiens
tcttgtgtcttgtagagaaataggaaatagaaaatttccctacatcgatgttagtgttttgtctattttccccatgcttatttctagacattttgtgttttctttttacatttaaatctgcaatccatctggaatttatttgtaagaagtaaggtaaaaaatccagctttttttttcaggtagtgaccaaaggtagttatttaaacgctatttattgaataactcatcttttcccctgctgattcaaattgtcacttctaccataaaccaaaatcccatatatatctgtgtcaatgtctagactcaatattttatgccatcgacctttgtgtctattcaaagtcaactacaggagctttataatatgtttaatatctggggctactcttcgctcagcattcttmatttgcaggtgttttctggcagtttttggatgtttattttccacaagaaagtcaatggcaacctttctaatttaaaaagtatcttggtatttttggaaggagctcaaacatgat

SEQ ID NO: 95909 - DNA, 622 bp, Homo sapiens
ccacgtccagtggccaggaggccagcccagcacctcctcccccaccattcccgtcctgggtgggggggtaattttcctgggagcagctgtgggaactgtcgtttctcatcccagcccagccagcactctgaagcctgcaggggaaggacagcacgtgggatggacactggggaaggagcttcgcaaggccagggtgcaaccttcaggccccaggtggcctggcaggccacgctgcctcggagatgcttgccagactccccaagttcactcagggcctggcagcaacctgctggctgcctctgcgggggtctgggttgctgagcacggtgcagctgcccagggccaatcagccctagggtgtccgtgccaggctgcggcctccccgcctcccccgcactgagggtactcatggcgtgcaaatgctcccgcacccccagagctgccctatcggatgtttccaggaattcacacatttccataaaaatgcattttaaatgatggacaggcgagcctggggtaacaaygggtgtttggtgggtagacaagagcaaatgggaaggagcccgagggaggagggggaagagaagaggaaacagaacttccagttggacattctgacaac

SEQ ID NO: 95910 - DNA, 302 bp, Homo sapiens
gaattcatttccttgcagctgtaggactcacagtgacttgtttcttcaaggcaggcaaaagagtatctctttactctcaggaaaggcctgagccttctttgaaagactcatttgagtaggtcaggcctgctccagatggtttccttttttatgaactcaaagtcaactgattagggaccttaattacatctgcaaaatcttttccctctttccatgtactgcaacataatcacaggagtgrtatttcatcctattcacaggtcctgcacacactcaagggaaggggatcatacaagggtgtg

SEQ ID NO: 95911 - DNA, 527 bp, Homo sapiens
ttaggtattttttcagtctagaatccagggagtgagttatatcagaggctttcaaatagttctagtccacaaatcttcttagtgttgctaaaaacccactgatctcctggttctttctcccacaccccactgctgcttgctatggcaaatcaggcaaaatctttggcaaggcagtagggaaagcctgacctgcttttagagaaggctatactctgttaaatatcaaaaggcaagttactgatttatgctagaaacagaaggatacctgttgtgtatccttgagtggatgaagagtcaagggtggctgttggacaagtcctgctgatgagtttgggtggctttcacaaatccactaagctctccactccwcactttcattctaccaaaaaaaaaaaaaacaaaaaaatgggaacaatagtgtctgctcttcctatgtcactccttatgtgaaataaggaaaacattatctgtcctgcctgcctacatgaggagtctgcacagctcacattgacccttttgagagctaa

SEQ ID NO: 95912 - DNA, 527 bp, Homo sapiens
ttaggtattttttcagtctagaatccagggagtgagttatatcagaggctttcaaatagttctagtccacaaatcttcttagtgttgctaaaaacccactgatctcctggttctttctcccacaccccactgctgcttgctatggcaaatcaggcaaaatctttggcaaggcagtagggaaagcctgacctgcttttagagaaggctatactctgttaaatatcaaaaggcaagttactgatttatgctagaaacagaaggatacctgttgtgtatccttgagtggatgaagagtcaagggtggctgttggacaagtcctgctgatgagtttgggtggctttcacaaatccactaagctctccactccacactttcattctaccaaaaaaaaaaaaaacaaaaaaatgggaamaatagtgtctgctcttcctatgtcactccttatgtgaaataaggaaaacattatctgtcctgcctgcctacatgaggagtctgcacagctcacattgacccttttgagagctaa

SEQ ID NO: 95913 - DNA, 620 bp, Homo sapiens
cacacatatacacatatagatagctataagagaaattcaaacatctaaatagtctctctctatatactttaagtacacatatatgcgtatatttcacccatacaaacctagatcagttattgtgcttttcttcctctatcacttctcccctgtacagtcaggggagtcagaggcctatacattgcccaggagaattatgattctcttagcagaaatataaagagaacacaggcaacaaaaacaaaaacaaaaatagacaaatgggacttaattaaactaaaaggcttccgcacagcaaaagaaataattaacatactgaagagacaatctgtagatgagagaaaatatttgcaagccattcatctgacagggaactaatatctagaatatgcaaggaactaaaacaactcaagaggaaaaagaaaaaacaatcccattaaaaagtaggcaaagaatgtgaatagayatttctcaaaaggagacatacgaatgaccaacaggtatatgaaaaaatgctcactatcactaatcatcagaaaaatgcaaatcaaaaccacaatgagatatcatcttaccatagtcagaatggctatcattaaaaagacagcaaataacagatc

SEQ ID NO: 95914 - DNA, 581 bp, Homo sapiens
gggtgtgcctctgtcccctcccaccgtgtatgtccaggccactcagttcctggggtgttccttatcaagggatgaaaccatgagcaatcaggaaggaaagacagtgccgataccaccatgggttccgcttagttcttatgygtgttcccagtgttctcatggagagcagttcatgggctcattgagtaaatccaggaagaacattcttacatctatgtgattaatcagtcggcattcttatgttctcagggcctacctgccaggatttgggttctcagtcggagaagtatcagcgagtaaagtgtaagaatccctttttctactttccttgcattccctgagtaccccaataaatgtgggaacatcaatcaggcccaatgcttccctacacggagttttagaagggtatcatacatatcctgtaccccaaatacccaatgcccagttctctctgtgtcactggactctaagggaatgaggttttccagagagatttattcaggcttcattttgaatgcactaagaaaatgagacctgtatgaaagtgaaactagcctcgttttccacaggaaatcagatct

SEQ ID NO: 95915 - DNA, 531 bp, Homo sapiens
taaggaatacactccaaggattagggaataaataccaaggtggcagaaaagcacatcctgctctgagggtaaggccctggagcctgcagtgagggtctacttcttaagcatttgtggcactaactcacaacgggtccgagctgcaggggcctggaactcccctagtcttacccccctgatttgatagacagggcaagggatctgtataaagcatggtgttaagggaactaggagaaagatttaagtgcttacttattgataatcttctgttttctagaaaggtttctggatactttcctgttaaacttctttaatcttcataactgtctgtaagttagtcattgtagccaggctttgtgtgtgagaaaactgaataaactggcaaagaaagtgacytattcatgcaagtgctttgaaaaattatggttttattctgttacattgaattttcgcatgcccttacaaccccaaatttccaattcttggtatatttccaaaggaaatttttataaaggagtactaggaaataca

SEQ ID NO: 95916 - DNA, 423 bp, Homo sapiens
ccaaccatgggttgtttcataatcagaaaaagaacataaacttggataaatgtccatctacttggaaaagccaaagagagagaacagaagccaggagaagagggctcagactttgttcttttataactcactaaataacattagactgggctacttcattcataaaaatctataaaatgggaaacagaccacttactttccatacatcccagggcttttatgaagatttaataaattaatctatgttagagcaattcttaaattatctgtgggaaggactagtttgtttctttccttttttaaaaaataaattaaagtctgtagttatttctgtttccttaggtttttaccaaatgtcctttgtctgttscaggattccctccaggacaccacattgcattttctcatcatgtatctgtagct

SEQ ID NO: 95917 - DNA, 536 bp, Homo sapiens
acccctagttcacaaccctctctggttgctcactgatcctccctgtggcacacagggtgcccccaacctggacccagctgccctggtgcctcactgctctcccctcacctcccttcacacctctttcaacctcctctcttttgcacatgctctttctctatcctggagagcctccctcatcattagctgctgaaatccyttttttttttttttttttttttttttaaggcagggtcttgctctgttacccaggctggagtgcagtggtgcaatcacagctcattgcagcctcaatgccctgggctcaagtgatcctcctgccttggacccccaaagtgctgggactataggcatgagccactgtgcccagcccccattcattgttgaagttccagctgaaacattacttactgtgagaagcctaagccaaaacaggctaaattaatagccccatcccacccctggtgcctactgaactgaatgtgtctttagtccagcacttctaatactgcttttaacattcattacatacatac

SEQ ID NO: 95918 - DNA, 598 bp, Homo sapiens
atgcagttgcgatcaccggcgaggacctgctggctcgccttgttggcacaggggcagcagtcagctcacaacctcctttagctcccacctggtctccttcagcttcctcaaatygtgggtggtgttcaagggccactccatggagaaatgaacgagcttttctgtcattctgtgtgaatgttggaggcttggaggcagtgagacaaccatgtggcatctagctcatcctgtggcctctggtttaccactgctcttcctcgcttcacatccagctttccttcctgtctgccagtgctcgggtctagcaccagacgcaaggacaacatcctgaaatgggctgcttaccccactcccaagattacataaggtctgatctctgtaagaaatccagtatgcccctcaccatgattctgcttctttgattgaaccctaccaatgcaggcagggaggtgcacccagccacagtgaggctagagcaagggagcagtgaatgatgggaaccagtacttctctctactgtgattatgacattgtccttacaatgacaggcatgcatatacaaacccttgctgaatattttttgtaaggtttaaggcaa

SEQ ID NO: 95919 - DNA, 565 bp, Homo sapiens
ttgtccttctgtgttccccactggttattgaatttcttgctaaaggaaccatgttttacttagcgcaaaatcatccctgagaccaagtgctcagtaagtcattgttgaatgaatgaacaaataaataagcatgtgagtgactgagtgcctcctctacattggcatgcctgtggccttggttgtgttatgtggaaaccagcagatagaagccactgttaatggttcacgctgcatcttgcattccatggatgcccaatagctgcatccagtagctattcattttcctgcatyaagagtgacctaggttctgatggtagttccattcctggcccctggagaagtgacatggggccagatgatccttcctggcttcctcagtccccagggcaggcccctgagaggataggagggcagaggaaaacacctctggagtcggtgctgggcccagaccctccctcctgctctggtggagcccagtttccgctttgtagcctggcccccactcctgctgcaacatcagtgtaaatattgttctttcaaacagtacactgtggtgggacaggga

SEQ ID NO: 95920 - DNA, 617 bp, Homo sapiens
gctgcgggtacataaggagcagcactctggtaagggtacatagtgaggcacccctatgctaccagccagggagatctcaatggaggcctaatgaggaaacagaattctcacctayacccaatggcaaagaggatacacttatttctttacccctcataaaactcagacttggagctgaagaaggtagcaacctgaaaatgccaatgggtgtaaacaaacaaacaaacaaacaaacaaaaaagccccaacaaaaacttgctctctctagccaaaagaaaggacctcagcagccaccaaagttatttggcaaatctggataacctcacttggcagtaatgaggtagtcccctttccttcccctgccagaatagtgtcagaggaagccaaaaaaaatgaaggttaaataagctccagagtcttatagtacccccaaatgtccagatttcaataaaaaaacacttatcaagaacaaggaagatctcaaaataaatttttaaaaagacaatcaatagacaccagcagagagatgacaaggatactggaattatctgacaaagattttaaagtactcataaaaatgcatcagcaaacaattatgaacacacttgaaacaaatg

SEQ ID NO: 95921 - DNA, 617 bp, Homo sapiens
gctgcgggtacataaggagcagcactctggtaagggtacatagtgaggcacccctatgctaccagccagggagatctcaatggaggcctaatgaggaaacagaattctcacctatacccaatggcaaagaggatacacttatttctttacccctcatamaactcagacttggagctgaagaaggtagcaacctgaaaatgccaatgggtgtaaacaaacaaacaaacaaacaaacaaaaaagccccaacaaaaacttgctctctctagccaaaagaaaggacctcagcagccaccaaagttatttggcaaatctggataacctcacttggcagtaatgaggtagtcccctttccttcccctgccagaatagtgtcagaggaagccaaaaaaaatgaaggttaaataagctccagagtcttatagtacccccaaatgtccagatttcaataaaaaaacacttatcaagaacaaggaagatctcaaaataaatttttaaaaagacaatcaatagacaccagcagagagatgacaaggatactggaattatctgacaaagattttaaagtactcataaaaatgcatcagcaaacaattatgaacacacttgaaacaaatg

SEQ ID NO: 95922 - DNA, 551 bp, Homo sapiens
ggtgtaaatcagtggttcccagttttttagagtatgaaaactcttcttaatttcaaaaaatcatgaataccacattataatggtgtcaatttcattgcccactgaaaggaaaaatacctataaatacatacgggttctaaggctcttctaataactccagagtctctgtgaaatgctacaggctagaatcattgatctagctgacattgaaccccttctggygatgataatctggggctcaagtcaggggaattgggactccttagaaaacattcacttattcaaaaggaaagctaaatatcggatccaagaacagcgctagaagttttcaaaagagatgaagtaaggcagattcaaggatctaagaatctgagctgagaaagaacagaaggaagaatgaacactaacaacagtggaaggctgtggggcagcgtgtcgggaagcagagttatacagtgcggctcatgccagcaagagggtcagatgccatgataactaagaaaaggaaggcagagggggaggtgattttgactctcaggcagggtgggcca

SEQ ID NO: 95923 - DNA, 551 bp, Homo sapiens
ggtgtaaatcagtggttcccagttttttagagtatgaaaactcttcttaatttcaaaaaatcatgaataccacattataatggtgtcaatttcattgcccactgaaaggaaaaatacctataaatacatacgggttctaaggctcttctaataactccagagtctctgtgaaatgctacaggctagaatcattgatctagctgacattgaaccccttctggtgatgataatctggggctcaagtcaggggaattgggactccttagaaaacattcacttattcaaaaggaaagctaaatatcggatccaagaacagcgctagaagttttcaaaagagatgaagtaaggcagattcaaggatctaagaatctgagctgagaragaacagaaggaagaatgaacactaacaacagtggaaggctgtggggcagcgtgtcgggaagcagagttatacagtgcggctcatgccagcaagagggtcagatgccatgataactaagaaaaggaaggcagagggggaggtgattttgactctcaggcagggtgggcca

SEQ ID NO: 95924 - DNA, 551 bp, Homo sapiens
ggtgtaaatcagtggttcccagttttttagagtatgaaaactcttcttaatttcaaaaaatcatgaataccacattataatggtgtcaatttcattgcccactgaaaggaaaaatacctataaatacatacgggttctaaggctcttctaataactccagagtctctgtgaaatgctacaggctagaatcattgatctagctgacattgaaccccttctggtgatgataatctggggctcaagtcaggggaattgggactccttagaaaacattcacttattcaaaaggaaagctaaatatcggatccaagaacagcgctagaagttttcaaaagagatgaagtaaggcagattcaaggatctaagaatctgagctgagaaagaacagaaggaagaatgaacactaacaacagtggaaggctgtggggcagcgtgtcgggaagcagrgttatacagtgcggctcatgccagcaagagggtcagatgccatgataactaagaaaaggaaggcagagggggaggtgattttgactctcaggcagggtgggcca

SEQ ID NO: 95925 - DNA, 502 bp, Homo sapiens
tactactattattactgaatttctttttggaatgttgatagagaaccattaccacttaaacctggggaatttttccttgctgtggaaacagggcttgactttctaaagattgtgctcccctctcatgatgattggtgacttcgtttactcatttataacatgttctgaacatccacaactttggtccgttttttttgtatatgcaaattttttgagatatagattgaatggtagaaatggagaattaatatttgcatgaaaggattaatagtttaaaatcttgtttttaaccataaagcaacacattcataagctgtaaaacttacaaatgggtatgaaatgtaaaygcctacctccttacttacaaatccatatttaatgtaattatagctgaagataatcatagctattatttcttttttctcagatatttgtatgtatatacatacatgtatataaatatatgtataaacgtgattctaggaattttcacttataatga

SEQ ID NO: 95926 - DNA, 369 bp, Homo sapiens
ggaaaacatccccagcattgctagakacctagacatccaaatacaagaagcacatagaacacatcagaaattcatcacaaaaagatcttctcctaggcaccttgtcatcaggttatccaaagctaagatgaaggaaagaattttaagatctgtgagacagaagcaccaggtaacctataaaggaaaacctatcagattaactggagatttctcagcagaaactctacaagctaggagggattggggccctatcttcagcctcctcaaacaaaacaattatcaactaagaattttgtatccagagaaactaagcatcatatatgaaggaaagatacagttgttttcagaaaaacaaatactgagagaatt

SEQ ID NO: 95927 - DNA, 499 bp, Homo sapiens
aaaaacattagcaaatacctttgtattgcttactttgtgcccatttctgttctaagcatttcctcatttcatcctcacaaaagcctacaaggtagatattgttattatctctgttttayagatgaagaaactgagacaacagggtctagtaactggcataagatggaaatgaaatagtgtccaacctctcaagccctttgctaagtcgccctggcagttgatcggagtctagatccgcaatccatagtccaagctttctgagctatcctatccttctagatttgcactatccaatgtgaaagccactagtcacctgcagctattgagcgcttgaaacgtggcttgtccaaatggtgatgtgtttcaaggacctagataaaaaaaataagaatgtaaagtatatcgttaatatttttcatattgatgacatgttgaagtggcaatctaatggctctattggtttcaataaaatgtattattataattaatgtcacctgtt

SEQ ID NO: 95928 - DNA, 499 bp, Homo sapiens
aaaaacattagcaaatacctttgtattgcttactttgtgcccatttctgttctaagcatttcctcatttcatcctcacaaaagcctacaaggtagatattgttattatctctgttttacagatgaagaaactgagacaacagggtctagtaactggcataagatggaaatgaaatagtgtccaacctctcaagccctttgctaagtcgccctggcagttgatcggagtctagatccgcaatccatagtccaagctttctgagcyatcctatccttctagatttgcactatccaatgtgaaagccactagtcacctgcagctattgagcgcttgaaacgtggcttgtccaaatggtgatgtgtttcaaggacctagataaaaaaaataagaatgtaaagtatatcgttaatatttttcatattgatgacatgttgaagtggcaatctaatggctctattggtttcaataaaatgtattattataattaatgtcacctgtt

SEQ ID NO: 95929 - DNA, 544 bp, Homo sapiens
aacaataccttgtatttatctcatgtctttctccagagaagctgcaagtgcttcagagattttatctttataaaaagctgataagtaggtgtgtagacctcctggtgaacccagccccgctgcccctgatccaatcagtttgtttgcagtcctctcacttctggtgatgatgattaacttaggtgggtctgagatcactcttgcagtgagtgccatatgccakggtacagaagagcccatttccacccaggatccttcagtgtctcttgttcaccagtgcccccagccagaatcctggcccagctgtcttaaattaaggggactttattcaaaggaactgagagtatttcacgagagtcatggcccatgaaaatagctgagccttatgaaggtctagacctgtgcctgaaagccatcattctccctccttctgctttggggtcacatggtttcttggatctgcccttctctgtgtgcttccttccttcccctgcttctctttagagaccccttctctgctctcctctgactacgtggtctctaa

SEQ ID NO: 95930 - DNA, 333 bp, Homo sapiens
acgtgggagactgatgttaccaataacagaaaattggaaagtctagagtgtgagttggcttgagggaaatgatgatgaattggtttcagacatactaagagctcagaggaccctctgatctaggtaaccagaagtgtagggaggcaattctgagaagagggttaaatgtgcagttatgagagatcaccaaggaatagtttaatrccaggaggatagaagatgacatatgaagtgccaaggagaattgtggaagacagacaacaggctgctggggaacattcaccctagaaagtagaggactagggaggagaagctgctgaaggaaaaatcaaa

SEQ ID NO: 95931 - DNA, 563 bp, Homo sapiens
tcccagcataactgaaatgcaggaggggtgcttgcctccaaatagtggggagtgctattaccaagaaaagtaggcagacagtgttgagccagcaaaaacaataaaggtcagtcacatcacgtgtgagtcatttctacttattatcagctcccactaagaacttccctgacagagcgtttagggagaagaatcctgaattaaggggggattaacctggatcttgaaagctagctggctaatgaaggagggagaaaaactgttgatttagagtgaaggcaccaacttggaaatgtgcataggttgtgtgtatatgtgagaaggtgagggatagtggagtgcagggatgagtggcctggctaggcagagcattcacactagagaggaatggagcataaggtcaggtgacggggtgggtgaccacagtgaactaggcaagcagaagagtgtgagctcatcaggggagtcacaagctgaaacagatgcattagcaayttatttgtgtagtagaggagttggcagtggtactgcgtgggattgaagactgctagactttaggcaagggg

SEQ ID NO: 95932 - DNA, 548 bp, Homo sapiens
actaggcctgaaaaatcctccccaatcctgtttccaaggattgatgccaattctccaaacgtgctcagtgctcatgttcttttcagggtcattcggcttgtacagcacagattaaacacacagcctcagtattttcagtgttgtgaggagacgcatttacattccactgayggcgttgggtgtaaaaggaagccatctgctgtgatttagcaacacgaggaggagctacaactttgacaagcgagaaagagttgcaacacagctcaactcagtccaggtcctctttgtggggtggacctgagcagaaatcacctcaatattaaaaggcatttttattaagtagttcttagaagttggtcttctattaaatgtttcattgttctctttcactaaaattcgtttgctgctatttgttagggttcttttactagtttcaggaacccagagtaaatagattaattctatgacaaagatgacaactaggtctttgattctttgagcattcgatccaggtagttaatctttcctgtatctggttcattcgctac

SEQ ID NO: 95933 - DNA, 567 bp, Homo sapiens
ggttttaaggactgtgacaatatctcacaagatgtctactgtttctgattgcttcacactattttgcttttcaatgtttaatttacctacagttagtgtggtcaaaacatattaaatgaaaaatcccagaaataaataattcataaacttttaatgacatgctgttctgagtattactataattgttctttttcagtatcagttattgttgttaatctcttactgtgcttcatttataaatgaaactttatcataggtatgtatgtttaggaaaaaacatagtttgtatagggtttggtactaactgtactttcaggcacccagtgggggtcttagaacatatcccccgtgggtaagggggaactgccrtaatgctatttgccaaaaagtcatatttgcaaaataacaaaaacagatctgcatttttaaatgcctggaggctggaaatttgtaccacaaatctggggtttgataagtttaaggtcagcctaccctaatggattgatgttgccttctctcctgagaattgagccacttacactagcaaaaaaggctacaggtggaaat

SEQ ID NO: 95934 - DNA, 591 bp, Homo sapiens
cactagtactctttcagagattwttttatgttttcaagaatgacaaaaacgaaattctatacacaccctgatatccccaaagacactagtgccctggggattggccatgtgggttactaggttccatttatttggttatggaggatgttcttcacccaagttaatcctttcacaaaagctcatttttgttctttttcctgcagcttccctcagaagaagctgtggccagtgaggatttcagggtcgcttgtccccaggtgatatgggagtttcagctcaggaagtgactaggttagatgtgggggcaaatcaagaccttttcagccactagcttaaggctaacccaccacagacctaccttcttgaacaacactgggaatttgggtaattaaatgctaggatatcagacatgatgtgattaaatcgaagggctgaaacaaatctgacattctgtgctcaaattataaggttagcaaataagaaaactagaaatatctctcttctaggcaagaatgagaacataagtctacccaaatgtgctctacagaggtttcaggtttagcatcttgcttaaggatgatgcttcatggt

SEQ ID NO: 95935 - DNA, 507 bp, Homo sapiens
gaattctattaaacacttaaagaagaaaatgggctgggcacagtggctcacacctgtaatctcagcattttgggaaaccaaggcaggaggatcacttgagcctaggwgtttgaggctgcagtgagctatgttcacaccactgtactccagcctgggggacagagtgagaccctgtctttaaaaataaataaataaataaataaatagaataaaataacactaatcatatacatgctcttaaaacacttaggagaaagaaataattccacatttaggatatgaggataagcttatcctaaaacaaaaaccatcataagaaaagcagactacaaacaaatatgtctcatgaatgtaaatgaaaaaaatcattaacacgttagtaaactgaactaaaaataaatacagagaataacacatcatgactgaggattaacccaggaatttcaagtggtttaacatctgaaaatcaatcaatgtaacttatcatattaataaaggaaaaaattc

SEQ ID NO: 95936 - DNA, 496 bp, Homo sapiens
cactgcactccagcctgggcaacaaagtgagactccggctcaaaaacaaaacaaaacaaaatggaagattctagaaggtgggagtggcaggtgcatacagcatgggaggaatggtggaagaacagatgtaacatcgtgtacttacaattctctccatcaaagttacttccagttcttaacttctaccattgaagaactcatgagctgatatacagttatagccaggggtgatgagatgttgctatacttgggcgctatayagaaaaagtctgtatgaaccagaacaaggcaaaaggagctgctatgtcttaccttgataagagcggagcaatgtcccatgtcccatctcttaaaaacctttaggctgccgttttttgtgggagagagtgagggaatcagatccaatagatctccaacactattcaggaactgaatctggaacagggtcattggctaggaaaggacaaagactgcacttaacatcgttttgtgacag

SEQ ID NO: 95937 - DNA, 563 bp, Homo sapiens
tgaaaaaaactcatcacacatgattgaccataagaaggtggtcttcccattgtttctgactatgaggggtaatctgattatcattggcagtaacacctacaaattcacggtcaccaatctcactcattggaccctctaaattactctacaacccttctcccttcctttctcctatgactttatcagtcagcccactctttcattccttctgaaatctccaacccaatcaayattggctatactcgcagccccttgcttcattgagaaaacttccagtacccaatgagaatgctttccatctctacctttaccacctacacacttccctgcttgggtttattctttcctttctttctgccttagcagaaaagatgtctcaccctcctgtctaagcataatccccctgtatcccactctctctctctgccttttgtctcaaggtccttgctctatccaatacttttctctcctatctataagctctccctctttactggctttttctagttaatatgtaaatatccttttttttccttgtattaaaaagacatacaaacaaaaca

SEQ ID NO: 95938 - DNA, 517 bp, Homo sapiens
gcagtagtaataacattacatatcttatcactctatactataatctctgggttttttattcatctcctttaatggaccctaaactcctgggcaacaaatctttagtcttattcatctttatatcctcagtacctagtacaggcacttcacacatagcagatactcagtaaatgtttgctgaatgactagctgactggctccataaataaatgaatgaatgcttacatttatacgcatatacaaacataaaatgaayagatgaataagtgaaagaatcctaacacttcaaagggaagacttacatggctttttgataccagaaacagagacacatgaaaaatgcaatttagagaaagtattatttccattttcatctcattctattgcatcattcctacaagctgcatggccaaaaacattccaaaagggcttaatacaatttggctatgtccccacccaaatctcatcttgaattgtagctcccataatccccatgtgtcatgggaagaacccagtg

SEQ ID NO: 95939 - DNA, 506 bp, Homo sapiens
ggtctgtccttttacagccagtagtgctcgccgcagttgagcgacagggcgaagccctcgagtgagcgaggaagcaccagggaacagcacttatatattctgcttacacacgatgcctgaaaaaacttcccttggggttatccacttatccacggggatatttttataattattttttttatagtttttagatcttcttttttagagcgccttgtaggcctttatccatgctggttctagagaaggtgttgtgacaaattgccctttcagtgtgacaaatcaccctcaaatgacagtcctgtctgtgacaaattgcccttaaccctgtgacaaattgccctcagaagaagctgttttttcacaaagttatccctgcttattgactcttttttatttagtgtgacaatctaaaaacttgtcacacttcacatggatctgtcatggcggaaacagcggttrtcaatcacaagaaacgtaaaaatagcccgcgaatcgtccagtcaaac

SEQ ID NO: 95940 - DNA, 537 bp, Homo sapiens
cctatcacctgatggttgcctgacattcctggtgggagttgggggagccctctcctgctctgttcatgtctgactagctacctagtgaaacaaaagcatatgaaatttagtcattccacactaaatcattcagttatgcttttagcaccaaattaacgtaaaacaaaattatatagtttataacctctattttaaaatatataagaaaatcctctttttccaacattttattttgaattttttgatactccctttgatgcattttttatatatatatcatccttctgagctttgtaaaataaaggaatcaccttttttttttttttttttttttttttttttgtaaataagagtaccaccattctagtgacagccagttttttttagtattaccacagcatcaaaccaacatrtggagcatctgacctgcattctcttaactttgctgctgacttgggctgagaaatcagatttcatatgtccaggagtttgcagttgtctcttccaaatttatttagaaatctactcttgataatg

SEQ ID NO: 95941 - DNA, 514 bp, Homo sapiens
tttaagacatcagagttctcaaattttaggatacatcaaaatcacctgggaatttgataagacagcagattccaccccagagattctaagcccctctccagaaactctgattcagtacataggctccaaagcatcattttccacatactgtctccacggtgagattgcaggaaggtgcmaaagagagaacaggagacatgtcttattaaaactataaattgagtaactagcagagtgtctggcaaagaatagatggccaacaaatgttgatttaatgaactatttttcattaaaagattcctttatgttcatgatattaatggattttcatcattatctgattctctaagagaacgagggcttatttctaacagagggaaaatagtctaggttgctcagtagctacaaattgatgtagaagtgctttgtaaaattagcaaatgttttaaaattatttctttttttcaacatagctcccctccaatcttcaatgtaaaagaaaaaaaaatgaatt

SEQ ID NO: 95942 - DNA, 593 bp, Homo sapiens
agtcaatcatagtatgtactcagtaaagttttgttgaataaatggccaaatatgaatgaatcttagtatatagttgacaaagtaatgaatataaagawcagacatatgaaaaagtaacaaatttaatggtgtctaaagataattattgaaagatgagaagagaaatagtgtgatttgaatgtagtctgctttttaaaaaaatgtcagtaaaggtaccctaaaatagaaattaaccaaaaaaaaacaaaaacaaaaaacctgttgaaatgctgatactctatcttctttatatgtttatgttttgcactaactttttccactattttatactgtcttaattatatctaagtcttcaaacactagactgtgacctccttgaagcaggtacttttattcccactgtgtacccagttccaaatgtaagcttagaccacaataggtacccaataaattttacagggagagtgaaatgagtgataagacaggaaataaactattttaataaaactagcagagttgatgttcagaaagaaaagatagctgttagaaaacatcctaagtgactgtgaacaataaggcattctgcaacatct

SEQ ID NO: 95943 - DNA, 593 bp, Homo sapiens
agtcaatcatagtatgtactcagtaaagttttgttgaataaatggccaaatatgaatgaatcttagtatatagttgacaaagtaatgaatataaagatcagacatatgaaaaagtaacaaatttaatggtgtctaaagataattattgaaagatgagaagagaaatagtgtgatttgaatgtagtctgctttttaaaaaaatgtcagtaaaggtaccctaaaatagaaattaaccaaaaaaaaacaaaaacaaaaaacctgttgaaatgctgatactctatcttctttatatgtttatgttttgcactamctttttccactattttatactgtcttaattatatctaagtcttcaaacactagactgtgacctccttgaagcaggtacttttattcccactgtgtacccagttccaaatgtaagcttagaccacaataggtacccaataaattttacagggagagtgaaatgagtgataagacaggaaataaactattttaataaaactagcagagttgatgttcagaaagaaaagatagctgttagaaaacatcctaagtgactgtgaacaataaggcattctgcaacatct

SEQ ID NO: 95944 - DNA, 504 bp, Homo sapiens
gtgtacccagttccaaatgtaagcttagaccacaataggtacccaataaattttacrgggagagtgaaatgagtgataagacaggaaataaactattttaataaaactagcagagttgatgttcagaaagaaaagatagctgttagaaaacatcctaagtgactgtgaacaataaggcattctgcaacatctacttcatgtgtgcatttatgccttgtgtttgagaaacctgtgttatttcaaataatgttttcctaaaacaaacatgactgtcttattctccctgtctcctacctgccattctataaagtcccattgcttttagctttaaatttggtttcagcctctttgactcttttactattttcttttagtatttccattaccttaaaagagtgagtacagttgtcttcactttctcgtggtagaaagttaacagtatagaagtatgaaaatgtcaccaaagactaatcagaacaaattgcaagagtttttcctaatgtc

SEQ ID NO: 95945 - DNA, 482 bp, Homo sapiens
cataatgtacaaaatttttctcccattctgtagactgttttttcacttttctgaggttatcatttgcagcacaaatgttaatttttttaatgaagtacaattgatccattttttgttttgtctcatgcttttttactcttcctttattcctcttttcttcactatttccaaagctactagtccttcactcctgagtaacccatgctctcaccttttcctactcattctcatttctgcaatctaaagtttatcttttctgtgtccttttccttaaaaatcttgctgaatgaaatagtaaagaatccaatctaagtgaattgcattcctaggccaaacatcctcatcatcaaaaaataattattcaatgcctgccttatatagagaatcggaaacagttatctcagtgtccttgttgttttsagtgcattaacaggccttagtaacagcatttgggtgcattcctaattttgtatagactatga

SEQ ID NO: 95946 - DNA, 577 bp, Homo sapiens
tatctgaactcctgaccactgctgcctgattctgaaagcrgaccccaaagccctatcccccgaatgcacattcattcatttcttttctttctttacattttttttaaattcaagaagtatcaacaaattgaaaacattcatttctagtccacagagataaatatctagtttttgatgcaggctatgtctttttttccgtcctttatctaatattgctatgtgcttggagctgaggatgtgctgaagtatgaattcacaaagttgtgttgattgagaatgtctgtgataattttcccaacattttattatgaaaaatttcagacatccagaaaagttttagaagttgtgcattcacatacccgccacctaaattctatccacccatcaatccacattttagatcagaaagaaatcacagttttaaaaccttctcatagagaacatatggacccttcaagaatcaagaacctaaatctgagaaacaaggttatttgcccatctgtatcatggttttttcacttaacataatctcgtgataattttcctaatggcttcatgttcaatcacaacaggaaag

SEQ ID NO: 95947 - DNA, 593 bp, Homo sapiens
taatttaaatgcctttgaaatgctcatccttgagttcgtgtcctttgcagggacatggatgaagctggaaaccatcattctcagcaaactatcacaaggacagaaaaccaaacaccgcatgttctcactcataggtgggaattgaacaatgagatcacttggacataggtggggaacatcacacaccayggcctgtcagggactgggggactgggggagggatagcattaggagaaatacctaatgtaaatgatgagttgatgggtgcagtaaaccaacatggcacatgtatacctatgtatcaaacctgcacgttgtacacatgtaccctagaacttaaagtataatttaaaaatataaataaataaatgtttgtagttaagtgaaacaaaacaaaaatttcatgatacattaaacttactactacaatacattctgatatgttcccatctaatctttttaacaaacttttttattttagaagagtttcgaatttaaaaattgctatgaagatattacagaaatttgctatatgcctcataccagcttttgctattaacatcttacatcagtatattttttgcaactaatga

SEQ ID NO: 95948 - DNA, 593 bp, Homo sapiens
taatttaaatgcctttgaaatgctcatccttgagttcgtgtcctttgcagggacatggatgaagctggaaaccatcattctcagcaaactatcacaaggacagaaaaccaaacaccgcatgttctcactcataggtgggaattgaacaatgagatcacttggacataggtggggaacatcacacaccacggcctgtcagggactgggggactgggggagggatagcattaggagaaatacctaatgtaaatgatgagttgatgggtgcagtaaaccaacatggcacatgtatacctatgtatcaaacctgcacgttgtacacatgtaccctagaacttaaagtataattwaaaaatataaataaataaatgtttgtagttaagtgaaacaaaacaaaaatttcatgatacattaaacttactactacaatacattctgatatgttcccatctaatctttttaacaaacttttttattttagaagagtttcgaatttaaaaattgctatgaagatattacagaaatttgctatatgcctcataccagcttttgctattaacatcttacatcagtatattttttgcaactaatga

SEQ ID NO: 95949 - DNA, 593 bp, Homo sapiens
taatttaaatgcctttgaaatgctcatccttgagttcgtgtcctttgcagggacatggatgaagctggaaaccatcattctcagcaaactatcacaaggacagaaaaccaaacaccgcatgttctcactcataggtgggaattgaacaatgagatcacttggacataggtggggaacatcacacaccacggcctgtcagggactgggggactgggggagggatagcattaggagaaatacctaatgtaaatgatgagttgatgggtgcagtaaaccaacatggcacatgtatacctatgtatcaaacctgcacgttgtacacatgtaccctagaacttaaagtataatttaaaaatataaataaataaatgtttgtagttaagtgaaacaaaacaaaaatttcatgatacattaaacttactactacaatacattctgatatgttcycatctaatctttttaacaaacttttttattttagaagagtttcgaatttaaaaattgctatgaagatattacagaaatttgctatatgcctcataccagcttttgctattaacatcttacatcagtatattttttgcaactaatga

SEQ ID NO: 95950 - DNA, 490 bp, Homo sapiens
gtgtggctatccatgtgtgcaccttagataaatctgtccttatraaggtagctcaagacaccatgtagtatcaagtcaactctcagcccaacctgattgatttaccttctgaatatttattgtctataccaccgtcagcacacagcatgccctagcttctatttttatttttatttgtttatttttattgttatttttttgagatggagtctccctctgttgcccaggcaggagcacagtggcatgatctcagctcactgcaacctccacctcccaagttcaagtgattctcctgcctcagcctcccaagtagctgggactacaggtgtgtaccaccacacccaggtaatttttttgtatttttagtagagatggcagattcaccatatggtcaggctggtcttgaactcctgacctcaaatgatccacctaacttggcctcccaaagtgctgggattggaagcataagccattgtgcccagccccttct

SEQ ID NO: 95951 - DNA, 490 bp, Homo sapiens
gtgtggctatccatgtgtgcaccttagataaatctgtccttataaaggtagctcaagacaccatgtagtatcaagtcaactctcagcccaacctgattgatttaccttctgaatatttattgtctataccamcgtcagcacacagcatgccctagcttctatttttatttttatttgtttatttttattgttatttttttgagatggagtctccctctgttgcccaggcaggagcacagtggcatgatctcagctcactgcaacctccacctcccaagttcaagtgattctcctgcctcagcctcccaagtagctgggactacaggtgtgtaccaccacacccaggtaatttttttgtatttttagtagagatggcagattcaccatatggtcaggctggtcttgaactcctgacctcaaatgatccacctaacttggcctcccaaagtgctgggattggaagcataagccattgtgcccagccccttct

SEQ ID NO: 95952 - DNA, 490 bp, Homo sapiens
gtgtggctatccatgtgtgcaccttagataaatctgtccttataaaggtagctcaagacaccatgtagtatcaagtcaactctcagcccaacctgattgatttaccttctgaatatttattgtctataccaccgtcagcacacagcatgccctagcttctatttttatttttatttgtttatttttattgttattttttkgagatggagtctccctctgttgcccaggcaggagcacagtggcatgatctcagctcactgcaacctccacctcccaagttcaagtgattctcctgcctcagcctcccaagtagctgggactacaggtgtgtaccaccacacccaggtaatttttttgtatttttagtagagatggcagattcaccatatggtcaggctggtcttgaactcctgacctcaaatgatccacctaacttggcctcccaaagtgctgggattggaagcataagccattgtgcccagccccttct

SEQ ID NO: 95953 - DNA, 586 bp, Homo sapiens
ataaattgtgctggtaaaactggatatccatatgcagaagaatgaaattagatgctatctcttcccatatacaaaagtcaaatcaaaatggattaaagacttaaatctaatacctcaaactacaaaattactacaaaaaaaaatgggaaaacaatttaggacattggtctgggcaaaaatttcttgagtcatagcccacaagcacagataaccaaagccaaaatggacaaatgggatcacatcaagttaaaaagcttctgcacagtaaagraaacaattaacaaattgaagagacaacccatagaataggagaaaatatttccaaactatccatctgacaaaggattaacagccagaatatataaagagctcaaacaactctataggaaaaaatctaaatctgagtagacattttccaaaagaagacatacaaatggcaaagaggtatatgaaaaggtactcaatgtcattgatcataggagaaattaaaatcaaaactgcagtgtgatatcatctcaccccagttaaaatggcttgtttccaaaagacaggcagttacaaatgctggcaaaaacattgagaaaag

SEQ ID NO: 95954 - DNA, 672 bp, Homo sapiens
aaggcctaggacattactgtacactactatagtctttataaacactgtacacttaggatacactacatttatttaaagttttttctttattcaataataaatcaaccttaccctatcgtaatgtttttactttatatacttttaattttttaaatatttttattgttttgtaataatactgagcttaaaacacagacacactgcacagttgcacaaaattattttctttatatccttattctataagcttgcttctatttttaatttttttcattttatttttttcactttttaaactgctttgttaaaaactaagacacaaacacaaagggtctacgaagggtcaaaatcatccatatcactctcttctacctccacatcttgtcccactggaaggtcttcaggggcagtaatacacatggagctatcatctcctatgataacaatgctttcttctagaaaaccccctgaaggacctgcttggggctgttttacrgttaacttttttttttttatcagtggaagtacactataaaataacgataaaaggtatagtatcatgaatatgtacaccagtaacatagtcgtgtattatcatgatcgagtgtattatcatacacattaattgtatgtgctagacttctatatgactggcagcacagtaggtttgtt

SEQ ID NO: 95955 - DNA, 622 bp, Homo sapiens
gaacatgcttccctgtggaggagagacctgcaggtggtaagggaatgagctttgcacaccttggtctcaagggaattgcattttaggcaagtgcagatgctctgaggtaggagcctgctgagctgttccaggaggaccaagattgtcctggctggggcagagtgacccagggctgtggttctccaaacagggtcctaggacaaacagcatcagtttcatctgtagactagttagaagtgccaattctcagcccccattccacacctgcaggtatgggaactctggagtggggcccagaagtgtgtatgtgcatgcatatgtgtgtgtgtgtgtgtgtgtgtgtgtgtgtgttaacttttttatattgaaataatttcagattgacagaagagttgtaaagacagtacaaagattttccttacacccatcttcccttgatgtcaacctcttactccatcrtggcacatttttcaaaactaagagattaacagttatatggcactaataactaaactgcaaactttatctggatttctctagtgttagtgatctgtggtttaacaagttctccagatgatcgaatactaccaaaatttgaagaccacttagccagagggatagt

SEQ ID NO: 95956 - DNA, 579 bp, Homo sapiens
gtccaggccagccacacaggtcactgggtacagatgcccccagcctttgaagccctgagctgatgggaattgaaaacgctggcatcccactgggcagctgttctgccaaaagttcacaatcctgcacacttgagaacttcctgaccagccgacccagtgtcaaagggagctgaacctctccttgtctccagccctgaaatggagttgtgggcaaatgcttgcgttcacaggacagcacaaggcatcaatggcctgattatgtcgagacatttgaagacaaagcagaatggaacttcaaaagacttaggaaggcctgggatcccctttcagaagtcagcaagttcaatcactgataaaaatccctatattgsgttcacagtttggctttgacatttcagctcagatggcaaatgaaatcctttaatgtgtttaaacttttggtaaaactctattaccctctaactcttgctgaaaaagacattatcttttgcatgttgcatgaagaaggcttcccttttaatgtcacttccacatttctattacagcattcacagagctttcgtaaatatgtgaatatgt

SEQ ID NO: 95957 - DNA, 408 bp, Homo sapiens
atcggtcactcttctttgttaaatttcacattttaattttctttaatagtattatctttgtaaaatggcacatgataatgattaaaacaagtcacacaacacagcaaagtgcaaagaagaaaactaaaggtgattcccaatctcatcacatagaaataaccacctttgacccctgtaatcataatttcatcctctctccacacatrgataaagcaatagagagaaaaatataggaatgttccatggatgtctttattaaaacaaaatattaaattacatagtctgttatttcacagaaggaaaggaaacagagaattactaaaatttcaaataaatatttatgatacaactggtgataagttcccaaaagagcctactgaagctaaaacataaagattattaaacaaa

SEQ ID NO: 95958 - DNA, 485 bp, Homo sapiens
tttcaactttgtctttaagagtttgtttcacggctttacaaggccagcaatttttgcaatgtgtggtacatggtagaatcagtggatcccatggctatatgcccactatcacacctcttttgctgtgaaaaagacctttggtctgaagcaatgttaaaatgggatcccatgtcagttatattagataatctttgagtycttgcatagtaatgttgtcgaacatcactgttgtttgtttttttagctggctttgctggcgggcaaggcaaacccatacctagaatatgtgtcaatcccagtcaggatgaatggttgcacttttggtagatgaattatgatgtaatcatcttaccactaagtagctggttgatttcctccaaggatggtgatatgtctaagtcttagtgttgatctctgtgcaaaggttctctaccatgtgcatgaatgtgatgagacagaacacacacacaagtcaggcgaaagca

SEQ ID NO: 95959 - DNA, 485 bp, Homo sapiens
tttcaactttgtctttaagagtttgtttcacggctttacaaggccagcaatttttgcaatgtgtggtacatggtagaatcagtggatcccatggctatatgcccactatcacacctcttttgctgtgaaaaagacctttggtctgaagcaatgttaaaatgggatcccatgtcagttatattagataatctttgagtccttgcatagtaatgttgtcgaacatcactgttgtttgtttttttagctggctttgctggcgggcaaggcaaacccatacctagaatawgtgtcaatcccagtcaggatgaatggttgcacttttggtagatgaattatgatgtaatcatcttaccactaagtagctggttgatttcctccaaggatggtgatatgtctaagtcttagtgttgatctctgtgcaaaggttctctaccatgtgcatgaatgtgatgagacagaacacacacacaagtcaggcgaaagca

SEQ ID NO: 95960 - DNA, 605 bp, Homo sapiens
tgtcacagtatgcttcaaaacactggatccctaaaaacattaataatgtatcataggttttatttcttattttttggactgcatgcatcttactaaggcactcagagcacttgccatttcttgtccattacgtacaattaacatgatgttatcaatacaatgaaccaaaatgaattctgcagaagtccagatggttcacagtatattgtgacagcatttagaagattaataatctctggaggcaggccatggaagtacaytattaaggacatggaagtattccatgtaaataagaaccactttagaatctccttgatgagtgtggaaaagcatgcatttgctagctcagtagtcataaaccatgccagagattatattaatttgatgtagcaaggataccacatctggcacagcagccgtgactgggactattacttggttaagttcatggtagtctaatcttatatatcataatttattcagtttttccaagagccagactgatgaattaaatggagacatgccattgcctcctgtatgcaatagagtttttgatgggtttggctgaagtttagcctcaactgaatgccatggagagtcctagg

SEQ ID NO: 95961 - DNA, 606 bp, Homo sapiens
tttcagtcttgttggagaagcaagatgaacaatacctgacagaaagaatcatatccaatgagtgctttagaaaatattgccaaggcactgagaaagaaatgaggatggaagtaggcatagaaggatggtcaatattggcatggggacaaagttgtggcttgaccaactagcaagaaactcaaacttacagagccctgtgtttatgtaaactgtgatatggataataatgacaaccatacgcaaataaaaatgaacatttattaagtgcttactctatgtcaggacctaagagttttgcrtatactaactcacataatcggcatgctagccctgtcttgtagatattctttttattcctttaatgaatgatgaaataaaggctcagagaagttaaattgaatacccagctagtatgcattggaacacagggaatttggctccagagctcaagttcttaaacactgtctgtctgatagtttggaataagcatgagtggttcacatgaagtaaagtctgctgtacgctagactcattcattttacattgttcattcatgtgctgttgctttaaatgtatgttgcccagagataagccggggaccttatg

SEQ ID NO: 95962 - DNA, 606 bp, Homo sapiens
tttcagtcttgttggagaagcaagatgaacaatacctgacagaaagaatcatatccaatgagtgctttagaaaatattgccaaggcactgagaaagaaatgaggatggaagtaggcatagaaggatggtcaatattggcatggggacaaagttgtggcttgaccaactagcaagaaactcaaacttacagagccctgtgtttatgtaaactgtgatatggataataatgacaaccatacgcaaataaaaatgaacatttattaagtgcttactctatgtcaggacctaagagttttgcgtatactaactcacataatcggcatgctagccctgtcttgtagatattctttttattcctttaatgaatgatgaaataaaggctcagagaarttaaattgaatacccagctagtatgcattggaacacagggaatttggctccagagctcaagttcttaaacactgtctgtctgatagtttggaataagcatgagtggttcacatgaagtaaagtctgctgtacgctagactcattcattttacattgttcattcatgtgctgttgctttaaatgtatgttgcccagagataagccggggaccttatg

SEQ ID NO: 95963 - DNA, 606 bp, Homo sapiens
tttcagtcttgttggagaagcaagatgaacaatacctgacagaaagaatcatatccaatgagtgctttagaaaatattgccaaggcactgagaaagaaatgaggatggaagtaggcatagaaggatggtcaatattggcatggggacaaagttgtggcttgaccaactagcaagaaactcaaacttacagagccctgtgtttatgtaaactgtgatatggataataatgacaaccatacgcaaataaaaatgaacatttattaagtgcttactctatgtcaggacctaagagttttgcgtatactaactcacataatcggcatgctagccctgtcttgtagatattctttttattcctttaatgaatgatgaaataaaggctcagagaagttaaattgaatacccagctagtatgcattggaacacagggaatttggctccagagctcaagttcttaaacactgtctgtctgatagtttggaataagcatgagtggttcacatgaagtraagtctgctgtacgctagactcattcattttacattgttcattcatgtgctgttgctttaaatgtatgttgcccagagataagccggggaccttatg

SEQ ID NO: 95964 - DNA, 656 bp, Homo sapiens
tttcatatttcttcttgcccttcaaccccttcaaaggtaaggaaacagaatagagtgtgtcactcaattaaaatattgtccctcatctctgaaacccctccgtggttcaccactgtctacaaaatggagtgccaacttcctggcaaagcctgccagctgcacaatcgcacaatctggctccaggctggtataattagatacctcccctcctgcacgcatctggggtaccttacaccccattcaccaccagaccattttgttctctcacttctttgctcttacttatgttggtttcagcttgggattccaaactctacttatttgctcatggaaatcctacattctgtctgccttcccttctcctttattgagcaaccacagtatgccagcactgtgctgggaggcagaaacgaagagaaacacsactgggcttgatctgagagacttttcaaagactagttttaatatgatcaagggaacaatgaaatctgctggaagaatgtggagggtatggagaacggacacaaaaaggaggtagcaattgagctgggctatgaaggttttgtagaagtcttttcagaagggagaaggcagaggggcagtggtagcaaagacaatgaaaatgacaatattttgagggagtgaaatcctaaatt

SEQ ID NO: 95965 - DNA, 656 bp, Homo sapiens
tttcatatttcttcttgcccttcaaccccttcaaaggtaaggaaacagaatagagtgtgtcactcaattaaaatattgtccctcatctctgaaacccctccgtggttcaccactgtctacaaaatggagtgccaacttcctggcaaagcctgccagctgcacaatcgcacaatctggctccaggctggtataattagatacctcccctcctgcacgcatctggggtaccttacaccccattcaccaccagaccattttgttctctcacttctttgctcttacttatgttggtttcagcttgggattccaaactctacttatttgctcatggaaatcctacattctgtctgccttcccttctcctttattgagcaaccacagtatgccagcactgtgctgggaggcagaaacgaagagaaacacgactgggcttgatytgagagacttttcaaagactagttttaatatgatcaagggaacaatgaaatctgctggaagaatgtggagggtatggagaacggacacaaaaaggaggtagcaattgagctgggctatgaaggttttgtagaagtcttttcagaagggagaaggcagaggggcagtggtagcaaagacaatgaaaatgacaatattttgagggagtgaaatcctaaatt

SEQ ID NO: 95966 - DNA, 542 bp, Homo sapiens
agctagggtaatttgatctagaaaccaatcatccaaaggtgaccgctttgcttctgcttgcccagtgattataggggtgcctgattccctatcttcaatcmctttcagctagagtccttctatttcttgcatcagcccctggctgacgcaatactgtttgctcacacacacatacacacatcctaacatggcccaatctcccttctcatgctgcttattcaaatttgggaattagttattgatctgaggggtagaataggctaagtgctgccgggagttgacatccaaaagactctgtattgatcttgtctcaggaaaatagactctgacattcagggacaacacccacagaacaatacaaagtcaataagtgaataaatagttgctaagttgtgctgtgttgaataccaccaatggctctaggcagtcaaaaggtatgggatcgatggagttacttcattcatacaggtttgacctagtcttgaaggacaggtcaaccctgggtaggtgaggagaaaggaagtggtaggcaggtatgagaa

SEQ ID NO: 95967 - DNA, 622 bp, Homo sapiens
tgctgtggagtctatcctggactttattcctatttccattgtctgtagtcaagctcctcacacacttattcctagattttgtaaaaacttctcatctgcctgctctggttcttgctgtttttttccagtccactgtgtaaacctttccagacaaaggttcttaaaaccttcttctcatgtggtcacatccctatccaattatcttaaatatgtcttttttttcctctttttgagatagagtctcacttcatcgcccaggctggagtgcagtggcattatctctgctcaccacaacttctgcctcctgggttcaagtgattctcatgccagcctcccaagtagctgggattacaggtgcctgccaccatgcccagctaatttttgtatttttagtaaagacagtgttttgccatgttggccagtctggtctctaactcttggccttaagtgatcccccaagcttggcctcccaaagtgctgggattatgggcatgagccaacacagctgaaattaaatatgtccctcttaactttgactttaggttctgcacgtttttctagaygcagttttttcacattgacctgatccttcaccaatatgcagcccacactctataaatgg

SEQ ID NO: 95968 - DNA, 601 bp, Homo sapiens
aaagagtgtgagactgaaaaatattttttttaaaaatgacccgaaatctctaaatttggcaaaagccaaaaacctacaaatccaagaagctgagtgaatcctaaacaggttaaagccaaagaaattcacaagacacataataatcacactactgaaaaccaaaaacaacacaaaatcttaaagcaatgagagggaaattatatcttaattatagaggaaaaaacaaatgctagtggacttctcatcaacaaccatggaagtggtatattttgaagtactcaaaggaaagaactgtcaacttacaattctatctatattcagtggaaatgtccttcaggtatgaaggagaaatcaagacattctcagatgaaagaaaacaaaaataatttgttgccaacaaacctatcctaaaagaakagttgaaggaaattattgaaacagaatggaaatgataaaagaaggaaacctgaaagatcatgaaggaagaaagaaaaatggaaagagtaaaaatatggactactacgcagccataaaaagaatgaaaacctgtcctttgtaactacatggatgtagctggaggccattatcctaagtgaaataa

SEQ ID NO: 95969 - DNA, 569 bp, Homo sapiens
ttgtctggtgttttctgcagagtactgaggaaatattttgtaaagtgagctttgggtgtaacttagccccatcattatttagagaatagagggagagaaagaggaaggattttaaaggcagacaatgacagacaattcaggataggtagggttttaaaaggagataaacacactaaggagagatttgctgcagtaaataggatgagggaagtagtttgtgggatgcgagcaaaggaagcaggrtgtcttagatattgagtagagccagaaagatcatgcagcctttttccaagtacgtggccaccaagtaggaatggctggtgacaagacagaacgctaaaaaaggaaggtaatcttgtgcccttgacacatagaaagaacaagggaccaaaattgaaggcaagctataagagtatcaagaaactcttagaaaccaaaaagtgatttggaagcacaaaacatagttaatgctacccaacgtcatgataggccaagaacactgtggattcctaagttagaaaatgccatataccaaaattttaaatggaacatattcctttttttttttt

SEQ ID NO: 95970 - DNA, 526 bp, Homo sapiens
tcattattttcaccctctggacaagtttagtggagtaagggaaaaaggcacatccagccaagtctgactctttaagaagctttctgagaaacctcatccagaatctttgacttctrtttccttgcccagaaggaggtcatatggacactcctagctgcaagggagtctggagaatgagagttttagttgagcatactgtcattacttttcttttaaaaggaaggagaggccaggtgtggtgactcatgcttataatcccagcattttgggaggctgaggcaggaggattgcttgaacccaggaattctagaccagcctggacaagatgatgaaatcctgcctctatttaaaaaataataaataaataaataaataaataaaagaaaggagagaagagacattgagaagacaactaacagtgtatgccacaatcctctaaacagacaaaaatcttgaaaagtgtcacagctaggaagagctaaggagacatatgataattgaatgtaatgttgtacctagatgaaat

SEQ ID NO: 95971 - DNA, 596 bp, Homo sapiens
cattttgacatttctcaaagtgaaaaccctgttggtctattacattaaaggaagagggtaaatatgccttttcttcatttctagtttttagttaatactgaggaatgaaattatatttgctgaagaacttggagacggttgccaatattttcacttcaattttttttttaaaagcctcttcaaaaagaaaatattttacccctgccaaggctctttgtagagaactgtagcctttaaaaataaagttcaacagatgcttttaaagtttgaaattaatttttaaagtaatgtgacttktagtggtttgttgattgatattttctactcaggatgagtgattaggagaagaattcacaggacgaataacaaacgatactctggaacagccaacttcgatcaaaaaggaatatgagagagaaaaaaatctgctttggcctatctggttccaggtagctggggcatggaaatcagactcggggctggcagttggcccatgcatcccaatctcttcataacttaaggccacctacttaataagtcctattcctctcctgtcaccactcaattcacttgcaatcaatactgagtaagttaaa

SEQ ID NO: 95972 - DNA, 479 bp, Homo sapiens
agatctttttgcattaaaaaaaaaaaaagttgtgtgtttgatgtgtgaccttgtagtttacctagagttttccagattttggttagataataatcttttatttttctactgatgatatctctgtgtgtctctgcaccttgaaaatcaggattctgtgtggtccccacacacaggatgtttcctagatcctatacatttttattacacataccatgttattaatagattattaatccattcattcaccagaaaaatggtaggtattcactgtaaaccaaacaccattctaagcaytggggacgctataaaagtggagtatatattcgagcaaaaagaaacaactaaactcagagagagagagagaggtttcagaacatgagggtaaagggcaaaagaattatgagggggtggctattttaggtagagcggtcaatgagggcctctctgagaaagtgacatttgggtagaatcctaaatgg

SEQ ID NO: 95973 - DNA, 534 bp, Homo sapiens
attttacaagttaacctgggaattttttttaacagtgtgtttggatcaatggaaattttatccagctgattagagaaccacagtataaaacaacagggaaattaagttgttttttttttttaaagagactgtgggggtcagtcaggagcatcaacagttccaaatagcaactattatgatgcactaatatggcagtctaaaagttcatattcagccagccaggcacagtggttcatgcctgtggtcctagcactttgggaggccaacatagaaggattgcttgaggcccatgtttcaagaccagcctgggcaacatggcaagaccccatctctacaaaaattaaaagattagctgggcatgatggcacttgcccatagtctcagctactcaggaagctgaggtgggaggattgcttgagcccagaagttcaagtctgcrgcacgctgtgattgtgctgctgcactccagcctgggcaacagagcaagaacctgtctcaaaaaaaaaaaattcatattcaccttctgaactttct

SEQ ID NO: 95974 - DNA, 534 bp, Homo sapiens
attttacaagttaacctgggaattttttttaacagtgtgtttggatcaatggaaattttatccagctgattagagaaccacagtataaaacaacagggaaattaagttgttttttttttttaaagagactgtgggggtcagtcaggagcatcaacagttccaaatagcaactattatgatgcactaatatggcagtctaaaagttcatattcagccagccaggcacagtggttcatgcctgtggtcctagcactttgggaggccaacatagaaggattgcttgaggcccatgtttcaagaccagcctgggcaacatggcaagaccccatctctacaaaaattaaaagattagctgggcatgatggcacttgcccatagtctcagctactcaggaagctgaggtgggaggattgcttgagcccagaagttcaagtctgcggcaygctgtgattgtgctgctgcactccagcctgggcaacagagcaagaacctgtctcaaaaaaaaaaaattcatattcaccttctgaactttct

SEQ ID NO: 95975 - DNA, 634 bp, Homo sapiens
tagccaacccacagaactgtgagaaataagacacgtttctcagtttatgccactaagtcttggggtgctttgttatgcaaatgccaacagatacactgtatttgaacgtctgttctagaaaacagaaatatctttatctgaaagctacccaggtaaatgtctatactcactacagtattttccggtactagtgttgttttcatcttctcttcctgggcaatctaaaatcccatcacaaactttataaatggagatgcatcgtcccgactctgggcaagaccattctcttggggaacatttatgaacatcatgaggaccgctttctgtggggggaaaaagagagagttacaggccataggggaggtacagccagctctttgttaatcagtggtttacagaggatgtagagcaagttgaacaagagaaatctataaatgatctacattttacaataagttagtgatttctaactctaccactagtcttttactgagattctaaggagaggcataatggaattactccacttttcctggaaraggcagcccccagtagggttataagaggaagaagcagatatgggcctcaattatcgacaaactaaattcatgatcccctaagaaaagatgtagtt

SEQ ID NO: 95976 - DNA, 634 bp, Homo sapiens
ccattccccacccaacaaacaagaagcccagcttgatatcatcagggagggtattgtgatggccagaggtcagcagtttgacttttggaatgaggaacacacagctttcttgtctccatccacactgataaagaatcactctcaatcagcagaggacccctctcaacccctgcacaccttgatctcttyggtgcatagttaacctgggatgtatactcataggaaagattgcacagagctccctaactccaccaaatactgaaaatacctgaaaatctgtttctgaatggttttccctctttggagacccacacagagacaacaggtccaaactgtcaacactgagcaaagaaagaaatgaatggattctactaccattgctaaagatgttaatgagtttcaatctactccagaaaacaataattcacaatcctttgagcttccaactgggagatatctaaagtcttattttttggttcatttgcttggcaagcctaagtctaaccttcttcccacagagcaaatccatcatgtggctataatgtcctgcaagaatttaagtatagggtaaagtgcaatatgagaggagaccatatataagaacaccaaggaaactcttccttctgaatttggt

SEQ ID NO: 95977 - DNA, 634 bp, Homo sapiens
ccattccccacccaacaaacaagaagcccagcttgatatcatcagggagggtattgtgatggccagaggtcagcagtttgacttttggaatgaggaacacacagctttcttgtctccatccacactgataaagaatcactctcaatcagcagaggacccctctcaacccctgcacaccttgatctcttcggtgcatagttaacctgggatgtatactcataggaaagattgcacagagctccctaactccaccaaatactgaaaatacctgaaaatctgtttctgaatggttttccctctttggagacccacacagagacaacaggtccaaactgtyaacactgagcaaagaaagaaatgaatggattctactaccattgctaaagatgttaatgagtttcaatctactccagaaaacaataattcacaatcctttgagcttccaactgggagatatctaaagtcttattttttggttcatttgcttggcaagcctaagtctaaccttcttcccacagagcaaatccatcatgtggctataatgtcctgcaagaatttaagtatagggtaaagtgcaatatgagaggagaccatatataagaacaccaaggaaactcttccttctgaatttggt

SEQ ID NO: 95978 - DNA, 582 bp, Homo sapiens
aatctgtgatatccccattattaacaactttgagggcttgtgaacataacagcatagaaccccaatctgcaggcagttaggggattgtcttccaggacattcttggacttaggagcaggatctcaattctccaagaaatgacagtcttgtgttattttggttccaaacaggaaagcttcacattttttgattgtggtgttccataaacctctactgatgtattttagtaataaaagtgggtcttaaagaaaactggtctggtagatgagtctcagttgggcatgaagggaataaggtagtagtcgctagtccagatgctgtctgaggccaaggattgattttctggtgtcaccttgctggcatgtgggaactgcatgcatgatgtgtttccactgctgcttttctaggggactatgtgttaagkttcttggacattaaaagcatccatcctggttaggattttatatttgccctcattttgatatgcaaaagccctcaaaacatttagtaacgcatttgttatttaaccccttttatatcctagttgagcaggaaacctccttgcagagtcattttcaccat

SEQ ID NO: 95979 - DNA, 462 bp, Homo sapiens
tcaatctgaattcacttcctacagtttctcttcactgtggattcctgtcctgtcctgggaaaccctgccagcatgttttcaagaatatacttggtctctgccccttaagactttactctaggactctttcatttacctgtctttgggaaaggaaatctctctccccccacytttttttttttttttttttttttggctgctgttctcaaattggcctgcttttgcttcccaatgatatttatcggtcattcaaggattctttttttccatggtctatctgggatcctgctacttctctgttttccttcactgaaatcctgctaacatgcagggctttgatggtttatccctacccacttgcattttggggtttcgggggatatctttgcttttagtttcaatgaaaatgttggtcctgggtgtgactttggtaccagtccctctttcattttatatataggg

SEQ ID NO: 95980 - DNA, 465 bp, Homo sapiens
tatttcattgtggtaagaacatttaacataagatctactctccaagaagttaagttcatgatacactattgttaacaataggtacaatgatctacagcagatctctagagcttatttatcttgcttaactaaaactttgtgcccattaattaataagtcctcatttccccctctagcccttggcaactaccattccacactttgattctatgaatttgactatatatgataattcccgtaagtggaatcatgcagtttgtccttctktggcaagcttatttcactcagcatgtcctcaaggttcatcatgctgttattatttcagaactctttttgtaagactaaatagtatttccttatgtttatatacaacattttctttatcaatttatccatgtatggttttttatacatcttcgctatggtaaatactgctgcaataaatactgctgcaataaatactgc

SEQ ID NO: 95981 - DNA, 465 bp, Homo sapiens
tatttcattgtggtaagaacatttaacataagatctactctccaagaagttaagttcatgatacactattgttaacaataggtacaatgatctacagcagatctctagagcttatttatcttgcttaactaaaactttgtgcccattaattaataagtcctcatttccccctctagcccttggcaactaccattccacactttgattctatgaatttgactatatatgataattcccgtaagtggaatcatgcagtttgtccttctgtggcaagcttatttcactcagcatgtcctcaaggttcatcatgctgttattatttcagaactctttttgtaagactaaatagtatttccttatgtttatatacaacattttctttatcartttatccatgtatggttttttatacatcttcgctatggtaaatactgctgcaataaatactgctgcaataaatactgc

SEQ ID NO: 95982 - DNA, 465 bp, Homo sapiens
tatttcattgtggtaagaacatttaacataagatctactctccaagaagttaagttcatgatacactattgttaacaataggtacaatgatctacagcagatctctagagcttatttatcttgcttaactaaaactttgtgcccattaattaataagtcctcatttccccctctagcccttggcaactaccattccacactttgattctatgaatttgactatatatgataattcccgtaagtggaatcatgcagtttgtccttctgtggcaagcttatttcactcagcatgtcctcaaggttcatcatgctgttattatttcagaactctttttgtaagactaaatagtatttccttatgtttatatacaacattttctttatcaatttatccatgtatggttttttatacatcttcrctatggtaaatactgctgcaataaatactgctgcaataaatactgc

SEQ ID NO: 95983 - DNA, 594 bp, Homo sapiens
ctttttgtcagtagaaaggtcaaataattttgcacaatgtgctgcaaatttttagctttataattttactataagtgacccaagggaaagctcattatattgttacacacaaaaattatgttgtgagctaatggaaagtgaacagtaaggtagaagccctgtgtgctatacccactgctttttctgaaatacataatcttggcatgttttgtttttaattttttcaataaatgtggaaaaatttatgtaaaaaataagagtcctcatctcacaatcaacsatggtataggagggtagccttctatacatgaatataaggcccttctaaggaatataacatgcaacaaagatttacagtaaagccaaggaagtaagaaaaaaagttgactaacctaacccacctgagctcggctcacaggggtcaatgtcctcatcatcgctgggacactctgctgaggccacaaggatgtcatctgtggtctgcaaaagaatcacattcagtagattaatttaaagggtcctaacagattctctcatctttgtctcattgacaagtgaaatacaatttgtttatcaagaaaccaaattcactat

SEQ ID NO: 95984 - DNA, 618 bp, Homo sapiens
atatttgtcaaccatctgtatttgaaagtataaactactattccactggaagagctctgtattgattgtggattcaggaatccacaggggaaggctagattcagaaaagacagagaactaaagagaaggggaaaagaggcacctggagagagggggaaatgcagttaactggacatcatcaggacctcacatcggaagttctgccttgaaagcatttggaaaaatggggcctcataggcagtgctctctcctccctcggctgccttgcctctgcttcaggagggaagcatcacatgcagtttttcacctcctcccacagtttgggaccatggtacgggggacctcttggagtcatggcaacagtgggaaaggattttcttcacgggtctattcagatttgcacttggcagaaaactttcagcagaaagccattagctttctcttaggactttggttttcaagttgagtttggaaccagaactgaagattaaaacatgcagaatattctctatgccatttagctgtctgcagaaacccactgttgctgggtacccagccatgtcccctgcccacccccaccctggcgaacstgggagtgagaagccaggggaagcacag

SEQ ID NO: 95985 - DNA, 632 bp, Homo sapiens
tcaaatcttttcaaaacataagaacagaatgacaattacaatctgtaaaagtgaagaagaaataactgccatttaagaggaataaaataatgtttcataacgcatttataacactgtttttcaagtctatgtggtcagactttgctatcaaagactcaaagaaagtgtatgaactgaagctcttcctaaataattacctcttttagttctctgcaagtgcaatttgacagctaatagattgcctcaatggattttcgtcttccatcatgtttctatggcatgcaaagccaaaacacttaaagatcatgggcaacagactaaattaaatttacctttttctcattttgttattgtgtcacaaaaaacaagttctgaagacttgtctggaggaacttgactataagttcaaataaaatttttaaaaaagaaaccatttatttcatacatrtattttctagtttcctatcaaaggcaatacctcccctgtagttgctgctgcatgtgccaagttaagttttcccacttgctgcatcctagcttgccaaaaggagcacttcttttcctttgcaacttcactgaatttccttttgtatattattttatttctaggatgatgtttacaaagcatatta

SEQ ID NO: 95986 - DNA, 608 bp, Homo sapiens
tgctaggtgccaaaagtacaacagacaagaaaaaacatagtcttggaactccaggaacttattggctggtggaggagacagataataaaaaaggcaacaaacagatgaaacactgcaaagtgtgaccatgaagaaggcaagcagcgggagaattaccttttagtttaagaggccagggaaaatccctctgagtaagtgaggcttaccgagaccacagaattgagaaggagcctatcagacaaagaacaaagggggctgggtgtggtggctcacgcctgtaatcccagcactttgggaggctgaggagggaggatcatttgagattgggagtttaagaccagcctggtgaacatggtgaaaccctgtctctactaaaaatacaaaaattagccgggcgtggtggcacatgcctgtaatttcagctactcgggaggctraggcaggaaaattgcttgaacctgggaggcggaggttgcagtgagccgagattgtgctactgcaggccagctgggtgacagagcaaaacttcatcttaaatagccaaagggaagaacattccagagagaggagatatgtagagacaggaagaacttgctatgttctgaaaa

SEQ ID NO: 95987 - DNA, 576 bp, Homo sapiens
acagtgccaacagattcaatatctggtaaaaacatgttcttcatagaaggcatcccctatgtgtcctcacatagctgaaagacgaaagggctaggaagctctttcaggcctctattataagggcactcacttcattcatgagggcagagcacccaaatgtttaacaaatataactagtattactgttgttgttgttgttatcattattattattgggtggattgaggtccttggagagcttctggtgacttctgtctccttcagggccaagtccaagcttctcagcaaaacatctaagtcctcccatgatccagctcctgctggcatctccagcttcatctktcatgatccctacctcataccctacactccagtcattgctgagggtttcctcgctgctgcaggtcaccaggctttgcacaaggcaacccctctgcctgagcactcaccaccccctttgaacctcagacacagcttcagtgtggtatcctctccaaagacttccctcattgattccttcattcagtgaaagtttgctgaaatctacagcgtgccagcattttccaagtggcggtc

SEQ ID NO: 95988 - DNA, 639 bp, Homo sapiens
ctttgctggctgcttcagcagctcgggttccgatgaagtagacttyaagggctcccctccctccaagactttttgaagacctctttggagaaagaggatgagatggctaaactgtcactctcccttctttccgcacgcagccaccatacgccaccaccagtgcaagtggctgatggggttcttagagggccaaggacatcagaaacagcagccttcaaagacccttgtgtccaacccactcacttctacatttggggaaactgaggcccagggagagcggtatctgttaggatgtttgatcatgagataaacaatcagaagtcctgggttccagtcatgactttgcctctaactctctgttatgtgccctggagctgaagacccttcagccacaaaataaagggcgtgggtgaggcaaagtcctcagagccttcccagctgggaagcggtgaggctggacaccccttccccgtgccaggtctcatctgcaatgcatgtgggtgggtgcagggggccagcgccctcccttccagccctgacaggccgcaagcctcctccccggaccactcagcccccaccccaccccctgagacagaaagaggcaaagctacctctgagggggcacagtaggcaggtgcc

SEQ ID NO: 95989 - DNA, 407 bp, Homo sapiens
gaattcctctttcccttaaatttctcaaagacttcctgtgaaggtttaaatagataattcatataaacctagcacaaattaagtacatgataagtgttagccagttagtatcagtattccatttagattcatttgtcctccttgtagcctggttactgtgctcagcttggctctcttccattccagttgaaacaagacccttccattgttcatgtttttcatcccagctcctgtattasttcatgccttgatttcttcctgactctaactgcactctaactctaaatcatcagggacactcaggaatttattattattattatttttgagacagagtttcactcgtgtcccccaggctggcgtgcagtgatgcaatcttggctcactgcaacctccacctcctgggt

SEQ ID NO: 95990 - DNA, 407 bp, Homo sapiens
gaattcctctttcccttaaatttctcaaagacttcctgtgaaggtttaaatagataattcatataaacctagcacaaattaagtacatgataagtgttagccagttagtatcagtattccatttagattcatttgtcctccttgtagcctggttactgtgctcagcttggctctcttccattccagttgaaacaagacccttccattgttcatgtttttcatcccagctcctgtattacttcatgccttgatttcttcctgactctaactgcactctaactctaaatcatcagggacactcaggartttattattattattatttttgagacagagtttcactcgtgtcccccaggctggcgtgcagtgatgcaatcttggctcactgcaacctccacctcctgggt

SEQ ID NO: 95991 - DNA, 617 bp, Homo sapiens
ggtctgggggtgggagtggagactggggagacgctggtcaaaggacaagaaattttagctagacagaagaaatgagttcaaaagatctacggtatagcatggtgactatagttaataacaacrtgttgtatacttggaaaattgctaagagagtagattcgaagtgttctcaccacacaaaagtaagtatttgaggtaatgcatacgttaattagcttgatttggccattctgcaacatatacatatttcaaaacatatttgtacaccataaatgtatacaatttttatttgccaattaaaaaataaacaagaaacagttaaaaagaaaaaaggaacagcaggtgaagggaaccatccaagcacaaacatcctcaactcttggttgatggaacaccaaatagaggttctaagatattgtctgcaatcagctgggcacagtggctcatacctgtaatcccagtgctttgggaggctgagacaggaagatctgttgagctcaggagtttgagaccaagcctgggcaacatagcaagacctcatctctacaaaaattttaaaaattaacctagtgtattggtgcatgcctgtagttccagctactcagaaggctgaggca

SEQ ID NO: 95992 - DNA, 715 bp, Homo sapiens
tatgaaagtgttttaaattgttagtgaaataaggactgtttttcatttcaaacaagactagtactgagaggaagctggaagtcctaggtactgttgtgccttagttctgcaactttcataagacagaagaaaacaagaaaacttttcttctcagaaacagcgtggagacagctcctccctctcaagggaggctctcttttgttactctgcttttctgatagaattacctatatggagctggtgacttctcttttttttggatacagtgagaccaatattctaactacttccaaatctactgcctttgactctttctttttaccctgtcaatgctgcttagccaaagagcaccaggaatgtacctgcacttgaagtatttggattttttttcttgttgcaataaagagaaggcacatcagggagaaccatggggtatctcaggaaaagggcattagaaaggacttggaagatttagacttgtgttcagtgatttgaggagggttcaaggaagcagggcttggatatagtttgcctgctatcaagaagcaggcgtaattttatgatttgacatattaatggaatattaatgactctacttggaagtaacggaccaacttttctgstctgcttgagactgaggggtctcctggggcaaggcattttcagaacccaaaccaggaaattcccagacaaactaggaggagtgaatcacacc

SEQ ID NO: 95993 - DNA, 642 bp, Homo sapiens
gaataatttaacataatttaattattaygaacttaacctctttaagttgcatttcctcatctgtgaaatgataacaataactactttgtgtctatttcattatgttaatgtgagaatcaaacgaaatcgtggacataaagtatctgtaacatgattcttgggagcctttctgtacttctgagatttaagtgaaatggtcctgaatgctctaaattttaaaatttgtgtgttcccactgtttattaacacacagacacacacacacaaacacacactcagagtttctaccaatttcccatcttactttctcattgcccctatttccatgcctgttttcatagacattcccaggaacccacgtgtcaaattcagacccaagattctgtcctccttcgattcttctaaggaatctcatcactttgagcacacacgagcttagtaactttactgaagatcatcaaacatagtgtcttgttatggtgcccccatcttctattccgtgctataccccactgctgtcagcgttccgaaagcttgtcccgccatatgctgcccaccttgtcacacagggctggctggacgaggtagttctaatgcttctactgcagctgcttttggaatgacactccccacttcccattc

SEQ ID NO: 95994 - DNA, 449 bp, Homo sapiens
taatcacaaattttgatccaggtgggatctcatttcttagaatcagatcaatatctccaaccattagacatttccractgaataccataaaagcatttcaaacaaatcccaaactgagctcatcatttctccctatgcttttgtgattcctgactctgtatgtagaattactgtttttctattgttgaagccacacatgtagatatcatcttgactcagtcatcaagtcctgttattctgtctcctaattcaagacaatattactttgcacttgaaatccttcaataattgtgtccctgccgacattgtccctgaaccattctcttcactacaaccagagcatgtttttaaaaaacacatctgattacatcacttgcagatgatgttccaatggcttcccctgtaccatttggagaagatcccctagcttataaaaccctgcacactcc

SEQ ID NO: 95995 - DNA, 448 bp, Homo sapiens
ttgataaatctttattttaaatgctacttgttaataattttgaaatttcttcatttttgaaaaagcaaaaaaagaaaaatgacactttttagtgtgttggttttctttaaaattgaaaatctaggttctgtactttatcccaaagcaaaaamattacacactgcttcctgcaccttaccctctttggacattttctagatttgtgattactttctaacttcctttcttttttttttagtctgcctagatcaattttgcaggtgtcattctttctcaggaaaggtagcttttcattactttacaaggatggcaaatgcacagttaaagcagaacactgtgtcattttattaaacacattaaatgttacacatctgctgcaccccgtgctgtggtggatggataccttcaccaagaaaaaatttaagggagggctgtagcagtgataaaa

SEQ ID NO: 95996 - DNA, 517 bp, Homo sapiens
cagtcttctctttcccctcaccccctgcaaccttttgcctctcattcagagataactagtgcagcctattcctcaactgctttaggaccatgcagtgcaaggaaacagcttgcttctgtgccttctctctgctgcttaggtccagttttctcaggcatgcaaactcaaattcaattcttctttctgctttccagctttcaaaatttcgttcctgcccagtcgtctcccattctctttaaccttgtagatttttgcataaaatatattttagtaaagatttggtagtccagaggggtaaaacaagtaactgaaagtcagcactggtttttacagtaataattatatccaatgataattttgtatgaatccaaataatgtgcagcttaaattattttctatactcagaaaaaaggccttttctgagcatttctcccctgtagtattctatcccgagtttcygtccttaccagacaaattaaccagttctcattgcaggacatgaacggagcaagttggt

SEQ ID NO: 95997 - DNA, 554 bp, Homo sapiens
atgtgtgaagggaatctacgctgggaaaatactgctttaacttattttgttacctgctttctctagttggtagacaaatggactttcctttttgttgatttggcacacctttagatttatatacagattttgtttagacagtgaaattataacaacactgtcgttataagtaaatacactcactcccaacaacataatattctttagtacaaaatacacccacgtgcaatttttaaaaatgtgatagttgtaatggagtaaaatatctcccatatgcaagttgacaaaaaaagatagaggaaaatagactagactaacattctgtaaagaagtrtttaagtctgtaatatcatgagttgttaattgagggaagataagaaagagcctgactttcaaatgcttccttcattacatttgcctttatggaagacagctcgatttttttcacatgaatacttgcataaacgtgaataaatgaaaattttcctagtacagtatcatatatgtttggctactgatattacaataccaatcgttgcacaaagtggttatca

SEQ ID NO: 95998 - DNA, 534 bp, Homo sapiens
agtaactagtgcttaaaatatccattgttgttttaaaaattaatttgaaggagattatattttcataattgctataaggtcttgccttaatagtaacactattttttctcttctaagcaagttagataatgttagactattgttatgggtatgaatatggacacatatctgggagagtaggctaaagggaagatgacaagagaaaatttgctcagttactgtcttgctgaaaatattgggtgtttctttaatatatgtattcttacctgccaayctaagtgtcttgactggaaagtgaatagtctataacaggtaattttgccttttcctgaatgtggatcaggtttagcggatacttctctaataggtgataacaaactaaaaggctcaaataaatccaaaattcacatgcactaagtcttatttcttattactacaggaaagtttatgtttttccttgcttacatgtaagaagacagtgtgcacacatggtcccctcttctgtagatttctgtgtagtgttcttgcaatccc

SEQ ID NO: 95999 - DNA, 534 bp, Homo sapiens
agtaactagtgcttaaaatatccattgttgttttaaaaattaatttgaaggagattatattttcataattgctataaggtcttgccttaatagtaacactattttttctcttctaagcaagttagataatgttagactattgttatgggtatgaatatggacacatatctgggagagtaggctaaagggaagatgacaagagaaaatttgctcagttactgtcttgctgaaaatattgggtgtttctttaatatatgtattcttacctgccaacctaagtgtcttgactggaaagtgaatagtctataacaggtaattttgccttttcctgaatgtggatcaggtttagckgatacttctctaataggtgataacaaactaaaaggctcaaataaatccaaaattcacatgcactaagtcttatttcttattactacaggaaagtttatgtttttccttgcttacatgtaagaagacagtgtgcacacatggtcccctcttctgtagatttctgtgtagtgttcttgcaatccc

SEQ ID NO: 96000 - DNA, 577 bp, Homo sapiens
tattccacaagatttgaaaattatttttaaatatgggacaaggccataaaaagccactagggggcaaaatgagcatggaataaacattttactgatgtgaaattgtagagacgaaaaggagagtcatcctttatgcatcattaaaaaaataagcaaacagcaaatgttgtgcatcattataggtagagaaagagcactacggaatagttatccaactgtgttttattctatgagtaaattattttattttgagaccatgtttttatagggaagaacagtgtgcaagaagcagaatrctccactagtaattgaataacatttctaaatgtatgtaataacagtaaaaccatatccacagaaacacaaaacaccaataagtagattcaatactgaagtagccctttacttacatgttaggatctaatatatatttagaattctttctttcacgtttattttgctttggtcttactcccactcttttattttttttttttatgtttcattacataaagttaaggtgtacaacatgactttttatatacatgtacatagagaaatgattacaagtaagcaa

SEQ ID NO: 96001 - DNA, 568 bp, Homo sapiens
ggtatagaggagaagcggggaaggaatcaatgtgaacagttatcttgagagatggttaattttttgtctatgtgtgtcacacatagacacacatatagcacttatgttctggggcttatattttttagagacagtgttacttctgctttcaagggatggtgtaatattaactcaatcctttggcttctggtcatgtctctttagaragacaacaaaagacagacagtgaatataaactaacaagggatcctctgaagcactgagcccagagctcgtgttatgaacctgagagggcagagggggttaactaactatggctgaagactggagcccaccgttcagcatctgcctttctactgtactggggccgtaagaaatcttgggggccagtcagacacccgaggctgagtaaattttgcctgtgtgcacttttagaaaaattccaagagttagttttcatttgtgagttctattaattccatcctctgactcgtccttcttcatacctaacagcatcctccagaagctataaaaatctctagaggtccttgaagtaatgagaaagctg

SEQ ID NO: 96002 - DNA, 614 bp, Homo sapiens
cacacacacacacacacacacacacacacacacacacaaacgaacagattccatagagatacaattgcaatygcttctcatgtttttatctttcttctggctacatgccccatccttccatttgaaaactgtgaaactgcaacaacagatcttctgtagctaggcaatgttgatttcattcaacaaattaattgggaaaagtcaccaacaataaagaaaatggtacccaattatttatgaaagttatttctcaaaagctatgtattttttcttctttagctacctctagaatttcctcccaaaggatgtacctcaaattagtcagccccaaagggttaatacaagcctcctcaagccactcctttacctggcaaattatatcactcttcagcatgtgtcacttgcacaacttttcagctccttccctcctaaggtaataggcccagaagctggatgctgctgtgcttcggcacctgtcattttgacatttcatgctttctttagaaaagagaagttggtagaatgtgagaaaagtagaactttgacaggttgtcagaatatcttgcagcacaaaccaacctgccagccagcctgttttctggtatatttcaaag

SEQ ID NO: 96003 - DNA, 574 bp, Homo sapiens
gggctgtagttagtgtgtatatctctttaaatattggcatggsaggtcacacacaaaaaagcacatgccaagaaaattagccgatgaggctttttttaatccatgtcattaagaatatctgactgaaatagtatattagtaatgtttatgtatttattcaactcatgacataaattatataacacaaaatagtttgtaaaaaaattcaaaaagtgatatatatttgcttaaagtctaaatgcttgatatttttcaatgtttccctaatttttgttattttgtggatgttaatattaattttaatatactttaatagtttttatttaaaaaataaggtttaaaatttaaaatcataagtaaaacttcatattccagctttaaaaagaaatcattattttaaaataaattgaaaattactaaagttttttcatttacagtttatcaccatacagtcaccaaaggacccattctacacctatttaaacagtgtacataccaacttagaattttaggaatgaagccaaatatctctaaaattatgccctggataagttgtacataaagacaagggatt

SEQ ID NO: 96004 - DNA, 574 bp, Homo sapiens
gggctgtagttagtgtgtatatctctttaaatattggcatggcaggtcacacacaaaaaagcacatgccaagaaaattagccgatgaggctttttttaatccatgtcattaagaatatctgactgaaatagtatattagtaatgtttatgtatttattcaactmatgacataaattatataacacaaaatagtttgtaaaaaaattcaaaaagtgatatatatttgcttaaagtctaaatgcttgatatttttcaatgtttccctaatttttgttattttgtggatgttaatattaattttaatatactttaatagtttttatttaaaaaataaggtttaaaatttaaaatcataagtaaaacttcatattccagctttaaaaagaaatcattattttaaaataaattgaaaattactaaagttttttcatttacagtttatcaccatacagtcaccaaaggacccattctacacctatttaaacagtgtacataccaacttagaattttaggaatgaagccaaatatctctaaaattatgccctggataagttgtacataaagacaagggatt

SEQ ID NO: 96005 - DNA, 389 bp, Homo sapiens
agttttcctcttagatgtgatgacagccccaagagcaraagccaagcctcttcatcagccaggctctcatatacagacttaagaccattattgcagctttaaaggtaaaattgcccatctgagactgctgtggcagtaagtgttatagttaagactatttgtaaggaaattagtattgaaatataaagtttctaataaaatttataaaatcaccttgagtctctgctttgtttttcctttgaagactggctacgcacagaaccataacaaaggtgtggcccgaggaagctggccaccaagatcccaagccagaatggagcccagctcccaggctgccaccaccacttctcctgggcctgggccttttctgtctcccttccagccgccac

SEQ ID NO: 96006 - DNA, 564 bp, Homo sapiens
ttaaattctgagattcaaaacacctaacaattgttgctttttttttttycatgtttcatagtttaataaataggttttatattaatgaagatacctttagttatgctgtggcaagagtgcttgttttagagcgtttcctgccaaacacccacatgggacattccctcccagtaccagatgtggagatgcgttcaggcctggccagtcccatctcacgtcccttcctcctgggagcccatttgcagctaaccatgttactcagtgtcttccatgggtggttgtgatgcaagatgcacaaagcctgctgcaaattcttcctcagaccatctcttgcttttccgaagtcaaatttctaagcccaggtcattccaccctactatcccctttggtggcaaactcttctgttgctcctatcattttcccttttgtctctccctatctcttgacatttgcacattgaagcattaaattgcagggtggaaaggaagacaatttcttctgtgtatttaaaaaaactacagagcagcatattgttctcagcacacatctatgttaaatgaattc

SEQ ID NO: 96007 - DNA, 412 bp, Homo sapiens
atcttgcatttttgttttttgttttgttttgttttgttttgtttgagacaaggtctgtttctgtctcccaggatggagtgcagtggtacaatccaggctcgttgcaccctctgccttccaggctcaagccatccccaacctcagcctcccacgtagctggggccataagtacacaactccatgcctggctaattttcatagtgtttgtagacacgggaagtgggggatgktgtctccctatgttgccaaggctggtctcaaactcgtgagctcaagtcatctgcctgccttggtctcccaaagtgttgggattacaggcatgagccaccatgcctggtgccaagaaactatcttgcattctatgttcatttcctcctttcagttttctattctttctggaattcctactcat

SEQ ID NO: 96008 - DNA, 599 bp, Homo sapiens
gcacagggtaaccccagtactttagcagctgacttcctatcagaaacaacagaggccagaaggcagtggttaagatgacatatttgaaatgctgaaagacaacaaacaaacaactgtcaaccaagaatccagcaacctatctttgaaaaatcaaggcaaaacaaagacacaaccaaatgaataaagactgagagaatttcttgcttcaagcctcrccttacagaaactactaaaggaagtcacaccagatagcaatacaaatccacatggtgaaacaaagagtgccaatacattcaattataaagacaaattttaaatacgggataatatattttttcctccatttctctcaagctgatttttttaattgcataaaacagtatttataaaattttaatactgaaaaaaccacagtaagatttatacattgaaagaagcaatatgtgacattaacagcacaaagggaggagggtatgacattaaatttgaacaagaatatgacaccatatggtaattccaatatacagaaaaaaatgtcagctgaaattgtttatctgttctttaattagtcttctcctcatccatccactcacctgccc

SEQ ID NO: 96009 - DNA, 543 bp, Homo sapiens
aacaaactccaacaggatgaacacaaagagatccgcacctaacacatcaaaagttaaagagttgaaagacaaagataatattgaaagcattaagagaaaagatgactcatcatgcacagggtaaccccagtactttagcagctgacttcctatcagaaacaacagaggccagaaggcagtggttaagatgacatatttgaaatgctgaaagacaacaaacaaacaactgtcaaccaagaatccagcaacctatctttgaaaaatcaaggcaaaacaaagacacaaccaaatgaataaagactgagagaatttcttgcttcaagcctcgccttacagaaactactaaaggaagtcacaccagatagcaatacaaayccacatggtgaaacaaagagtgccaatacattcaattataaagacaaattttaaatacgggataatatattttttcctccatttctctcaagctgatttttttaattgcataaaacagtatttataaaattttaatactgaaaaaaccacagtaagatttatacattg

SEQ ID NO: 96010 - DNA, 599 bp, Homo sapiens
gcacagggtaaccccagtactttagcagctgacttcctatcagaaacaacagaggccagaaggcagtggttaagatgacatatttgaaatgctgaaagacaacaaacaaacaactgtcaaccaagaatccagcaacctatctttgaaaaatcaaggcaaaacaaagacacaaccaaatgaataaagactgagagaatttcttgcttcaagcctcgccttacagaaactactaaaggaagtcacaccagatagcaatacaaatccacatggtgaaacaaagagtgccaatacattcaattataaagacaaattttaaatacgggataatatattttttcctccatttctctcaagctgatktttttaattgcataaaacagtatttataaaattttaatactgaaaaaaccacagtaagatttatacattgaaagaagcaatatgtgacattaacagcacaaagggaggagggtatgacattaaatttgaacaagaatatgacaccatatggtaattccaatatacagaaaaaaatgtcagctgaaattgtttatctgttctttaattagtcttctcctcatccatccactcacctgccc

SEQ ID NO: 96011 - DNA, 595 bp, Homo sapiens
tggacgaatcccaagattaaaaaaagatattcgggaatgagaaaacagtgtgaaaatgacccaaaaagaggtatataaaaggaaattgttaaaaactttctttttgattgccattattttaatgaaatgctcttaaatgtctacaaggtgccatctggcctttgagacagaaaattttgatagttttttcttaactattagaatttgactatytgcatgattgatatcagtttcactagaagaatgaaaagaaatcaaataagagtaggttttggtagaggaaaattagaacaaaggaacaggaagggtagaataaacattttaacacactcatatgtatttagatttcaaaataaaactaaattttggtcagttaagtaaaccactgactcaataataatttaatccatttacatggtcattttatttaatgggaaaaaatatagacatcagcaaaagaagttaaaatccatggaattaaggtgtgaaaatcattctaccatatggattatccttcagagtaacatgcatactcatgaatttaatgtacctaatatgtcaccaaacccattctgccattttatatcccttaagt

SEQ ID NO: 96012 - DNA, 595 bp, Homo sapiens
tggacgaatcccaagattaaaaaaagatattcgggaatgagaaaacagtgtgaaaatgacccaaaaagaggtatataaaaggaaattgttaaaaactttctttttgattgccattattttaatgaaatgctcttaaatgtctacaaggtgccatctggcctttgagacagaaaattttgatagttttttcttaactattagaatttgactatctgcatgattgatatcagtttcactagaagaatgaaaagaaatcaaataagagtaggttttggtagaggaaaattagaacaaaggaacaggaagggtagaataaacattttaacacactcatatgtatttagatttcaaaataaaactaaattttggtcagttaagtaaaccactgactcaataataatttaatccatttacatggtcattttatttaatgggaaaaaatatagacatcagcaaaagaagttaaaatccatggaattaaggtgtgaaaatcattctaccatatggattatccttcagagtaacatgcatactcatgaatttaatgtacmtaatatgtcaccaaacccattctgccattttatatcccttaagt

SEQ ID NO: 96013 - DNA, 649 bp, Homo sapiens
attttaaacattttgtaactttatttattatctttccttgttttactaaagtattttaaaataaattccagatattgtggcattcaaatctcccatatttcagcatatatctctaaaaaaaattttttaaatcaaacttattgccccagtgccattagccaatctattaaagttaacartatttcatttatcccacaatgtttcatattctggttttttttttctctctgcttccttgtggtatttactgcattccctttcccttatatttcttgttaatggatattagctctagaaactttcgtgggttcatgttttagtaagaatacttcgcggaggcactgggtggagtttagctttttgaaatcaatgctcttgctctcatctcctggtttgtggcactgcagttcagggtactcccccaattaacaacaaccattttagtttcttccacttctgagagtgtcttctttgaaatcacaagcagataaagaaaactcacagcgggctgtttgtctttgatctttccttctttctagctgtgaccatcagtcatccattgttttttcagtccctgtctaggacctactctcatcctcccttctgaaagttttcaaaaattatctttctgcatgcccaaacaacagtg

SEQ ID NO: 96014 - DNA, 565 bp, Homo sapiens
cttgccctgtcaccagaagacaatataccaatgggttttgactctttatctggttgccattctgtgtcttttaactggggcatttctttctttctttttttttttttttcctgagatggagtcttgctctgttgcccaggctggagtgcagtggtatgatcttggctcactgcaacgtctccctcccaggttcaagtgattctgctgcctcagcctcccgactagctgagattacaggcgtgtgccaccacaccccgttaacttttgtakttttagtagagatggggtttcaccatgttggccaggatggtctcaatctactgacctcgtgatctgcccacctcggcctcccaaggggcatttatttcatttacatttaaggttagtattgttatatgtgaatttgattctgtcttcatgatattagttagtcattttgccaacttgtttatgtagatgcttcatagtgtcgatggtctgtgtactttggtgtgttttttatagtggctggtgatgctctctccttaccatacacagtgcttcctttaggagctctttcaagcca

SEQ ID NO: 96015 - DNA, 565 bp, Homo sapiens
cttgccctgtcaccagaagacaatataccaatgggttttgactctttatctggttgccattctgtgtcttttaactggggcatttctttctttctttttttttttttttcctgagatggagtcttgctctgttgcccaggctggagtgcagtggtatgatcttggctcactgcaacgtctccctcccaggttcaagtgattctgctgcctcagcctcccgactagctgagattacaggcgtgtgccaccacaccccgttaacttttgtatttttagtagagatggggtttcaccatgttggccaggatggtctcaatctactgacctcgtgatctgcccacstcggcctcccaaggggcatttatttcatttacatttaaggttagtattgttatatgtgaatttgattctgtcttcatgatattagttagtcattttgccaacttgtttatgtagatgcttcatagtgtcgatggtctgtgtactttggtgtgttttttatagtggctggtgatgctctctccttaccatacacagtgcttcctttaggagctctttcaagcca

SEQ ID NO: 96016 - DNA, 565 bp, Homo sapiens
cttgccctgtcaccagaagacaatataccaatgggttttgactctttatctggttgccattctgtgtcttttaactggggcatttctttctttctttttttttttttttcctgagatggagtcttgctctgttgcccaggctggagtgcagtggtatgatcttggctcactgcaacgtctccctcccaggttcaagtgattctgctgcctcagcctcccgactagctgagattacaggcgtgtgccaccacaccccgttaacttttgtatttttagtagagatggggtttcaccatgttggccaggatggtctcaatctactgacctcgtgatctgcccacctcggcctcccaaggggcattwatttcatttacatttaaggttagtattgttatatgtgaatttgattctgtcttcatgatattagttagtcattttgccaacttgtttatgtagatgcttcatagtgtcgatggtctgtgtactttggtgtgttttttatagtggctggtgatgctctctccttaccatacacagtgcttcctttaggagctctttcaagcca

SEQ ID NO: 96017 - DNA, 623 bp, Homo sapiens
tatttaataattaatatattaatctgttctcacactggtaatagacatgcccaggactgggtaatttataaaggaaagaggtttaattgactcacagttccacatggctgaggagccctcacaatcatagtggaaggtgaatgaggggtaaagtcaagtcttacgtggtaacaggcaagagagcttgtgcagaggaactcccatttataagaccattataattcctaagacttactcactaacaggagaacagtacgggtgaaactgcccccatsattcaattatcaccacctggccccacccttgacatgtggggattattacaattcaaggtcagatatgggtggggacacagccaaactatatcagttaacaacacagtgcttataatatggtcattgcggtgtttatgatatgcccatgaccgcttataagtgctttacaaatatgaagtcattaaatcttaataacaaatatattaataaagaactgtttctttttcacattttgcaggtcaggaaactaaggcacagagaagctggctggcccccagaacacacttaaacctcatattctactactgtccccttttagatattacaaagtttcaacttttacttcaa

SEQ ID NO: 96018 - DNA, 364 bp, Homo sapiens
taacaattttataggaaagattaaggttctctcaaataattctcatagattcattttaatttaaaaattagttgttgaagcaatatctgagtaaattctaattattgaaaaaagtacaaataaggccaaggaccccttttgattactgaatatgtctcacaaccagtccttcctctccagctctactggcatctctctttcctctgccccactcaaaaataaatataacttttaccagtttggtatatgttcttccatatctttttctacgcatttatgtacattcatatgcacctatacattatttatttgkaaattaatgttttagttgtgttataattgtgtctgtattatcctgtaactc

SEQ ID NO: 96019 - DNA, 612 bp, Homo sapiens
attctagatcttgcaaacaccacacagctagtaagtgatggagctagaatataaaccaaggctatctaacaataacttcacactgcagagtatctttagttggccaaaaggctrtaccactaaaaggctgcagaaagaaggataattatctttcaaaagtttgaaacgactctttgacctatattttgcagttgcacaaagtatcatgactcattaacggtaggagtcctgtttttgtttttggaggattagctacagtcatgtaaagcatccttaaactaaaagtagcttttcaagacttcggatgaagaactttagggcagaatttagaagaaactaagttgacttttagttcttactttggctttttggtcatgaaccatttgatctggaagctgatagaaaattaaaactatagtcagattgcaagcttttcataaagagtttctttttcgtgagcattgaggaatacagatctaccacagtgtaaagtgagagaggaaatatttttcactcaaaacatttttttgaagttctgactgtaaaaaatacagtatggaggtatcaggattacaaaaagagaccaattacagtgactgccttcaaaaagtt

SEQ ID NO: 96020 - DNA, 553 bp, Homo sapiens
caccatggctattccgtttgtggtcacattgtgccagcattggggtggccaatggtagtgattagattatgtcagtttaccaacacatcctgtctgtttggttaacaatacctcttctcttgttgatgttctctggtggtttttaaaatatgaatcaaggccaggcacagcagctcataactgtaatccctgaactttgggaggccgatgtgggtggatcatttgagcccaggagaaagagaccagtctgggcaatatggtgaaactccatctctacaaaaaaatacaaaaatttggtgggcatgatggcacatgcctgtggtcccagctacttgggaggctaaggtgggaggattgcttgagcccaaaaggtagaggttgcagtgagccaagatcacrccactgcattccagcctgggcgacagagcgagaccctgtctcaagcaaacacacagaaacaaaacaaaacaaaacaaaaaactcatgtgaatcaaagatcctatttgttcctactcaacgtagttcatccacatacctcttgctcagacctcct

SEQ ID NO: 96021 - DNA, 643 bp, Homo sapiens
tgggcaatatggtgaaactccatctctacaaaaaaatacaaaaatttggtgggcatgatggcacatgcctgtggtcccagctacttgggaggctaaggtgggaggattgcttgagcccaaaaggtagaggttgcagtgagccaagatcacgccastgcattccagcctgggcgacagagcgagaccctgtctcaagcaaacacacagaaacaaaacaaaacaaaacaaaaaactcatgtgaatcaaagatcctatttgttcctactcaacgtagttcatccacatacctcttgctcagacctccttattcccggccttccagtcttactctttccaggtccctaggtccctttcatctcatacagggtgaatgactatctgcatcacctaaatctctgcccattgaggctatttcctctcaccatcgcctttctgggacatttctggagtggtgctatagtgcagctgcagtccattattagcatatatccacatattaagctgttcagcccgtgaaccaagcttggccttttttctcctctgctagctgatcacagggacctccctgcaatgtggcttacatgggagtggagggagaagcaccagtgcaacacaggcagagtcatgggaatctgagttacca

SEQ ID NO: 96022 - DNA, 643 bp, Homo sapiens
tgggcaatatggtgaaactccatctctacaaaaaaatacaaaaatttggtgggcatgatggcacatgcctgtggtcccagctacttgggaggctaaggtgggaggattgcttgagcccaaaaggtagaggttgcagtgagccaagatcacgccactgcattccagcctgggcgacagagcgagaccctgtctcaagcaaacacacagaaacaaaacaaaacaaaacaaaaaactcatgtgaatcaaagatcctatttgttcctactcaacgtagttcatccacatacctcttgctcagacctccttattcccggccttccagtcttactctttccaggtccctaggtccctttcatctcatacagggtgaatgactatctgcatcacctaaatctctgcccattgaggctatttcctctcaccatcgcctttctgggacatttctggagtggtgctayagtgcagctgcagtccattattagcatatatccacatattaagctgttcagcccgtgaaccaagcttggccttttttctcctctgctagctgatcacagggacctccctgcaatgtggcttacatgggagtggagggagaagcaccagtgcaacacaggcagagtcatgggaatctgagttacca

SEQ ID NO: 96023 - DNA, 643 bp, Homo sapiens
tgggcaatatggtgaaactccatctctacaaaaaaatacaaaaatttggtgggcatgatggcacatgcctgtggtcccagctacttgggaggctaaggtgggaggattgcttgagcccaaaaggtagaggttgcagtgagccaagatcacgccactgcattccagcctgggcgacagagcgagaccctgtctcaagcaaacacacagaaacaaaacaaaacaaaacaaaaaactcatgtgaatcaaagatcctatttgttcctactcaacgtagttcatccacatacctcttgctcagacctccttattcccggccttccagtcttactctttccaggtccctaggtccctttcatctcatacagggtgaatgactatctgcatcacctaaatctctgcccattgaggctatttcctctcaccatcgcctttctgggacatttctggagtggtgctatagtgcagctgcagtccattattagcatatatccacatattaagctgttcagcccrtgaaccaagcttggccttttttctcctctgctagctgatcacagggacctccctgcaatgtggcttacatgggagtggagggagaagcaccagtgcaacacaggcagagtcatgggaatctgagttacca

SEQ ID NO: 96024 - DNA, 550 bp, Homo sapiens
gtagctttggagttatccccatactcctggttattacacaactgtgtaacccatggcttttctgaactttaatctccagcctccttacacaggtgcataagatggctccagtacttcataaactaaagcaagggcgaattaagatatggcctgatgctctctagggagatgttctaaggagggataaagaagactgggcatggcgaactgtagcccacccagagtgctgaatctgtgacagtgaaataaacctacacttcagaaagtgctctgagaacctaacataactcatccctctatcctttgtaagtagcaacctggaaggcagcatcaggcagagttttttaattagacagctatgtrttttgtcagaaaatttactaagcagttggctaaaagaatgattatctcgagctgcactaactctgattagtatccattaaacatctatggttttggagaaagctcaaagatagccagctatgtgccaaagaacagaccaatggctatcaataccacaaagttagcacaaatataaaccgcatagttt

SEQ ID NO: 96025 - DNA, 509 bp, Homo sapiens
taccattatctacacatttctttttttacaaggaattctgtgtttttcttacggatttcaattattgtttggtgtcacttmctttcagtctgtaaaatttcctttagtatttgttgtaaggcagatgtctagttcattttgtgttgctataccagaatactacagaccagataatttataaagaatagaaattcatttggcttatgactccggaggctgagaagtccaagagcttgacaccaaaatttggtgagggcctttgtgctgtatcatctcatggcaaaaggcagaaagtgaagagagtgctggagagcaaaaggttgttgaacttgcttttatagcaacctattctcacagtaaggaactcactcctgtgatgatgacattgatccattcgtaggggcacagcccttatggaataatcaccttttaatagccatgatgatagtaatacatttcaaaataagtttgggaggaaacattcaaaccattgcagcaagtctcctatt

SEQ ID NO: 96026 - DNA, 603 bp, Homo sapiens
ttacttgcttctgttgcaccagtgcttacccttcatctcacgtttgggcacayggcaggtgaagggttgcattatttacaactaactcataggagagaaaataacctagtgctaattcataacggattaaagaaatatattggcattagttgcaaatggacttttccctcattgcaacctgactcaggagaagccctgatgaatagtggtgaatagaaacaattcacatgggctgacctgtgaagagtatatagagatgtccaaaattaaagtcttggttttgttctcccaactttgtcatcatccctcacctccaccccatgcccctattattcttcatcttagtaagtatctccacaattttttaattctatcggccaagaagcttggagatatatttgagtcctcccttcctttatatctcacatctacaccatttacaattgcatttgactctactttcaaatctaattacttgcccacatttttacttgatcatctttcacctggctactttgctttctctgcttcctttcctgcttctgcttctgtgtgctattttctacaccagaggtacagtaatatttttttaaaactgcacca

SEQ ID NO: 96027 - DNA, 631 bp, Homo sapiens
cctgccactgctatatcatctaagtttatgtaatattctaaattctactttgtcatttccacaatgttcacaaaatctttctcatccacaaggagcaactcattcattcaagttttatcatgagattgcaggaattcagtcacatcttcaatctccatttctaattctacttatcttactacttgyaccacatctgcagttacttcctctgttggagtcttgaacccatcaaagtcatccttgagggttggaatcaatttcttccaaactcctgctaatgttgatattttgaccttctcccatgaatcacgagtgttcttaattagtctagaatggtcaagcctttccagaaggccttcaattgactttgcccaatctatcagaagaatcaccatctatggaagctatagtctgacaaaatgtatttcttaaatattaagacttgaaagtcaaaattatttcttgatccatgtactgaagaatggatgttatgtgagtaggcatgagaacaacattaatcttgtgcatctctatcagagctcttgggtgactaggtgcattctcaataagcagtaatattctgaaagggatctttctttctgagcagtgggtctcaacagtattcctaaaa

SEQ ID NO: 96028 - DNA, 452 bp, Homo sapiens
agtggaaagagcgaagactttgtcttgtggcttggatgtcagctcagctgcagtaggatagagtagcaggtagaktcataatgttcccaacttcaggccctgggtctcagacaatattctggacctgtcctgggccaggagagacctcactactctgaagggtaggacacaagccttgttggattcctcatctgctgattgaagagtcctgggtccttgagtaaaatcagtggtagccaagcagtgactgccatgggcattgggtgagactcagtcctgtgctggatttgggtctgatacagcacagtcccagtgttggtggccacagggttgcttgtgtcttccctcccctagctccatgtaacttagcatggaaagagagagaacctctgtttattagtgggaaagtagggaggagaataagagtctctgccttccactccagagaattc

SEQ ID NO: 96029 - DNA, 500 bp, Homo sapiens
taactctttgagtttgctagtgtcacagtgttattaggtttgagatgacccccaatgaagatgtgaccaaagctttagatcacagcagtcaactctcttttgatacctggaaggccttcctaagaaggatgggtgcaaataagcccagactgaagactataaaaaatacctaagtcttcaatgcccagacatcaacagacattcacaagcatcaatattgtccatgaaaccatgaccttatcaaatcaatattgtctatgaaaccatgacctcatcaaatgaactaaggaaccactgacaatcccagagtgacagagatgtgtgacctacagacagagaatttaaaatagctgttttgacaaagctcaacaaaattcaagataacacagagaaggaattragaatcctatcagataaattacaaagagattgaaataattttaaaaaaatcaagcagatattctggagctgaaaaattgaactgacatactgaagaattc

SEQ ID NO: 96030 - DNA, 575 bp, Homo sapiens
atgctccatcctgtcctctctagatgaagcccagagaggccaagtaacatgcccagggccacacagcttacaggtagaagagccagcatgacgactcaggtcttcccactccaagtgcagtgttcatccaaccctcctctaatttggagactggactccttccctaggtgctacaaagtttataccacagagcccaaagccccagcatacgcactactctcatcagctgaccagccaaggtcagccgtggccatcttccrtggagcatttactacgtgctttgttcaatgccaattattttcccccagataattcccatttatcctcacaacaacatggagaggtcagttctaccattgtctatgttactgataagaacctgagacaagagaggttaagtaacttgccaaaggtttcaggatacacagtgggcagccccttaaccctttcacttgactacctcctcctgtcctctgctctgggtcaggtgctgcaagagcctagaaagaacagaagcccagtctccacacttgaccatgatctacgtcaggatggcaggggacaaatatttattg

SEQ ID NO: 96031 - DNA, 600 bp, Homo sapiens
acatttagcaaagtcagctagggcgactgagccagagagatggggcacacagcaagaggagacctgacaaagtgcaggtgtgtcctagagaaggcaagcgagaccactgcatgattggaataccagccaacccttgcctgttcttgttccagcaaagtgcccttttaaaataaatttatgtatatagtctctgtgtgtgtgtgtgtgtgtgtgtgtgtgtgtgtatagacatatagaaatatatattcctaattcagaactcattcgtaagtgcacacactgacatgtgtttcatgtttcccaatttatcccagagcctatatgcagtgtttggctgcacaagwaggcattaaatgcaaccactgggaatgagaatggtggccacaacgttggagcctccctgcaatgttaaagccttcccagccaggctgtaaatcttgctacctgactgcaaagccatccaggactgtgtcgcttcattcagaaaggtgtaccttaggcaattcagtacaccccatgaactgagtcactgccagcatgatttcaggttcactgtcgataatttaattagcacttgcctgacatctacaatacatgaat

SEQ ID NO: 96032 - DNA, 600 bp, Homo sapiens
acatttagcaaagtcagctagggcgactgagccagagagatggggcacacagcaagaggagacctgacaaagtgcaggtgtgtcctagagaaggcaagcgagaccactgcatgattggaataccagccaacccttgcctgttcttgttccagcaaagtgcccttttaaaataaatttatgtatatagtctctgtgtgtgtgtgtgtgtgtgtgtgtgtgtgtgtatagacatatagaaatatatattcctaattcagaactcattcgtaagtgcacacactgacatgtgtttcatgtttcccaatttatcccagagcctatatgcagtgtttggctgcacaagtaggcattaaatgcaaccactgggaatgagaatggtggccacaacgttggagcctccctgcaatgttaaagccttcccagccaggctgtaaatcttgctacytgactgcaaagccatccaggactgtgtcgcttcattcagaaaggtgtaccttaggcaattcagtacaccccatgaactgagtcactgccagcatgatttcaggttcactgtcgataatttaattagcacttgcctgacatctacaatacatgaat

SEQ ID NO: 96033 - DNA, 588 bp, Homo sapiens
catcaaccaacacctacctgctatctgtccatcctgtttgggtggggagctatctgagctgtgcagaggtggcaggggtgggccctgctgaggaatgcagcaaggggctcaccccacgacccacagatgcatgaccctgcccaagggagggcttctcatcttactcagcctcagctagaagccagtggtgacacattccggggtgtctattcctatcctgagatagagccacatggaaattcaaaagatgaaatcgcagaagcagtttatcacccaagtataaagacaggcatctgtcaacaaaggaacatgatcatagctgagtgttccttgagtggcttttccttcattgctctcaaagccttttgagatctcgaaaagtctccagtgggcaagacttgacattctatgtgtgagacacagatgcagaatcagacatggataccgtgattcgctgctacatgccggtgtcttcagctcacgtctgctcactcacacacgaggtgaccaatcccaatratggggatcctgtcccagcccccagttctccagcagtgtctcctggctcccctctttagacccagcacc

SEQ ID NO: 96034 - DNA, 625 bp, Homo sapiens
cttcccgtgctggaaaagcattaaaaaaaaaaaaagaataaggaaaagattcaatcagatcgaagtgacaatgcaatctgaaaagtgcccctttcccccttttacccagctccctttccatcctacagttctcatattatccaggtatcttccttttctagcaaaagaaaaaaaataacaaaaaaaccttggacctgaatcgggaagaaatgctatgagaaaataaaaattctaattagttatagatgagaattggtcacagataattattctacgttctttggcttatgccagaaaaggcttaaaagaactttttttgttgttgctgtatatgtaaatgtagatgtaaatgcctagataaacacacagagaggcacaccatcattaasagatcttgcagattttgagtgtttagaacaaaaatgaaagagaaatttgtcattcacaaactaggaatgtttgaatcgtttactgtcaggactttgtcactttgaactaactcaaaacaaaagaaaaggccaatgggttcaaacaggatcattttaaacagtacacttccagaaaatttgtgctgagtggtacctgccctccctgatatctactagctagagtatttctatttcaa

SEQ ID NO: 96035 - DNA, 625 bp, Homo sapiens
cttcccgtgctggaaaagcattaaaaaaaaaaaaagaataaggaaaagattcaatcagatcgaagtgacaatgcaatctgaaaagtgcccctttcccccttttacccagctccctttccatcctacagttctcatattatccaggtatcttccttttctagcaaaagaaaaaaaataacaaaaaaaccttggacctgaatcgggaagaaatgctatgagaaaataaaaattctaattagttatagatgagaattggtcacagataattattctacgttctttggcttatgccagaaaaggcttaaaagaactttttttgttgttgctgtatatgtaaatgtagatgtaaatgcctagataaacacacagagaggcacaccatcattaagagatcttgcagattttgagtgtttagaacaaaaatgaaagagaaatttgtcattcacaaactaggaatgtttgaatcgtttactgtcaggactttgtcactttgaactaactcaaaacaaaagaaaaggccaatgggttcaaacaggatcattttaaacagtacacttccagaaaatttgtgctgagtkgtacctgccctccctgatatctactagctagagtatttctatttcaa

SEQ ID NO: 96036 - DNA, 530 bp, Homo sapiens
ccaaatctgcccccaaccccctgctctacccacagtcttcccccatcttggctaacagtagttccaaagttttagatgcacaggccaaaatatcagcctcatccttgactccccttttctctcttgccttgcctccaatccatcagcaaatcctgtctgcgtctaccctcaaattatttatagaatttgactacttcttaacacctctgcggctgttatcctggtagcagggtaaagagcattcccagagaagggaagagcatgtgcaaaaactctgatccrgggaaagctgcaagagtagaaaatctcaaaagagatccaggagtgattcttgaatctggggagttgtctgctttcttggccgcattgtgagatgtcatggggaagaggtcactatagggatgcagctttggtgattgccaagtggtctgactgcctgaaatggatctggccagctctgaagttataaatgactattaacttgcatgtacattattatcttctgtgtgtgtgtgtgtgtgtgtgtgtgt

SEQ ID NO: 96037 - DNA, 530 bp, Homo sapiens
ccaaatctgcccccaaccccctgctctacccacagtcttcccccatcttggctaacagtagttccaaagttttagatgcacaggccaaaatatcagcctcatccttgactccccttttctctcttgccttgcctccaatccatcagcaaatcctgtctgcgtctaccctcaaattatttatagaatttgactacttcttaacacctctgcggctgttatcctggtagcagggtaaagagcattcccagagaagggaagagcatgtgcaaaaactctgatccggggaaagctgcaagagtagaaaatctcaaaagagatccaggagtgattcttgaatctggggagttgtctgctttcttggccgcattgtgagatgtcatggggaagaggtcactatagggatgcagctttggtgattgccaagtggtctgactgcctgaaatggrtctggccagctctgaagttataaatgactattaacttgcatgtacattattatcttctgtgtgtgtgtgtgtgtgtgtgtgtgt

SEQ ID NO: 96038 - DNA, 624 bp, Homo sapiens
ctttctgaaccaaatacaaaattcattatatttattatatagggctattagtaaaaagaaggtagcttcaggtaccaagactttagctgtcacttctagtaacaatttgccagctaagattccatggcatacaaataccaaggcagtggccaattggcccagtctgtacttcttgcatggagccacacttatgggtcaaaattaactaccaagtaaagatggaaaataaaatctaaattgctttttcctgtacctctgaatgtcttagacttttygacagacaagcacttgggaagtttcttatcactcacagacttaaggattgatgaaagtgttcaatattcagcaatgaaacctaatattccttgctcctctagtccatcaatgcccatttcaaattttgctacctgtctgcacagctgtgggtgttcagcaagggccctgaccctttctgatgctctcctcccctcctctccattaagctacaagacagataacttttgtcctgattgctcttttaatgcacaggctggagaagaaattatcatctctatgaaagggaagcatggttagtcaacctgacatcgctgtcatcctagaagctgggcatggtgatttatttgt

SEQ ID NO: 96039 - DNA, 561 bp, Homo sapiens
ctattacacattttacttgttttgtttactgtctatggtctcccactagaatataaattccatgtgggtaaaacttttttctcttcctactatatccccagaactaagaacagtgcctggcacatgacacaataaatatttgttaaataaatgaatcaaagaaatagccaggcttctgttctagaaaaatgtgcataatagtgatggctttgacagactcagaagcttggaaggagaaagaggtgtggaataaagtaagagtggccaaacgaaggtaccaagatggcaagtaataggtcaagttcaargagacagcaggcatcatccacttggtggtgagagctaagccatgagcattgggagagtctgtcatttactactcagaacaattgactaaactcatcaagtctcagtcttctcatctgttaaatggaaagaagacaaacacctccttcccaagggagttgtaagaattaattgaaatcatataagtggctctgtattctgcctgatataaaataagtgctcaatatctggttccaagtaagttgacaacacccg

SEQ ID NO: 96040 - DNA, 592 bp, Homo sapiens
atgtaaatgagcttggaatcaaacccttccaggagaaagggaatggagctatgcaaaagcaaagttttgtacgttatttaatttaagtttgtattagtccaagctagactgttataaattaagatgttaattgtaatctccagagacaccaccaaaaaaattcaaaaatataatcaaagaaacaasatgataatttaaaaggtattgaaaaaaatctatatataacactaaagagggcagtaactgagggacagaagaatgaaaatatatagatttatagaaaacaaatagtaaaattgcagatacgaatctaccttctcagtaattaaatttaatggaaatggatcaagcactccaattaaaaagcagagccaggaagagtagggtgcacctgcaatcccagctactcgggaggctgaggcaggaggatcgcttgagcccagggattcagcaatatagctgcatagtgattggtaccctgaaatagccactgcactccagcctggcaatatagcaagacctcgcctccataaataaaagcagagattggcagaatagattttttaaatgatccaaccatatgctgcctata

SEQ ID NO: 96041 - DNA, 592 bp, Homo sapiens
atgtaaatgagcttggaatcaaacccttccaggagaaagggaatggagctatgcaaaagcaaagttttgtacgttatttaatttaagtttgtattagtccaagctagactgttataaattaagatgttaattgtaatctccagagacaccaccaaaaaaattcaaaaatataatcaaagaaacaagatgataatttaaaaggtattgaaaaaaatctatatataacactaaagagggcagtaactgagggacagaagaatgaaaatatatagatttatagaaaacaaatagtaaaattgcagatacgaatctaccttctcagtaattaaatttaatggaaatggatcaagcactccaattaaaargcagagccaggaagagtagggtgcacctgcaatcccagctactcgggaggctgaggcaggaggatcgcttgagcccagggattcagcaatatagctgcatagtgattggtaccctgaaatagccactgcactccagcctggcaatatagcaagacctcgcctccataaataaaagcagagattggcagaatagattttttaaatgatccaaccatatgctgcctata

SEQ ID NO: 96042 - DNA, 582 bp, Homo sapiens
taacacccagtacactgtctcagttaaatacttcctaactcatgtatcctttagtgacactgccttctcagaaaccaggtactgcctacattcacctgtatattcacagaacccagtactaggcctgctacagtaaagtttgcattgaattgaatttgtggctcagctcagactttctgaccaccactaaccacccagcctctacctycttggaaccctcagggactttcctgcttctgatgcttgctgttttttgcttgactttgtcattaataagcccatgtctataaatgtacttgtatatctattgaatacttaccaattaatcactttatgtgctttaacttgtccagtcttcacaacagcctttccatcttacagatgaagagaccagacctaagaggttaagtggcttgccctgggtcacccagctagtaagtagagtggtcagagttgaagcaagcaatgtgttcctaatcactaacctgttttcagctggagcactgctagttccttgtaggctaaacatgcatcctttatattgttgaattaccatcccaacagccctattaggtaggtatg

SEQ ID NO: 96043 - DNA, 582 bp, Homo sapiens
taacacccagtacactgtctcagttaaatacttcctaactcatgtatcctttagtgacactgccttctcagaaaccaggtactgcctacattcacctgtatattcacagaacccagtactaggcctgctacagtaaagtttgcattgaattgaatttgtggctcagctcagactttctgaccaccactaaccacccagcctctacctccttggaaccctcagggactttcctgcttctgatgcttgctgttttttgcttgactttgtcattaataagcccatgtctataaatgtacttgtatatytattgaatacttaccaattaatcactttatgtgctttaacttgtccagtcttcacaacagcctttccatcttacagatgaagagaccagacctaagaggttaagtggcttgccctgggtcacccagctagtaagtagagtggtcagagttgaagcaagcaatgtgttcctaatcactaacctgttttcagctggagcactgctagttccttgtaggctaaacatgcatcctttatattgttgaattaccatcccaacagccctattaggtaggtatg

SEQ ID NO: 96044 - DNA, 721 bp, Homo sapiens
tttgttctacagccagatggaagtacagatgtttttaggatgtcttaaagtgagctattgctagatttattatgttttaaatatttattattaacaacataataaataataaacagcataaagaattacatttttctggtatgtcacyaaattacagatagccaaagaagatatatttctgagattgaataacttctacaattaaaacaatgtcttatggggaaatatttaagtatattcactgatagagcggcccctctaagatttttctttttaagtttcttgggtaatgttatacagataacaccgaaattggaattcatcctttgcattgtttataggtaaggtaatgcagatgagaagttaaaaccagaaaagcacaaatggctatactgatgtgactgattttaaaaattaaattaaaaaaatttgaaaatcaagactaaaaaatatagtagaatctgtatgtcattttgtaatgagatggcaagagatattttttcagccactcagaggttgactaaaagagctggatttaaagataagatacacatttttcttttacaaaaatataaaggtacataatttgttgatcttttccctaatgacaagtcctattagtttaggtttgcctgacaaaatttttgcatataaacacactgaatctatcccttaattgcaaaatttatattttaataatgtgtgaagaagagactgtttc

SEQ ID NO: 96045 - DNA, 640 bp, Homo sapiens
catccaagtcactctgctttgggttgattctctgagactcagctggctgacttcaaaaggacgaaatagatttcaacattggaaaagaatacagtatagaatatatgatgggtcttgttagctatctcttattttctaatccaaagagcctcctagttggaggaaaaacttgaactacataagtatatcagcaaattttcattatattttataattctttattgcattatacgtgaatatatttagcagtggtagtacgtcttggaaagtttaagaatttagacaaatatgctttttttawaaaaaaaaatagttgagttttaaatatgctgtttgggtccttatgagcatgtgggagatatataggagaaagagtttgttgctgatgttatagaatcaccaatgcagcattgcacttttgttcttttccattcattgttcttgcttacatggagcacttgcaaataggctggacgtctcagagttctgaacaatgcccttggctaaccgttagtcctaattgctgtgactaatgtgctgtgtgacctaaagacggtaacatacttaaccttggttttctcatctgtaaaatagaattgatgacctctaccaagccaaggatttcagtgaggcactcaaa

SEQ ID NO: 96046 - DNA, 595 bp, Homo sapiens
gttgcctttgcttttgtttcatagaaatcaattgaaggtgaaaataaataaaaatgctaatactagtgatatggggagatatcatcagtttaaaacaaatgaaatactgaatttatttagtatatgaaaagagagccttattttcttcccttgggacactctttatgatgaaaaaacgtaaaggaaatacaatgtaygctggaaataaattactaaagactgtgtctaaatgaggaggtgcatttgggaattttattgtttttaggtttgcgggtgaacagaatcccactgcaatagtgcataagactctttccagctatctccagaagaaggagataactagcaaggttttcactgttagagtttgttcagagcggaacctaaaggaaatactgggaaggtcacagcagtttcatctcagcttattggattggatcaaagtaattctactgcaaggcaaggtatatcattccatttacagacagagaatgcatgaagtccttcatttcacacagtaggtgtgaagaaggtaccttggtaaatttcctatttgctttcagataaagtgtattcttaaacatgatgtgggtagctg

SEQ ID NO: 96047 - DNA, 529 bp, Homo sapiens
agcacctactatatttgcagcttcacagaaaaattataaaatgtttatctttgaatttcagcagctgatgaactctttttaaaatttttaaatctttttgtacttcatctgagggaaggggagccgattggttgtataaaaattatgtcttctatcttcaagctcagtgactctctaacctgcacgtttagaatcctttgggaactattaagatgcackcaagcacaggtgcacttgcagaaattctgctataacattgaattctggcatgggtgtttgtaaaggttttccaggtgactttaggagtaccaactcatctcttgcatctttgtaggcattacaacatctgtagttatcttcataaaatggaaacagattgaaatattggaattttagaaagtacagatgtgcctactatcgataagtttgactaaattaattgtgtcacagaaagggttttttattttaaataaggagaaaataatttcaagttcaataaaaaatccaatattagcacttatttgtgcct

SEQ ID NO: 96048 - DNA, 606 bp, Homo sapiens
ttatgtaaatgaatatattgtttatggatacatacacawgaagtgaaactataaaatacactggtaattgatgcaccacaaattcagaacgggagaagtggggagagaaaaagatgcttaagacgtatctataagacatagtttttctacaaaacgaaaagcataatgatgcaaagatggcaaaatactgccatctgttaatattattattatattattttggtgttttctgaatattttaaatattttattattaaatgtaaaattttgagaagaaaatctgtaactgactctaaccacattcagtgatggaggagagaacataatatgattattccaatcaatgcaatataaacacttgataaaatgtgactcccacttgtgattttaaacatcttagaaatttagatataaatgaaattttccttactatatgaagataatctactaaaacgctacaacaaaattcatatttcactgtaaagtttaggagcactctctcaagacgataatgaagccaggtgcatgctatcatcctatctattcaaaattatgttgtatgtccttgttaacacaaaggttaaattacaattataagaaataaaa

SEQ ID NO: 96049 - DNA, 597 bp, Homo sapiens
catttggtatgaattaacattagtggttaatgagaaatttgaacaaactccaatccagcaccttttggaagttattttaatcctgcagtctagctgtggggtatgcctgcaagagatatttatggaatgtgcatgctgaacaccaaagccaggcttgttggagtttatgcacatcacaggcttgaacttccccgagagcaagtgtggtcaggttagcrtaagggttctgatgaaaagccagctacattcttaaaaccagcactagtttctctttcttcccccgaggaagtatggaggcctactcacaaatttctacctgcatgggcaagatgctgacacatccttggagtgatgctgaatgtggaggggcagaaggggcagtaaagacagtggcaatgggcaaagctaccctcttctatttctgttagaggatcaagcttctgattcttcttgctcagcatgttccatgcttcttgctgagtatggctgttgaaggggcactaaattattgattattcttgagttctaaagacaactgaaaaagaagctggtccctctgaacaccatcatctcattctctccgcttccacaattgcc

SEQ ID NO: 96050 - DNA, 597 bp, Homo sapiens
catttggtatgaattaacattagtggttaatgagaaatttgaacaaactccaatccagcaccttttggaagttattttaatcctgcagtctagctgtggggtatgcctgcaagagatatttatggaatgtgcatgctgaacaccaaagccaggcttgttggagtttatgcacatcacaggcttgaacttccccgagagcaagtgtggtcaggttagcataagggttctgatgaaaagccagctacattcttaaaaccagcactagtttctctttcttcccccgaggaagtatggaggcctactcacaaatttctacctgcatgggcaagatgctgacacatccttggagtgatgctgaatgtggaggggcagaaggggcagtaaagacagtggcaatgggcaaagctaccctcttctatttctgttagaggatcaagcttctgattcttcttgctsagcatgttccatgcttcttgctgagtatggctgttgaaggggcactaaattattgattattcttgagttctaaagacaactgaaaaagaagctggtccctctgaacaccatcatctcattctctccgcttccacaattgcc

SEQ ID NO: 96051 - DNA, 650 bp, Homo sapiens
gaatcagaacctgcagtatttagcttagcaaccttgtgcttctgtcaacatcataccattcccaaggagggaaagagagacacaccattgaatatctcatattgcctttctatccagagtgactctcctctaatacatggcactaaaattttaaaaatcatacttcttatatttccttttatttcatgatctcaagttaaagccctgcatgcattcaacacagcaaagtacatagcaaggagagaatgtatgactcataattagtgaatattttattttgttgggagatagcccaaaggcaacatggtgtgccaaygtatgcttgaccaaacacaattaaacattttagtccaacacagctgaatatttctgaccttgcagctcattggctgctggtgctttgtgaataagttggtatgagatcatcatatggttggctgtgtccccatccaactctcaacttgaattttatctcccagaattcccacatattgtgggaggaacccagggggacgtaattgaatcatgggggccgttctccgtgctattctcatgatcctgaataagtctcacaagatctgatgggtttatcaggggtttctgcttttgcttcttcctcattttctcttgctaccaccatgtaagaagtg

SEQ ID NO: 96052 - DNA, 556 bp, Homo sapiens
aatggtaacaccaaaagctacaaaacagcagagtaatagcatcaaaattttgaggaaaattagtattcaaagaaaattttatacccagcaaactgtcaattaaatgtaagactaaaacaaaatgttttctgatactcaaagtctcaaaagattttcctgccgggcatgatggctcatacctgtaatcccagaactgtgggaggctgaggtaggaggattgcttgagcacagcaattcaagaccagcttgggcaacatgatgaaaccctgtctctactaaaaatacgaaaataagctgggcatggaagcacgcctatagtcctagctacacaggaggttgaggtggaaggatctattaagcacaggaggtggaggttgcagtgagctgagatggcaccactgcactccagcctgggtgacagagtgagaccccatctcaaaaaaaaaaaaaaaatgcatgcctyctttcttcttcaaaaccacggggaaatttaagaaaaaaggagatctgatacctgagaaaagagatataagagagaactgaaggacatttccag

SEQ ID NO: 96053 - DNA, 567 bp, Homo sapiens
ctggctttggtgagagaacatctaaaaacagaacattgacccaatgaatttttcatcaaatcttctagcactttgaagtgtcaccatccatctgtgaaaataagaagccctgggtcagtgccctggtccatctggttgtcttctttgactttatttatttatttttgagatagtcttgctgtctcacccagactcatgtgcagtggtgygatcctggctcgttgcaacctccaccttccaggttcaagtgattctcttgcctcagcctcctgagtagctgggattacaggtgcctgccaccacacccagctgatttttgtatttttagtagagatagggtttcaccatgttgaccaggctggtctcaaactcctgacctcaggtgatccacccaccttggcctcccaattctttgactttaaactcaaaagagagtggctatatctgaaatcttcagttccagttttcctctgattcttgaattttcttctgttctcactgtgtccactctcttaatagtgtttttgtttatctggcactttctcaagtggttcttaagctttgcac

SEQ ID NO: 96054 - DNA, 603 bp, Homo sapiens
ctgaactgtattttcaggtttctttgggtccccttggccaagaagagggtccactcagtcagttagggggcttagaattttacttttggtttacagcctcaactgaaatcacagccctatgtatcagtgatgttaccagctgattgttattgtttttgatagtgtcatgtatataagacatcttttttggtaggagtaagtgtgagtcagaccaaatagtggcaatgccctgggaaaagatattttccaaagagctcctattcagatataatatggactatgctttgagtatgagtttttaataaagccccaaaggacagcagtcttctctgctggccagaaggttgcctacttttcattgctaccatgccacagagaggggttgggggtggagaggtgggatgagtatagttckaagttaaagtgctacaaattgggaaatcaagtttagtctaaagctgaccccttacgtattttaagtatggcttaaaggtttctctgtacatcatgaactgtaacaagtggaggtgtaaacagactgtagcttacacttgtgccattcattgagttttagccaatcatacatagccaactgtttgaacc

SEQ ID NO: 96055 - DNA, 603 bp, Homo sapiens
ctgaactgtattttcaggtttctttgggtccccttggccaagaagagggtccactcagtcagttagggggcttagaattttacttttggtttacagcctcaactgaaatcacagccctatgtatcagtgatgttaccagctgattgttattgtttttgatagtgtcatgtatataagacatcttttttggtaggagtaagtgtgagtcagaccaaatagtggcaatgccctgggaaaagatattttccaaagagctcctattcagatataatatggactatgctttgagtatgagtttttaataaagccccaaaggacagcagtcttctctgctggccagaaggttgcctacttttcattgctaccatgccacagagaggggttgggggtggagaggtgggatgagtatagttctaagttaaagtgctacaaattgggaaatcaagtttagtctaaagctgaccccttacgtattttaartatggcttaaaggtttctctgtacatcatgaactgtaacaagtggaggtgtaaacagactgtagcttacacttgtgccattcattgagttttagccaatcatacatagccaactgtttgaacc

SEQ ID NO: 96056 - DNA, 593 bp, Homo sapiens
ctggctgcttttcacattttctatttcctttctgtttttagcaatttgcttaagatatgccttggcaaagttttattaagtatgttatgcttgcatgtatacattatagttttcatcaaatttggaaaattttcagccattattttttcaaatagtttctcttcccatttccatttctcctcttcttctaaaactccaaktacttatatattagatatctcgttattatcccacagttcaccaacactcaagtcaactcttatctttttctttctgtgcttcactttggatagttagtttcttttgctatgtcttcaagttcacagatactttttttggcagtatctaatctgctgtcaataccacccagtacatttttcatgtaaaatattgtattttccatctctataatttcaaattgggtctttttatgtcactcttgatcaggttcatgctttcctctatcttcatatacatttacagcatatctgtaatagctgtttaatgtttttgttggcttattttattacttctgtcatgtctggatctgtttttactaagtgacttttctccttgttatgagtcattttttt

SEQ ID NO: 96057 - DNA, 593 bp, Homo sapiens
ctggctgcttttcacattttctatttcctttctgtttttagcaatttgcttaagatatgccttggcaaagttttattaagtatgttatgcttgcatgtatacattatagttttcatcaaatttggaaaattttcagccattattttttcaaatagtttctcttcccatttccatttctcctcttcttctaaaactccaagtacttatwtattagatatctcgttattatcccacagttcaccaacactcaagtcaactcttatctttttctttctgtgcttcactttggatagttagtttcttttgctatgtcttcaagttcacagatactttttttggcagtatctaatctgctgtcaataccacccagtacatttttcatgtaaaatattgtattttccatctctataatttcaaattgggtctttttatgtcactcttgatcaggttcatgctttcctctatcttcatatacatttacagcatatctgtaatagctgtttaatgtttttgttggcttattttattacttctgtcatgtctggatctgtttttactaagtgacttttctccttgttatgagtcattttttt

SEQ ID NO: 96058 - DNA, 477 bp, Homo sapiens
ggaaacccacatgttagttactccagcattagagattttataagacagcgtttagaggcagatcactcttgacaaastcaccttgagtgtttttgcctttgtttctaaactctggacaactcaaagaaagtattataggactcagctaattcaaacaatggctttcctttgaaataagatcgtctgcttcccttaaaggcatagtagtcacctttgacacaaggaacagaaggtaaaataacaaaggaagtggtgaaccaacctcagttctggaattaaaaaaaaaaaaaactgatttgcattaattatcatttctaggtgtctggcctagtccagaggatgcaaatggcagttcagatcaatcatccttaaatcggatgtgaacgctttgatgtggctgagggagagttgtggaaaggggagtaggtaccatgaagagaattgcaacaaaggaaaaaaaaatatatggggttgaat

SEQ ID NO: 96059 - DNA, 477 bp, Homo sapiens
ggaaacccacatgttagttactccagcattagagattttataagacagcgtttagaggcagatcactcttgacaaagtcaccttgagtgtttttgcctttgtttctaaactctggacaactcaaagaaagtattataggactcagctaattcaaacaatggctttcctttgaaataagatcgtctgcttcccttaaaggcatagtagtcacctttgacacaaggaacagaaggtaaaataacaaaggaagtggtgaaccaacctcagttctggaattaaaaaaaaaaaaaactgatttgcattaattatcatttctaggtgtctggcctagtccagaggatgcaaatggcagttcagatcaatcatccttaaatcggatgtgaacgctttgatgtggmtgagggagagttgtggaaaggggagtaggtaccatgaagagaattgcaacaaaggaaaaaaaaatatatggggttgaat

SEQ ID NO: 96060 - DNA, 617 bp, Homo sapiens
ttttttttttttttttttggaacataaccattcctttttttaaagggaactttttttatgtctttggactagactgtctaaggccacaagattagaagttaccataatacatgctacactgctaacctttagcaaacttcacttttgttgaaaaccttgtaagtttgggatttcaattatcctttgctattaataagaccttgtttagtctaaattaacttagaattggtatagatggcctttttttctctctgctggtctttccttgcctttgccagccgcttatgctgctgttcttttaactactgtggggggaaagggggtctaaaaccagctgtaactgtctatttatagaaactggtctgggtgccttggcttaaaggttaccttgtgtcatacctttgaaacaagggacctgtccaggcttccttytgatggccaacccacctctaatgctggccagtctatttcacacaaagttctaagttttcctggtgtcacagtaacaccgtactctcccttaaattttcttgaaatttttttttaacatagttcctagtggagtgggcttatttgtgcctgacccatgcttcttcaagacaaaacaccacgctcac

SEQ ID NO: 96061 - DNA, 617 bp, Homo sapiens
ttttttttttttttttttggaacataaccattcctttttttaaagggaactttttttatgtctttggactagactgtctaaggccacaagattagaagttaccataatacatgctacactgctaacctttagcaaacttcacttttgttgaaaaccttgtaagtttgggatttcaattatcctttgctattaataagaccttgtttagtctaaattaacttagaattggtatagatggcctttttttctctctgctggtctttccttgcctttgccagccgcttatgctgctgttcttttaactactgtggggggaaagggggtctaaaaccagctgtaactgtctatttatagaaactggtctgggtgccttggcttaaaggttaccttgtgtcatacctttgaaacaagggacctgtccaggcttccttttgatggccaacccacctctaatgctggccagtctatttcacacaaagttctaagttttcctggtgtcacagtaacacygtactctcccttaaattttcttgaaatttttttttaacatagttcctagtggagtgggcttatttgtgcctgacccatgcttcttcaagacaaaacaccacgctcac

SEQ ID NO: 96062 - DNA, 617 bp, Homo sapiens
ttttttttttttttttttggaacataaccattcctttttttaaagggaactttttttatgtctttggactagactgtctaaggccacaagattagaagttaccataatacatgctacactgctaacctttagcaaacttcacttttgttgaaaaccttgtaagtttgggatttcaattatcctttgctattaataagaccttgtttagtctaaattaacttagaattggtatagatggcctttttttctctctgctggtctttccttgcctttgccagccgcttatgctgctgttcttttaactactgtggggggaaagggggtctaaaaccagctgtaactgtctatttatagaaactggtctgggtgccttggcttaaaggttaccttgtgtcatacctttgaaacaagggacctgtccaggcttccttttgatggccaacccacctctaatgctggccagtctatttcacacaaagttctaagttttcctggtgtcacagtaacaccgtacyctcccttaaattttcttgaaatttttttttaacatagttcctagtggagtgggcttatttgtgcctgacccatgcttcttcaagacaaaacaccacgctcac

SEQ ID NO: 96063 - DNA, 581 bp, Homo sapiens
ggagcattcatgaacgggattagtgcccttatgagaaaggccagagaactagttaactctcttacttccctgtgtagatacaagaagttggccatctgcaacgtggaaaagggcccctcaccaaaacatgactattctggcaacctgatgttggatttccagcctccagaactgtgaaaaataaatttcttttgttattaaccaactagtctataacaatgtgttttagcagcccaaactgactaaggcagctttgaatgataaaatcagaaaatacaaaactctaggttggtgggtttccttctcatagcagtttaaatattgcactctcttctcttggttgcatagcttccgaggcaaaagatgtaattcttatctttgtccatctatagctgtttttatcctcttgcttcttccaagaattctttattttcagtactttaaatatgatatacctaggtrtcatttctttgcttgtttgatttttgcatttatctttggcgttctctgagctttctagatgtgtggtttggtatctgacattcatttgaggaaattttcagccattattgcttcaaatg

SEQ ID NO: 96064 - DNA, 578 bp, Homo sapiens
tactataaaataaagttactgtgagctatccatagattacattgctttagtgtaaaactattcggcagtctctgtgcatgtcactttgaaatacatacctgctgtgctgtaaatcactgaatgaggaaaggggagaaagattttctgatgggctgtttataatcccaattctatacatgtttacttaaagatgggggggtggataaaacaaggggagtgtaggagtgaaattattgtttatttattttcaccaatgttagtgtttaccaaaaaggaacaaattctcgttttgttgtgtacaaaattacagagggagctcaagcacrtaacaatattgcagactgccttgaaaataacgtggaataactggtacttatgcaattcctcagaaatatagctttgattctaaattggctgcaaagaggtgttccaaaatagtaatttcatcagtcttggctgtttgctaatagtaccatctagtcaactctgcctgcatttccaaattggttgttagaaaaacctacaacagtcttggtaaaaacttgcaatcaatgttttctaaatgatactggaaacca

SEQ ID NO: 96065 - DNA, 505 bp, Homo sapiens
gaggtagtttgatatacagttattttgtagcaaacaatacacaaaacagtctgttttacatcctataaaggaatacctgagkctaggtaatttataaagaaaagaagtttatttggttcacagctccatgggctgtacaagcatgacaccagcaactactctgcttctgatgggaacctcaggaagcttacaatcatgacagaaggtgaaggggaagcaggcatgtcacatggtaaaagaggagtaagacagagggacaggaagtcctagaatctttttttaacaatcagatcttgtagtaactcatggccacagggaaggcaccaagccattcataaaggatattctctcatgactcaaacacttcccattaggtccatctccagcactggaggtcacatttctacatgagatttggagggaacaaaacatgcaaactatattagttatagattaccaaaacagtgtatttaaagaagaatttacctttcttcttttcatatca

SEQ ID NO: 96066 - DNA, 505 bp, Homo sapiens
gaggtagtttgatatacagttattttgtagcaaacaatacacaaaacagtctgttttacatcctataaaggaatacctgaggctaggtaatttataaagaaaagaagtttatttggttcacagctccatgggctgtacaagcatgacaccagcaactactctgcttctgatgggaacctcaggaagcttacaatcatgacagaaggtgaaggggaagcaggcatgtyacatggtaaaagaggagtaagacagagggacaggaagtcctagaatctttttttaacaatcagatcttgtagtaactcatggccacagggaaggcaccaagccattcataaaggatattctctcatgactcaaacacttcccattaggtccatctccagcactggaggtcacatttctacatgagatttggagggaacaaaacatgcaaactatattagttatagattaccaaaacagtgtatttaaagaagaatttacctttcttcttttcatatca

SEQ ID NO: 96067 - DNA, 599 bp, Homo sapiens
cataggaaagacaaactaggattggctagtttgaataatttcagcaagctgtaagctataagcatgtccctagttgcctggtagctggccctgggatgattaaggcagaggaatattgcttcctggggtgcatggaccagatagaggagatatggccctggattgggcagttgggatacctagggcacactcccagttgagccctttgctgtatcccagaattggccagcaatgggaggggcagtctatcctaagatggaaacatgtttttgtctttttggtcttttgtttttcaagatggagtcttgctctgtcgcccaggttagagcacagtggcgtgatctcggctcactgcaacatctgcctcctgggttcaagcaattcttctgcctcaatctcctgagtaactgagattacaggtgcatgccaccactcctggctaatctttggatttttagtasagatggggtttcaccatgttggccaggctggtctcgaacacctgacctcatgatccacccaccttggcctcccaaagtgctgggattataggcataagccactgtgcccagctggaaacattttttaagatgccaaaa

SEQ ID NO: 96068 - DNA, 541 bp, Homo sapiens
ctttcattgttagagggacctcagggactaagtgttactgagaatttgaatatgtcctccagtttggaagacaggctataataaggacaagcctacagtcgtcttgggatctcatttgcaacacttccttggcatgcttgcagtttggacagggttcacgtgccaaggtgtaggatgaaagataaccagacccaaaataaaccaggcagtaggacaagttttgaattttaatgcatattaaaaatgttgccctatcctggggctgcatttcaaagagaggtataaagataaatgtacctttatatttttggtatttgaaggtatttgaaggtctgttttactaggagatgttacagtgcaatgaaagttgacaacagctgcgctggacacagctacttagagactcaatcaccgtgagtttagttctaaattcrtggaattcaggggttaagagcatggattctgaaactaaactgcccggatttgactctgtcacttatcagctgagtgactttgggaaagctacttaccttatctgtac

SEQ ID NO: 96069 - DNA, 430 bp, Homo sapiens
aactatgggagtgtttctaattttctcttatccaaattttatttagagaaaagtgttcagttttgtacaaaggagactagaaagaaaaaaggattcccaaattaatgtcatgtaaagatgaactgaaatgtgtagaattgttagtaatggtgaggtaggaggtgggacgtgattccagaggtggggctcagacatcagaccagattgaggactagataaaagggagaaatggtagaaacacctctccataagacatgcccagcagtgtgccatgtcagtttaccattgccatggcaagaccygtaagttactgcctctttccatgggaatgacccaacaacttggaatgtactactcttttactagaaattgctgtataatctgctccctaatttgcatgtaattaaaagtcggtgtaaatatgactgca

SEQ ID NO: 96070 - DNA, 574 bp, Homo sapiens
ttaaataaaacaacacatataatatacctggcccagagtaaatattccaggaatatttgctattattattattatttaacattttttcagattcagatggaagctcagaacagatgtataatatggctttgatccatccacgcctcaatctatctccttattgaggcccagaggaaaagtgggatttgtcagaaccacatctggcatagacacagaaccttccaaaatgatgttcttcctgctgcattatcagtaaaatgtcactgttgagtgagaacttacttcatttcttcccttggcatctgaaggctacatacatggtgtaggacgagcctggactctggattgaaattctgcatatgtttggcmctttccagctgtgtgactttgggtgagttgcttagcctctctgagcgtcacagtcctcatctataagatgagaagaagaataaaatagttcctcccttaaagtgaagaatcggtaagatgatcaggaaatataaggacctcacttagtacactaagtaactggcttagagtaacagactaataattgttcactactattatttta

SEQ ID NO: 96071 - DNA, 567 bp, Homo sapiens
tcatgttgaggcctgggagtaattcaggaagtagactagtgttttagtctgttcgggcggctataacaaaatgccataagctgggtggcttataaacaacagaaacttattcctcgcaattctggaggctgggaagtccaagatcaaggcaccaacagactcagtggctggtaagcgtttacyttgtggttcatagaatggtgccttgtcactagtcctcacatggtggaagtggcaaagcagctctctagggcctcctttttcatttcttgtgtgtgtgctttttttttaagagatagggtgtataaggccattatctcattgccataaagaaatacctgagactgggtaatttataaagaaaagagtataattggctcatggttctgcagaccttacaggaagcatgatgctggcatctgctcagcctctgggaaggcctcaggaaacttacaatcatggcagaaggtgaaggaggaataggcacttcacatggccagagcaggagcaacagttggggttggaggtgccacacccttttaagcaacagatctcatgagaactcac

SEQ ID NO: 96072 - DNA, 567 bp, Homo sapiens
tcatgttgaggcctgggagtaattcaggaagtagactagtgttttagtctgttcgggcggctataacaaaatgccataagctgggtggcttataaacaacagaaacttattcctcgcaattctggaggctgggaagtccaagatcaaggcaccaacagactcagtggctggtaagcgtttactttgtggttcatagaatggtgccttgtcactagtcctcacatggtggaagtggcaaagcagctctctagggcctcctttttcatttcttgtgtgtgtgctttttttttaagagatagggtgtataaggccattatctcattgccataaagwaatacctgagactgggtaatttataaagaaaagagtataattggctcatggttctgcagaccttacaggaagcatgatgctggcatctgctcagcctctgggaaggcctcaggaaacttacaatcatggcagaaggtgaaggaggaataggcacttcacatggccagagcaggagcaacagttggggttggaggtgccacacccttttaagcaacagatctcatgagaactcac

SEQ ID NO: 96073 - DNA, 615 bp, Homo sapiens
ctgccacatgcgacttttcatttgccatggtgccaatgaatatttgagagtggcctttcaagcatgcaaatccgaccatcacacatggccctggacaagctccaaacaccctagcatggcctggggctgtcttttgctcctgccttgtctttcatctcctgcccatctttcatctcttgcctcttgcactctgagctctctatgctcctgcgacatacttggcctctcttgcctctgcccttgtatgtgtaattcctttttcctgggactcttttcccttctaatagctacctctttgaggacagggactctgtcgattggttggtcgatagtaaatgatctataaatatttgtagaattgacaccaccccagctgacgtccartggcctcatctcaaacctcacttcttaggaaaggctttccctgctgctagggctaggtagagcctcttgtttttccttctaaagcctcctgtacttcccctgtgaaattcacatgtttgtatctatctcctaaactcaatttcacaagggcagggaagctccttcttgtttaccgctctatcttcagtgttcaacgtatactaggtgctcaagaaaggttttgaatgagga

SEQ ID NO: 96074 - DNA, 648 bp, Homo sapiens
agagaactgggctctgagcccagcattaagtagataatatgctcccaggacaagccaccctaccactgtgaagtctctttttcctcacaaaataagaaactatacttgactgaaaaaaggtttctcaaggcccttaaaatgtggtgactctacatgtggttcagtaagagtcaaggccgggcaaaaaggcctgggaaacttccggtggaatacctgtatgcatcttagtcaaccactcttgaatatcatagggaagccaatcctcttgtttattgacaatcattcctctgagctatgtgtacaaaggagaatgsaaagtagagatagataggaagaaagaaagaaatgaaggactgcatttaccacttggttttccaattttttgatttaagtggcaaaattgcttctgagcccctaaaccaccatttacccaactatattcactcacaggtctcccccagaggtttcttttgacttcatgccccgtgtctgggaatgtagctgaagaaagcatgcatctggataaagacaacgaggagaacctgtgtgagactaattgcttcacacacgaggaaactttggcttcatccatctgagctaagtggtactggcaatctttaaatatagctgccctacaaaatcatatag

SEQ ID NO: 96075 - DNA, 648 bp, Homo sapiens
agagaactgggctctgagcccagcattaagtagataatatgctcccaggacaagccaccctaccactgtgaagtctctttttcctcacaaaataagaaactatacttgactgaaaaaaggtttctcaaggcccttaaaatgtggtgactctacatgtggttcagtaagagtcaaggccgggcaaaaaggcctgggaaacttccggtggaatacctgtatgcatcttagtcaaccactcttgaatatcatagggaagccaatcctcttgtttattgacaatcattcctctgagctatgtgtacaaaggagaatggaaagtagagatagataggaagaaagaaagaaatgaaggactgcatttaccacttggttttccaattttttgatttaagtggcaaaattgcttctgagcccctaaaccaccatttacccaactatattcacycacaggtctcccccagaggtttcttttgacttcatgccccgtgtctgggaatgtagctgaagaaagcatgcatctggataaagacaacgaggagaacctgtgtgagactaattgcttcacacacgaggaaactttggcttcatccatctgagctaagtggtactggcaatctttaaatatagctgccctacaaaatcatatag

SEQ ID NO: 96076 - DNA, 607 bp, Homo sapiens
aatattttattcaacatacttgaaacaaaattttgcttatcagcattctaagttgcttacacacttcttagtccctttaaagtcttcatctgtttagaatgttaactctttgtcttccaagatatgcatcaaactgtttcagctgatctctgttttcctgtttgagaaatagtaaatgattgacaacattggttggatctgagtgtagctaaatttgaacatgccaaaagcaaatataagaagtcctgttgttcatttccttcacaagtggaatatcagccatgtgccaagtatggtgctggatgttgggaatacagtgctaaagaaggtgtgttccatcctgccctccctgagtttkcacttagataggcacactgatacagtgattgagttttatttgtagctttgttattacatgagatcaggtatatgatgtccatatatatacacatatatctatgaagtacttagaacaaagtatacaaactgaatttataatgaattactttgtaacataattaatatgttgcctatcaaacattaattggacttgggaatatgtttgtttgagtgtagccttaaaagtgattattatatgcaaagcttt

SEQ ID NO: 96077 - DNA, 558 bp, Homo sapiens
atctcaacaaattaatcgctgccattcttccatgtccagtttctgttcatgagcttctgtaatttataacttataaaaatatttagtctctcttttgtgtggcttaatgaaatagtttttggttttgaattcaaactgacattctccttaactgtatgtgtggttgtcaatatgttattaaatcattctgaggtataagttttttttaccattaagatggtaataataacctacctcaaaaagtaggtgagggaaccaaacagcctagggacaacctggcccattagaggcacaataaattatagctattatcattaataataattgggacatctgcatcttaaactccctgtaattttatggacactatggttgtttaaaaatcactgttctagagctatcatgtgacttcaatgacagtttaaaaaatcacttaactttactgagaatacaaagaaagtggatctcacattgattgtgagagtgtaaaatggtacagcaactctggaaaaccattcagcagttkcttcaaaaattaacatatatagtctacaaata

SEQ ID NO: 96078 - DNA, 620 bp, Homo sapiens
attttaatgtatgtatacattgtgaagtaattataatcaggctaattaacatatccatcacctcacataattaacttttgtgtgggttgtgtggtgggaacacgtaagatctactttcttatcaaatttcaaatgtacaataaagtattattaactatggccaccatgctgtacattagctctctagaatttattcattctgacagaaactttgtattctttgactaatacctccccattcctctcactcccaacccctggsaaccaccattctactctctgcttctgagttcaacatttttagattttacatataaggctgaaaaaaatattcctttgtatgcatacatatcacattttctttatccatacctccattagtggacatttaggttgatccatatcatggctattgtgaataatgatgcaatgaccatggaagtgtagatatcccttcaacatacctatttcagtacctttgaaggaaattgtgggtcatatgttagttttttaattttttgaggagcgtccatagggtattttataatgactataccattgcgccctgccaccaaaaatgtacatgggttcccttgtctttaaatcctcaccagagattg

SEQ ID NO: 96079 - DNA, 588 bp, Homo sapiens
gctctgggcctgtttctcaatgttgtgaaaagcaggacagtcagttcccatggagtagattacagcgtgttggacaaggacattcccccgcgtgaaggcacactccatggagccagtggggccaccattcacggtgtgcaagctgtggccttggagagaacatgggcagggmttccccagcctctactataccccagctttactccattgatcacaacaatggcacttttttcttttggtgcaaatatttccattttccaattgagcctagactttgattttataaaaggaaaagagaatatctatatatgtaaatatctgcatgtgagtgtatgtgtatatatatatatatatatatgtatatacgcatttatagataaaattattatggttgcagaagcatcaaattttgtaaaaatatctgtttactacaagcctcttttcaagcacacttatgacacagaaaatattcagagattaaattgcccatgaatctagtgctcagaggaaaatagtttgacaaattggaccaatgaagttgaaattggatcatagaagttcaaaatatttacaaagtgtcatcttttg

SEQ ID NO: 96080 - DNA, 617 bp, Homo sapiens
caccctactagggttttctgtgccatctcctattttctgttccactgctaatctctctttggttcaaacccttttgatctttcaccatggtgacaaactcccatataatctctctgtgcttccttctctcctgttccagttcatcttttatacctgttgtcacagttatccaaaaatgcaggactgatctgctgaaaatcattagatgtcttcaggacattcaaagtaccctagggtttaaggtcacgatttggctccaactcacctctgtgggctccgtggctatctttccctcttgcacactatgtttaggccaaattcacsagttcactggcctgcctttcccattcttcattgtcaattccttatttttctacttagaatagctttctttttttcttccattgtttcaaattctacttcaaggctccagtcaaattttatattattagcccagcctttcccattttcttcactgagaactaatcattcttctttcttggctctggtttcctctagcttttttttttgtttttgttttttcccccaaataaactttcttttgtatgtattacagagtaatatattattgagttatatgtgtatattctaccttc

SEQ ID NO: 96081 - DNA, 617 bp, Homo sapiens
caccctactagggttttctgtgccatctcctattttctgttccactgctaatctctctttggttcaaacccttttgatctttcaccatggtgacaaactcccatataatctctctgtgcttccttctctcctgttccagttcatcttttatacctgttgtcacagttatccaaaaatgcaggactgatctgctgaaaatcattagatgtcttcaggacattcaaagtaccctagggtttaaggtcacgatttggctccaactcacctctgtgggctccgtggctatctttccctcttgcacactatgtttaggccaaattcaccagttcactggcctgcctttcccattcttcattgtcaattccttatttttctacttagaatagctttctttttttcttccattgtttcaaattctacttcaaggctccagtcaaattytatattattagcccagcctttcccattttcttcactgagaactaatcattcttctttcttggctctggtttcctctagcttttttttttgtttttgttttttcccccaaataaactttcttttgtatgtattacagagtaatatattattgagttatatgtgtatattctaccttc

SEQ ID NO: 96082 - DNA, 586 bp, Homo sapiens
acatggggttttgccatgttggccagtctgttctcgaactcctgacttcagatgatctgcctgcctcggcttcccgaagtgctgggaataggtgtgagccaccaygcccagcctaggcacattttctttagatgcatcaggaacctttataaaagtacagttatatggaagatggcttgcaccatcaaaaaactctgtatgtgtagataaatgaagacattctaaggcttgaacttgagaggaactaacattttaaaagcccctaaaaccataaactttcacatggtatatcatggtaatgcagtttattttcttcttgtagttgtaacctatacatagaggcccattttcttcttagagttgtggcccatagacctagaggtagtgacttttactcatttgtaaactgaaaattatcagcctcaccagcctctcagtacaaatgaggtcctatccatgcaaatgcccagatgtcctcctctcactgttccacttgtatatatagggcccagctattgtctgaatgtgtccccccaaatccatgtgttggaaacttaatccccaatataacagtgttgggaagtga

SEQ ID NO: 96083 - DNA, 586 bp, Homo sapiens
acatggggttttgccatgttggccagtctgttctcgaactcctgacttcagatgatctgcctgcctcggcttcccgaagtgctgggaataggtgtgagccaccacgcccagcctaggcacattttctttagatgcatcaggaacctttataaaagtacagttatatggaagatggcttgcaccatcaaaaaactctgtatgtgtagataaatgaagacattctaaggcttgaacttgagaggaactaacattttaaaagcccctaaaaccataaactttcacatggtatatcatggtaatgcagtttattttcttcttgtagttgtaacctayacatagaggcccattttcttcttagagttgtggcccatagacctagaggtagtgacttttactcatttgtaaactgaaaattatcagcctcaccagcctctcagtacaaatgaggtcctatccatgcaaatgcccagatgtcctcctctcactgttccacttgtatatatagggcccagctattgtctgaatgtgtccccccaaatccatgtgttggaaacttaatccccaatataacagtgttgggaagtga

SEQ ID NO: 96084 - DNA, 592 bp, Homo sapiens
gaacactgccagtccttgtaaggccagaagccagttcccttgcacttttgtttgcttatttgttttttaaagtgacaggaagtttattaagaaagggataaaagaagggtaactccatagcagaacagccccttgcccttttttttttttttttttaagatggagtcttgccccgtagcccaggctggagtgcaaaggagcaatcttggctcayggcaacctccgcctcccgggttcaagcgattctcctgcctcagcctcccaagtagctgggattacaggcacctgccaccatgcctgactaattttttgtatttttagtagagacggggtttcaccatgttggccaggctggtctcgaactcctgacctcatgatccacctgcctcggcctcccaaagtgctgagattacaggcttgagccactgcacccggccctactggttgcccatttttatgggtgtttcttgattatatgctaaacaaagggtggattattcatgagtttcctgggacaggcatggataattcccagagctgaaggtttctcccctttttaaaccatatagggtaacttcctgacgttgccatg

SEQ ID NO: 96085 - DNA, 552 bp, Homo sapiens
gaaatgagtaatataagtataaattaggttgatcttttgggaaaacaatttagcaatatgtattaagacctgaaaattaatatactttcactttgtaattctatttctagagaatctaatytaaggaaatgatagagatgtaacaaggatttatgaacaaagttgtctaccgcagtgctatttgtctagtgcatagagatatataataagtagtgctgtaaaagaaaatatattcatgcatagtaaaagacttgaaagaaacggaccaaaatattaacacagtaactcttggtggtagtattattgattattttaattttctttcttagatatttcagccttctatttacaatggtaataaattatactatttaaaggtcattaaaaataaattatatagaattgttcaccttaatctaattcgggtaccaacacattttgtcttttaatatatctgatcagtagccagcttatctctactgctttcaggactttcttctgttctttgctaaccatgaggctgcacgggctttttattacggctgttatttg

SEQ ID NO: 96086 - DNA, 524 bp, Homo sapiens
tggctcgtgtttatggagcatgtaccatattccagagcttgatcttggtgctgaggttatgacaggaataacttgttcttgcctggtccgtatccattcagccttctctagagatttcccgcacatggtcccttttcatgccaatggattctcaggtgtctctgctgagggtgttctctaggcctgtgtgtgcattaacacctctgaaaggatcctcaaccagaaatgaataaggttgatcttcaaccaatgaggatgggagatgttggatataccccagcttccttatccctcaataggacaattctgaagcatctcccataatttctgagaggatctccagaaggattgaggcctagttcgcccccagtggtaatctgctcatcaacactgtctttgctttccttccttcytgtctcacttctaggattacctctcaaaaaatcaaatctgcatctgttttggggtaaaccaagctaagacagcagggaacaaggcagataaggtccttgttctcatggaac

SEQ ID NO: 96087 - DNA, 552 bp, Homo sapiens
acataaaaactttttaaaataattcaggatgtgaatgaaaaattttctaaagagttagatattttaaaggaaaaccaattagaacatctggaaatgaaagacscattttagggaattacaaaatgcagtgggaaagttttaacaatagattcgaacaactagaagaaagaatttcaaagcttgaagatgagccttttgaactcacccaatcagaaaaaaataaagaaaaaaaaactcaaaagaagttaactaaatctccaagaaatatgtaattatataaaatggccaaacctaagaatcactggtgttcctgaggatgaagacaaaacaaaatgtttgggcaacttatttgagggaataattgaggaaagcttccctggccttgctagagatttagacacccaaatataagaagctcaaagaacgcctgaaagattcactggaaaaaggacttcaccaaggcatatagagtcatcaggctatgtaaacttaacatgcagaaaagaatcctaagagcagttagacaaaagtttcaagtaacctataagggaa

SEQ ID NO: 96088 - DNA, 551 bp, Homo sapiens
aacaccccccaactgtctctattgctccmttcttgccttgtgatgtgcctgcaccctatttgccttctgccatgattggatgactcctgaggcctccctagatgcagatgccactatgctttcttgaatagcctgtagaaccgtgagccgattaaatctctcttcttataaataattcagtctcaggtatttctttagagaagtgcaagaatggcctaatacagaaaattggtacgaggtgtggggcattgctgtaaagacacctgaaaatgtggaaccaactctagaactgggtaacatgcagagattggaagagtttggagggctcagaagaagataggaagatgagggaaagtttagaacttcttagagactggttaaatgattatgaccaaaatgctgacagtaatacacagtgaaatgcaggctgccaaggtctcagatggaaatgaggaacttattgggaagtggaacttattgggaattgaaaggtcacccttgttatgccttagcaaagaaagtggctgtattgggttcatgccctagagatc

SEQ ID NO: 96089 - DNA, 479 bp, Homo sapiens
tttgcttccaccttttggctcttgtgaataatgctgcagtgaacatgggtgtacagatacttgttttagtccctgttttcagttctttttgggtgtatacccagaactagaattgctggattatgtgataattctgtttttaattttgaggaattgttgggctgttttctctagcagctgtaatattctgcactccaaccaggaggggaggcccagttttgatagttgtcaaatttccttcaggtttttcatccctaaaaagaagccaaggtctttcatagctccatgatcttatgatgctgtaattaggatataatactaacaagtaataattaaacggtgtaataccaattctttgaatacagtagcagttcagaaggatactcgtgcagtctaggaccactgacataggcctcatggaagagacaggacttaygcagtcccagagggagtgataggacttaaaggatggacagaaa

SEQ ID NO: 96090 - DNA, 521 bp, Homo sapiens
ggtggataagctttttgatgtgctgctggatttggcttgccagtattttgttgaggatttttgcatcaatgttcatcatgaatattggcctgaagctttttttgttgtatctttgccaggttttggtaacaggatgatgctggcctcataggatgagttcagaaggagtccttcttcctcaattttttgcaaaactttctgtaggaatggtaccagctcttctttgtacctctggtagaattcagctgtgaatctgcctggtcccgggcttttttttttttttttttttggtaggctatttattactgcctcaatttcagagctctttactgatctgttcatggattcarcttcttcctggtttggttttgggaggatgtatacgtccaggaatttatgtatttcttctagtttttctagtttatgtgtgtagaggtgtttataatattctctgatggttgtatttctgtggggtcagtggaaacatcctgcttgtcatttctgatcatgtttatttgaat

SEQ ID NO: 96091 - DNA, 439 bp, Homo sapiens
ctgaaaaacatgccagcagaaggcaaataagaaaggaaattcatagttgaaaaaaaaaacctaacaatttatgagagttgaagaaagaaataatcaaccttaaaaagccaaacaggaaaaaatattcaaaatataaacactgagagtcccagtagaaaaaaattttagaaaaccaaggatatggagaaaaccctgaacaataccagagacaatattggattaaagacaaaagaatcagatcagattcagacttctgatyaacaccactggttacaggaagacaatgaatcagtttcttcagtaatttgaacctaaaactctataccaaactatcattcagtattaagagagaaatgaatacattttcagatatacaagaattcagtttacctcccacagaatctctgaaaaaaatattagattactatagttaaaaagg

SEQ ID NO: 96092 - DNA, 439 bp, Homo sapiens
ctgaaaaacatgccagcagaaggcaaataagaaaggaaattcatagttgaaaaaaaaaacctaacaatttatgagagttgaagaaagaaataatcaaccttaaaaagccaaacaggaaaaaatattcaaaatataaacactgagagtcccagtagaaaaaaattttagaaaaccaaggatatggagaaaaccctgaacaataccagagacaatattggattaaagacaaaagaatcagatcagattcagacttctgatcaacaccactggttacaggaagacaatgaatcagtttcttcagtaatttgaacctaaaactctataccaaactatcaytcagtattaagagagaaatgaatacattttcagatatacaagaattcagtttacctcccacagaatctctgaaaaaaatattagattactatagttaaaaagg

SEQ ID NO: 96093 - DNA, 463 bp, Homo sapiens
tttaattcaataaaggaccctatcgctagtttttttagtatcaagagaaaagcagcccttagcaggcagttatgtgttttcaagamagtaatttaccaagttgaaattccttagcagataatagttgatgattccaaaaatatgttttatataaaagcttataatcactatattgccgtgttcaagcaagagtttatgttctggaaatatagggatgggagattggttacgtttcagtaagttgtcgcatttgctatggttttggaaaagaagctggctgtctactcactggattcttctgtgatattgctggcaaataagctccctgctgctgaaccgggttttttgccttctttgtattgctgcctccttctggcccactggtcaattgcttctccctgggaaccatcactagctcttccacctcttggaaccaattcctgggataactttcagagactat

SEQ ID NO: 96094 - DNA, 582 bp, Homo sapiens
gtaatagcatggtagtcataaggctaagtgctatacagatattatctcatggactcctcataaataccctcatatataggtaccattaacatccccacttcacaaataggaaagcagaagcataaaaagtgtaaataatctgggcagattaacacgaataatatgagagtaaagctggaagtaaaatggggtagagtaagtagcttttgtaarcagcgtttaaggctgcttctcctgttctcaactgatagttgatgatctgtcttcaatcacttctctgatctttttttttttttaatactttctattgaagtagtagagactgccaaggtttgcagaataacatttaagtaatcatttcaccctaagagaaaattactcttgtgtatggcattaaagaataaaattatctgagacatgactaatatactttaacacaataaatgcatttaactgatttattatttctgtgccagggaaaggttctatgtacacaacttatgtgattaatatcaagaatttatacataatttacaacccttttatataagtatgttaaataatcaaactgtaagaacaatg

SEQ ID NO: 96095 - DNA, 571 bp, Homo sapiens
ttacctgtaactgattaaaatgtgtagagcatgaaattttctatttattttcagatgaattcctcacatttcctggctttagaaagttctycttccaaaaatcttccacgactatgtatcctcataaaccctggtcatataatatctcctttctgacctgcacaaactcgatggcttgctgtggataatggatagaggctgctaatcctatgaaactgggtagaaatgcctgcttctttatttttgaacctctagccaaaacaagtccaacaaggccagcaaaaccaataacacccagtcctggaaaaaatccagcaggtgcattttggagatattcatagctgtctcacccccattgaaccaaactttacatctttggcttcatttaggagtacctttcctgacaccaacttttatatagctcttgataatgtcaaagctgagagatgctttcctaagctgggtccttgactcatctgcatgtttagattagccctcgagaacttagtagagtaaaactcataaaccttcatgggattttggggagggaagtccttttttggtgctgcat

SEQ ID NO: 96096 - DNA, 571 bp, Homo sapiens
ttacctgtaactgattaaaatgtgtagagcatgaaattttctatttattttcagatgaattcctcacatttcctggctttagaaagttctccttccaaaaatcttccacgactatgtatcctcataaaccctggtcatataatatctcctttctgacctgcacaaactcgatggcttgctgtggataatggatagaggctgctaatcctatgaaactgggtagaaatgcctgcttctttatttttgaacctctagccaaaasaagtccaacaaggccagcaaaaccaataacacccagtcctggaaaaaatccagcaggtgcattttggagatattcatagctgtctcacccccattgaaccaaactttacatctttggcttcatttaggagtacctttcctgacaccaacttttatatagctcttgataatgtcaaagctgagagatgctttcctaagctgggtccttgactcatctgcatgtttagattagccctcgagaacttagtagagtaaaactcataaaccttcatgggattttggggagggaagtccttttttggtgctgcat

SEQ ID NO: 96097 - DNA, 571 bp, Homo sapiens
ttacctgtaactgattaaaatgtgtagagcatgaaattttctatttattttcagatgaattcctcacatttcctggctttagaaagttctccttccaaaaatcttccacgactatgtatcctcataaaccctggtcatataatatctcctttctgacctgcacaaactcgatggcttgctgtggataatggatagaggctgctaatcctatgaaactgggtagaaatgcctgcttctttatttttgaacctctagccaaaacaagtccaacaaggccagcaaaaccaataacacccagtcctggaaaaaatccagcaggtgcattttggagatattcatagctgtctcacccccattgaaccaaactttacatctttggcttcatttaggagtacctttcctgacaccaacttttatrtagctcttgataatgtcaaagctgagagatgctttcctaagctgggtccttgactcatctgcatgtttagattagccctcgagaacttagtagagtaaaactcataaaccttcatgggattttggggagggaagtccttttttggtgctgcat

SEQ ID NO: 96098 - DNA, 593 bp, Homo sapiens
ttctacatgcctgaggcaggattaacaaggaaattggaggctgctaaagctcccatttggcaagcacacacgctggagaggaagaaacgggatcagttkcaatttcactttccaggctttttgtgtttcttgctagcaaaatgcagactgtatttaggactttagaggtaagggactctgcagatacagttgttagacttctagccccatggtacaggggagagcagaataaattgtggtttcttcttcacacaaatgaacttgaatatagccagtgcacatacaaaaatatgttccagttttttggctttgaaacgtgcaggttctgaaatagtgggaaaaaaaaaaatcccagttttggcaagagcatttgaaagaaaaaaatttactagagaactctggatcttggactttgatttgttcaaatgtatagagataactgggttaaaattagtgttcagcatttgcaaagttgagaattgtttggaaagatgccttcaagaatcaattatgatacttaattggagacatgaaatttctgctgctaaatttgtcagatgcttattttagaatctcctatttataatatgttt

SEQ ID NO: 96099 - DNA, 593 bp, Homo sapiens
ttctacatgcctgaggcaggattaacaaggaaattggaggctgctaaagctcccatttggcaagcacacacgctggagaggaagaaacgggatcagtttcaatttcactttccaggctttttgtgtttcttgctagcaaaatgcagactgtatttaggactttagaggtaagggactctgcagatacagttgttagacttctagccccatggtacaggggagagcagaataaattgtggtttcttcttcacacaaatgaacttgaatatagccagtgcacatacaaaaatatgttycagttttttggctttgaaacgtgcaggttctgaaatagtgggaaaaaaaaaaatcccagttttggcaagagcatttgaaagaaaaaaatttactagagaactctggatcttggactttgatttgttcaaatgtatagagataactgggttaaaattagtgttcagcatttgcaaagttgagaattgtttggaaagatgccttcaagaatcaattatgatacttaattggagacatgaaatttctgctgctaaatttgtcagatgcttattttagaatctcctatttataatatgttt

SEQ ID NO: 96100 - DNA, 543 bp, Homo sapiens
ttacatgaggctgggaagtctaaaataactaagccagagagtttaaagggaggtttatcaagacaaaaggaagagatcatgtcacatgactttgttaaaaataccaaggaaatgtctattactattaaggtactcttttactttactaactttaaaaaagaatcaacatgataaacccatcaatagcttcttgtgggcagacctgggaataccaactttattatgcccatgagggcaaagcctccagtagatctgaatcacctgattgtttcagtagctgctccaccagctgcaggcctgaggaagccacccggatacttcccactccagtttgcccatctgtaaaacgggcagacccgacagcccagccaggacaattgaggcgatatctcagaaacatgggcagartcccacagagagttctgtccagggctttctgacaggaagcaaagggtggtcagtgaaggagaaagctgtgatactctaaaaagaaatggaattaatggtgattaccagacactagacagaaaagaaagcaaaagg

SEQ ID NO: 96101 - DNA, 587 bp, Homo sapiens
tacttttctcttagaattaaaactttctttaatattatatacattttttctcatcagttttcattttgtttttattttgcattgctgttttttgatagtgcagaaaagagttggacacattttgaacggttgatgttggagaatatataagtgcaccttttgtggcgttttatccagatttggcattaagatgtcccrttttatcagatgagcatgctttaatcttcatctggcctcttattctggtgttaggacagcctttgcttgatgttgaggaaggtatctgactctgctgttttgcttccttatgtacctggcttgccagtttaaaagtttcaccattttaagtttcctaacagagtggcacatagagcatatttaagaagcctattgtaggaattcacccagatttagtgaatagaaattgaatacttgacctttatctagaaaagttgctgttttgttgtcaaccagaagaactttcttagtacagcccctatattccaaatagctagattcttaattgctgtactttcattaaattgcttcattattattgctgcatcaagattttcactaaacgaaaa

SEQ ID NO: 96102 - DNA, 590 bp, Homo sapiens
gtaaatttaaaacctttatttttcattacaatatatacttgattccagggcatggagtttaggggtggttgggaactatgtcacctaataacctctttggtttccattgctaaacattctatagttctgttatagtaatcattttggttgtcttttcaaagtgaaaacaaacccatttgccaagtgggaatgaaattgaagtttattgttagtgctgcattctaaacaggggaaacatagaagataggaagaaagtagtcttagttttgaaagcacagccctcctggtattcaagctaccaactttgcaatgtttaccaagcagtttttcatctgtacaacaaccttggtgaagatgtgtctggctycttctcctaaatactttgtcttcatgtctggtggcttggtctagcattttcaactacaggatcacaaaggaaggaaactggaggagtgacctttcaaattcttgagaggaggaaatggatgtttacactgttgttggctagaattttgaagcctttcaaaaataaagttgctctgtatgccccagattttatagagagaagtccagtgccaagttgaaaataa

SEQ ID NO: 96103 - DNA, 462 bp, Homo sapiens
gaattcagacatgaagatcatggtattctgttcttgaggattttgaagtctactttggacccaaaaccaatataatcctagtttcatctcagctatatctcctacatacactatttgttataacttgtagcaaataaactctctcctttgaacccttgtaatactctgaattttccttatggaatagaattttgtcaatcatatataacaatagtatatttatttatacaagtcatcagagtagtttgtaagactttgagttctttgaggacataaataataccttatatattttttaatcttctgcagcacattgcattgatcattacaatgtaatatgaaatcactaatacctattaaccaagcagtttatggggaatgccagatgaatggtacattaaattaagagttatgggaagaaagaggaagggamggcaacttccagcttgaagccacacagaa

SEQ ID NO: 96104 - DNA, 606 bp, Homo sapiens
aaataatgtataagctatgattcatcccatatagtctgtggttttattactttgkgatacagtatagaagtctgcaagctctcttctaaaaattttccttaaggttccatttgtttcagtgctaaagttaatgttttcccaatttatttgaaaaaaatatatattaagtttttccaattcaatgttttctttgaaaatctttctcaaaatatcggtaactaccactacctatttatatgagaataaaatacaagtgttacctgatttagcatagatcttgggtttagatatttttagtttaatacactatgatggctaagaggtgctctacaccaaatctgtcaggtaacactgttctggtttactctcttattccctgtctgtgccgagcaaatatctgaacttctcagggactcatgtcttcgtcatcaactggttcattctaataacaacctagcatttcatataacagcacatactcagtgggtttactagggaattcaaactcaggacatcaaggaaataggagagtccccaaggcacttataaggtgaagagttggggaaagggaacaggtatttatagtacctttcaaaacatacaaac

SEQ ID NO: 96105 - DNA, 533 bp, Homo sapiens
ggtggcgtgcacctatagttccagctgcttgggaggctgaggcactagaatctcttgagccccagaagtggaggttgcagtgaactgagattgtgccactgcactccagcttgggctacagagtgagacttcatctcaaaaaaaaaaaaaaaaagcaaagacgagaaaagaaagaaaaaacctgtgaaccatctcaaagataatttgaggaattggcagatgatggagttctaaggatgtagaacagtttcccctcatgtcttgaggcccaaaacctacaattgatactctgatgaaaatgtctgttctgtagacatcctgacatctggaggatgagcaaaggaaaggtgtcagggaaagcatggttggagacacaggaaaaaaaaaccctgggcawaccatgtcatcagttccaaaggaagaaaaattataagtggaagtggtagtaaatcatgttgcatattgcaaagagaatttgcaggtttcctgagaattctcaattgattggtcatagtgagagccagattataagt

SEQ ID NO: 96106 - DNA, 642 bp, Homo sapiens
cccataaatagctacaaacctttttaatatgattaagaatatttcaaagcaatatgtaagggtccgcttaaggaagaacaattagaactattcggcaatgctgtctgggtaagctgtgatatattgtgagttttatttttagcttttgggccctcagcatccccctatacctttctaacaaactatttcctaccctatcctttcacgtatctcattttttcttctttctaacttttaatttaggttcaaggggtacatgtgcaggtttgttacatggataaatttcaagtcatggaagtttggtgtacacaaattattttgtcacccaagtaactagtatagtacccaatakgtagttgtttgatcatcaccctctttctaccctccaccctcaagtaggccctgatgtctatctattgctcccttcattatgtccatatgtattcagtgtttttctcctacttatcaatgagaacatgaagtatttggttttccattcctgtgtgatttgctgaggataatggcctccagctgcatccatgttgcttcaaaggacatgattttcttctttttaaggctgcatagtattgcatggtgtatatatatatatatatatatatacacacacaccatggaatatat

SEQ ID NO: 96107 - DNA, 540 bp, Homo sapiens
tagcctctttccagactaaatcttcaagaccaaattaggaaaaagtgcaacaaatctagttttagaagaaatgaatattttctccaccccgataagctttggaaacattcagacctaaaatctagtccacagcttccataaaatttctctgacagtacacactatgctctaagcactttcctagagataarataaaacagaaactaactgaaattaccttcagcttatatgacatgagataatctttgttaaataaaggtagttttaaaactgttggtgaaataaaaatataaatgtcttcagaattgtcagcatacagtttttgcctgggattcttagtcagacaggtttgtgctgtctctactagatgctttaaaatcacaaaactataaatgcaacctaacagcagaacacacagtaaagatgagttacttaattacttaacacatgtcagtcaaaaaagtttcaaatgtttaacttctgtcttttttttccttctgtgatatttttgatacttccctaatttattggtgagctgtt

SEQ ID NO: 96108 - DNA, 540 bp, Homo sapiens
tagcctctttccagactaaatcttcaagaccaaattaggaaaaagtgcaacaaatctagttttagaagaaatgaatattttctccaccccgataagctttggaaacattcagacctaaaatctagtccacagcttccataaaatttctctgacagtacacactatgctctaagcactttcctagagataagataaaacagaaactaactgaaattaccttcagcttatatgacatgagataatctttgttaaataaaggtagttttaaaactgttggtgaaataaaaatataaatgtcttcagaattgtcagcatacagtttttgcctgggattcttagtcagacaggtttgtgctgtctctactagatgctttaaaatcacaaaactataaatgcamcctaacagcagaacacacagtaaagatgagttacttaattacttaacacatgtcagtcaaaaaagtttcaaatgtttaacttctgtcttttttttccttctgtgatatttttgatacttccctaatttattggtgagctgtt

SEQ ID NO: 96109 - DNA, 371 bp, Homo sapiens
cagagagaggcagcactgacaaacaacccgagtagggggattgtgaatgcagcagtataatctaactcacacccaagtaaaagaatttgttcagacaaataggatgtttgaaaatatcactggcactttttttttcttttacctgatttttctgtgcctggacattcagcagtcagtgaacacagttgttgtgctcataccaggtcaatgaaaaattggagaaagaagtaaaggtttaggaggactacgattaggtttaatctctgacctcaaggactttatactccacagataagtaataaagtctgttttttgacaacaaygtaaagcagggatggctgcttttgagagactgtctctgatacttaatt

SEQ ID NO: 96110 - DNA, 572 bp, Homo sapiens
ggggtgttagagttccagactgccagatacataatttgaatatatttaaatgcttccataaaggcatttatcatgtaccatgagccattttcttttcatagattttcaaatttctttagtatctactgatggattttcagatgaaaagatcaacccttgactcagagaaatgagaaagaggttttttgtctatgtgacttactttataactataaacagcaggtacattcaaggactctgctaggataaagagaagaaactgatttctctcacagagaaaatcagattaggagactttattttaaaatgaagtgtctgcgttctgtttctcagagtgcttttcgttctcagaaacactgacttatcttacggaattctcattgaagcttctgtctttatcacactgccctatcaagtctttggtttttctagcattgattttttttttctcctgttttctttctctttacaagaggcatcaggacacatctacatgatagcaartgaaataacacatccgtattttcatacaggctcaaattctagaggaggtagaaaattgctttgcctat

SEQ ID NO: 96111 - DNA, 619 bp, Homo sapiens
aagcttgtttcatatgctgcacagataaatacatgatgtaccttttaacaatgctctattatttgggtagaagtcaagaaaagaaagttgaaacctagactttgggtaaaaataaaacacctctgcctccaagaagaaaaggcaatcaatgtatacgctatttgcatgctcacctagatatatactgctatataagaaggctcaagactggtcattgatattaaaattaggcaatttacagtaataatagccacattaccctctgtgaggtaaaattcatattgttgaatgcatgactttcctctgcagtaccattatartcatacattttatgatcccattgactcatgccttcaatggctgtggtataatctgactgacatgcacaaatagatcaatttctcaatgtgattattcttccactttaccagatttttggtgactattttactgttaactaaatgtcttctgattctgggcatattaaagagattatcaactcacataatttttgcaaaatttcttggttgcttatcttccaacattgtttcttctaagttttggatagtgtgccaaaacataattagtatagacccttaactcaggcttatctgcattt

SEQ ID NO: 96112 - DNA, 502 bp, Homo sapiens
cacctctgcctccaagaagaaaaggcaatcaatgtatacgctatttgcatgctcacctagatatatactgctatataagaaggctcaagactggtcattgatattaaaattaggcaatttacagtaataatagccacattaccctctgtgaggtaaaattcatattgttgaatgcatgactttcctctgcagtaccattatagtcatacattttatgatcccattgactcaygccttcaatggctgtggtataatctgactgacatgcacaaatagatcaatttctcaatgtgattattcttccactttaccagatttttggtgactattttactgttaactaaatgtcttctgattctgggcatattaaagagattatcaactcacataatttttgcaaaatttcttggttgcttatcttccaacattgtttcttctaagttttggatagtgtgccaaaacataattagtatagacccttaactcaggcttatctgcattt

SEQ ID NO: 96113 - DNA, 582 bp, Homo sapiens
tgaaggggttaggtaatcctcccctgaattctggctgtctccagccagattcttctccaaagttatgccatcaattgtcccctaaaktcaagccacttctcttcaatgtccagctgctgcttctccctgctggctgagtctggagtctttataggcacaggatggggctgggcagaaccatgggtggtttaggaaaaaacaacattcaagagggaaaacagggatatatattctcactttggcctgtggtttcaggcttttcgacttgagggtagggttttcgctgggacctaccctttctgcctagaatttctctgcctcctgttccaatcactattataacggtcttctatgaagtaaagtttaccacgtgaaacaaatggaaagagagaagttgttagctcagaaatagaaactataaaaaagaaacatgaattttagaactgaaaactacagtatttgaaactttaaagaatccaatggataaactcaattagcagaatggaaatggcagaagggacatttagtaaactttaaaatatgctaataattatttaacctgaagaacaaagagaaaaatac

SEQ ID NO: 96114 - DNA, 721 bp, Homo sapiens
attaataaagattgtactttgcatcccattactcatctgtgagttttctgtctatgtcagtaatctagaaatgagaaagagtgaaacttacattcttaagacctccaaaatgattatactttgtctgcaaagcagttaatctcaagctcttcattctctacatttactaaactctatcatttagtaaatttcctatgttggagaattgcctgattttaactttagttttaattaatttatatgcttatattctgttatatatttattmtaaatatattatactaatatgagatacacaataacttatatatgaactaggtttatgatgagctaagtttgtgatgaagttgcacaaaattgtggcttagaagcaatataatgttgtctctctaacataaatgtcagaacgttaatagtccagggctggacagcaactgtgacccataaagacctctcaagttccattctctcacttcttgcattatactggactttcatttctaagatcactttatgggctaagacaattcctccaaattgagtcttcataaacatactctatgcaacagaaaggagaagagacaaagaagcagggttaaaggcttatgctagctattgtatgagaaagattcacacagtaatcacgtttgtataccaatgtttgatggtttgtcactcagtcatgtcttagctgtcaatgaggctaggaaatgtagatttt

SEQ ID NO: 96115 - DNA, 721 bp, Homo sapiens
attaataaagattgtactttgcatcccattactcatctgtgagttttctgtctatgtcagtaatctagaaatgagaaagagtgaaacttacattcttaagacctccaaaatgattatactttgtctgcaaagcagttaatctcaagctcttcattctctacatttactaaactctatcatttagtaaatttcctatgttggagaattgcctgattttaactttagttttaattaatttatatgcttatattctgttatatatttattataaatatattatactaatatgagatacacaataacttayatatgaactaggtttatgatgagctaagtttgtgatgaagttgcacaaaattgtggcttagaagcaatataatgttgtctctctaacataaatgtcagaacgttaatagtccagggctggacagcaactgtgacccataaagacctctcaagttccattctctcacttcttgcattatactggactttcatttctaagatcactttatgggctaagacaattcctccaaattgagtcttcataaacatactctatgcaacagaaaggagaagagacaaagaagcagggttaaaggcttatgctagctattgtatgagaaagattcacacagtaatcacgtttgtataccaatgtttgatggtttgtcactcagtcatgtcttagctgtcaatgaggctaggaaatgtagatttt

SEQ ID NO: 96116 - DNA, 541 bp, Homo sapiens
agtttcacacctgttgaaggaaaagaaaaatgtaactctgagatgaacccacacatctgaaagcaatttcacagataatttcctcctatttttttatctggggatatttggttattcacaaagggctcccaaatgtcctttcatggcttctacaaaaagattatttcaaacctgctgaattgacagaaagttttcagtcagtgagatgaatccacacataacaaagcagttttacagatggcttctttctagttataatctggtgatattcaatttttcactattgaccttaaagggctcccaaatgtccctctgcagattttaccaaaagagtgtttccaacctgcttaatcaaaagaaggtttaagtctgtgaggtgaatcgaaacatccaaaacagtttcactgatagcgtctttctggtttttatcttgggatattccatttttcaccataggctaaaatgggytcacaaatttcccttcacagtttcaagaaaagagtgtttataaagtgctaagtcaaaaaagttttaactctgt

SEQ ID NO: 96117 - DNA, 617 bp, Homo sapiens
cagcaggccaaaatggtggtcttgagcctcagaagtcatctagcatttcttgtaagacaggcctggtgttgatgaaatccctcaacttttgattgtctgggaaaaatctttatttcttcttcatgtttgaaggataagtttgctgaatataatattctacattggaagttattttttcccttcaatagtttaaatatgtcattctactctcwcctggcccataagatttccactgaaaagtctatttccagatgtattggtgctcctttataggttacttgttttctttctgttgctgcttttgggatcctttatcttttacctttggaagcttgattattatattccttgaggtagtcttatttggattaaaacttcctggtgttctttcaccttcttgtacctggatagtcacatatttctctaggtgtacaaaattctctgttcttattaatttgaataacatttctaacccaacctctatctatatgtatactctttaaggccaataattcttaggtttttctcttttgaggcaatttttttttatatcttataggattgccctattggatcatattcttttttctcctctgactgtattttcatatagattg

SEQ ID NO: 96118 - DNA, 617 bp, Homo sapiens
cagcaggccaaaatggtggtcttgagcctcagaagtcatctagcatttcttgtaagacaggcctggtgttgatgaaatccctcaacttttgattgtctgggaaaaatctttatttcttcttcatgtttgaaggataagtttgctgaatataatattctacattggaagttattttttcccttcaatagtttaaatatgtcattctactctctcctggcccataagatttccactgaaaagtctatttccagatgtattggtgctcctttataggttacttgttttctttctgttgctgcttttgggatcctttatcttttacctttggaagcttgattattatattccttgaggtagtcttatttggattaaaacttcctggtgttytttcaccttcttgtacctggatagtcacatatttctctaggtgtacaaaattctctgttcttattaatttgaataacatttctaacccaacctctatctatatgtatactctttaaggccaataattcttaggtttttctcttttgaggcaatttttttttatatcttataggattgccctattggatcatattcttttttctcctctgactgtattttcatatagattg

SEQ ID NO: 96119 - DNA, 617 bp, Homo sapiens
cagcaggccaaaatggtggtcttgagcctcagaagtcatctagcatttcttgtaagacaggcctggtgttgatgaaatccctcaacttttgattgtctgggaaaaatctttatttcttcttcatgtttgaaggataagtttgctgaatataatattctacattggaagttattttttcccttcaatagtttaaatatgtcattctactctctcctggcccataagatttccactgaaaagtctatttccagatgtattggtgctcctttataggttacttgttttctttctgttgctgcttttgggatcctttatcttttacctttggaagcttgattattatattccttgaggtagtcttatttggattaaaacttcctggtgttctttcaccttcttgtacctggatagtcacatatttctctaggtgtacaaaattctctgttcttattaatttgaataacatttctaacccaacctctatctatatgtatactctttaaggccaataattcttaggtttttctcttttgaggcaatttttttttatrtcttataggattgccctattggatcatattcttttttctcctctgactgtattttcatatagattg

SEQ ID NO: 96120 - DNA, 615 bp, Homo sapiens
ggtagacattaaagctcaaaaaagtatatttgattactaagaaatatattaatgtaaggagggttatattttaaaatatattagtattttctcctcttttgcaattctatatacatgagcttgtctctgcttagcttgaagcatccatttgacttggggagtagggttagaattcttacattagaaatacaagagagaagaagattcaatattcagtttctaatacttatgaagagatacttgaagtcaaagcaaagtgacaggaatctctgagacagatagaaactttccaaattcctttacctatctcaagaatatatcaagaagsaggcctggaagataagactgtagaaaattgtatgcctaacatagggcaaaagtagagaaagtgaatgccccaaacctgcttctctggttcccatgggttggttgctgaataggggagacagaaaggggagatgtggggagcaggagttataatctgatctgtactctctgagtctttccctggcctggggatatcatgttaaataggcacagggaatgcttgttccttgatccgggcagtagaagaatgtgttccaaagccttctgaaccaatttgggaattgacaa

SEQ ID NO: 96121 - DNA, 595 bp, Homo sapiens
tgattttagctgtaggttttttgtagatgtactttatcaaattgagaaagttgtcctctattcctagtttgctgagagttttcatctcattcatcaycattcaacatcaatggatgttgaattttgtcaaatactttttctgcatctatttatgttatcatgtgatttttctttagcttattgatgtgatggattacattaattaatttttgaatattgaactagcctcatatatcttttttctttctttttttttgtagtttctttttgttccatgttctctttctctccttgctttcttttgcttgccctttctttctctctctcacactctctctccagatagttcataagttaactctctagacatagattatagtgtatacttctcactattagaatttagggttgtttccatcagaggatttttagttaaattttgaggtgtgtatcgtctctttcctttcccaaatgacatactggcttttggggcagaggtagaaattgagtgtttcccctttcttttaattatttttatattttgatagcacactctaaaagactatctacaagtttggatttagagttttgaatt

SEQ ID NO: 96122 - DNA, 595 bp, Homo sapiens
tgattttagctgtaggttttttgtagatgtactttatcaaattgagaaagttgtcctctattcctagtttgctgagagttttcatctcattcatcaccattcaacatcaatggatgttgaattttgtcaaatactttttctgcatctatttatgttatcatgtgatttttctttagcttattgatgtgatggattacattaattaatttttgaatattgaactagcctcatatatmttttttctttctttttttttgtagtttctttttgttccatgttctctttctctccttgctttcttttgcttgccctttctttctctctctcacactctctctccagatagttcataagttaactctctagacatagattatagtgtatacttctcactattagaatttagggttgtttccatcagaggatttttagttaaattttgaggtgtgtatcgtctctttcctttcccaaatgacatactggcttttggggcagaggtagaaattgagtgtttcccctttcttttaattatttttatattttgatagcacactctaaaagactatctacaagtttggatttagagttttgaatt

SEQ ID NO: 96123 - DNA, 557 bp, Homo sapiens
taaatgggagatcatggtctttacaaaacccacattctactatagctaaagtggcttttaaaatatctgattgaaaaatgaaaatgacatgggacataggtatttcaaatacaaattactaaaaaggataactgttaataaaagtatttttcattttgtaataaatttggttctttattgatggcttctttctgtataayacaggttgacaattcctttttgacatatctggagcttaccttcaagaatactgaattattttataatcccggactccattaattacagaactcttactgtaggaaggggcaagtgtagttgttattctttaaatatgcttaagcattaaattccaaaataattgttttatctaggataggaaaaccaacgaaccaaccaaccaacccacccaattaaacaaaaaccaagggataagtagaaggaacaagctcttaccaagaaaagattccacggttggcacctctcccagcgaccccagcaattcactcagtaagtcatttttctcaggggcaattgcatcctggtgttccaacagg

SEQ ID NO: 96124 - DNA, 521 bp, Homo sapiens
cagatacacagccaccatattttctcatctttaagagattattattaatatgtaatgttatattatgacctcatattcatgggggaaacagaagtactcactttgtttttgtgtatcagacaccagacatttgttataaatgccaatgtcttgcatacctcagtttaaaatgtgtacatgctatcatttatgggttcctccaaatgttgtatagtttccaaccataactgaaatggatgcagtaaatagaaagacaaaytgaatttttttcttacaagtcagttacacctctttgtgaagaatcatcatctggtgacttcaaatgatttaaattatatttttactatgatcacattttatacagctattttaagttttcttgtgttctttaggccatttgaggacagtgaagaatatacattttatatatagtttttattgtattatataacatatataaatataatttgccttctcttatatttatcttaaggaaattgtccagattggttttaaatgaa

SEQ ID NO: 96125 - DNA, 505 bp, Homo sapiens
taaataataatgataatagcgactcacatgtattgagtctattctatgtgccaagctctagatgaggtgtgtaacatgaggtaggcactatgattacccccattttacagatgaggaaactgaggctcagaggggttacctcccttgcctaaggtgacccagttagtactagagacagagctttgattggattccaggcctcttggcatgtgcctctgaagctgcagttgagtwatctctgtgttcctctgctatgactagggcgtagtaggaactctgaaatagttgaaaaccctttcctgtgcatactttatgccattcaagactgggacttcatgcatcaatcaaatttctaaataaatgttagggactgatatagatgggcaaattctcatttctctccattaaaaacctttaaaatatcaccattaaaaaaaagagaatatttcaaccccctaaagctggaagaacataatatcaggataaaggataatggggttttttg

SEQ ID NO: 96126 - DNA, 650 bp, Homo sapiens
ggcaatgggggtagaagtgggagttgccccagggaagggcccagagtggcaagcgctcaccaacgccggccaccgagcaaaacttccccgcccccgccccccacccagcttccccgcagggagaccctttccgttagcagcttttcactaagttaataacggtgtgtgtgtggtggtggcggggaggggggatttgggggttacacaatatctatatcaatgatattgatcacgtccagggaagaagcctgggcaaaactagagacaccgagtgtcagcaaaagaaagcttcttaaccacaagttgcgtgccgcctgaggaaggtgccctgtggcagggggtggccgctgggagatgcctgcctctaaccgacgtccaggcgtgactaaacctcgacgccacccccattcacaagctcaactcagggattcccaagcaaccgcagaccggaggtggcgcagaggcagtgaccgaggtcgctgattaggggccgagaggctggcaaataataatttwaaaaaaaaaaaaaaccggaatagccttcgcggacgcagctcagcgtgccaggcaaaggacagtctgacgacccgcccctgccgagccccgcagcgcggcgccggtgtccagcagcctccaaggcgccgagcgcg

SEQ ID NO: 96127 - DNA, 587 bp, Homo sapiens
tgacatacgggaacgcacagtcgatcgagagggactggatctctattgacaccaatgagccactaaatcaaaccctaacttttgatkttggcaaattcagtacaaataacttcttatttttcaaccaatttaagttgtcaatgtgatgctccatcactccttaatactttagaatttatgtcctacaaacaaggatattctcctgaataaccaaaatagaactatcaaaattagcatattaacattaattcattactttcacctgattctcaaatcacattcgagttttgtcagttgttccaattatgacttttataactaaataatccagtccagaattatgcattgcatctagttttcatgtttctctgccacttttaatctggaacagtcccttggtcattacttctatgctcttgacatttttgaagagtacgtgccagttattttgcagaatatccctcaatctgagtttgtctggtatttactcatgattagattcatttatacgtgtttggcaggaatattacagaagtgatgctgtattcttatcattgcatcccctcggtggtgtgtgcgtctgcacg

SEQ ID NO: 96128 - DNA, 621 bp, Homo sapiens
atgttttgctagtggccagaagctttcctaaaataatatttaccaaattataaacccaggaagctcagagataaccaagcaggataaacaccagaaaatctacagttagatgtatcatattcaaattacaggaaactaaagacagaccatcttgaaagaagtcagaggatgaaacatcatctgtcccatttaattaaaaaaaaaaaaacaaggataagaattacagcagacttctcatcagaaaccacgcaagcagcaacggagaggagagagatacttacagtgttgaagaaaaatagtaactmattatccttcaaaattatccttgaaaggataatcttgttcttagatgaacaaaaactgagggaattcatcgttagcagacatgccctgcaagaaatgttaaaagttcttccagaagaacaaaacttatataggtcagaaatgtggatctacatttaaaaggaaagagcatcagagaagaaaacatgaaggcaaaataaagtatttggtgttttcttattccaacaagaatgtctaatattcaaagaactagtaaaagcaagtgtggatggggatgtagactaagaggaactcgacagtattactgtgatatggtac

SEQ ID NO: 96129 - DNA, 621 bp, Homo sapiens
atgttttgctagtggccagaagctttcctaaaataatatttaccaaattataaacccaggaagctcagagataaccaagcaggataaacaccagaaaatctacagttagatgtatcatattcaaattacaggaaactaaagacagaccatcttgaaagaagtcagaggatgaaacatcatctgtcccatttaattaaaaaaaaaaaaacaaggataagaattacagcagacttctcatcagaaaccacgcaagcagcaacggagaggagagagatacttacagtgttgaagaaaaatagtaactaattatccttcaaaattatccttgaaaggataatcttgttcttagatgaacaaaaactgagggaattcatcgttagcagacatgccctgcaagaaatgttaaaagttcttccagaagaacaaaacttatataggtcagaaatgtggatctacatttaaaaggaaagagcatcagagaagaaaacatgaaggcaaaataaagtatttgrtgttttcttattccaacaagaatgtctaatattcaaagaactagtaaaagcaagtgtggatggggatgtagactaagaggaactcgacagtattactgtgatatggtac

SEQ ID NO: 96130 - DNA, 498 bp, Homo sapiens
tgtcttcctcttgctagacgtgtcctccccctgcagctgtatgtgacacacccagaggggattcctcagcatcacccagaggttgaagcctctgtcaggaaccattctgtgctacctttcattcccacccccatgccccctctccactcttctccctgcccctgctccaggaggaaggatgttgtgtctatgacattcacaaacccctgttttccaacatctagttgggttcaaccaacaaagagctatggcaraaaatttgcaggaaccaaaagagtgaggctcccttcctggggagtctccctggactggctctgctctttgagaaaaatgtttgtgagtttaatgtgaaaccctgaatggttttagaaagataagtgtgctagttgaaggctggtcaggaaaaggatggtcaactctaattagaataagaaagggacaattcaataaacggactattatagtgaaagcgaactaaatgtggcctgagaaggactc

SEQ ID NO: 96131 - DNA, 604 bp, Homo sapiens
agaatttccattccacccagcaattccattactgggtctatacccaaaggaatagaaaacattctactattatatagatacatgcatgcagcattattcccaataccaaacacatggaatcaacctaaatgtttatcagtaacagactggataaagaaaatatggtacatatacaccagggaatagtatgcagttatgaaaacaaacaagatcatgtcctttgcaggagcaaggatggagctggaggctattatctttagaaaactaatgcagaaacagaaaaacaaatactacatgttcttacttgtaaatgagagctaaatgatgagaacacatggacacatagaggggaacaacaccccctgcctatcaaagagwggaggtttgtaggagggagaggatcaggaaaataacaatggatactatgcttaatacctgggtgatgaaataatctgtacaacaaactgccatgatgcatttgcttatataaaacctgtttatgtacccctgaacttcaattaaaatttaaataaaaagtacttctgtttgtgctgtaaaattcttatagtgagtttttcagctctattagctcagtttggttcta

SEQ ID NO: 96132 - DNA, 604 bp, Homo sapiens
agaatttccattccacccagcaattccattactgggtctatacccaaaggaatagaaaacattctactattatatagatacatgcatgcagcattattcccaataccaaacacatggaatcaacctaaatgtttatcagtaacagactggataaagaaaatatggtacatatacaccagggaatagtatgcagttatgaaaacaaacaagatcatgtcctttgcaggagcaaggatggagctggaggctattatctttagaaaactaatgcagaaacagaaaaacaaatactacatgttcttacttgtaaatgagagctaaatgatgagaacacatggacacatagaggggaacaacaccccctgcctatcaaagagaggaggtttgtaggagggagaggatcaggaaaataacaatggatactatgcttaatacctgggtgatgaaataatctgtacaacraactgccatgatgcatttgcttatataaaacctgtttatgtacccctgaacttcaattaaaatttaaataaaaagtacttctgtttgtgctgtaaaattcttatagtgagtttttcagctctattagctcagtttggttcta

SEQ ID NO: 96133 - DNA, 406 bp, Homo sapiens
gaattccacaatcttgtagaattyttttgccaatcattaacaaagtttactgactgaacagaagagtgcaatgcaactcctgctacagcagccgtagctgtgactgcaattaatcccataatcactgcaattaaagtaaaaatgaatcttttggatctatttaaaacaccttttaatacttcagtcaaaatatggacggatggtgaggcctcccacggtcggtccatggacacagggatccacacgccctctcttgctctcaccagcagaatacggtgttgccaattaaaagttgaatcaatgcaagtaagcaatctacaattttcacaggttatagtctgggagtctggtttaataactatatttcctacaactagcatataagggggctttacgcaactttgta

SEQ ID NO: 96134 - DNA, 468 bp, Homo sapiens
gaattcaatttacctttattcaggtgggagattataggttatataaccacccccaatataaagcaatctcttccccgatgacactcaaacccggaaaacttgaatcccagggtgttcagattttggtataagctgatctcccaggacctacttaggcaggatctggtgcccaggacagaacctgttgacctggcaccatggagctgggaggggctgtcaccatctttctggcactccgcttgtcttgcctgctcatcctcattgcctggaaacgaatggataaggcaggaaagctgcccccaggtcctacaccaattcttttcctggggcacctgctgcaagttcgaactgatgctacgtttcagtctttcatgaaggtgagtctgtctgtctcctttaatagggctaaaagcaactaatcctatagccagattcacatagaamcttatgacttctaaaagatagact

SEQ ID NO: 96135 - DNA, 528 bp, Homo sapiens
cagaacattccaaatagtagaagcttgaatatttgtacagaggtaatatgcaaagaagtagggcaaatttttaccaaaagaaaaataggctcagagaggttaaataatttagcaaaatcacttagtgcaggggttgccaatctgtcctgcacattayaattagctggggatcttgaggagctttaagaactcccaagggccaggctgcatcccagaccaatgaagtcagattttatggggggtgggacacccacatcagttgcttttaaaatgccgtagacgtttccatcgtgcagataattttgaaagtatgggttctagaagacttcaatgatgaagagaacctaaatcctaggttttcagaatgaccaattgtctgggtttggtcaggaatgttctggttttaaaactataaaatgctgtgtcttagaaatttccctcagtcctgtgcaaactgggacagttaggcacccttgttcccaggtgtaaaatccagcctaccacaactgctgcatgatgttgagttta

SEQ ID NO: 96136 - DNA, 528 bp, Homo sapiens
cagaacattccaaatagtagaagcttgaatatttgtacagaggtaatatgcaaagaagtagggcaaatttttaccaaaagaaaaataggctcagagaggttaaataatttagcaaaatcacttagtgcaggggttgccaatctgtcctgcacattataattagctggggatcttgaggagctttaagaactcccaagggccaggctgcatcccagaccaatgaagtcagattttatggggggtgggacacccacatcagttgcttttaaaatgccgtagacgtttccatcrtgcagataattttgaaagtatgggttctagaagacttcaatgatgaagagaacctaaatcctaggttttcagaatgaccaattgtctgggtttggtcaggaatgttctggttttaaaactataaaatgctgtgtcttagaaatttccctcagtcctgtgcaaactgggacagttaggcacccttgttcccaggtgtaaaatccagcctaccacaactgctgcatgatgttgagttta

SEQ ID NO: 96137 - DNA, 567 bp, Homo sapiens
atgactgtctatatagggttttgtactatccatggtttcaggcatccactggggagtcttggaacatatttccctcagataagggacaactactgtattatcttatgttcttggggttagatgtctaaaatgaatctattaggctgcattcgttctggaggttccaggaagaatctcctgtcttgtgttttccagtgtccagaaactgcctgcawcctttggttcatggcctcttcctccatcttcaaacccagaatcttctctctttaactttctgtcgcccacttaaaaagacttatgtgattacattgagcccactcagaaaatccagaataactctccatctcaagatccttaactaaattatatctgcaaatttccttctcccaaataagaccacatattcataggttccaggaaataggatgtatacatccttggggtatttttcagcctgcaacagataataacttcttctctgagagaactggctcaagctgacattagttaagctaatacagttgatcattcattcatttagttggcatacttaccagactgttattg

SEQ ID NO: 96138 - DNA, 451 bp, Homo sapiens
gtacaaaaaaaaaaaaaaaaacatggtctttcctttcaagaaattcccagtcttatgggagatatagacatataaaattatctataactaaatgtgccaaratgttatagtgctatatgaactgctatggacattaatcctaagggatttggtaaagcttcttaaaaaaagtaatatttgaggtggatcttgatgctcaaagaaggtttttgaagtgaccaaggcaggactaggcgttctagaacacagaacaccctggcatacacacagagcttggaagcaaattgtttgaagaaagaaggaagtttggtgcatagcatacagtgagttgcaggagggattgaaggagagaactgaaaaggccagagctggcttgggcaaacttggactttctcctggatgcaagcagtaggaatccagtgaagagaggaaagctgtgtcaaaagtgcca

SEQ ID NO: 96139 - DNA, 551 bp, Homo sapiens
ggttcttccttgcacctctttctgtgtatgagtctctgctgccttaacaatgaatactaagtaggagcagtatgtactccattctaagccacatctatagtggttagtcccctggccctaggcttataacttgcctttatctcttcatgtgactggtttacaaaatgccactaagctgagctaggttggcttatcccactgttggcctagccctcttaggactttatctgaaatctttatgactactttcccagwtacatagtgtgtgtctattgctctcctgggagaatctatgtaggcttctaggtcaggttggtcagacgatgcatgaaaagcataaaatgcctgcttcttttgggttgttcttccttcctacctaaaacctgacactttcacccttggcttcatggtcctgtgaatgcaacatgatttttctttgttactgaaaaagattttacttctccactcttatgattctctatacaatagacctataatttccttacctgatatataatctttaagcaatttaagatttttggcatatgaat

SEQ ID NO: 96140 - DNA, 618 bp, Homo sapiens
ctacttgatggtttgctttcttgtcacrtgctgcatagggattttctgattcttcaaactggattagtagatttgcaacagtctacattcaaataaagcattttaacaagtaatagacacatttatacttcctgaatgcgttacacctcctctctgtggaagcaggaaagaatgggagggtcagagtacgcagggttcagattagctagtttgaacaacttcaacttactctgggacacaggaacgatccctcagttgcctggcacttaataagtcctggagcgattagggcaggtggatagtggcccagagtgtgaaagccctataatggaggtggttgggagtgtgtgctctggattggttggtttgcctttgaaaagagtgctccagtaagttgtttactatctctagaaactggctaatcctgggagggtcagtccctgcagaatcagtgaggccccaaatgtcaaagcatcagaatacaaaaaataaaaaatctaaaaataaaagacatggttaatatggagggaaagttcttggggcctcaggggcagtctctgtcactaatttcactctgacaaatgctgtgattcccaactgtctcactacaggattggt

SEQ ID NO: 96141 - DNA, 618 bp, Homo sapiens
ctacttgatggtttgctttcttgtcacgtgctgcatagggattttctgattcttcaaactggattagtagatttgcaacagtctacattcaaataaagcattttaacaagtaatagacacatttatacttcctgaatgcgttacacctcctctctgtggaagcaggaaagaatgggarggtcagagtacgcagggttcagattagctagtttgaacaacttcaacttactctgggacacaggaacgatccctcagttgcctggcacttaataagtcctggagcgattagggcaggtggatagtggcccagagtgtgaaagccctataatggaggtggttgggagtgtgtgctctggattggttggtttgcctttgaaaagagtgctccagtaagttgtttactatctctagaaactggctaatcctgggagggtcagtccctgcagaatcagtgaggccccaaatgtcaaagcatcagaatacaaaaaataaaaaatctaaaaataaaagacatggttaatatggagggaaagttcttggggcctcaggggcagtctctgtcactaatttcactctgacaaatgctgtgattcccaactgtctcactacaggattggt

SEQ ID NO: 96142 - DNA, 618 bp, Homo sapiens
ctacttgatggtttgctttcttgtcacgtgctgcatagggattttctgattcttcaaactggattagtagatttgcaacagtctacattcaaataaagcattttaacaagtaatagacacatttatacttcctgaatgcgttacacctcctctctgtggaagcaggaaagaatgggagggtcagagtacgcagggttcagattagctagtttgaacaacttcaacttactctgggacacaggarcgatccctcagttgcctggcacttaataagtcctggagcgattagggcaggtggatagtggcccagagtgtgaaagccctataatggaggtggttgggagtgtgtgctctggattggttggtttgcctttgaaaagagtgctccagtaagttgtttactatctctagaaactggctaatcctgggagggtcagtccctgcagaatcagtgaggccccaaatgtcaaagcatcagaatacaaaaaataaaaaatctaaaaataaaagacatggttaatatggagggaaagttcttggggcctcaggggcagtctctgtcactaatttcactctgacaaatgctgtgattcccaactgtctcactacaggattggt

SEQ ID NO: 96143 - DNA, 626 bp, Homo sapiens
atatatgcacaaactttgaaatgaaaaataaaccaaagcgtaatctttgttgaattgtgatgggctcagccacagataatgctttgcagagtttctctcctgtagagatttgtcagtgattcaccttgaatagaagattgttayatcctatctgaaaaagggtctgttgttttcctcataactttcatctgcagctgatgtcaaacttcagatatttcagtcaggggtcaaaactgttattgtcattaaaatgagtctggagattaactctagagatgtgatgtgaatagttaagatgtactctctgcacatttcaagtaggcaataaattattattattaactatattcaccatgttgtacacggtctatccagaacttattcatctcataactgcaagtttgtttaatatatgttgactgtgctctaaatgcaaagctctccagaaaggggactaattattttcttccaaaattttatcaaagttagacagcagataaaaggccagcaagaagcaacaaaatatgtttatgtaacctcagtgctcttaaatgactgtacatgacaccataataacaatgccttttttggtacagcagcatcttttcatggaataatgatcattt

SEQ ID NO: 96144 - DNA, 604 bp, Homo sapiens
attatttagtagtattcaaaattatttgttaactaataattgtactctatatagctgagatagtagaattgcttcagtctcatttaacttctgccaaaatcatctatatatttttgaggagcatagagtggagagaaagagatygagaagttaaataggttaggtgttgctaatcaccattcttcataatgccctggaatggatgagatggcaaatgtgattcaatttttaccacatagagtctcagttcctacagacctctcatcacatagaaagccctcacctaagctaagtaggatactaacttttaaaggtatactttgggggagggaaggtttacaacagagccaacaaattacttcatctggttttaagtccaaactgtgatctgttgcaatgccagggctgaggggctgtgggactgtctctgatagatttatagaacaatggtatggtgattgctaatgtggtcccttacggatgaatttttaaggtaatgttactttctttgattttttgtcatatgtgccaatcttctgatcaaagctacaactgagaggcaactccatagtaattaaacacaccaagcaatgtaagagacaga

SEQ ID NO: 96145 - DNA, 604 bp, Homo sapiens
attatttagtagtattcaaaattatttgttaactaataattgtactctatatagctgagatagtagaattgcttcagtctcatttaacttctgccaaaatcatctatatatttttgaggagcatagagtggagagaaagagattgagaagttaaataggttaggtgttgctaatcaccattcttcataatgccctggaatggatgagatggcaaatgtgattcaatttttaccacatagagtctcagttcctacagacctctcatcacatagaaagccctcacctaagctaagtaggatactaacttttaaaggtatactttgggggagggaaggtttacaacagagccaacaaattacttcatctggttttaagtccaaactgtgatctgttgcaatgccagggctgaggggctgtgggactgtctctgatagatttatagarcaatggtatggtgattgctaatgtggtcccttacggatgaatttttaaggtaatgttactttctttgattttttgtcatatgtgccaatcttctgatcaaagctacaactgagaggcaactccatagtaattaaacacaccaagcaatgtaagagacaga

SEQ ID NO: 96146 - DNA, 528 bp, Homo sapiens
aatggaccaggcatcttttctcacttttgataatttttaccaagcccacaagaaaagactatttcttttgagtttcattcagaaaaggaaatgctgcattctatttttaatgtcaactagaaaacttaaatattttttggatttaaaataatccaggaaacatctgtgaaggtctttgtcatacaatacttgtcattttaaagtaacatgtagaacttctgagcttatagggataattagaccataccttattagtaaattctaaaccaacrtaaataataggtcaccaggatatatacctataacttgtttaatattaatggaaatttgtctacaggattattgtctaaggatttggtgtattaatatacatctgtctgataattaggaagaaactcttcatgtaactaaacaattgtgaaacctatcaatagctaactgagagcaaacaatggggttcataaacttgccagtaatgtttatgttattaaactttatggcactctagaaaaaattcacagttgtgga

SEQ ID NO: 96147 - DNA, 528 bp, Homo sapiens
aatggaccaggcatcttttctcacttttgataatttttaccaagcccacaagaaaagactatttcttttgagtttcattcagaaaaggaaatgctgcattctatttttaatgtcaactagaaaacttaaatattttttggatttaaaataatccaggaaacatctgtgaaggtctttgtcatacaatacttgtcattttaaagtaacatgtagaacttctgagcttatagggataattagaccataccttattagtaaattctaaaccaacgtaaataatagrtcaccaggatatatacctataacttgtttaatattaatggaaatttgtctacaggattattgtctaaggatttggtgtattaatatacatctgtctgataattaggaagaaactcttcatgtaactaaacaattgtgaaacctatcaatagctaactgagagcaaacaatggggttcataaacttgccagtaatgtttatgttattaaactttatggcactctagaaaaaattcacagttgtgga

SEQ ID NO: 96148 - DNA, 528 bp, Homo sapiens
aatggaccaggcatcttttctcacttttgataatttttaccaagcccacaagaaaagactatttcttttgagtttcattcagaaaaggaaatgctgcattctatttttaatgtcaactagaaaacttaaatattttttggatttaaaataatccaggaaacatctgtgaaggtctttgtcatacaatacttgtcattttaaagtaacatgtagaacttctgagcttatagggataattagaccataccttattagtaaattctaaaccaacgtaaataataggtcaccaggatatatacctataacttgtttaatattaatggaaatttgtctacaggattattgtctaaggatttggtgtattratatacatctgtctgataattaggaagaaactcttcatgtaactaaacaattgtgaaacctatcaatagctaactgagagcaaacaatggggttcataaacttgccagtaatgtttatgttattaaactttatggcactctagaaaaaattcacagttgtgga

SEQ ID NO: 96149 - DNA, 604 bp, Homo sapiens
tgttatacaatttagttaatgggtgaagacaggtaccttttctcatttgctcagcaaacgtttataggacgcctgctttgtcccacacactggggttgcagtggtgargaacagggtaaagatcatgggtctcacagcctcagagcttgactttttcctggggaatggtagaactaccagggaggggtggaaccccacccaagagaaccccttctttctctctctctagtgcaggcacatagctttgaatgacatccttaatctttcttatttctctgaccgggatttaacactattacttccactcctttccatagatccacatccttaatcctaagccatcgaggccagacgtgctttggaattcagaactcagggcttttagacgcattgcaaagatgggaatgtaaaatggtacaaccacttaggaaaacagtttgagagcctcttataaaattaaacatacacctaccacacaactcagcaatctcactcctgggttaatttacccaagagaaatgaaatgtatgaaatgaaatgttcccactaaaacccataagccaatgtttatagcagctctattcataatcattgaaactggaag

SEQ ID NO: 96150 - DNA, 596 bp, Homo sapiens
cttgttgcccaggctggagtacagtggcacgatctcgacacactgcaacctctgcctctggggttcaagtgattctcatgcctcagcctccggagtagctgtggcataaccacaggtgtgtgccaccatgcctgcctaatttttgtatttttaatagagacggggttttgccatgttggccagactggtcttgaactcctggcgtcatataatctgcctaccttggcctcccaaattactgggattacaggagtgagccaccatgcctggcsggatgattttcctaagtgttggaaaacaagtgagttaggcatacatgaactgccccagaggacttgtctggttcttccctgatagtggaggagagccaaaaataagataataaggtcccagattaatgaaatcaaaatgtaagcgttgtctctttttggcatgggtcatggtgggaatgatttcaagctgagtcatgtgccacagaaggacaacaaatgaagacttggagtcacaatgttttcattttctggtctttccaactcatcatgtatgctgttatatccctgctctttgctttgggtaggttcccccctcctttctgc

SEQ ID NO: 96151 - DNA, 604 bp, Homo sapiens
ataataattgctttatacagytgtcctgtaaatcagatagaagaacaaattataaaaatatatttgtactgtcctgtatttacctatgtaattaactttatcagtgtcctttgtttctttgtgtgaactcaagttgtactcctgtgtcctttcatttagcttgaaggaatcccttagtgtttcttgaagactgggcctgatagtgataaattctctcaattttgtttatttgaaaatatcttaatttctcctttatttttgaaggataatttttctgcatatagaatacttggctgcctatctttttctttcagtgtgttgattttgtcaactcactctcttgaggtctctagtttctgttgaggaatcagctgttaattttattgataatcccttgtatattatgggtcatttttctcttgctgctttcaaaatttttttctttcttcgtctttaagagtttaattatgctgtgtctaggtgtggatatccttgaatttattctacttggagtttactgagcttcttgggttgtagattaatgttttcagccattatttcttcccatactctttctattcctttctctctttcttttccatct

SEQ ID NO: 96152 - DNA, 604 bp, Homo sapiens
ataataattgctttatacagctgtcctgtaaatcagatagaagaacaaattataaaaatatatttgtactgtcctgtatttacctatgtaattaactttatcagtgtcctttgtttctttgtgtgaactcaagttgtactcctgtgtcctttcatttagcttgaaggratcccttagtgtttcttgaagactgggcctgatagtgataaattctctcaattttgtttatttgaaaatatcttaatttctcctttatttttgaaggataatttttctgcatatagaatacttggctgcctatctttttctttcagtgtgttgattttgtcaactcactctcttgaggtctctagtttctgttgaggaatcagctgttaattttattgataatcccttgtatattatgggtcatttttctcttgctgctttcaaaatttttttctttcttcgtctttaagagtttaattatgctgtgtctaggtgtggatatccttgaatttattctacttggagtttactgagcttcttgggttgtagattaatgttttcagccattatttcttcccatactctttctattcctttctctctttcttttccatct

SEQ ID NO: 96153 - DNA, 604 bp, Homo sapiens
ataataattgctttatacagctgtcctgtaaatcagatagaagaacaaattataaaaatatatttgtactgtcctgtatttacctatgtaattaactttatcagtgtcctttgtttctttgtgtgaactcaagttgtactcctgtgtcctttcatttagcttgaaggaatcccttagtgtttcttgaagactgggcctgatagtgataaattctctcaattttgtttatttgaaaatatcttaatttctcctttatttttgaaggataatttttctgcatatagaatacttggctgcctatctttttctttcagtgtgttgattttgtcaactcactctcttgaggtctctagtttctgttgaggaatcagctgttaattttattgataatcccttgtatattatgggtcatttttctcttgctgctttcaaaatttttttctttcttygtctttaagagtttaattatgctgtgtctaggtgtggatatccttgaatttattctacttggagtttactgagcttcttgggttgtagattaatgttttcagccattatttcttcccatactctttctattcctttctctctttcttttccatct

SEQ ID NO: 96154 - DNA, 576 bp, Homo sapiens
gtcttttaaattttagccatgctagtggctatgaagtataagcagtaataaatcctttcagaaaagcaaacttcaaagtatggattaactgacttaatttgtatttcactggtgactaacactgaactttatttcatgtgtttgcctgtttaaaaaattggattgtcttactaaaaagttgtaatagttccttgtatattctggacacaagttattttcagatatgttttgccaataccttttcccttcaagaaaacagcttgctatttttttgttttcttaagagtatgtttaaaagaaattttacatttgatgaagtccaatttatcaggggttttttcctcttattttctatactttttgatgtccaatctaggaaatctytacccacaagatcacaaagattttatcctgttttttcttctagaaattttatagttatggttcctacatttaaacctattactcattttgaagtaatttttttttttgcttttggtgtggagtaaggatttagatatatttttttcaatactaatatctagctactctcatatagtttcttggcaaaactat

SEQ ID NO: 96155 - DNA, 643 bp, Homo sapiens
actgaggaactgttccagatgaaaatgatttaagggatatgataaatatgaatctgggtgaaggaagaatgctataaaaaatcctgtgaagttgatattgttttactctttttaccaataagaaaccccttaaaaaggttaaacttgtccgaagtcatagttagcatacaggtaagccagctctgcccacctctaaggtatatgctgttagcattatacttattaggctagttgctatttctgtggctagccatattggagagctatggtctcaatccaaaatttccacatgyactgaattcagttaaaatttggtattctctcatattttgtaagagaaatgattaaatgcatccccataactgtatcaaagttgaacacttcaagttatataaatacaaaaaatacagtgaatgtaaagatagctgtcactcatttactctatagtaacttactttcaaagagttttattaaaatataagtgaaagtaaactctaggtagatgtgataaatgaaaattataataaaagctattataatctgcaaaaactgaaccataacaaataaaaactcacagtgttagcacagctgctaagttcaaacttccatacttacgaaaggtacacataccttttcctaaatg

SEQ ID NO: 96156 - DNA, 572 bp, Homo sapiens
agctcgagccataacaaacacagaccagaagagtgtgcagttgctagatttaatagagtgaaaacacagctcccatacaatgcgacggcacgcaaagagggttgccactccctgctttaawgcctgggtttatatccggatcattgtccctcccccatgctctcaggcgatatattatttgactatttctttacctcctgctttagcctaatttgtattttagtgagccctctttactgcctgattggttgggtgtgagctgagttacaagccccgtgtttaaaagtagttgcagtcacctttcccagctagggcttaggaattcttagtcggcctaggaaatccagcttgtcctgtctctcataatgactaatgatgttgagcatatttttatgtgattagttatttgtaaataatttttggtgaaatatccaagtattttgtccttttaaaaacttaattatctgttcttattgttgagttttaagagtttattatatattctagaaacaagtcagatgtgtgatttgtatatatttcctcccagtctgtgactggtcttttgtttgttt

SEQ ID NO: 96157 - DNA, 543 bp, Homo sapiens
agactaatcgtggcagacacccccactgcctccctgctaccccacgtggtttgaaagtaacagaattccctgaacggtaatatgctacttatcttcctgtcagtcattcagtaccatttataaattctagagggctactgttagtaaaaccctcttgctttctattcctgagcatgtttcatcgttgtccattttgatcttggaaatgtaatctttaacaaggtaccaatgtctgtgaaatgtcactccaacaaaggatatcagtattctccatggcttttgttgtactcggatttgaccttcattgctaattgttggtctgtgttcctagcttatggcttatttggacatacatttcttctgttaccacttcaaagcttttgtctagaaatyagactggtaaaataatatagaagggttttcccctatgatatccttttcctttgatacaaataattgaaaattgggtatgatagcataaaaggacttaaagtttgaaagttttaagaaagatttggagaatcaggagtaaaagagaacaaa

SEQ ID NO: 96158 - DNA, 557 bp, Homo sapiens
atagcaggctgttaccattttcagctacctttctgttgaatcagtgttttcatatataattatgttttggagttctacagaatattatatctgaaaaaattattcaattgctgggaaaataagagtttgaaaactgctattttgaaggtacaaccactgatatcayttgcaaaccatcctgataggcaaacacaaaacactgaatgtatggtcccaggtgtatttggaaggcagaatcatcctgtgagtaggcaacactagtgagagactttttacctcttgccaacctgacacacagatggaacagctccccagaatcaaatgtgcagtcaatgcatgaaactagaaaagtaaacctgggaagacatgaaacctcagaaagaatgaaaaataggtgtcatgatgataatatgttatcaacatgtactataaatgtggggtgcttctggcctcgcttttatatttacgataaggaagcagttgtaagatactgatctgtgattatatatggtttccagctgagcccttaaccttcctgtccccttcagtcccttcct

SEQ ID NO: 96159 - DNA, 409 bp, Homo sapiens
ggtccaacatggaaaaaccccctctctactaaaaatacaaaattagccaggcgtgttggcgcatgccggtaatcccagctacttgggaggctgaggcaggagaatcgcttgaatctgggaggtggagcttgtggtaagcctagatggcaacattgcattccagcctgggcaacaagagtaaaactccatctcaaaagaaaaaaaaaaaaaaaaaagaactttggtctccacagtcttaacccagaaaatgtataaaacctagttgtggctcaaccaccttggacacatgtcctcagtgtctcttgagggttgtgtcatgggccaccgtcactartatttggctcaaaataaatctcttcaaatattttacagtttgactcttttcgtcaacactttcctaattgaattc

SEQ ID NO: 96160 - DNA, 494 bp, Homo sapiens
actttcatgtttatatttaaaaataaaaatatctaaaaataatgattgaattttaaatcctaaaattagacaaatagaaaaatgggctaaatccaaaggagaaataaagaaatagcaatcgtaagagtagaaataaaaagtatgtaatagagaaaattaacaaagctcaatacagatttttaaaagagattaataaaattgataaatstctgccaaaattgatcaagaaataagggaaaatttaaattactaataccagagaaaaaagcaatgccacagatctggcagacaatgaaaggataataagtgattatcaacatctttccaggagggaacttgtaggtacaaataattttcctggtgaattatgtcaaacatatacagaaaatattttaccagtgccacacaaactctcagaaaatacagaaggaggcaacttttcctaattcattctatgagactagcattaccataacaccagaaaatagtaataa

SEQ ID NO: 96161 - DNA, 494 bp, Homo sapiens
actttcatgtttatatttaaaaataaaaatatctaaaaataatgattgaattttaaatcctaaaattagacaaatagaaaaatgggctaaatccaaaggagaaataaagaaatagcaatcgtaagagtagaaataaaaagtatgtaatagagaaaattaacaaagctcaatacagatttttaaaagagattaataaaattgataaatctctgccaaaattgatcaagaaataagggaaaatttaaattactaataccagagaaaaaagcaatgccacagatctggcagacaatgaaargataataagtgattatcaacatctttccaggagggaacttgtaggtacaaataattttcctggtgaattatgtcaaacatatacagaaaatattttaccagtgccacacaaactctcagaaaatacagaaggaggcaacttttcctaattcattctatgagactagcattaccataacaccagaaaatagtaataa

SEQ ID NO: 96162 - DNA, 587 bp, Homo sapiens
taaagacaggggtactggtgcaagcaacttgaggaggggtctgtaagaaaaggggaggagaatccacctgcacaggtgtatatgactccattctgcagaaggtaagctttaaggagagggagaaagttctaggacgtgtgggttaggcagaagtagaggatcccgcaagtatgaccgagggactggaatgcagagggcccctgttctcattattaagtggaatagcaaatataggttggaatccaaagtgagaaatagcaggaagagcaaaaggaragtcaggaactgtgcatctcatttcatgatcagtatctgatgtgtgtgtaggtacagggtcagagagtatgagtggcctaacaggccagccaagtcagtgactgctaatttggtagtttctggaatctgcaaggaaaaggtgaccaatggcaaaggatctgtggcctccacagcaggtagggagaacaggaaggctgagctgctacgctgtctgaagggacctgagaattattctcccaccctgaggttcccttcgtgttcagggttctccaagctaaggtcttctgcagtaactatgcagggaaggtagg

SEQ ID NO: 96163 - DNA, 587 bp, Homo sapiens
taaagacaggggtactggtgcaagcaacttgaggaggggtctgtaagaaaaggggaggagaatccacctgcacaggtgtatatgactccattctgcagaaggtaagctttaaggagagggagaaagttctaggacgtgtgggttaggcagaagtagaggatcccgcaagtatgaccgagggactggaatgcagagggcccctgttctcattattaagtggaatagcaaatataggttggaatccaaagtgagaaatagcaggaagagcaaaaggagagtcaggaactgtgcatctcatttcatgatcagtatctgatgtgtgtgtaggtacagggkcagagagtatgagtggcctaacaggccagccaagtcagtgactgctaatttggtagtttctggaatctgcaaggaaaaggtgaccaatggcaaaggatctgtggcctccacagcaggtagggagaacaggaaggctgagctgctacgctgtctgaagggacctgagaattattctcccaccctgaggttcccttcgtgttcagggttctccaagctaaggtcttctgcagtaactatgcagggaaggtagg

SEQ ID NO: 96164 - DNA, 587 bp, Homo sapiens
taaagacaggggtactggtgcaagcaacttgaggaggggtctgtaagaaaaggggaggagaatccacctgcacaggtgtatatgactccattctgcagaaggtaagctttaaggagagggagaaagttctaggacgtgtgggttaggcagaagtagaggatcccgcaagtatgaccgagggactggaatgcagagggcccctgttctcattattaagtggaatagcaaatataggttggaatccaaagtgagaaatagcaggaagagcaaaaggagagtcaggaactgtgcatctcatttcatgatcagtatctgatgtgtgtgtaggtacagggtcagagagtatgagtggcctaacaggccagccaagtcagtgactgctaatttggtagtttctggaatctgcaaggaaaaggtgaccaatggcaaaggatctgtggcctccacagcaggtagggagaacaggaaggctgagctgctaygctgtctgaagggacctgagaattattctcccaccctgaggttcccttcgtgttcagggttctccaagctaaggtcttctgcagtaactatgcagggaaggtagg

SEQ ID NO: 96165 - DNA, 488 bp, Homo sapiens
gaattctttgatgctgaacaaggtatgagccagaactgaaggccttgccacactccttacactcatagggcttcttaccagtatggattctgctatgttgtacaaggtacgaggctcgactaaaagtctttccacattccttacattcatagggctttacatcagtatgaattttccgatgctgtgtgagatgtacgtgcactctgaaggccttgccacattccttacactcatagggtttctctccagtatgaaccctttgatgtacggtaagctgatggcgactaataaaggctttgccacattccttacattcatagggtttctccccagtatggatcctctgatgctgaacaaggtatgagccagtactaaaggccttgccacactccttacattcatagggcttctcgccagtgtgaagtcttccatgttgaacaagatatgaggcacgactgaaggttytcccgcattccttgcatctgtag

SEQ ID NO: 96166 - DNA, 583 bp, Homo sapiens
acgaccatgacacctaaatcagataaagacatggaaaaaaaaacaatgctggaaaccaatatatcttataaatatatacatgataatttaaaaaatactactgggaggccaaggcaggcagatcacarggtcaagagattgagaccatcctggccaacatggtgaaacactgtctctactaaaaatacataaattacctgggcgtggttggtgcacatctgtagttccagctactcaggaggctgaggcaggagaatcacttgaacctgggaggcagagcttgcagtgagctgagatcacgccactgcactccagcctggcgacagagcgagactccatctcaaaaaaaaaaaaaatttcctataaaaagtattatttaccatcaccaagtaggaaatatcccagatggtaaggttggtttaacttacacaattcaatcaatgtgatatatcacagtaagagaaaaacagggaaaaaaaaactcactccactatacagattcaactcactaggtacattaaaaaacacataagaaaatttaacactaatttatgattaaaacactcaacaaactaagaaaatg

SEQ ID NO: 96167 - DNA, 583 bp, Homo sapiens
acgaccatgacacctaaatcagataaagacatggaaaaaaaaacaatgctggaaaccaatatatcttataaatatatacatgataatttaaaaaatactactgggaggccaaggcaggcagatcacaaggtcaagagattgagaccatcctggccaacatggtgaaacactgtctctactaaaaatacataaattacctgggcgtggttggtgcacatctgtagttccagctactcaggaggctgaggcaggagaatcacttgaacctgggaggcagagcttgcagtgagctgagatcacgccactgcactccagcctggcgacagagcgagactccrtctcaaaaaaaaaaaaaatttcctataaaaagtattatttaccatcaccaagtaggaaatatcccagatggtaaggttggtttaacttacacaattcaatcaatgtgatatatcacagtaagagaaaaacagggaaaaaaaaactcactccactatacagattcaactcactaggtacattaaaaaacacataagaaaatttaacactaatttatgattaaaacactcaacaaactaagaaaatg

SEQ ID NO: 96168 - DNA, 583 bp, Homo sapiens
acgaccatgacacctaaatcagataaagacatggaaaaaaaaacaatgctggaaaccaatatatcttataaatatatacatgataatttaaaaaatactactgggaggccaaggcaggcagatcacaaggtcaagagattgagaccatcctggccaacatggtgaaacactgtctctactaaaaatacataaattacctgggcgtggttggtgcacatctgtagttccagctactcaggaggctgaggcaggagaatcacttgaacctgggaggcagagcttgcagtgagctgagatcacgccactgcactccagcctggcgacagagcgagactccatctcaaaaaaaaaaaaaatttcctataaaaagtattatttaccatcaccaagtaggaaatatcccagatggtaaggttggtttaacttacacaattcaatcaatgtgatatatcacaktaagagaaaaacagggaaaaaaaaactcactccactatacagattcaactcactaggtacattaaaaaacacataagaaaatttaacactaatttatgattaaaacactcaacaaactaagaaaatg

SEQ ID NO: 96169 - DNA, 523 bp, Homo sapiens
taggggctcatgaaagaatctacgggcactaacgctattcaatatttggcatttagagctattagaacatgacctgcatctctaaatacacattattatgattaacagagctcagatctgagcaaaacagatctccatatctcttgcatagatctttgaaagaaagagtaactgggtccaaatattatgaaaccttgtgggttggggataaacgttgcttccataggcaaacactattgagaagtagaattacttacataaggaaaatagaaactgaagacctatcaaaccctttttctcagatagtatgaatgtaataatttcaaacgtgtttatttttgctttccttcatgctttaatttgtggttctagaggtacttatttaagaaaatggattaaaacaattacaaatacaaaattagctatgaaaagtaatattttctaggcatgrgaaattatagaaaattacatatcacaagatacaaaaataaaaatatattttaccacttagctgcctaacaca

SEQ ID NO: 96170 - DNA, 642 bp, Homo sapiens
tgctttcttcctaaaactggaacaaggcaaggatgtcagttctaaacactgctactcatcattatactcactgtcctaaccactacaatatggcaagaaaaataagtaaaagtatagagagggataaaaccaaaattactatctttatttaaatctcatttcacatattcagtgaaatctatctctaaattatcctccagtttctacttttctttgatatatagccattgccatcctactatcatctccttttctacaattttatttcataatgatcaatgaaataaattgctacttatgagtccaggtgtgacccagcagcaaccattacatagggcaggtgataattttccaaactctctggttttctttcatagttcagtctttaattcagcatttagtgaagtgtgggattgtatatagawaatggcaataagaaagtacagatttttcacaaatatatttatatatatgttggactatacaaattccaggagtgaaatatcaaggtgaaaatgctattaagatggcaagtcaccataactttaaacctcagtaaatagctgttttattaccaaagtgttcaaaaatgtaaggtaaaaatatttttaggataaagaagtggcaacctttatcataacc

SEQ ID NO: 96171 - DNA, 606 bp, Homo sapiens
gcactaattatttttcattttcgtatccttcttccccttctctttgttctacttacagctggtaaacttttaaaaatcaaaatataagatattcctttatcaaggaactakaagaatgattgagtactggatgtgcaagtagaaaaagaggatttatgcagtatgtcaaatatcataaggacaaatttagtaccagataataatttaatacattcagtgttttgtacttagatgaactggattatagacatgtggatggatatagtatacaaatgaattgcttcatgcatgcttagagttatttaataaaactctgtagatgtccttattaggtttagaacgtgcagacagctggagaactttcctataaaaaccactaatatagttggaaaacgttttaaatcttttttctttctctaaatctgagatttttaatggtatcctcaagatcttctaaagtaataactgttaataaatatggtacttgtttgatttgttgctatagggcaaactactctaaaacttaatggccttatgggaataaaaaatggtgcacctgctgtggaaaactgtttggcagttcctcaagaagttaaacacaggatt

SEQ ID NO: 96172 - DNA, 657 bp, Homo sapiens
gctggctctggttcagtaactccacaaaagtcaaatccatcttgtttcttgcggagaatatcatagaatgagggaaacctctcctgcagcaggcacatgggcacatgagtgcagcctaaatgtcttctggggcctctccagccctcaagagcaaagtaagtttactatgaagctgcatagaacaacaacaacaaaaaaaactcactaagttaaatttctgctaattcctgagaattacctcctatctccatttctgtggtttcacacatgctactctttcacatcattacttttattcttcccaaatatgggtgtccacaaagctctcaataagtatatcatgaattttagtaaatttcactagaaatgaaaaatagagagtgggcttacagccacatgacctctaaattgcatacattcccctcatttctctttcttatacccttctcccgttttcaaaaaaaatacaaatagtcaaaacatattcaaaacaaaacamctcgtcatttggaatgcagattaactcccttctctataaatgtcagtattatctgacactcaggctcacaatgattcaaattccatcttaaatgaacctatcaagaaatcactcaaatattacatgtactatcagaagaattctagtaaatgggacat

SEQ ID NO: 96173 - DNA, 629 bp, Homo sapiens
catatctttattactttgggaaatatctatctaaaacactaaatatgtctgcaaattttcaagtagagaaaagaaaatcaagataacatgagaggcgagacaacagtagtgggtatgatgttaatgacaacacagtgaaatgaataattgaggaaaataagcaagtatagagattatagcacctttaagttatgtttaagttctaccaaacatcatgccctatgttttgrtccatagtctctggtgattacaactaaggaatgagcagaaaactgacattttgagaagacaatatattcagtgcttcaaatcacactgataagttattacactgatgtataaagtctcttctataatcataggtcctcacagcaatggttatgatatttttggatcccaaatgctactgtgttattttctaccattcttgatgagcagggagattttccccactacttttaaccatgaatcttgagatataaaaaatagaaagcttttgacactaaggtgggactccatctgcatacatggtcccttgttcttggctgagagtcaccataaaagcaggaatttggacaaaagagaatcattttgatggctgctatgtagttatgtatatacagtggtgg

SEQ ID NO: 96174 - DNA, 573 bp, Homo sapiens
ttaggcagctggtgttccctggccagtaggaatccttttgtctctgagataagaggtttgtgtccaggagagggcaatatgtgatttgcttgaggtcacttagagctcctagtaattatgtctstcattgtaccttgattatagattatcattgcaaatccattaaagaaggagaagcaagcggatttcagagaggcaagtagctttattttcttcattatgttttcattccccccctctgttacagtttgtttcttctttactaaatggttttgccaatgatatagatgactttgaagtggagaatgggaagaggagacttcgtgggtggcgaaaggactgtgctaaacactctcctgattagttcattaattttcaatttgttgccattaggcctgttcatttggctccccatttgtgtgatatagagaggcttgccctcaatgcttccaggcccgaatactgtgctatccttgaagttctgtgtaggtacagcactttttttaaaaataggaaagttaaatggtcccttttactgttgttgtttgtgtcccaagtagtatatataatact

SEQ ID NO: 96175 - DNA, 602 bp, Homo sapiens
cagaagcttctagataatgctccttctagaccctgaatcaagaagtcttttgaagcatcctggcctgagagagcctgagaggtgacctgacctcaggacatctagtctccctctggagaagccatagtttgaatttaatttctttgtgttaccacatcataagggctatgggcctcctcagctctctgtgcctctgtgcccctttccatgagctgggatgaaatagccaactagaacaactatcaggacgtatgttctttttttgtttactattattattttttgrgacaaagtctccctctgtcgctcaggctggagggcagtggcatcgtctcagctcactgtaacctctgcctcctgggttcaagtgattctcccacctcagcctcccaggtagctgggactacaggtgcctgccgccatgccctgctaatttttgtattttttggtagagacagggttttgccatgttggcctggctggtctcgaactcatgacctcaagtgatccacccgccttggcctcctaaagttctggagttacaggggtgatccactgcaactggcctggaggtgtgttcctatgagtgtattcagaaggat

SEQ ID NO: 96176 - DNA, 602 bp, Homo sapiens
cagaagcttctagataatgctccttctagaccctgaatcaagaagtcttttgaagcatcctggcctgagagagcctgagaggtgacctgacctcaggacatctagtctccctctggagaagccatagtttgaatttaatttctttgtgttaccacatcataagggctatgggcctcctcagctctctgtgcctctgtgcccctttccatgagctgggatgaaatagccaactagaacaactatcaggacgtatgttctttttttgtttactattattattttttgggacaaagtctccctctgtcgctcaggctggagggcagtggmatcgtctcagctcactgtaacctctgcctcctgggttcaagtgattctcccacctcagcctcccaggtagctgggactacaggtgcctgccgccatgccctgctaatttttgtattttttggtagagacagggttttgccatgttggcctggctggtctcgaactcatgacctcaagtgatccacccgccttggcctcctaaagttctggagttacaggggtgatccactgcaactggcctggaggtgtgttcctatgagtgtattcagaaggat

SEQ ID NO: 96177 - DNA, 609 bp, Homo sapiens
tatatattcttgcagatggggagagaagtagaagtcagggaggagtagaataggagacaagacaaaaccatgggctctgctttcaaggacccaacagtctagttgaagaggtgggattggttatgtcaaaagatgaccagcagcccaaggcaatggagaaatatcagatgaaggatgtggagagttggttccrttagagatttctatgcagtttctagtgaaaagactagagaatttttacttatgtcctgaacacactgttaagtagatcttggatgagaaaataaattattgcaaagagagaagtaagttgacagaaagcttatgtaatggtttgaatttcaaacaattagggaggcttacatgttggactaagggaattttaggaatgaatcataggctctttcaaattagcgggatatgaaaaatatattccaggcaggaactatttctacccttcatagattcttcaattgagatattcttcatgtatggtttacattcattagattttattttcctgtttaagttaaatgattaggaagtttaaaatcttgaacaaatgacagtaatatagtttatggaaactgtatttataagaaggaaatg

SEQ ID NO: 96178 - DNA, 609 bp, Homo sapiens
tatatattcttgcagatggggagagaagtagaagtcagggaggagtagaataggagacaagacaaaaccatgggctctgctttcaaggacccaacagtctagttgaagaggtgggattggttatgtcaaaagatgaccagcagcccaaggcaatggagaaatatcagatgaaggatgtggagagttggttccgttagagatttctatgcagtttctagtgaaaagactagagaatttttacttatgtcctgaacacactgttaagtagatcttggatgagaaaataaattattgcaaagagagaagtaagttgacagaaagcttatgtaatggtttgaatttcaaacaattagggaggcttacatgttggactaagggaattttaggaatgaatcataggctctttcaaattagcgggataygaaaaatatattccaggcaggaactatttctacccttcatagattcttcaattgagatattcttcatgtatggtttacattcattagattttattttcctgtttaagttaaatgattaggaagtttaaaatcttgaacaaatgacagtaatatagtttatggaaactgtatttataagaaggaaatg

SEQ ID NO: 96179 - DNA, 637 bp, Homo sapiens
aacacagctttaactgtttccagaaattcctgtatcttatatctctcttcaaatttgtttcaaagaatttcttgattgctgccttaatttcattgtttacacaaaaggtacacaatgttgtttaatttacatgtatttgtatagttttgarcatttttcttggttttgatttctctttttattgcactatggtctaagagtatcgttggtatgacttcagttttgaattttctaaggattgttttacagctgattttgtggtcagttttagactatgtgctctgtacatatgagaagaatgtatattctattgtttttgttggggagagttccgcagatgtctagtaggtccatttggtcaagaatcaatttaaggccttggatatttttgtttattttctgtcttgatgatccatctaatagtgtcagtgaggtgttgaagtctcttactattattgtgtagttatctaagtctctttgcaggactctaagaaattgccttatgaatctaggtcctcctgtgtttgatgcagacatatttatgatacttagaactttttgttgaattaaaccctttaacattacgtaataccattctttgtctttttaactgcctgttttgtctgaaattagaata

SEQ ID NO: 96180 - DNA, 569 bp, Homo sapiens
cagtccaagttggggagtatactgaaccaaaattctgattcaattaatatattaaattggaatcattccctgaagctctgggattactctctgcayagatattggtttactacaaagagaactatttggatattgtagtcatctgaaacaatgctaactgaaggattagagaaacccataaatccatctgtcttggaagaattagtaaggtaagaatacatacatattagatagaaggaattcagacatttaaagtaacatttctcaaactattttgtttgtaaaaatatttctttggaaacgggatatgtaataaaattataaaacatccaagaaaaaaagactgtaaaagaaccattgccttgcgtagaccaagatttcatatactcacacaaaaaatcttaatgcaatgtaaatttataaacttggaatatactaaaattaagaaactgtgttcatataaatgtagtatttatagaatttttaaagactatatatgggaagaaagcatttgcaatatatacatttgacaaaagactcttatccagtatacatctatgtgtgtatgc

SEQ ID NO: 96181 - DNA, 569 bp, Homo sapiens
cagtccaagttggggagtatactgaaccaaaattctgattcaattaatatattaaattggaatcattccctgaagctctgggattactctctgcacagatattggtttactacaaagagaactatttggatattgtagtcatctgaaacaatgctaactgaaggattagagaaacccataaatccatctgtcttggaagaattagtaaggtaagaatacatacatattagatagaaggaattcagacatttaaagtaacatttctcaaactattttgtttgtaaaaatatttctttggaaacgggatatgkaataaaattataaaacatccaagaaaaaaagactgtaaaagaaccattgccttgcgtagaccaagatttcatatactcacacaaaaaatcttaatgcaatgtaaatttataaacttggaatatactaaaattaagaaactgtgttcatataaatgtagtatttatagaatttttaaagactatatatgggaagaaagcatttgcaatatatacatttgacaaaagactcttatccagtatacatctatgtgtgtatgc

SEQ ID NO: 96182 - DNA, 569 bp, Homo sapiens
cagtccaagttggggagtatactgaaccaaaattctgattcaattaatatattaaattggaatcattccctgaagctctgggattactctctgcacagatattggtttactacaaagagaactatttggatattgtagtcatctgaaacaatgctaactgaaggattagagaaacccataaatccatctgtcttggaagaattagtaaggtaagaatacatacatattagatagaaggaattcagacatttaaagtaacatttctcaaactattttgtttgtaaaaatatttctttggaaacgggatatgtaataaaattataaaacatccaagaaaaaaagactgtaaaagaaccaytgccttgcgtagaccaagatttcatatactcacacaaaaaatcttaatgcaatgtaaatttataaacttggaatatactaaaattaagaaactgtgttcatataaatgtagtatttatagaatttttaaagactatatatgggaagaaagcatttgcaatatatacatttgacaaaagactcttatccagtatacatctatgtgtgtatgc

SEQ ID NO: 96183 - DNA, 551 bp, Homo sapiens
agctctgtgaaatagcacaattctcataaatgatgattgactgggtagaaaatgtatctataaacttagagcttccttagcactcaatttgggatggtagtgcagtgagagcctatgttataattctaatgagacttcaagttacttataagttttactaccgtatctgattgacactacttgtgctaaattccatcagtgtctaaacaaatgaagaatatacataacactcaaaaatcaaaatctaaaaattacaggatcataaggcaggaagctttgaatatgacaaagcatagtgatatcaatttgcaccatatagtgggscccaagtgccatgcatatatagtacatatggtaaatgacataaaggcagatgtagaggaaaaatggatctaagaacagtaatactgtctctcttcttgatctactggaccaaacaggtatcaggtaattaaagaagagagaaattttcattgttcagggcaactcagtagacctttggggcatgtggtgtcagatatttcaaagtttcttgagcacttactatgtat

SEQ ID NO: 96184 - DNA, 477 bp, Homo sapiens
cttggttgaatcctagttttaacaaaaaaaaacttaaaaaaaatttataagccaattgtaaaaatatgagcacaaaatgaatatttgataatattaaataattattgttacttattaaaagtaaagtttatattttagatatatagtgaaatatttacaaatgaaatactcgaatacttaggagctacctcaaagtaatctgatgtgagtggggaagtggtaaggagtttagaagaaacgaaaaattatattaaaacatttgaagctttgtgatggttacatggggactcatgatagaytaaagatacattcgtctgctttaatatgtgtgatgaggaatccaacttcattttttgacgtttgactgctgaaagcttttaagcctcacccttccctcatccccttggacctcacatctgggcaaactgataagaaagcctggtgttcccttccttgtcacagatgggagagccaaat

SEQ ID NO: 96185 - DNA, 477 bp, Homo sapiens
cttggttgaatcctagttttaacaaaaaaaaacttaaaaaaaatttataagccaattgtaaaaatatgagcacaaaatgaatatttgataatattaaataattattgttacttattaaaagtaaagtttatattttagatatatagtgaaatatttacaaatgaaatactcgaatacttaggagctacctcaaagtaatctgatgtgagtggggaagtggtaaggagtttagaagaaacgaaaaattatattaaaacatttgaagctttgtgatggttacatggggactcatgatagattaaagatacattcgtctgctttaatatgtgtgatgaggaatccaacttcattttttgaygtttgactgctgaaagcttttaagcctcacccttccctcatccccttggacctcacatctgggcaaactgataagaaagcctggtgttcccttccttgtcacagatgggagagccaaat

SEQ ID NO: 96186 - DNA, 588 bp, Homo sapiens
agactccatctcaaaaaataataagataataataataataataaaataaagggactttatgcatgttttatgtatctaacaaaaatcctcttttgtgacacattttggraaaagtaaattatttaggttaattaagtattgcaacaccagtacatttcccaaataaaataactggatgtactgcaaacatactgaatatatcaaacacaataaacttcttaaagaataaaagtttaggaactaccaaaatctctaatgaatatcaggtcattggcaagtgtagttaattttatcccattgctatcatgcactcttaagccgacaagctaatcacagagtgctctttcattcactatgtatcaagaactgaaatgactgtgtttatttcaaggtcttggtttcagatgcaaagtcatcaaccagtggcagtataattaagtcgtcaagaagtaagaaatttcttttgaaaaatggtgttagcatggcttgttctagcaagttagaaacaagacgagttcgctgctcaaggctaaaaacaaaacattctaagaaggtactccaggcaagtcaagccttgacattaaggct

SEQ ID NO: 96187 - DNA, 636 bp, Homo sapiens
caagtatcccattattttcttggtttttgtttgattgttgtgttttccgtctcttacattagcacaagagcatgtagctgttgctcaataaatatatgaaatgagaaaaatcaatgaacatattacatttaaacctctaagttgcttttagcttttatattatttttcataaaaatatgtatgtataaatataaatgcatagattatatacaataacgtgcttttataaaaaacatataaattatgaatttattataaaagtatataattacatatataaattttataaactagattatataaagattatagagagattatatataakgtatataaaagatttattatatataaagattatatatatagattagggttcactcttggtgtcatatattctataggtttggataaatgcatgctggcatgtatctgccattatagtatcatacagaatagtttcaccgacttaaaaattgcctgtgcactgcttatttatttttcccccaacccctggcaaccacagacgtttttactgtctgcacagctttgcgttttttggaatgtcatatacttggaatcataccggatgcagccttttgagactggcttctttactcagcaatatgcatttaa

SEQ ID NO: 96188 - DNA, 636 bp, Homo sapiens
caagtatcccattattttcttggtttttgtttgattgttgtgttttccgtctcttacattagcacaagagcatgtagctgttgctcaataaatatatgaaatgagaaaaatcaatgaacatattacatttaaacctctaagttgcttttagcttttatattatttttcataaaaatatgtatgtataaatataaatgcatagattatatacaataacgtgcttttataaaaaacatataaattatgaatttattataaaagtatataattacatatataaattttataaactagattatataaagattatagagagattatatataatgtatataaaagatttattatatataaagattatatatatagattagggttcactcttggtgtcatatattctataggtttggataaatgcatgctggcatgtatctgccattatagtatcatacagaatagtttcaccgacttaaaaattgcctgtgcactgcttatttatttttcccccaacccctggcaaccacagacgtttttactgtctgcasagctttgcgttttttggaatgtcatatacttggaatcataccggatgcagccttttgagactggcttctttactcagcaatatgcatttaa

SEQ ID NO: 96189 - DNA, 636 bp, Homo sapiens
caagtatcccattattttcttggtttttgtttgattgttgtgttttccgtctcttacattagcacaagagcatgtagctgttgctcaataaatatatgaaatgagaaaaatcaatgaacatattacatttaaacctctaagttgcttttagcttttatattatttttcataaaaatatgtatgtataaatataaatgcatagattatatacaataacgtgcttttataaaaaacatataaattatgaatttattataaaagtatataattacatatataaattttataaactagattatataaagattatagagagattatatataatgtatataaaagatttattatatataaagattatatatatagattagggttcactcttggtgtcatatattctataggtttggataaatgcatgctggcatgtatctgccattatagtatcatacagaatagtttcaccgacttaaaaattgcctgtgcactgcttatttatttttcccccaacccctggcaaccacagacgtttttactgtctgcacagctttgcgttttttggaatgtcatatacttggaatcatacmggatgcagccttttgagactggcttctttactcagcaatatgcatttaa

SEQ ID NO: 96190 - DNA, 442 bp, Homo sapiens
ttcttcgcctgttgacttagagataggagaagcccgaaatggccaggtggcaatcttaacttccagttaaaaggaattattgtgtctcctggtggcagcattcctccctctggaactaagacctctaggccagcagaatgtaatgttgcaggaaaaggaagcaaagattttgctagtgggttactgggggtgatggtgaatggtgccacttccacttctaccccttgattcctggacctgtgaatcctggctatgggagaaacagtaccaaatattcgacactgattcagagcatacacagccttctggagaacttttccccaggcctgtaaagtattgccatatagttggtgttgtaattgtaacttcaaaaggccattccaatgttytatcaatccagctgcatcaggatgatgagaaatatggtaagaccagtgaattc

SEQ ID NO: 96191 - DNA, 599 bp, Homo sapiens
atcaaggattcatagataggttgcatatttactaatatgaaagcttattgttcaacaggtaatattggctgaatgaagacaataacccatccttcaggctctttgtctcacatacatgacatctggagagatgcagcttccactccgggggcttcattagaaactagatcctcaagaaacattcaggtaatcctaaagtaagaaagtgaaggacatagtccaagaggagactgagaacatagggagtctttttatcacaaattggtgttctagtggacatactgaaaagacttaaaggaaaagagaggaaaggggtttgaatagcattatggatatgctcaatcgaataaggataaagaacccattgacactgggtagcaagaaggcttagacatttaggatgattaaggtagatagtgaatgtttacttcaattcccattgaagatggattgattttacggtttctcagacatgtggcaattagtctaagctagagttctrtaatttggttattttgatatgaagcagtgaaagaacaacacttactacataaaagagaaagttttgcattttcaaattcagagttattactttcaaa

SEQ ID NO: 96192 - DNA, 592 bp, Homo sapiens
aagaagttgttatgcatagccccaacttaaggagtagggagtgccatagccaagaaaccattacctaacccargatcataaagatttactcctatgttttctttaagagttttgtgattttaacccttacatttaggactataaaccattttgaatttttttgtgtataaatatgctagtggtcctggttcattcttttgcatgtggatatccagttgtcccagcactactttttgaaatgactattcttttctctttcttggcacctttgtcagaaatcaatttactataaatttgatggattatttctggactctcagttctataatcgatctcctgtgctagtgctgcactgtcttgatcactgcagctttgtaatacattttgcaattgggatgtgtgactcttccaaatttggtctttttcaagaatgctttggttattctgggtcctgttaattttcatataaattttttagaatcagtgtgtcaatttattaaaaaaaaaaaacacccagcttagattttagattttggtaggaattatgttgaatctatagagcagtttggggagtgttgctatcttaacaagg

SEQ ID NO: 96193 - DNA, 592 bp, Homo sapiens
aagaagttgttatgcatagccccaacttaaggagtagggagtgccatagccaagaaaccattacctaacccaagatcataaagatttactcctatgttttctttaagagttttgtgattttaacycttacatttaggactataaaccattttgaatttttttgtgtataaatatgctagtggtcctggttcattcttttgcatgtggatatccagttgtcccagcactactttttgaaatgactattcttttctctttcttggcacctttgtcagaaatcaatttactataaatttgatggattatttctggactctcagttctataatcgatctcctgtgctagtgctgcactgtcttgatcactgcagctttgtaatacattttgcaattgggatgtgtgactcttccaaatttggtctttttcaagaatgctttggttattctgggtcctgttaattttcatataaattttttagaatcagtgtgtcaatttattaaaaaaaaaaaacacccagcttagattttagattttggtaggaattatgttgaatctatagagcagtttggggagtgttgctatcttaacaagg

SEQ ID NO: 96194 - DNA, 592 bp, Homo sapiens
aagaagttgttatgcatagccccaacttaaggagtagggagtgccatagccaagaaaccattacctaacccaagatcataaagatttactcctatgttttctttaagagttttgtgattttaacccttacatttaggactataaaccattttgaatttttttgtgtataaatatgctagtggtcctggttcattcttttgcatgtggatatccagttgtcccagcactactttttgaaatgactattcttttctctttcttggcacctttgtcagaaatcaatttactrtaaatttgatggattatttctggactctcagttctataatcgatctcctgtgctagtgctgcactgtcttgatcactgcagctttgtaatacattttgcaattgggatgtgtgactcttccaaatttggtctttttcaagaatgctttggttattctgggtcctgttaattttcatataaattttttagaatcagtgtgtcaatttattaaaaaaaaaaaacacccagcttagattttagattttggtaggaattatgttgaatctatagagcagtttggggagtgttgctatcttaacaagg

SEQ ID NO: 96195 - DNA, 604 bp, Homo sapiens
ggtacttactccctgaatttcaatcacaacactttggagacaactwtggtagatacaggggtcagtcgaaggattttcatgaggagcaacatgtttaggtttgtgtgttaacatgatcctggtaacaacttggaagaaacattggaaggaaacaatgaaatggtaggaggaggagcagttagttggctattacaataattcaaacaaaaggaagtcaggacataaactaagggaagagcagtgtgaatggattttaccaccctagctcaaataatatatcaggattctgcacacattgaggatgtttgttaatacatgtgtctgcacattactgcgcatttcccacaaccaagcatcaacatttaggtgtctgggataatctaccaatttgcataatccagatgtagacaatgttattccccagaattgctccactgagatttcagagtgaaaagcagttagactgtaggaacttctcttcagtgtctctatgaggagaaatagaagattggtggtcctctagccaccaattttttggtctgaggcaatttgtgggtgtcttcagaaattccaataaaatataacaggaaggaggcactggtag

SEQ ID NO: 96196 - DNA, 582 bp, Homo sapiens
tcctctaacttttactgtcttgctgcactccaacctgtctccagctgccagtgcctgaatttttacatgaaagattctctaagccaggagctcacaggcacagccagcctgaaatgccagggaattactgctctcccctcacccccacatcctgaaatgatgactgactggagtcagtatataagtgccttagttccctcgcttcttcagtggaataagtctaattttttttccagatttctccaaaaatattaagatccagttatccacagggataactcatttaataacacacactttrttgattgcattccctttcatcctttccctgtctcgtttttcctggggctatgggagggaagtaaagtgcagcactcctactggtgtttcctagacaatcatttctccatcaaatcactcccactccttctggaggaagccgactaagtacagatacatttgacataattttatgcagaaacataattaattattttttatttatagatgtcatggctttcttaattctcctgtcaggttattgcttattctctctagagtgttgtgggaggtcagactata

SEQ ID NO: 96197 - DNA, 482 bp, Homo sapiens
ataattcatagtaacagaaaatgtactaaccaggaagatcttttgccaaattaatacttctgttagtctaaattcttttagtattaatcaacagaaacccaattcaaattagctctcaagataaaatacagaatttattgagaagatattagggtatataaagtaatttaggatatgtttggaaataaaactgattgaaaggtagggccataacaattagaaacaaggacttgaccattttttctatcctgctggtttcattcccttttactgcagaccagcttccttkacatggagaaaaatgcgcttatatttcaagagcctaaaagttattttataactattataagttgactcatgccttttctggtaccaagttcggaaatactggtgggctgatatcaattccaaactagggctaggaagcaggagatttgtgttttttggtttaataatatgactgctcccatttgttttacaag

SEQ ID NO: 96198 - DNA, 632 bp, Homo sapiens
tcttatttcataggtgatataatacttcagctgtctgaaagtaagtcactctccaaaattcatactatttctactatactagcattttacaacttttcttttgtttctggtccatctatccttttcacaagattaaatacttgtgactctattaaagattattgtaattattctttcattttcacataatttatttttttaattctaaaatactttgttagatgagtgtaagttaatggccatattatagggtgtaattttaatktttataatctttgattacatttataatgtataacaattaatttttgtccatttaacaaatatcacacgttgaatttactacaaaaaaataagaaaaatcatgatttggcaatatgtaaatttataaacattatatcatttttggcttagagattaaaaccataatgaaatatagattgtttatggatcatgacatcaacaatgaataaaagctgccttcatgtaatgtttagaagttttgaatgttttatttaaaaatcagttagttaattttgataatttccatgttttatttctaaattacaagataagctggaaggtattaggctgctattggcaatcatttacccataagtgagatgttccag

SEQ ID NO: 96199 - DNA, 661 bp, Homo sapiens
tcagtccttatgcaggcagcaataaaggaatagagataacctagaaattgagaaacttgaggcagcttctcatcctcaccrgtaacagacaaccctgagaacttgtttatctgggtgacgggattattacagtttggtctggtgaccaaactgaatcagcatggcctatcacacccacttcttgaagattaagttggcatgcagtaaatcccttcagttggacaaaattgctgtgggggctaagactaaaggtgtggctctcccacgaaccgaattacagctcaaggctctgcagttaagttgagaaaaagggcatgtctcaggacagaaccatggatgtggcttttagcacgtggagaggattcaaacagagaagaaggtaactaggtttttgagaaaggtctactgaccaaaaaagtataagcccatatttaaacagtttgcaaccgttcaaatcttctaatggtcattgagtctcagctacctagatgcaggactgagagcattctttccttttcttttcactgtcttccttggtcacacatgaggggacattgagaataggctttctgtgggggctgagtcagttcctttgcagcttcctgcttttgctttgcctccttcaagtaccagaagagtagcactgcagaaaacagttgaa

SEQ ID NO: 96200 - DNA, 661 bp, Homo sapiens
tcagtccttatgcaggcagcaataaaggaatagagataacctagaaattgagaaacttgaggcagcttctcatcctcaccagtaacagacaaccctgagaacttgtttatctgggtgacgggattaytacagtttggtctggtgaccaaactgaatcagcatggcctatcacacccacttcttgaagattaagttggcatgcagtaaatcccttcagttggacaaaattgctgtgggggctaagactaaaggtgtggctctcccacgaaccgaattacagctcaaggctctgcagttaagttgagaaaaagggcatgtctcaggacagaaccatggatgtggcttttagcacgtggagaggattcaaacagagaagaaggtaactaggtttttgagaaaggtctactgaccaaaaaagtataagcccatatttaaacagtttgcaaccgttcaaatcttctaatggtcattgagtctcagctacctagatgcaggactgagagcattctttccttttcttttcactgtcttccttggtcacacatgaggggacattgagaataggctttctgtgggggctgagtcagttcctttgcagcttcctgcttttgctttgcctccttcaagtaccagaagagtagcactgcagaaaacagttgaa

SEQ ID NO: 96201 - DNA, 590 bp, Homo sapiens
ctagctcataaatatattgatgaacaaatcattaaatatttgtttartgaataaatagatggaagaattcaggtcttagtggccctctgtttcatggaaatagaggtgcagatgctggatcattattcctctacgaggaatgttatatgtaacagcatcttctgcaatctctacggaagtgtgaacagtcaggacttgtggcttcattatgattctctcaaaattgtctgtggtataggatattgctcagttttaaatttcttttttaactgtaagcttacacactacactatgcttttatatttctattgttcagttacattgttttataatataatagtatattttttgaaaatgacaagtataaatctgtatcggtaaacattgatcataacataatacactcatcaggccacagttgcactctctgtattgcacaattgtagaatatttatggaaatataaaaacatcgttacatataggctatttgcttagtttgcttaaaacagaaaggaaataagtgacttctccagggttgatctcttgtggtacaggtacccgtgatcaggtgaaagaaactccctcagaa

SEQ ID NO: 96202 - DNA, 590 bp, Homo sapiens
gaaatttgtcaatttaacacgtgttctttacacattaggtgattcaagattggtttgatcaggtcttagaattaaatatgttcttgtttccatagtatgcctagatgtattcatcactgtaacaaaagtgcctagcccagccttgagcctacccaattatgttgccagataactgtatttaaaatggacagcaagctatgagcatgagatcattcatttttaatagttaacttgccagcctaggcaacatggcaaaaccttatctacaaaaaatacaaaaattagacaggcatggtggcatgagtctgtagtcccagcaactcagcaggctgaggtgggaggatggcttgagcaccggaggttgagggtgtagtaagccatgatcgcatcactacactccaggtttggtgragtgtagtgacagagagagaccctgtttgaagaaaaaagaaagaaaaaaaatagttaatttggctttcatatacaaatataaaaaagcaagaatagttcaatctttataagacctaaggacagaaatgccattcagccaagcaatcccattgctgggtatataaccaaaggaataaatc

SEQ ID NO: 96203 - DNA, 614 bp, Homo sapiens
tatatgtgtgtggtatatatatataaatagagagagagagagaaatagtttcaaaaggccatgtaacagaaaggggtttgttcctttctcccctgaactatcagagaaatgataagagaacagatcttgaacacaatgcctttaggttgtcaggccaaccatgcactctgccactggagttgtgaawgtcttgaagggaaagatcacagctattttacttaccaagagataaaactaccatgtgtagaagagctaggcctgagagctgtcatttcccctctgacttctgcttgctgcagtctgctgaaagatgttatggctgaccgaccctcaaaaatagacactgtgatggtgatatattgtggcccttgaagaatttaattgtcaaattgacatttatcaaaaggcttagtgcatttaaaagataaattgtgcaagtttggttcagatcaaagagcccctgcccttctccattcatagcacaggccggcttcagcaggcaagtcgtgtgtgaaaaatgatccccttccactcccagctcctttaagcactgcactggtgacagataatcagaaatttaagtgttagcctcctcttcagaaagttcttaaaat

SEQ ID NO: 96204 - DNA, 598 bp, Homo sapiens
atcatttatggggagtgaggggaacaaatggtgcctgaacttataggaatgaagaagatttggcataatcttcatggagagaggaataaagggttaagaaataaattgctgagcagcagtgaatgtccaaccaggaagggtagatagcacagrtgtgtaataagcatctgcaggatgtttgatgtaatgacagcaaaacttctgataaattcttcatttgccttgatgataattttgtttttcagatgtagaggaatggatcaggggattagtaatctcttcttaattctgatcaacaagaaggggaaaatattgccaataatgggaactgtgatcattttacctgaatgtgtgtaacacagataatctggatattagaaaagtcagtgctggaaagttctatgagctccacaacgtatgcacacaagaaggcaagaaggggccataatcatggtaaatatgaaagagaagcaaaaatgtatttaaaaagtaacacaaagacccagctaagaataaatttgggcagacatgacaacaggaacataagggaaaataatttaaggaaattgacagtatatctcttatatcagtgatatga

SEQ ID NO: 96205 - DNA, 598 bp, Homo sapiens
atcatttatggggagtgaggggaacaaatggtgcctgaacttataggaatgaagaagatttggcataatcttcatggagagaggaataaagggttaagaaataaattgctgagcagcagtgaatgtccaaccaggaagggtagatagcacaggtgtgtaataagcatctgcaggatgtttgatgtaatgacagcaaaacttctgataaattcttcatttgccttgatgataatttygtttttcagatgtagaggaatggatcaggggattagtaatctcttcttaattctgatcaacaagaaggggaaaatattgccaataatgggaactgtgatcattttacctgaatgtgtgtaacacagataatctggatattagaaaagtcagtgctggaaagttctatgagctccacaacgtatgcacacaagaaggcaagaaggggccataatcatggtaaatatgaaagagaagcaaaaatgtatttaaaaagtaacacaaagacccagctaagaataaatttgggcagacatgacaacaggaacataagggaaaataatttaaggaaattgacagtatatctcttatatcagtgatatga

SEQ ID NO: 96206 - DNA, 598 bp, Homo sapiens
atcatttatggggagtgaggggaacaaatggtgcctgaacttataggaatgaagaagatttggcataatcttcatggagagaggaataaagggttaagaaataaattgctgagcagcagtgaatgtccaaccaggaagggtagatagcacaggtgtgtaataagcatctgcaggatgtttgatgtaatgacagcaaaacttctgataaattcttcatttgccttgatgataattttgtttttcagatgtagaggaatggatcaggggattagtaatctcttcttaattctgatcaacaagaaggggaaaatattgccaataatgggaactgtgatcattttacctgaatgtgtgtaacacagataatctggatattagaaaagtcagtgctggaaagttctatgagctccacaacgtatgcacacaagaaggcaagaaggggccataatcatggtaaatatgaaagagaagcaaaaatgtatttaaaaagtaacacaaagacccagctaagaataaatttgggcagacatgacaacaggarcataagggaaaataatttaaggaaattgacagtatatctcttatatcagtgatatga

SEQ ID NO: 96207 - DNA, 639 bp, Homo sapiens
atttcaaacattatctgttaacttattacagataagaggacttggcctcctgatgccaccttattccttctctctctcttcactttccttatcctccctgtatgttatagatattcccatttcagattaaatcatttatgattactaatatagctaagccatgaatgtgtactatgactacatttcctttctggtataatgttttgttcttagaattaattgcttcatttttatcttcggttttctatccaactatagtgaattatttccaaactctccaaggattacaaaaccccactgaatgctgttttccatagggtcttccaaaaacatcaatactctgtcattttaattttcccagagacatctctcctgaagcccactctcttcccatttcartatacagctgtgactgtgtgtagctagatgcagctatatggagaatcacagatgaactataataatcgggaaaagattgatacttaataaatgcctttggaaaaactgtttagagaaaaaatgaatttagattaatacttcacactggaatttcaaatgttttaataagctaagccaaaataagtaaatgttataagaatataactacctcagctgtccaaagctggttttggtttcatc

SEQ ID NO: 96208 - DNA, 441 bp, Homo sapiens
aagtctggattgatgtgaatggagtattaagggtaattttagtgagggctgagaggaagacaagagctatagagagagcctaagtcttctcaggtattacttaagtgatcagaatgttggtagcaatatggatggtaaaggtcattctgataaggacttagattgaaatgagaaagaaggtattggaaagtggagtaaagtttatgcttgttatagagttgcaaagaacttgacagagttgtgtttgtgtcctagaactttgtggaagaaagaacttaagaatgatgaatgggggtgtctggcagaagaaatawctaagcagcaaagggttctaggtgctgcatggctgcttttggatatttacagtaaaataaaaagagaaaaattatttaaagatggaatttataattaaaaggaaagcagaatgaaaagatttggaaa

SEQ ID NO: 96209 - DNA, 460 bp, Homo sapiens
cttcttagtctgttgactcaggggcgtgaagagtccagaatggctaagtggcagtctgaacttccagttcaatggatgcatttttgtgtttcttagtggaagcattcctccttctggaactctagggagcagaacataaagtcaccacaggaacagaagcaataattttgctagtgggtcactaggagtaatggtgaggtggtgtcactttcatttctactctttgatctctggacccatgaatcttggccatgggagaaacagaaccatatattggatgttgattcagagcatatgcaaccttctggagaaccttgctccagttctgcaaagtattgtcagctagatggcactgtaacttagtcttcaaaaggccattcacctttctatcaagctggctgcttcaggatgaygaggaacatggtaagactactgaattctggtgcttgagcccattggc

SEQ ID NO: 96210 - DNA, 581 bp, Homo sapiens
atccagcaaagtcaaaattaaaagacattttagagatatgcctcgactttcacaaatactatcatgtctcccatttcagacagctttgaggtctaagctaacttagcactgtacatgtaatttagcatstgtgtgtgtaaagactgactgttagatagctctaatactgattttcaggtttttaaaaacttttcaaattgaagcataatattcatatatataaatacatagctctataaattcttgcaaaccaaacaaactcaagattcaacatccagacctagaaatatgacattagtagcacacctcatgctcctttccagtcaccctccctccccctgcccaaagcataactataatagcacccaaattctaacagcatagattagtttggattcatctcatattttctataaataaaatcatataatgtgcgcttttctgtgtctggcttgaccttcagatttttactttgttttgtttccttcttaagtatatcaagctatcatgaaggtagaaattaaaaatttgttcattttggaaattaaaatttgttcattggtcaaatacaaattgagaag

SEQ ID NO: 96211 - DNA, 569 bp, Homo sapiens
ccagtctcctccttcatttgtctaacatttctatgtacgaacttcttccttgagctagggtgagtgaggatccagtttcagaagtgagagtatgtagaatttgtgtactggaaataatttccacaaagctatgactgtggtggctgaagtatgaagttgaactaagagcacttaccatcatttgagcagtctartttcttttctagaattattgcccaaattaataagaattgttgattattttccatgtgtgacagtcttttatgcatgcatacatgtgtgtttgcattatgtatgtacatattcatgcatatagtcttcccagtacggcatcctttctttggcaggtggagtaagatttgctcttttcctaatctgggtaatttgggaagaattgtgaggccaagtctacctctcaccaatgaaaaggcaggtccatgaccaatgctggctaatctctgatactaaaatacttaaaactggctgggcatggtgattcatgcctgtaatcctagtactttgggagggtgagttgggaggatctcaggagtttgaaaccaacctggcaa

SEQ ID NO: 96212 - DNA, 614 bp, Homo sapiens
cattcggctcttattacctgkcataagaatggcaggtaataatgtaggaaatggcaggaaattaagctttagagactgaaaacaagtatagggtttaagaaggtatatttcatttgtaaagaagattaagcctttttcttgttaccaagttgatttgctagcatttctatttgagcttctcatttactaaactatttctctaatcattttgagagtccaaagtgtttaaattattgagaattattctatcatgtttagtgtttgacatgtgagccacagcatagacataatttaatataatcttagacattgtcactaatgtccagggcaataaaagatttatttcattataaaagaaatataaggttgtcaatgaaaagagtcaaactgtgtaaaatatttaaagagatttattctgagccaaatatgtgtgaccacagcccatgacacagccctgggaaattctgagaacgtgtacccatggtaatcaggctacagcttagttttatacatttttgggaaacgtaagacaccaatcaatacatgtaagatgtgcattggtttgatacagaaacaacttgaagagggggctaccaggtcataggtggattcaa

SEQ ID NO: 96213 - DNA, 614 bp, Homo sapiens
cattcggctcttattacctggcataagaatggcaggtaataatgtaggaaatggcaggaaattaagctttagagactgaaaacaagtatagggtttaagaaggtatatttcatttgtaaagaagattaagcctttttcttgttaccaagttgatttgctagcatttctatttgagcttctcatttactaaactatttctctaatcattttgagagtccaaagtgtttaaattattgagaattattctatcatgtttagtgtttgacatgtgagccacagcatagacataatttaatataatcttagacattgtcactaatgtccagggcaataaaagatttatttcattataaaagaaatataaggttgtcaatgaaaagagtcaaactgtgtaaaatatttaaagagatttattctgagccaaatatgtgtgaccacagcccatgacacagccctgggaaattctgagaacgtgtacccatggtartcaggctacagcttagttttatacatttttgggaaacgtaagacaccaatcaatacatgtaagatgtgcattggtttgatacagaaacaacttgaagagggggctaccaggtcataggtggattcaa

SEQ ID NO: 96214 - DNA, 599 bp, Homo sapiens
atggtctgtaaaaatagattttacagtattaaatcatccttgctcttctgagactaaacccatctccgttataatgaattcttttttattgatatccctaggtatggttttcttatgttttgtttagaaatgtttgcagctaggttaataggtaatatttcccaataagtaccctttcccatactggcacagattctataaccttgagtggctcaaaattttatatattttcgtatagaatataataagattgttgaaactctaaaaaggcataataataataaaactactaaaagccttaggaagatattctggaaagaaagaatgagcataataaaaatagatatgataaaaataattaaaatgattttattaacaattttaaaagcagtttggtttaagcgtgctggttattcttttgattattataatattagatattgtatttttttggttgtttaaacatctaagagaatcacatgtactctctctmtatatatatattacaaggccacaagcatatatatgtgtgtgtgtgtatctctttgtaatttataatttaatgcttaaaaattgttacatctatgtaattgtgaatc

SEQ ID NO: 96215 - DNA, 592 bp, Homo sapiens
tctttgggtaatatggacattttaacaatgctgagttttccaatccatgaacacaggatgtctttctatgtcttctttgttttttacaggtctttttttctgtgttttctgtaaattcctttataaatgttttataattttcagtgtacaggtctttcacctctttgataaatttactccttagtattttattatttttgttgctattataaataggattgttttctccatttcctattttggatagttcattgtttatatatagaaatgttactgattattgtatgttccctttttatcctgtaactttattgaattcatttattagttctaagagatttttgtggattatctaggaatgtctacatatatgtcatttgcaagaagtgataattttcttcttttccaatttggatgccttttatttatttattcttacttacttgctctggctaagacttgcagtactgtgatgaaagaagtggtagaaatgggcatccttgtcttgtatagtgtcttagaggcaaagttttctgttttctttcattrattatgatattggctgtggtttttgatatgatggtctttattc

SEQ ID NO: 96216 - DNA, 568 bp, Homo sapiens
gcacagaaggagtaaaagtttagcttaaatgaatcaatgctgatttatgtgaggagataaatcagccttcaacataattgaagccgtgctggattttatctaaagaaggcttataccaacaagacttctagcagtcatctcagaaactttttctcaggggccgcaaaggtctttgacaatgggaattatgtttctcaatctaagagtatgacaggatcagwccaggaggcttgcatgtatcttttactgattttttttgtgtgaaacagttttattaagaaagtatttttgctagaatatagttatacatagccactggaagttgattaattgaaatttggaagtgatagctatactttttaaatgttaatttttcaatgttttatttaggccaacattttcaatcacaaaagaattcatcttgagattcaatcaaacacaaaattccaaagagaaggaagaattgttggaactagctagaaaaatcattctcagatgtaaggtaatggcatatcatttgattgttgagcatgttaacttcctttctagttggtacatgattacacat

SEQ ID NO: 96217 - DNA, 527 bp, Homo sapiens
gaattctgtttggcaacaattacttatcattcaatcagtactgactgtgtatttgacaaaaacgagccaggtagttggtgcagaacttagatagttggtgttatactgtaggaaaggctattcccaaataactgtaataccaagcagactgcgytaagcctcatgaaagacagtttgaatgtgttttcaagttcaaaggaagaaagagtacattcaattaatgctgacaagtttaataacaatcacgagggtttaagaagttcctatttatgcacaacatttgttaaaaattaaattagtaaaagcaaaaagatttagtctctgtgtttatgagcacattatgttttaataaaaacattaagggcataaagaggaatcagtattacacacaaatacaaattaattgttaaaagtagtagcagagaattgaaagtgataaaaatttaatatttctcaagctgtccctcattactttcaagtgatctagagacgtgattcctgcctacatcccagtacagtggagagtc

SEQ ID NO: 96218 - DNA, 527 bp, Homo sapiens
gaattctgtttggcaacaattacttatcattcaatcagtactgactgtgtatttgacaaaaacgagccaggtagttggtgcagaacttagatagttggtgttatactgtaggaaaggctattcccaaataactgtaataccaagcagactgcgttaagcmtcatgaaagacagtttgaatgtgttttcaagttcaaaggaagaaagagtacattcaattaatgctgacaagtttaataacaatcacgagggtttaagaagttcctatttatgcacaacatttgttaaaaattaaattagtaaaagcaaaaagatttagtctctgtgtttatgagcacattatgttttaataaaaacattaagggcataaagaggaatcagtattacacacaaatacaaattaattgttaaaagtagtagcagagaattgaaagtgataaaaatttaatatttctcaagctgtccctcattactttcaagtgatctagagacgtgattcctgcctacatcccagtacagtggagagtc

SEQ ID NO: 96219 - DNA, 536 bp, Homo sapiens
acactagtacacaaatggaggcatgctctgtcatacatcctgctgcatttaatgtataagaaagaaccattggtccttgttgctcacttctgtgaacaaaaagtgcactaaggccatgggagtcatccactttcaggtcaaggtctatcctttcccttgtggtaaataccaggccagagatgaatcagcaccaaaccaaaggccctcatccaaatatgagaatgctgactccttctcatttaaagaaaaaaaaaaaaaagagattcttttattttcaataatcctttattcttgggaaaacccagtttaaatgtgacctaattttttattttatttagcatattacatctatgatcataagtaagataaacccataattttcatttctaatatcttctttatctgagttaggtagcgaagttatactagttkcataaaaaacaggaggtgtccctctctttgattctccaggaaaaactgaagtaaaaataaaattatgtttattgtgcagccataaaaaaagagtaagttcatgt

SEQ ID NO: 96220 - DNA, 410 bp, Homo sapiens
gtgtctggggagggtatatgtgtattctgtgtgtggtaagaagggggcggaatatttggtgacaagaagtatcttttcttcctaggcattatatttcccaactctcctgcagttagctggrggccacatggctgagttccggccattggaatgttgctggaactgatgtataccacttccaggattggtctataacaccttccttgaatcttcccttctctgtctttcctggtcttctggaagttcttagacaacggtggaaccactagatagataacaggttcccgattccctgaacgagtgtgatagagtgtcctcaccaacccacattggaatatgacatgggtaagaaataattcttagttgtggtaaactgctgagatttgggaagatttttttttgtaacatta

SEQ ID NO: 96221 - DNA, 636 bp, Homo sapiens
agagctacaaaagaatacagaaaaatcatgtaacgacgtagcccttgatcaaaaagtcagtctttcaaaggagataaaacttacatacttcattcattcaattaactcattcayttatccattattcataaagcgtttattaatttatatttagagaaatgtaacatgaatgaaatcaaaagacccacagttgactggggaaagcagtgcctggcacataaagcactcaatatttgttaaccattgtttactagaaaatttaaaagttaatatcacaaagagcatctacaaatgaataaaaaggagaaaacgctctggtagaaaattaagcagggattatgaacaggcaatttataaaggagaaatcctaattttcaatcaacaggtaaaaatatgctcagcttcactagaagtcggtggaaaatgatcttatttaagcaataagatcacacatcaggttagcataattaaaagcgtcagtgaggaaggggagaaatagttgccacagctttgggaaaagaaatctggtggtaattatcaaaaataaaagtacacatatcctctttgggcttgtggttcattttggctggaactcaaaggtgtgtgtgtgagtttattgggaaaggtatacagagt

SEQ ID NO: 96222 - DNA, 636 bp, Homo sapiens
agagctacaaaagaatacagaaaaatcatgtaacgacgtagcccttgatcaaaaagtcagtctttcaaaggagataaaacttacatacttcattcattcaattaactcattcacttatccattattcataaagcgtttattaatttatatttagaraaatgtaacatgaatgaaatcaaaagacccacagttgactggggaaagcagtgcctggcacataaagcactcaatatttgttaaccattgtttactagaaaatttaaaagttaatatcacaaagagcatctacaaatgaataaaaaggagaaaacgctctggtagaaaattaagcagggattatgaacaggcaatttataaaggagaaatcctaattttcaatcaacaggtaaaaatatgctcagcttcactagaagtcggtggaaaatgatcttatttaagcaataagatcacacatcaggttagcataattaaaagcgtcagtgaggaaggggagaaatagttgccacagctttgggaaaagaaatctggtggtaattatcaaaaataaaagtacacatatcctctttgggcttgtggttcattttggctggaactcaaaggtgtgtgtgtgagtttattgggaaaggtatacagagt

SEQ ID NO: 96223 - DNA, 376 bp, Homo sapiens
attcactatcacaagaatagtatgggggtaatcacccccatgatttattacctcctactcgcaccctcccaggacatgtgggcattacaggaactacaattcaagatgacatttgagtgcggacacagtcaaaccatatcaatacatttagctattgccaaaacaatccatcagctgatcccagcccaagttgccaacatgcataattatgastgaaaaataattgttgttataaaccactacattttggggtgttttgttaggctgaaagtgattaaaggagaaggatcattttccttctaaggttataacccagaatctgcacagatcccttctctcgtgccactggtgagaatttagttatatgtctatatta

SEQ ID NO: 96224 - DNA, 376 bp, Homo sapiens
attcactatcacaagaatagtatgggggtaatcacccccatgatttattacctcctactcgcaccctcccaggacatgtgggcattacaggaactacaattcaagatgacatttgagtgcggacacagtcaaaccatatcaatacatttagctattgccaaaacaatccatcagctgatcccagcccaagttgccaacatgcataattatgactgaaaaataattgttgttataaaccactacattttggggtgttttgttaggctgaaagtgattaarggagaaggatcattttccttctaaggttataacccagaatctgcacagatcccttctctcgtgccactggtgagaatttagttatatgtctatatta

SEQ ID NO: 96225 - DNA, 376 bp, Homo sapiens
attcactatcacaagaatagtatgggggtaatcacccccatgatttattacctcctactcgcaccctcccaggacatgtgggcattacaggaactacaattcaagatgacatttgagtgcggacacagtcaaaccatatcaatacatttagctattgccaaaacaatccatcagctgatcccagcccaagttgccaacatgcataattatgactgaaaaataattgttgttataaaccactacattttggggtgttttgttaggctgaaagtgattaaaggagaaggatcattttccttctaaggttataacccagaatctgcacagatcccttctctcgtgccaytggtgagaatttagttatatgtctatatta

SEQ ID NO: 96226 - DNA, 521 bp, Homo sapiens
cttaagtattctgaacacacacatacacacacactctcacacacgataastatatgaagtgatagacataataattagcttgactcggtaataatttcacaatccatacatatattaaaacctcgagttggccaggcacggtggctcacccctgtaatcccagcactttgggaggctgaggtgggtggatcactaggtcaagagatcgagaccatcctggccaatatggtgaagccctgtctctactaaaaatacaaaaattagctgggtgtggtggcatgcacctgtagtcccagctacttgggaggctgaggcagaagaatcgcttgaacccaggaggtggaggttgcagtgagccgagatcacaccgctatactccagcctggtgacagagggagactccatctcaaaaaacaaacaaacgaacaagcaagcaaaaaaccttatgttgtatataccttgaacaggactaattattctccactaaggaggcaaagtcttccttagtattcaacccagtg

SEQ ID NO: 96227 - DNA, 560 bp, Homo sapiens
cctctgctgcttagctgaagctctgaaccaaactgggaggaagcggcagggagatcaggggtgtaaagactgctgtactccaggcagcccccattcaagcctcccatggctccttgctgcccacagatacccaggcccaggcccactgcctcacttgcccttcccagtggcatccccaacactcctgggccaacctgagaaagcaacacacacatctagaaacaaactctcatgtgttgatgttcactaccccgctgtgttaagcttttcacttctattgttatctttttaaatcctcgcgacagccctgygaagctgagtctattatcgtccccatttaatggatgcaaacacagaggctcaggtcacactgcaagtaaggagtggagccagggtgtgcaaaccttgtcttgtctgactccaaggccatgcacttgttataactaatgggagttccactgtatcagtcacagtccggtcaaggaaacagaagccattctaggtccttcaaatagaggagctttcacatagtgaattgcttaccaggtgtggtgacagta

SEQ ID NO: 96228 - DNA, 628 bp, Homo sapiens
ctccctgtacttgttgaataggagtggtgacagtgggcatcccttgttgttccagtttttagatgaaaggttttcaaccttyccctattcagtatggtgttcgtcatatatggcctttattattttgaggtgtgattcttctatgctgagtttcttgagagtttttgtcataaagggatttttatttttgtcaaatgctttttttgcatctattgatggtcatatgttttttcctttattctgttaatgtgatgcatcaagtttattgatttgcaaatatagagccatccttgcaaccctaagataaatctcactttatcatggtgtgttattttttcttaacctgttgttggattcggtctgctagtatttgttgaggattttcacttctgtgttcatcagggatatcagcctgtagttttctttttgttgtgtccttctctcatcttggtattagagtcatgctagcctcaaagaatgagttacagagaattccctccacttccgttttttggaatagtttgaggaagttcgatgttggttcttttttacatctttaggagaattcagcagtgaattcatctggtcctgagtttttctttgttggcagaccttattactgcttctt

SEQ ID NO: 96229 - DNA, 534 bp, Homo sapiens
gtctctgggcgtacttcagccttaggactcatctaggttttgccatccttgtggtctagaatgcctttcaaatttacttgaaagcacagaacacggcagccctgggtggcaaggtttgccggcactcaagtttgaacctctagaattggcgattcccctatggctagggctggtttaaatgctccctctgcgggcaggcatcacctcaagttggtccagtttttctttcagctctaacaggacagcactgagttcaatccctcaaaattgctgtattttccacctctcagcatccagagaagctctctgatcacacaagtgatrctgggggtcggggaggtatggtgttgagactcaagactgtttttgctatcttctcagtgcctctttcagtgatatgaagttaaaacctaatactatgagtactcacctgatttttggttcttacgaaagtgttttatgtgtgtgtgtgtgtgtaaatacttgttaaatttgtgtttttctgggggtggaggtaggtgatcagtggagagt

SEQ ID NO: 96230 - DNA, 569 bp, Homo sapiens
gctttcaacttttccccatttggtaggatgttggctgtgggtttgacttttagtttctattttattattattattattttgagacggattcccactctgttgcccaggctggagtacagtgcgcgatctcgactcactgcaacctccgcctctcaggttcaagcaattctctgcctcagcctcccgagtagctgggattacaggcacccactaccatgcctggctaatttttgtatttttagtagagacggggtttcaccatcttggccaggctggtcttgaactcctgaccttgtgatccatccgccttggcctaccaaaatgctgggattacaagtacacgagccccaccgcacctggccgtgacttttattacattgaagtatgtcctttctatgcctgtttagttgagggtttttatcacaaaaggatgctggattttatcaaatgctttttctgcatctattgagatgatcgtatgayttttgtttttaattctgtttatgtgtctatctgtgctctttcagactcttgatgtaggcatttaatgctatgaactttcctcttag

SEQ ID NO: 96231 - DNA, 253 bp, Homo sapiens
acagcaaggccagtctcactcccgccatgctctccatagagctaaatttatatccaggcctctggtgtgcagggctgagatcttgcctcaggctacaagcctccttgctgagaaagcaagcaggtctttcaggtcttgactctccctgcctgccatggcttctgtgctcctctctacactttctgttcaccctgctagcccacagatkctgcccaagaaaattcgcactttgttgaaattattacatagttca

SEQ ID NO: 96232 - DNA, 600 bp, Homo sapiens
tacaaagaggactgagttgcctgggatctctcatgaggtggtgtcaaagccaggaccagaactcagggatgcacactcagactcaatgctttcaaacaatatgttatgaggagctaatttattttttttccttttttcttttgtttgttttctattcatcacaatttaatgctttaaattaaatgaaaatatattcacatatgttaaatacaagtctacattttaccactgttagatttaagacataaagatactttatgtcttatgcttattctcarttctgtacttactacactgcagaccagtaacagtttgtggatcagcaccaatctgtaggcagcactttgagtagcacagctttgcatgtcctaaccaaccactcttgcaggttcatgagatgcttctccatagcaagttgatgcttgacttgcataagcacttacaaagcagactgctgccatctccaaaggcgatcctttcttctttggatataaacctcaccatgaactcacttcctctgagaagcccagaaaaagagatactgaccctagaagtgactttagccatagaacagaaggcccctcatgctgagcatgttga

SEQ ID NO: 96233 - DNA, 475 bp, Homo sapiens
acctcaattgagcaagaataaagaagatttaaataacgttcttaagatttatctgacagataggcctgtacccaatagagaatatattctcatttaaatgtatgttggacattaataaaaattgactacaatgtaaatataaaattccaaaacyttgatacatataagtgacatttatgtaacaaaatcaaataacatttgtaatccacagaaagataggatctctcatgtaaatgtaggtcagggtattgttagctgatctaggttagcctctttgagggtaactaaaattacttggttttgctccacatatttcattcaccagggagctaactcaggcatgttctcattataatagcagaatgtgagagagtcagaagaagacatgcaatgccacttgaggctaggctgggaactgatacactgttcatttctatcttattttattggccaaaccaagataaaggtcaaacca

SEQ ID NO: 96234 - DNA, 475 bp, Homo sapiens
acctcaattgagcaagaataaagaagatttaaataacgttcttaagatttatctgacagataggcctgtacccaatagagaatatattctcatttaaatgtatgttggacattaataaaaattgactacaatgtaaatataaaattccaaaaccttgatacatataagtgacatttatgtaacaaaatcaaataacatttgtaatccacagaaagataggatctctcatgtaaatgtaggtcagggtattgttagctgatctaggttagcctctttgagggtaactaaaattacttggttttgctccacatatttcattcaccagggagctaactcaggcatgttytcattataatagcagaatgtgagagagtcagaagaagacatgcaatgccacttgaggctaggctgggaactgatacactgttcatttctatcttattttattggccaaaccaagataaaggtcaaacca

SEQ ID NO: 96235 - DNA, 475 bp, Homo sapiens
acctcaattgagcaagaataaagaagatttaaataacgttcttaagatttatctgacagataggcctgtacccaatagagaatatattctcatttaaatgtatgttggacattaataaaaattgactacaatgtaaatataaaattccaaaaccttgatacatataagtgacatttatgtaacaaaatcaaataacatttgtaatccacagaaagataggatctctcatgtaaatgtaggtcagggtattgttagctgatctaggttagcctctttgagggtaactaaaattacttggttttgctccacatatttcattcaccagggagctaactcaggcatgttctcattataatagcagaatgtgagagagtcagaagaagacrtgcaatgccacttgaggctaggctgggaactgatacactgttcatttctatcttattttattggccaaaccaagataaaggtcaaacca

SEQ ID NO: 96236 - DNA, 418 bp, Homo sapiens
gtattcaaatttctgttctgtcattttgagtaaaacaatataagaaaaatgaaaagtgtttacaaagattttaagattggctgaagtttgatgctggcattagatctgaatggaaatagctaacataaaaatgtatctcaaaacagcagtggataccaacattttatggaaggagtttcttttccaatagaaaaaggaatatcattggattacatgtataaaatgaaagcatgatgaattttagtgtggtaaaattgaagttttctttatacagctttaagtatgtattaactttcactttacatcagcataaaaaaattttaaagcttcaattttaycttcattatagaaatacatgataaaaacctcctttctctttattcttactatcatttcttacatctggtagggaataaac

SEQ ID NO: 96237 - DNA, 603 bp, Homo sapiens
atccatttcttctagattatctgattggttgctgttcatagtagctttttatgatcttttttttacttctgtggtatcarttgtaatgtttcctctttcatttctggttttatttgagtcttctgtctttttttatagtttagggaaaggtttgtgaattttgcttatcttttcaaaaaatccagttctcaattgtgtattgatttttttctgctgttttctagtctcaatttcacttatttctgcactgatctttattgtttcttttattctgctcacttggggttttagtttgttctttccctagttgcttgagatgtaaagttaggttgcttcttgtgatttttccattttcatattgtgttatattttcatttttatttgtcccaagatattttttgttttctctgtgatttcttctttggctcattgttattcaggagcaggttgtttaatttccacatatttgtgcattttgcaagatttctcctgttgttattttctagtttcataccattgtgattagaacagacacttgatataatttcagtcttcttatgttgtgctgtaacatagaatctatcctgcacaatgttccatgtg

SEQ ID NO: 96238 - DNA, 582 bp, Homo sapiens
atacaaatagactgaaagtgaagggggtggaaaaagatatttcatgcaagtggaaaccaaaagagagcaggagtagctatactgatatragataaactacaaatcaaagactataaaaagagacaaagaaagtcactatgtaatgataaagcgctcagttcagcaagaggagatgccaattataaatatctatgcatccaacacttgagctcccaagtctcccaagtatttaaagcaaacaatagtggatctaaaaggagagatagactgaatacaatattaattaggggactttaacaccctgctctcagcaatggccagatctttcagacagaaaatcaacaaggaaacttcaaagttaaactacacactagatcaaataggcctaactggcatttacgggacatttcactaactatctaactgttacagaattcacattattttcatcagcacatagaacattcttcagaacagaccacatcttaagtcccaaaaccagtcagaataaattcaaaaaagtttatatcacatcaagcatttgttctgaccacaatggaataaaactacaataaatgaata

SEQ ID NO: 96239 - DNA, 604 bp, Homo sapiens
gcaatagtcatcctacagtgacatagaacagaacttatttctactaactataattttgtatagttactagattaataaatctctcccattaatcttttgaaaagcatatttataattgcccaaattataaattggcaattataaataaagctgctataaacattagcatacaggttttttgaagacataagttttcaacttatttgattaagtactaaaaaagtgactgaatggtaagaccatttcrttttgtaaaaaaccatgaaaaactttcaaagtgactgtaccattttggatttccagcagaaataaacgagagttcctgttactctatatcctcatcagcacttggtattgtcagctttttttgtttgtttgttttaaacttcagccattctaataggtatgcagtagtaacttgttattttaatttgcaatttcctaatgactatgatgttgagcatcttttcacatgcttactagttttctgtgtatcttttttagtgaggtgtttgctcagagttttgcccatttttaatagagttgtttgtttttatattgttgagttttttaaagacttatttgtgtattttgcatacaagtc

SEQ ID NO: 96240 - DNA, 593 bp, Homo sapiens
gtttacaattgtctgtggctgttgggtatgaggtttcaaattcctctatcatccttgtttgtgtctctcttgttttgggtttgacactcctccttaaatagggtctgagcacttcgtagttctttcaaccataatcctctgttatgatacagcagccctgtgatgtggcataagattgaaggagtagtgtatcctacgatcagatatcagtcttttaatgagactgtgcccctaggctgtgacctccccaagtgcttctgagtcccctcatcccctcccaccaccacttargtgagtcagggagactactaggggctagagttgggtatttccttcctccttgctattcaagctctggtgaagtagtttcctttaaagtaaagaatagaatgctatggatgtatttagaatggttatacttctcctccccctgaagagaatgtgaaggtgtttactctggtcttcactgggagaacctatcagagctcttgcaggtaaaactcacaaaagtgtgagggcttttttaagactgggcaccctggagtttttcactctcatgccaatcctcacttagtgtctagccattcatcaat

SEQ ID NO: 96241 - DNA, 579 bp, Homo sapiens
gtggctgttgggtatgaggtttcaaattcctctatcatccttgtttgtgtctctcttgttttgggtttgacactcctccttaaatagggtctgagcacttcgtagttctttcaaccataatcctctgttatgatacagcagccctgtgatgtggcataagattgaaggagtagtgtatcctacgatcagatatcagtcttttaatgagactgtgcccctaggctgtgacctccccaagtgcttctgagtcccctcatcccctcccaccaccacttaggtgagtcagggagactactaggggctagagttgggtatttccttcctccttgctattcaagctctggtgaagtagtttcctttaaagtaaagaatagaatgctatggatgtatttagaatggttatacttctcctccccctgaagagaatgtgaaggtgtttactctggtcttcactgggagaacctatcagagctcttgcaggtaaaactcacaaaagtgtgagggcttttttaagactgggyaccctggagtttttcactctcatgccaatcctcacttagtgtctagccattcatcaat

SEQ ID NO: 96242 - DNA, 547 bp, Homo sapiens
gcagccagtggccagctttgtaaatttacataggtcatggtgagggttctgggtttactcctagtgagatgacaagccatcttaagggcagtgagtatggaagtgatatgttccaatctcaatatttttcaaagctcattctgtctagtgggtgaagagtggattgtatgtgagaaatgatggaagcagggatgccagttgagaggactttgcagtcaccaagtgaagcatgatgtagtaggaactagaatggtatgacattgaatggctggtaaagggttgggatcaggaaacgttatgaagttagagctatcaggatttgctgatgtactggaggtagaagaggtagagacctggtaaaagtggcttccaaatttttaacctgagcaactggagaaatagatttgctatgtattcatatgggaagcaggtttgaggttagggaaatcaggagttcaattttgracatgttaaatttaagctgtctcatatactaagaatttgaagacaaagacaaagtagttagtgggataaaagtggttgtgat

SEQ ID NO: 96243 - DNA, 574 bp, Homo sapiens
acatccatttcttgaatgaagactttaacggctaaccaaatttgtggttgacatgaaggaacagtgataggttgagcagcctgataggaggtcccataggaaagggaaagcaggcacaaatgagttaaaggtgtgtgcaaggttaaaatcaacaaaggatggtggaataccttggagcttagcacagcagtgagctgttatcatccttgtgcctgaagggccgaggggagagagttattatcagatyccacaaagagatcaggaacacagctgctgccaacctgtaacccaccaaggcaggagatgaagaaatatggtgatttcactctcctgctaatgcatcctgttgagtaagcccaattgaagccagagggaaagaagctggttgatacggtccataagctgagcctggttggagaagagtgtagaatggatcagaaagagtagatggaacacacaggaaaagttggttgctgcttttgactgcacagtatccttgcggatagaaccctgattttgcttttggggaatgactgctccttgactcttgggttcttgagttttgggtggggtg

SEQ ID NO: 96244 - DNA, 589 bp, Homo sapiens
ctaacacggtgaaaccccgtctctactaaaaaatgcaaaaaattagccgggcatggtggtgggcgcctgtagtcccagctactcgggaggctgaggcaggagaatggcatgaaccctggaggcagagcgtgcagtgagcctagatcgcgccactgcactccagcctgggcggagtctcaaaaaaaaaaaaaaacccttaaaaattccttatacacaagcacattatacaaaagtggggcctaatatgccctttctcaataaatccacatcaccatttttctagtattggaacacattatcttgagaactgtaataagtatttgccttatattttggggagccatgatgtttgaaaattcaaaaattcatatccttgatcaccagaattagaagaagaatgccagagtttgtccccagtgaaggacagtgggaactgagttgactgaaggaagagaagatacccagctcttgtctcatgtttatttggggrcatgtgatcaatcagtggaacactgaacaaaattgccggtaatattcaattgggtcctctctttctctctcagaataggttagctgtgtgtgcaatgca

SEQ ID NO: 96245 - DNA, 509 bp, Homo sapiens
cctgctaaagctaaggtagattctaaatttttaatatttgatatcacaaaaagtaattcaatcttagcttttgcagacaaataagttcaaaaagtaatatcctagaaggagatctttttaattactctaacaggttaagtgtataaccaccacacttttctgccctggaaggccctaaaggtaagttttttaattatagcctagagcattattacttacagcttagaaaacagagggaaaaaaaaaaaggcatgatcttaaagcaattataacttttgtgtcatttctccaagtctttttatatagtatgctttgacaaagttataatcagtatatmtataactgtttcctgcttttcacctacatcttgggcattctgtcatgtgttattacatcgtctgcatagtttctgtaactacacagattctacataatccttcttaatggttttatggtgaaagttcaagcaagggagcaagtcatacattacataaacatttccccgttga

SEQ ID NO: 96246 - DNA, 579 bp, Homo sapiens
atgttgaaggtggagccaaatgggaggtatttgggtcatgggggcagatcccttttagcttggtgctattcttgcaattattagtgagtattcacgagatctgggtaagtaagtggcacctttctgactgctcctgctcctgctttaccttctgccgtgagtaaaagctccttgaggcttccccagaagctgggcagatgctggagccatgcttgtacaacctgcagaactattagcaaattaaacctcttttctttatgaattacccagtctcaggtatttattgcaatacaacaatgccttactagtaatgatcaaaagctacaaaataaacaccatgcttggaagactttgaccaagaatattaaaatagcctctattattaagcagctactatatgccagtattgtacttagtgttttacacaatttagctcatctaaaactcagtacatttggtttacctaggagyaatagaatgttcaattaaaagtggcttaaatactgaataaatttagtgtttcacataattccatgatgttattggctcagtgatgtcaaaaaggactccttcacttac

SEQ ID NO: 96247 - DNA, 583 bp, Homo sapiens
acaggaacaaaacaagaatgcctacacatgacctattcaacattatactggaggtccctgcaaatttaattaggcaagaaaaagaaaaggacaatagaaagacaaatttgtcattacttatagaaagtccaaaagaatctacagataaattactaaactttaaaaaagatttttgcaaggttgaatagaaaaatcaatttaaaaagtatccccacatacgaacaaaaaattaaaaacttaaaagatatcatttatgatagcatcaaaaacaaaaagatataagwttaacaaaatatatgtatgcagtatttctatgaagaaaattttaagactttattcaaagatacaatggaaagacaacattaactcaccaaaaaatgcactactataaagaatttgttcacagatacaatacaatcccaatcaaaatcctaacaattttgttttgttgaaattctaaaatttgtataaaagtgcaaagaactgatcacagccaaaatcttgaagaacaaggtataaaaagacttattttaccaaatatcaagacttttaaaagatttagtagttaagacagtgtgttact

SEQ ID NO: 96248 - DNA, 580 bp, Homo sapiens
tatacaggcttctgcttccggggaggcctcaggaaacttacaatcacggtggaaggcaaaggggaaggaggcacgtcttacatggccagagaagaaggatgaaagtgaagggggaggtgctacacacttttaaacaaccaggtctaatgagaacacactcactatcatgagaatagcaaggggaaattcatccccatgatccaatcacctcccaccaggcccctcctccaacactgggsattataattccatatgagattttggtggggacacagatccagaccatatcagacagttctacattttgcagctatgttcccaccttgcgacacaacttctccaacagcaagggcagaataattgctggacttttccaaacatcacactggaaagcaccaggaggttaaatgactagctcaaagcaccaagcctgacagctcttaatccaagattaaagccaagtgtggggtttacaggtaggtgtgcgcaaagctcagcttctggaatttcacatttgtttgtggagtaacagcacaaagcctttgtttatatgactttaaaagaattaatctcattcatt

SEQ ID NO: 96249 - DNA, 535 bp, Homo sapiens
ttcaatcaaatgttcgcctccaccatgccaccaaagccatgttgctcaatccagtagtcatttctcacttctcaactaacctggcctctctgtacttatgggcacagtctctcagcatcaccattatcaggcactctgcccctgcctcttccggcaggctggacattgaagatcaggctggtatgcaagagaatgatgcaaggatataacacagtgtgaattgagcatcagcagaatctgctagaactatttttggatggaatcatttaggcaaaaggcaacagaattttgcatttagtcmatccaagctttcttccaacacaaaattgttccaagactaacatctctaacttggtctcatcttggcattaaataacctaagtgctaaaccccttttctttttggcttccctcaaggaaacaattccatcatgaatacacccagcctgactttcagaatttaaaaatgtttcatattagtctcctagattttcacttacatcttagaagattctttagaaattctcacagcccta

SEQ ID NO: 96250 - DNA, 512 bp, Homo sapiens
tattttcactttattcttagatgatattttagataggttaacagttatctcccttcagtcttttgaagatattatttcattgctgtctagcctctactgttgctgagtattgataggctgtcaaattgccattactttataaataatgtgtcgtttctctctcattgcttttaagatttttcattttgtcattggkgttctgcagtttctctgatacatcaaagcatgagtttattttttattttacacagaattagttgtgtttattcaagaaaagtttcatatctttcatcaattttgagaaattgtcagtcattattactttgaataatgcttcttccttattctttctatcacctctttctggatcttctcactctacgctcacatttctcattctttttttttccccttcaaccctaaatgctatattctatttagtttccttagctgtctctgatgctacatctaatctgctctttaatccaaattattgcatttttaatttctat

SEQ ID NO: 96251 - DNA, 521 bp, Homo sapiens
tgctttacctatagcaagaactaatactcacagttactccttctctaacttcatccaattcaactctctcctgagttggaataagattattgaatccaaaagtatcaaattctagaaagattaaagaagaagcagataagcaataatatagtgtgtcttggaactccagggaggtttcagctaactgacgctttcagacccaggatcaaactcagtcatgctctagcagaccttctcattgggctctacgtaatttagaataatccccaagtaaatgaaacacatatttgaaaatgtcttgggaaggtatatggaaaagtttgaatggtacatggtagtaaatatactgaaggaggaaaaaratacagttacctatcagctgcagccataccccaaaataagcaagtgaaagtcctatgtagccaggaagaatctcaggtgggtttaatgacaccaaatcatcaagaagatacaaggaggaagagaaggagagggagagggaggaggaggagaaaaggagc

SEQ ID NO: 96252 - DNA, 539 bp, Homo sapiens
gtctgcctatatatcctcccacttcaggggctactgggtggctatccagaaactaaagcatcccttctttctttgatttcacagggcccacacagcctgacctctctcaataaggggatttcactctttttttggtctatcccatttgcccagatgacccagttcagctgctatgttcctttccatgttttgtgtgctctcaattggtcatgaaactttaaaacatgagactcagaaaaaaaaacctgtctttgcatgactgtgtttgtgatgcttggagactcctaaagcctgtgacctttcttggtctcgtctgagggttgtgctgtgtcttaacccaagtctagagctactgacccagaatgtcttggggttaggattggasatggggtctcaggatctgtgttaacaagtttcaggggtgactataatgcccagtcagggttaaaatcactgttaacaataggggaggtttttctacttagtttttatttctcagcaagatgatattttaaaaagcaaactgcaggagaatggaa

SEQ ID NO: 96253 - DNA, 440 bp, Homo sapiens
tcttctcttttgggtttcagaagcatggaacaaattaatcttatgaactcttacttgagccaatgccaggagaactttatcacactaggccccccaaaagacctgcccttggccctgaatgcattcctcaatcttgttttgctttcctgagaaatctttggtaggaatttttatatacttcaggtgtgaatagtgtttcatctctagtattgccaaactgagacctgccttggcacagtaggcactcaataaatatttctccaacattatctatccttcaggcctttgagaggattgggctagaatctcaatgctctrattttgcgtatcagaacaacattatgcccaaagtaaaactaaaaagcaaaatctctaaatgcattgctgcctcaccaaacagaagtccaaattcaattcaattctttcttaatcaagctgaa

SEQ ID NO: 96254 - DNA, 424 bp, Homo sapiens
gaggatcaaataaggcagtgcttgtaaagggtctagcatgcagcctaatatgtaatattaagtatttattgacatccttttattgataatattttaataactagttcatctctgaaattatgctttattcaatcatttaagttagggacaagtattttaatactttccatcctggtgtttgctaatttgctataaacttgtcaaaatgaatgatgaggtgatgaatagacgggtaagtggatgawcccaacgcgatgttagtaggggggctttcgtgggaagctgggaacatgaagcaccacattccccacaattggccattcctacccaaaagtgccctccacctcctcctcccatccacaccccgcgccaaccaacatgaaactaccccctaacatataaacacatgggcaagcagaagaat

SEQ ID NO: 96255 - DNA, 439 bp, Homo sapiens
cgttgttgtttgggaggatcaaataaggcagtgcttgtaaagggtctagcatgcagcctaatatgtaatattaagtatttattgacatccttttattgataatattttaataactagttcatctctgaaattatgctttattcaatcatttaagttagggacaagtattttaatactttccatcctggtgtttgctaatttgctataaacttgtcaaaatgaatgatgaggtgatgaatagacgggtaagtggatgatcccaacgcgatgttagtaggggggctttcgtgggaagctgggaacatgamgcaccacattccccacaattggccattcctacccaaaagtgccctccacctcctcctcccatccacaccccgcgccaaccaacatgaaactaccccctaacatataaacacatgggcaagcagaagaattc

SEQ ID NO: 96256 - DNA, 561 bp, Homo sapiens
tgacctttgcttaaattaaaatgcctattataggatccaagtacaagaattcatagacatatgtggacataatgaaagatttaataataattaatgtaataaaggacaatgcagatttaaaagcttaagagcataagtaaaaatgattttgatcaatatttatcttgaaaattcaaaggcaaatctatggtcactctaggagttttaattttgcaagaaatttggaatgtagaatgatgagagatctacaaaaacattagaaatgtcacactaggctagatcaatggactattcagcctagggttttattatctgacagcagcagcaagtgatattttgtggaacaagatagtacataacctccattacattgattttaaaaggttaacagtgtatcaggaattgttctttcccttaataattcattatagatttaacttccatgaacatatgtattctttatacgtatcatctaaacctttcttcagcttacttacatatccrtcttgcaaagcttctcaaggtaacaagctccatatttttattacagctgagtaaatg

SEQ ID NO: 96257 - DNA, 533 bp, Homo sapiens
agtatacttactgtaacagagcttgatttcgttctgtttcatcttgagactgctaggaaaaaaaaaagttttttccaactgataagtgttaattcaatgcaacaagctaaaaaaattaacatttaaagtaatttttgtgttattctttcttagcttctttttatggtggtaaaatacacataaaatttactatctatttactatctgtacatttttaagtgtacagttctctggcattaagtatactcacactgttgtacaaccaagaccatcatgaacttccagaactttttcattttcccaaagtgaaactccatgctcattaaacactaactccccactcccctctccacaacccatggcagmcaccattctgctttctgtctttattgatttactactctagaaacatcatataagagatacaaaattttaatcattctgtgactagtttatttcacttagtattcaaggtttatctatgttgtggcatgtatctgcattttcttccattttaagactgaataatattc

SEQ ID NO: 96258 - DNA, 598 bp, Homo sapiens
acacattcttagagtttatttttaactcaatttaattaggacaagtaaatatatgtcatgtagcactcataagagaaaaacggattatcacattatattaatgaggctaggcattcaaagtgtgggacaattgtcttacaatcaaaacctcaggctctgtactatataatttaagatttttccaaggtcatcatatgatatatttgtggctcagcctgagtatacagtctgcacttttctgtttgagaaccacagsctccggcacttaaagcaccagaggagccaaagcaaaatttaaaaatctaaatagacattaaagaacaaagaaaaagtaagaaggcaaaattgcaataaatctcattataaataaatactagtattttatcaaggaaggccaacctcactatcacactatcatgggcacatacgtgacacacatacacactctgttgtatagcttaaattagacaaatgtaattctgaaaacattgtgcaactgcaacttttcttatgaggtttactacttggtaactgcagctgtgttgcataattgatcatgaaatatttataaatttgggggatttgatttccaaaactc

SEQ ID NO: 96259 - DNA, 598 bp, Homo sapiens
acacattcttagagtttatttttaactcaatttaattaggacaagtaaatatatgtcatgtagcactcataagagaaaaacggattatcacattatattaatgaggctaggcattcaaagtgtgggacaattgtcttacaatcaaaacctcaggctctgtactatataatttaagatttttccaaggtcatcatatgatatatttgtggctcagcctgagtatacagtctgcacttttctgtttgagaaccacagcctccrgcacttaaagcaccagaggagccaaagcaaaatttaaaaatctaaatagacattaaagaacaaagaaaaagtaagaaggcaaaattgcaataaatctcattataaataaatactagtattttatcaaggaaggccaacctcactatcacactatcatgggcacatacgtgacacacatacacactctgttgtatagcttaaattagacaaatgtaattctgaaaacattgtgcaactgcaacttttcttatgaggtttactacttggtaactgcagctgtgttgcataattgatcatgaaatatttataaatttgggggatttgatttccaaaactc

SEQ ID NO: 96260 - DNA, 606 bp, Homo sapiens
gcagtgtgggatgagctcccaaactgagatctgaaagaatgcagggtgcctctttttatgatcgaaaatttatggatttggttcagtgagccacctccattacccaccccactcccattccccctacatacacatcctaccttgggcattttggaagggtagctaggtaagagcactctctcaatgtcaaggaggcaggagctgagctggtagcaagcactcggtgggcttcagctggtgggaatcactagtgccagggaaatgcacatggaaagcatgagcaagtaattcactaaaacctttagcttagatgtggggtgggaatctgsaaagtgggagggagaaaggaggggagagagaaggggacactaattaatgggctccccctggtccttgaccacacactcagcaccctccaacaactccttagcaaatagcaggaagaggtacctctctccacacaaacccaggccagtgtggggaaatgggcttttcctctgcctcagtgcaggagtgctggctggggctgaactgcaggtgtgagctctgctccatgactcactgagagtttgtgggtctgaggcttggtatccctaaccgggaact

SEQ ID NO: 96261 - DNA, 547 bp, Homo sapiens
gtgtctatgtatgaacctttattcttcatgaagtagctggaactcttcattaattttcattttattttcttgcaatgatgaccacaaatctctttctcccagaagaatgtaaggttcatgagtaagaaacttgtctattcattctctgctatagctccagtgcctacaagagcacatattcaatactgtatcaaagatagaggaaacctagatcttagacactcaacaaatacatgataaagaacaactgttttcaaaggataatagagacaggtgtgtaacagctcttaaatttaaatatacattaaatgaagaactggacatttgtaaaaarctcagattcttagtagatcctcagagattttggctgtcagtctggggtagagcccaggaatgtgcattttatctagcagccttttacatcacccccaatactgccttttcacaaatgaggctgaggcaagtggtctgtttaacagcactttgagaaacactgccctagcatctgctttttatttatatgtactgagtaactaatagactgaac

SEQ ID NO: 96262 - DNA, 577 bp, Homo sapiens
gtttaagggcacacagtaagtgtcagggctgatattcaagctgggatctatcttatggaaaggccttggctctcgtattacctctcactaatcatcttcagaagtaaatgtaagaagtttaaattataaaaatttcctattaactttagatcaagatggaaggttcctgtaattcctgcctagcttgaatgtttgatgattctattgaacaagatactttggttcgacctatggtcttgctcataagatacgtgatattgaacaagtcatttcatctttctcaaacttaactacacatctagaaaatacaagaattgaacagaaatctccaaacagaaaactggtatgattatctataagatacaatattatattattcttattctaccaatattctcaaaattagattttagccaaaacatgttgactgcctcatttaaaaatatgttcctcttttggaatgcamatgattctaatagttgtcatttgttgtttgagtctcttatatgattcaaaataatataaaatttcaagtcactcaaaaatggcgatttgagaatatatgttaaatatgaaa

SEQ ID NO: 96263 - DNA, 540 bp, Homo sapiens
aaccaaaaccttaacgcagtatctatatatacatatatatatataccagaaagttagaaatggaaaagatgmgacaatgccaattgttggcaaggaagaatgtggaacaactcacatgtactttgaaaaactgcttggcattatcctctgaaattgaatgtatgtatacatattagtcattaattctattcctgtgtatacatgcctaactaccaaccaccaacattcagtcaccaaaagaaacacatgcaaatgttcaccatcaaaaatatgtactgtataactgtcatagaagcaccatttgtaatagccacaaaccagaaaataccccgttattcatcaataatataatggatacataattggtagtatattcaaacagaatactatgtaacaaaaagaatgaacaacagctacacacagcaacatggataaatctcataaacatgatgttgagcaaaaagatcaaacaaaagagtaaataccgtgtgtttctatttttataattggatagacacagagatgcaccactcagatact

SEQ ID NO: 96264 - DNA, 540 bp, Homo sapiens
aaccaaaaccttaacgcagtatctatatatacatatatatatataccagaaagttagaaatggaaaagatgagacaatgccaattgttggcaaggaagaatgtggaacaactcacatgtactttgaaaaactgcttggcattatcctctgaaattgaatgtatgtatacatattagtcattaattctattcctgtgtatacatgcctaactaccaaccaccaacattcagtcaccaaaagaaacacatgcaaatgttcaccatcaaaaatatgtactgtataactgtcatagaagcaccatttgtaatagccacaaaccagaaaataccccgttattcatcaayaatataatggatacataattggtagtatattcaaacagaatactatgtaacaaaaagaatgaacaacagctacacacagcaacatggataaatctcataaacatgatgttgagcaaaaagatcaaacaaaagagtaaataccgtgtgtttctatttttataattggatagacacagagatgcaccactcagatact

SEQ ID NO: 96265 - DNA, 540 bp, Homo sapiens
aaccaaaaccttaacgcagtatctatatatacatatatatatataccagaaagttagaaatggaaaagatgagacaatgccaattgttggcaaggaagaatgtggaacaactcacatgtactttgaaaaactgcttggcattatcctctgaaattgaatgtatgtatacatattagtcattaattctattcctgtgtatacatgcctaactaccaaccaccaacattcagtcaccaaaagaaacacatgcaaatgttcaccatcaaaaatatgtactgtataactgtcatagaagcaccatttgtaatagccacaaaccagaaaataccccgttattcatcaataatataatggatacataattggtagtatattcaaacagaatactatgtaacaaaaagaatgaacaacagctacacacagcaacatggataaatctcataarcatgatgttgagcaaaaagatcaaacaaaagagtaaataccgtgtgtttctatttttataattggatagacacagagatgcaccactcagatact

SEQ ID NO: 96266 - DNA, 540 bp, Homo sapiens
aaccaaaaccttaacgcagtatctatatatacatatatatatataccagaaagttagaaatggaaaagatgagacaatgccaattgttggcaaggaagaatgtggaacaactcacatgtactttgaaaaactgcttggcattatcctctgaaattgaatgtatgtatacatattagtcattaattctattcctgtgtatacatgcctaactaccaaccaccaacattcagtcaccaaaagaaacacatgcaaatgttcaccatcaaaaatatgtactgtataactgtcatagaagcaccatttgtaatagccacaaaccagaaaataccccgttattcatcaataatataatggatacataattggtagtatattcaaacagaatactatgtaacaaaaagaatgaacaacagctacacacagcaacatggataaatctcataaacatgatgttgagcaaaaagatcaaacaaaagagtaaatacygtgtgtttctatttttataattggatagacacagagatgcaccactcagatact

SEQ ID NO: 96267 - DNA, 536 bp, Homo sapiens
aaccaatttatccctattgttttttgttgtcatttgtttaatttgagagcattgattcttcttgcatatcacttttctactaaactcagtcaatatcagaaattttatgttcttatagaagatatgcaaatagatccagatattttgctatatttataaaaacatataattctaactcaatataatctatacacaaagaccttgccttcattaaaaagatgcacttgatttaaatataatgctcaaatatgaattacttctagcttcttgttctaaactggatttaataacctctcaccttctttgagagagagtaggagtgagcaatacacatgaaagaacattgggtttgtaagaataaaatggcacgatggcrttcactgaaagtgagtagacccattaattatcctgcttacaggtttaaacacacacacaattttgtctatgattaactggattgtacagctgttgttccttttgctgaaaggtttgaccttttgcttaagtctaatctaacacaaggaaatcattattca

SEQ ID NO: 96268 - DNA, 603 bp, Homo sapiens
acctattccctcctatccttgacagttctaggctttgctgatgtgtcagtggaaaggatataatatcatcttggtctattttctttgatcattastgagactaggcttctttacatgtgtctattatctatttgcatatctttgttggtgaaaatagatttgcccattttcgactgggaaagtctttgtcttactaatttgctagagatcttcctacaatacagttattaaatttttgacatgtatgcggtaacatttctctccctttgtgtttactttcctactctgttgatggaggctttgccgtacagaaacaactcatttgtatgtagttgactttgtgaattattctttcatacttcctgccccagttgtaatgcaaagaaggggcttccatctcagctagcttctaggaactcagattgcccctgagggcaggaggggtgaggcaccagcctttcaatgtcatcagtgtgactctcagttttgttacccacctgctcgcaacctttgcaacgctccctgatgccttgggaagaagaaatgagcttctctctgggatttcaggctactttgcttcctgcacttacttaactcctgcca

SEQ ID NO: 96269 - DNA, 624 bp, Homo sapiens
gtcaacctgctcatttctaagaccttcaagggatacattttctcaaaccttgtatgccatcatgcgacagcagacagactcatagctctccttgacatttattcttcatgaattaccaggaaactaaccaatatttaaaagtcttattaatattacaatgggcttccatttttaatttatgaattttagcatacttgcatgagcacaatctatccctgagtattcaagttatgaaataactagcagcaagacctacttaaatgcactgccctttacaacttgatagacagatagatagatagatagatagatagatagatagatagatagayagacatctcctgaggcttcaggcttgaatataaaactataaaacatttccaagattctgcccacatggcataaaatcaacccattaattcagcgacttaagaaaacaagttggtcttagcagttccatgggctgctaataagtattaccttaaaaaaaagattttgtgctcagataaatttggaaacctttagttaaacagtcaaacagcttttgtttttgttttctgtttttcttaaagatattacagagccttcaatatgcatcacgcagtggcttatgcctgtaatgcc

SEQ ID NO: 96270 - DNA, 563 bp, Homo sapiens
atgtttagatacacaaatacttaccattgtgttacagctgcctgtagttttcagtagagtaacgtgctgtactggtttggagcctaggagcaatagtctacaccrtataccctacatgtatagtaagtaggctatgccatttcaatttgcgtaacttcactctataatgttcgcacaatgacaaaattaccaagcaacacatttctccgagtgtagcccctttggttaagtgacgtacgactgtagattgttatgattcaatttataatcttcagaactgggcaatttatgctccaggaatgtgctttatcttgtattcaatagagattggaatttctttctcattttagaaatgaagaaaatgagtaacaaaaggtagtgttctcaaacttatcagagaagatctcaaaataaaattcttagccccaaaaaagtagcatgataccataaaaactgtgccttttgcagtgaggctgacttacatccaaatgatttttttaaacatacctcaaaactgtggggtaagatactatatatctgaaggtttgtgaaatttttagcac

SEQ ID NO: 96271 - DNA, 563 bp, Homo sapiens
atgtttagatacacaaatacttaccattgtgttacagctgcctgtagttttcagtagagtaacgtgctgtactggtttggagcctaggagcaatagtctacaccgtataccctacatgtatagtaagtaggctatgccatttcaatttgcgtaacttcactctataatgttcgcacaatgacaaaattaccaagcaacacatttctccgagtgtagcccctttggttaagtgacgtacgactgtagattgttatgattcaatttataatcttcagaactgggcaatttatgctccaggaatgtgctttatcttgtattcaatagagattggaatttctttctcattttagaaatgaagaaaatgagtaacaaaaggtagtgttctcaaacttatcagagaagatctcaaaataaaattcttagccccaaaaaagtagcatgataycataaaaactgtgccttttgcagtgaggctgacttacatccaaatgatttttttaaacatacctcaaaactgtggggtaagatactatatatctgaaggtttgtgaaatttttagcac

SEQ ID NO: 96272 - DNA, 478 bp, Homo sapiens
taaatttaaaatgagaaatcattagaattgcaataaggtgaaattatgagaagatcataccaatacaagtacctgaatgtgtcatgcttctgagaaagacttaaacaaattaagatttaaaccttgacactaaagagaaaatttagatttcaacactatgctgcagaaatcttaaagcatttwaaaaaaataggttgcaggaaagactgtccatgaaatgagagacttttcacatatctctgtcagaggtcaaacatgtcagtgtttttaggttgcaaatttgccatgttttgctaggtatgggaaataggttataaatctctattgagttcaactgagtaatttcagtgaaaaacacatgaatttcacagaagtgaaagctaaattacctttccctcttaatcaatgtagacaaccaattagaaatgtggtggctttaaagtttctcttttttttgtactcaacaaaatattagtgc

SEQ ID NO: 96273 - DNA, 478 bp, Homo sapiens
taaatttaaaatgagaaatcattagaattgcaataaggtgaaattatgagaagatcataccaatacaagtacctgaatgtgtcatgcttctgagaaagacttaaacaaattaagatttaaaccttgacactaaagagaaaatttagatttcaacactatgctgcagaaatcttaaagcattttaaaaaaataggttgcaggaaagactgtccatgaaatgagagacttytcacatatctctgtcagaggtcaaacatgtcagtgtttttaggttgcaaatttgccatgttttgctaggtatgggaaataggttataaatctctattgagttcaactgagtaatttcagtgaaaaacacatgaatttcacagaagtgaaagctaaattacctttccctcttaatcaatgtagacaaccaattagaaatgtggtggctttaaagtttctcttttttttgtactcaacaaaatattagtgc

SEQ ID NO: 96274 - DNA, 478 bp, Homo sapiens
taaatttaaaatgagaaatcattagaattgcaataaggtgaaattatgagaagatcataccaatacaagtacctgaatgtgtcatgcttctgagaaagacttaaacaaattaagatttaaaccttgacactaaagagaaaatttagatttcaacactatgctgcagaaatcttaaagcattttaaaaaaataggttgcaggaaagactgtccatgaaatgagagacttttcacatatctctgtcagaggtcaaacatgtcagtgtttttaggttgyaaatttgccatgttttgctaggtatgggaaataggttataaatctctattgagttcaactgagtaatttcagtgaaaaacacatgaatttcacagaagtgaaagctaaattacctttccctcttaatcaatgtagacaaccaattagaaatgtggtggctttaaagtttctcttttttttgtactcaacaaaatattagtgc

SEQ ID NO: 96275 - DNA, 579 bp, Homo sapiens
cttcatttccctaaagggtagaagagcaattccaagcttggagacatttctcccccatgccatccccattgccccctgctttggtttgtaacagattttaaatgaatggttcaaatatcacakgcagaagaattccgaataatcatggagctacttaatgtagccatcttcaaccaggaggaacatgactcccactccttaaatattggccacgtatagtgacttccttccaaagagtatgtatagaaaggcgggcaaagagtcactttgcaatggagaaacctgacagacactacctcagccaggtggtcagcatcaacagtgataggtcatgctgatagtctgtacccttgatagaatgtgatgtgaatggaacttaacctctgtgattctccacccccaaacctattaccccagtctaatcataagaaaaatagcagacacgtttctagtcgagggacattctacaaaatatctgacgaatactccaacactgtcaaggtcatcaaaacaaggaaagtccaagaaactgtcacaacaaagagaagcccaaggagacatggtgacaaaatgtggtgt

SEQ ID NO: 96276 - DNA, 611 bp, Homo sapiens
gactaatacaaagtaagcctctttgcttaaaatttatgtgggaatcacagctttgttttcccttcttctttcctgaaggaaaataagttttctttttctcacatgtctgttttcttaatttttttttacaaggaaacgctttctgaagagtaggcacaagtttaagaaaatgcaaggatgcatctaataggcattggctgtgattcatgctatctgggtctttccagakagcgtcacatagtagcaaacacatggaatcagataatttgggtttgaatcttgggtctgccacttaccaattgtgtgaccttggccaagtttcttaacttctcaatatgttttcttatcttaaaaattagaatcatacaaaatttaaaatgtacatgccttggtccggaagtcatcatatcaaagtacttcaggaattgatcgtataaaaatactcccacatgtgtccaacaatatatgtatgaagatacttgttgcagtattatgtgtaatagcctaaagtaggtctatcagtgagggagaagctagataattttgtggtttatccatactttggaatacctaaaactttttttaaagaaatgagattagcatcatatatg

SEQ ID NO: 96277 - DNA, 602 bp, Homo sapiens
  misc_feature (1)...(602): n = A,T,C or G
gtgatgcagcaaaattctgtttttgagacaggcctccatggctggttcaactgtagtyattttagttgtgaaaacacagtttcagtctccatgacctaactaatacacatggttgaggcaattgtccgagtactctaattcagagaaaacattggcttttctggaaattacctgggtcatctgacatgtgttttgcttaaactagttcaataatttttccaattctctactttggccagaaagatacaatctacaatgcctggacacaaaatataaactatannnnnnnnnnnnnnnnnnnnnnnnnnnnnnnnnnnnnnnnnnnnnnnnnnnnnnnnnnnnnnnnnnnnnnnnnnnnnnnnnnnnnnnnnnnnnnnnnnnnagttgatgtagttctatgttgcattgagggtgcagtgggatgataactagcagagattgtgtagctcctgctgaatcagggaaccagaatgccagaacagtagcttcgcagtgagacttacagatacgagatcttccataccaatggttttcaaacgtttcactaaccattctattcaataatcaggatttcactaatgtagaaaaaaatctattttcta

SEQ ID NO: 96278 - DNA, 607 bp, Homo sapiens
ttatttatttatttatttatttattcattcattcattcttctctctagctttaatcttggaaaatgagtaggctattgcatcccatttgaaaaaggcaacaccttgagctttgagcagtcaggaagagctttgtattctattttttcaacttttaagttcaatggtacatgtgcaggatgtgcagatttattacgtaagtaaatgtgtgccatagtggcttgctcacagatccgcacagatcatcccrtcacctaggtattaagcccagcatcccttagctatttttcctgatgctctccctcccgtcatccaagtgctttgtattcttagagaaatgcaaatgcctcttttcttgggatctgctatcctattgaccacttactcagacagatcatccagtgaatgaagtctcactccagccctgggctcctcctagcttccaaccctgccataaaagactaaagcctttgtactaggttcaacagtgtcccctccacaatttttgtccacatgggatcacaggatttgactttatttggaaataggtctttatttggtagatgctcattagttaaaatgagattatattaaattagagtgtctaat

SEQ ID NO: 96279 - DNA, 607 bp, Homo sapiens
ttatttatttatttatttatttattcattcattcattcttctctctagctttaatcttggaaaatgagtaggctattgcatcccatttgaaaaaggcaacaccttgagctttgagcagtcaggaagagctttgtattctattttttcaacttttaagttcaatggtacatgtgcaggatgtgcagatttattacgtaagtaaatgtgtgccatagtggcttgctcacagatccgcacagatcatcccgtcacctaggtattaagcccagcatcccttagctatttttcctgatgctctccctcccgtcatccaagtgctttgtattcttagagaaatrcaaatgcctcttttcttgggatctgctatcctattgaccacttactcagacagatcatccagtgaatgaagtctcactccagccctgggctcctcctagcttccaaccctgccataaaagactaaagcctttgtactaggttcaacagtgtcccctccacaatttttgtccacatgggatcacaggatttgactttatttggaaataggtctttatttggtagatgctcattagttaaaatgagattatattaaattagagtgtctaat

SEQ ID NO: 96280 - DNA, 448 bp, Homo sapiens
agcgtgtaatcccagctactcaggaggctgaggcaggagaattgcttgaacccaggagatggaggttgcagtgtgccgagatcgcaccattgcactccagcctcagcaacatagcgagaccccatctcaaaaaaaaaaaaaaaaaaaggtmtttggggtgggccctaatcaatatgactggtgtccttataagcaggggtagtttggacagatacacacagaggttagacaaggtgaagagacgcagggagaaggtggccatctacaagccaaggaaagaggcctgaacagatccttccttcacagccctcagaagggtgctcccaagaccctgattttggacatctgctttccagaactgtaagccacccagtctgtggtattttgttacgggagccctagcaagccaatacaggtaatgactgtttcttgtagcctcagttcccaa

SEQ ID NO: 96281 - DNA, 610 bp, Homo sapiens
tcaaaatcctctgaggctgagattaaaattcaaagtcctcaccaggcctacaaggcatgacagtttgcttgtctaaccacctctgctgctctgctctctctctctctgttctagccatgctgactttgctgttccttgaacagcctctttttctccctggggctcttggactcaccatttcttcacttcctcaaagtgttcccccagtttttattttgtctcaattcctggcttcagcgagacctctgtcgaccaccttttctttccctccctccctacctccctcccttccttcctttctttcttccttcctctctgcctccyttctttctttccttcctccctcccttccttcatccctctctctctctttttccttccttccttccttccaatacatattagatgtacatattttgggctacttgatacattcatataatcaaatcaggataattgccttaaatatttatctttttcttgtgctaggaacatttgaattattctcttctagttatcttgaaatgcacaatagattgatgttaactatagtcacttcactgatctattgaacattaggtcttatttcttctcggtgtgtatttgtaac

SEQ ID NO: 96282 - DNA, 626 bp, Homo sapiens
ctgaaccataaaagtctttccacctataagatctcaatcagtagaatgcagtgctaaagacttcatcttggtaacatgtttggcagcttacaaaatgccttcattcccataacctcctttagttcctacaacaatactttgaggttggcattaccatgatcatctctactttgtagatgtaaaagatgtgctgtcacctaggattgggcccttttcccaaagatgcctgacagcgagggaacagaggaggggcctcactgtgctttcccacgggctttgccatttgtttcatggttttcactgtcaaatcccagattttttttttttttttttttygagacagggtctcgccctatcacccaggctggagtgcagtggcacgatctcagctcactgcaacctctgcctcctgagctcaagcaatcctcccatctcagcctcccgtgtagctgggaccacaagtgtgtgccaccactgctggtgaattttttgtatttttggtagagacaggatctcgctatgttgcctaggctggttttgaactcctggactcaagtgatctttctgcctcagcctcccaaagtgtcgggattgcagatgtgagccaccgtgcctggccaagccct

SEQ ID NO: 96283 - DNA, 591 bp, Homo sapiens
ttgtctgtttttggtttagttgtctgtgttatgggattttgcttaagaaagttttgcccagagcaatgccctggagagtttccctatgttttcttatagtagtttcatactttgaggtcttagatttaagtctttaatctgttttgatttgatttttgtatatggaaagagacaggggtgtagcttcattcttctgcacatggatatccagttttcccagcataacttattgaatagattgtctgttccttggtgtatattcttaggacctttgttgaaaatgaattcactgtctgtggatttgtttctggtttctctattctgttccattgttctatgtgtctgtttttatgcaagtaccatgctgttttggttactatagctctgtggtataatttgaagccaggtaatgtgatttctccagttctttttgtttagggtagccttggctattctgtctcctttgtggtttcataaaattttatgattttcttttctatttctgtgaagaatgccattgatattttgatagggattgcattaagtctgtagattgctttgggtagtrtggacattttaacaatatcgact

SEQ ID NO: 96284 - DNA, 580 bp, Homo sapiens
tgtgttggagcagatgctcctggtgctccctaagcyccttggccttctgctgccactgaacgcagcccactcttttgtctttgcctgggtctttgtgcgcctctccaggcagcctgtgagccatagggccaggagccctgtcttattgtctccatagccccaaggcccagtgcagggctagacgtggcagtttttattggattcagctactgactggtcccttccttggcttgctcttctcctctccagcccccttcacttgctcaagtttcaggtttcaggctgactctgtctctccttttcacacttaggtccccagacatttctttgtcttgttctgaattaacccttcctctttcgagggaagctcggggaggggaagtgccagctttctcttggctggctagcaaagcttagatgaaaggccagaaaaaggtatccaaactctcagcaattgttttcctgcttttattattctttattcctcaggctaggcccctccttccctccttgctttctctgtcttgcattgtcacccaaccatactcccttcccagaatgtgacagactcctcacacct

SEQ ID NO: 96285 - DNA, 566 bp, Homo sapiens
ttattctcaatctggccataaagattattaggtaagatgcacactgtcttatatacacgctggtacattcccacactcctctgcccagcacggcactaaacatatgtacatatttgttcgatagaatccttcaaagtcctctcccttagagtcatttgcagatatttctcaaacatgatgcagatcaaaatgcaatatacaaagtcaggtaatgtccccagcatcaaattaaaatagctaaccggccaacagatggcagctgaagcaaatcgcttgccgatttaaayaagaacggtgttcggttcagttgtgcacatttttctagacagaagttgactgctaaatgaaatcaacttcagagcccagttgtttgtagtgtgaaggggaaattacaaaaaacaaaaatgccttctttgttcctggaaccccgggtgattcacaagcacggacatcccctggtcttctgattttaaatcactaaggtggaaatgtcattcacccaggaggttattgattaaaataaagagcaggaatgttttctgcatgaacctcacttctgctggcaa

SEQ ID NO: 96286 - DNA, 566 bp, Homo sapiens
ttattctcaatctggccataaagattattaggtaagatgcacactgtcttatatacacgctggtacattcccacactcctctgcccagcacggcactaaacatatgtacatatttgttcgatagaatccttcaaagtcctctcccttagagtcatttgcagatatttctcaaacatgatgcagatcaaaatgcaatatacaaagtcaggtaatgtccccagcatcaaattaaaatagctaaccggccaacagatggcagctgaagcaaatcgcttgccgatttaaataagaacggtgttcggttcagttgtgcacatttttctagacagaagttgactgctaaatgaaatcaacttcagagcccagttgtttgtagtgtgaaggggaaattacaaaaaacaaaaatgccttctttgttcctggaacccsgggtgattcacaagcacggacatcccctggtcttctgattttaaatcactaaggtggaaatgtcattcacccaggaggttattgattaaaataaagagcaggaatgttttctgcatgaacctcacttctgctggcaa

SEQ ID NO: 96287 - DNA, 613 bp, Homo sapiens
aattaataggctttgccattctggaatttaaaatatctgacattctaaaatttgtgagtataaacttgtcagtatctttctggagacaaaaatatgattagttgacatttttaaaacttaagatagatagtttggaagaataaaaattattaaacaaaaagatgattcattgacatgatttttaaaacttaggttgcttggaagaatgaaaaaataattttttaaaaatttaggccaaatttattctgctaaagtgttcaaaggaaatcagatcttaaagtgaagatgattctcagcttcatggtatatatttttttgcttcccttctaaaaagatgtattgtggraccacagatcttagtataggaaaaaaaaagtccagaagtagctagatgacttgaagggataaaggcagtatacattcccctccagaatatgaagactccaaaatagaatacaaattatttcataacattttataagaatgttttacatgagtggtagggtttaagctaatgttattatgatatccacacacacattccaaagaaaatcatgtttcaccattcatgatgaaaatatattctatggaatttaagaaagggaggttattg

SEQ ID NO: 96288 - DNA, 265 bp, Homo sapiens
agcgctggggagttagattaagtgttgagaatgcctgctttragcacatcctgagcctccacaccagcccaaggcactgtattgatcctctttcttaccatggactttgcctgaataaaccagctcaggtttcagtgagaacattttaactgcagaaagctaacctataagctgagaccaagcaaaagtaaataaataaataaatacatacatacatacatacatacatacaagaagaagttgtgaaaggaaaggaacagacatt

SEQ ID NO: 96289 - DNA, 442 bp, Homo sapiens
gaattcatcttcttggtttggaaaagaaggggrtgacattagtggcgaaacctccgtgtagagctctcgcaccgcaactctgagtcatagcttacatcgatcaagcactcactctgaagcaggctcggggctaaaccttcacaaccattgactctgtgctacagaggagacagtgatcttcacagaagttagttcccagagggctttccccagccccaccattgggagcagaggggcagggctgagcccagtctcactcgagtcctgctcacaccttcctccaggactgcacgggccacctcgcccagccctcatggcaatgctgaaggcaggtgtgattctcgccattttacccaaggggaaagggaggcaccgggggaaagggaggctgggagcggcagacctcacagctaggaagtggccaaggcacgaagaagcccac

SEQ ID NO: 96290 - DNA, 649 bp, Homo sapiens
atgctttgaattaatgtgatatagtgaactttatttcagtgagtctgaatttacatttggaatatgaataatcttcacttatgttgaaaatgataggctgaaaataaacgtgctcatagctttttcatgcagatcctttactatcaattaacataggaaatctttataagtgctgcttaaagtttagatgataacttaaagtctgaggatataaagacataatgatcagacatatctcaaaattctgattattcaatctcatattgtattgggagatattcccattcactagggaacattgtatgttatctgagttataggactgtttaaacagtatgatttccatatattatattagattttaagagtgattatgctgatcaaattataacaccgttgaaaaaattctttagaggcttgtcattaaatagaaatgttctaaattcctttttccagtttggattatcttcacccctgaaaatatgaggacacatattctcattgcctacatacaccatgcagtgtctctacacagagtataagaaatttaaacctattatctagatctaaggggatatgrgcaggcatctacctagattttcttaaaaaaaaacaactgaattctttgtttactacctatatgagttga

SEQ ID NO: 96291 - DNA, 367 bp, Homo sapiens
attatcacccaggctatattttgttataacaacctgatctaagacactaagattccattcatataaaactgagaaagagccaggcatggtggctcatgcctgtaatctcagcactttgggaggccgaagkaggaggatcacttgaggcaaggagtttaagaccacctgggcaaaattgtgaggccctgtctctacttaaaaaaaaaaaaaaaattagcaaagtcttggaggtgtctgcctatattcccagctactcagaaggcaaagggaagagaaccatttgagcccaggaggctccagtgagctatgatcatgccactactccagatcaggtgcggagaaagacctgtagatgtgaggagaattc

SEQ ID NO: 96292 - DNA, 563 bp, Homo sapiens
gtggccttttttacttttattaaatcacaaatattcactagggaatattcattccctagaaattcattatttggttaaaagggtcagaaaaccaaacacaaaatgtcttaagcaaaaagataaaatttacctgatgtatataaatgaaaggctttaggcacagctagatctagttgctcaaataacatcaccagattcaatatctgttgtctttattttcccttctttggttttattatcaagctttctttcctctcatagtgctaaaaggattgccaagcagctccgcagttttatcttattctctcaataaccatgctgaatagtcatagtgagatttccttttttaaaacatagcaaaaatctcagaatttcatttcattgattctgctgggaccacctgatcacccttgaaacaatcatggtggccatgggaatgtggtgcactggtagggcaaacctggtyctctcctgtacaccaaattggtagtagagtcagcaacgctggaattatttgtgtggggagtggtgaaggcttatatatccaaacaaaaacaggtttc

SEQ ID NO: 96293 - DNA, 566 bp, Homo sapiens
tttttgagcctaccacttatttataatcctggcatttttttaaacaaattccatctatgtatcaatctgcttaattatcttacagctctccatgagacaaagcaactcaaaaaataatctgatccaggtgactaagtagaaacagtaaatctatcactgggaggtcagattacacaagtagagtcaaaagacgaggcagatgtaaaagtatctgaaggttcttgtgaattaaaacttaagtcaaagaataatrtaatgaccccaaaatatcagtttcggacttaaattcagtgtatttgttgtaatcttataactgaaagatgggaatggtgtggaaaagtatatttagagagctattgctgaatgaaagcaggcgtttgccattctcccataaaggaggctgtgtacaattttcatttggcatcctaacaatcttatatttggtttgagcagtacattttcatttcattcatcatttaaagacagataatcagaaagtcattacattggccgacaccagaccctttgctcgattgtatcataattgagcactgtggagcgtgtgc

SEQ ID NO: 96294 - DNA, 554 bp, Homo sapiens
ggagaaaaaggcatttctcttaaggagaaccatatgtgcaaaggcctggagggataagtaagtatagttcattcagtgaaacagaagtcgtgccttatgtctggagttcgtggttcctaacatcttaggagaaagatgagatttgaatggaaagtagtggacacattacaaagactttgactatcctgttggattttctcaagatggaaatgagaagccagaaggaaattaataaagaaaataacaacgctgttgatcatttcctatgcatcatgcattgttgtattaatgaatccttacaactttattatgagtaaaactgaggcacagaagytcaataatacttcctcataagccaacttgagaaaataataactctcagtcagtaagtaccgtgattaatacttagacccattctgtgactctgggagactgaaaccatattgttccaatatacttcaagggaatgattatattttaggtagaaatataattattgtagacttgtgaaggataacctgagaagaaaagcctggagacaaaaatatagtaag

SEQ ID NO: 96295 - DNA, 596 bp, Homo sapiens
tattaaaattaatttttatttttaaagataacttttacttttycaaatcactggctttattcttactacccaatattttcttctcattttcccattatatagcatacatgttgggcaaattccatagctgttttcttcagtcatatactaaaaaacaaacaacaaaatagtgtggtgctggcataaagacagtcatatagactaatagaataaaatacagggcccagaaataaactctcacatataccgacaaataatttttcagtaagggtaccaagaccacttaatgggaaaaggaaagtcttttcaacaaacagtgctgggaaactggatatccacatacaaaagaatgaaattaaactcttaccttataccataggtacacattaactcaaagtagatcacagacctaaacattaacagctaaaactatagaattcttagaagaaaacataaggggaaagatatttatgatggtggactttgcaatgacttcctgaatatgacatcaaaagcacagacaacaaaagacaaaagaaataaattggacatcatcaaaactaaagacttttgtgcatcaaaggacactatcaaca

SEQ ID NO: 96296 - DNA, 585 bp, Homo sapiens
actaggggccatggatgtgttttcctctatggtctgtctattcaaactcttgctttccattaggatacaggtcaaatgtcaccactgctgctagtaagtagaacccacctctctgacaaggttagtgaagttccagtggaagcgaagtacaaaatatttattgaaaaagtgtgtgattcataggagtcactacaatcctttaagaagaaagatgaacatgtgtatatctgcatggcatttytgtcttattgttgatgattttaaaaaaaaaaaaacattgccctataaataaaaatatgatggggtacaaaacaactaatcagaatttgtaaagacttgtagaaaagagacaagaaaataacagactgcttcaaagacaagaaaggggattaaaaggaataagaaaaagtcaaattaaaaaattgcaaagaaagaaaacttaatttttattcaaattggagtaaagttttacataaactataaaagaagataagagcattaaatagattattgattttagtaggaaaaaaatgaggaaaacagggaaaggaggctaatcaaatcctgttaaaaatagttagaatg

SEQ ID NO: 96297 - DNA, 585 bp, Homo sapiens
actaggggccatggatgtgttttcctctatggtctgtctattcaaactcttgctttccattaggatacaggtcaaatgtcaccactgctgctagtaagtagaacccacctctctgacaaggttagtgaagttccagtggaagcgaagtacaaaatatttattgaaaaagtgtgtgattcataggagtcactacaatcctttaagaagaaagatgaacatgtgtatatctgcatggcatttttgtcttattgttgatgattttaaaaaaaaaaaaacattrccctataaataaaaatatgatggggtacaaaacaactaatcagaatttgtaaagacttgtagaaaagagacaagaaaataacagactgcttcaaagacaagaaaggggattaaaaggaataagaaaaagtcaaattaaaaaattgcaaagaaagaaaacttaatttttattcaaattggagtaaagttttacataaactataaaagaagataagagcattaaatagattattgattttagtaggaaaaaaatgaggaaaacagggaaaggaggctaatcaaatcctgttaaaaatagttagaatg

SEQ ID NO: 96298 - DNA, 560 bp, Homo sapiens
ggatgctctgcaacaattagctactggtgattcatcaaagagccccagggtagggatttctttttaacttttttctcaacatgctttagaaacataaattagtccctgrattggatcggtgtggatttatcactcaagtttcctgtctttaccctctttcttctttcatctggcagatgtttgtttcatcttcagatttactgaaagtggtgccggagtctgagagcatttagcaatactaaaaagccatttcttttaagactctgcttaaatgttaaatgtcacctccttggagaggacttcttttgacctctctacttaacataaacccactcctgttagtatctatcctctttatcctgctttctttttctttataacacctctcatcacctgtcacatgatatatttattcattggttgacagtctgtttcccaccactagttccatgattacagggacttcatttatctgttcactgctctctttgcaggggctagggcagtgcctggctcaaagccaagggggttgttttgtgtattcttttatgagatggtca

SEQ ID NO: 96299 - DNA, 556 bp, Homo sapiens
tgttccaataaaaccttatttacagaagtttgcattcttataatttttgtatgtcataaaatattacgcttctcttgattttttaagtatttaaaaatttagaaactatttttagttcacaaacccgacaaaaacaggcaataagctagatttgcctgttgattgcagtttgcccgcttctgacctagcacatagtaattgctcaacaaatgctagccattgatgagcaagagtttctttcctaagtgcctggctcctcattagaaccaatttcatggcagcttcctccgaagacctgcaacccttttagtattccctatgaacagcctggaaagcaaactttttaaagtccttagtagtrggtgaagacattttatctgcagtgaactagttcaagagtgcatcaagagaaggcggactggtgattagggcacagggcttggagcccagggaactagtgaggtctcagctctgagggtttaatgtggttattaactttcatacctgttttattcagaatgatactggagataacagcaacaacattaaaagtagc

SEQ ID NO: 96300 - DNA, 497 bp, Homo sapiens
cccgattcctgggaaatctgtaacaaccggaaggcatctagggccatggcgatgggcataagtctccttggtaactttgctgctgaagacttcatccttaaagggaacttagagstattgcaactgcagagacagaaaatactgtacaattagcaattaactctgcaacaagtaattgtaactcggatacaaagaagtaaccatcttgacatagacagtcatggaaataaataagaaaacaaccagcacgggacacaaggaaatgggaagtcatgtccttaatggcaaaaactggcaactaaatacccataaacaaggacgagttgagacaaatgctgctgctcccatgccacggagctctgcgcagccagtgaaaaacaatgaggacaatttctgggaactcatatgaaacaatgaccagtgtatatttaaagtaaacacacacaaatgcacacagatgcacacacaaattcaaatattttatgtagaatgtgagg

SEQ ID NO: 96301 - DNA, 497 bp, Homo sapiens
cccgattcctgggaaatctgtaacaaccggaaggcatctagggccatggcgatgggcataagtctccttggtaactttgctgctgaagacttcatccttaaagggaacttagaggtattgcaactgcagagacagaaaatactgtacaattagcaattaactctgcaacaagtaattgtaactcggatacaaagaagtaaccatcttgayatagacagtcatggaaataaataagaaaacaaccagcacgggacacaaggaaatgggaagtcatgtccttaatggcaaaaactggcaactaaatacccataaacaaggacgagttgagacaaatgctgctgctcccatgccacggagctctgcgcagccagtgaaaaacaatgaggacaatttctgggaactcatatgaaacaatgaccagtgtatatttaaagtaaacacacacaaatgcacacagatgcacacacaaattcaaatattttatgtagaatgtgagg

SEQ ID NO: 96302 - DNA, 405 bp, Homo sapiens
ttcctccttcactctgttgggatgccatttggagaccaccatgtgggcaagsccgcctagatactgaaggataagaggtcgtgtcgaggagaactgaggtccccagaagtggggcaccaatgagcaggcacatgagtgaggccatctgaccattcagctgaatgcagccctatcagtgatcacagactaggccagcagaggagtcacccagtcaacctatagaattgtagacaataataaactattgtagatttaagacacaagttttgaggcaatgtgttacagagcaatagataacttatacacaagtgctaattcccttttcttttccaaattctcttaaactcttcattgtattctgcaaataagtcttcccatgtcaccacggtggcacatatattgcta

SEQ ID NO: 96303 - DNA, 553 bp, Homo sapiens
cacagaacactacacattaatctcacatattagtagaaatcaaataactgaagctcctcttggtgagaagtttgggtttggtgcttcgccaggtaaagtagcaaggtgcaatggggagaaggggatggagcaggagattaaagccctcagctggacaaatgagctttgacacagaaacaaagtgtttgaggacaaaatagagtcagactatgtcactggacaatgtggattcatgccattggctgcattagaatgcaggacaagatggaaaggagaatatttaaatagtttacttggaagaacattcrtgttcatgttttctggatactgttatttgattggctagagagcatgtagactccttccttccttccttcctttcttccttctttccctctctctttctttctctctctctcctccctctctctttctttctctttcattatgtgatgtctatttttggtatgtcctattaaagctagttacaattacagatcaaattgtgactgttttcagagtgcattgtgtcctctgcaattctgttatatta

SEQ ID NO: 96304 - DNA, 609 bp, Homo sapiens
ggtcttattttaaaaacactagcccagcccaatgtcataaagcatttcacctatgtttacttatggcagtttcatagtttcaggttttacatttaagtctgtaatccattttgaatttagttttgtatatggtgagaggtagaggtctagtcytattcttatgcatgtagatatccagtttccgtaccaacatttattgaaaagactgtcttttcctcattgagttttcttgatacctttgtcaaatatcagatggctgttggtgtatgaatttacttccaagctctctattctgttccattggtctgtgtgtccgtttttatgccagtatcatgcgtcttttattactataactgaattttaagatttttttatatttctaaaagaatgtcattggtattataataggatttgcattaaatttgaagattagtaatatggtaattttaacaatattaattcttccaatccatgcaaatgggctatcttttcatttatttattccttcaattttttttcgcttaatattttatggcttttagtgtagatctctttcatctacttggtcatgtttattcataggtatctttttttgttttgtgactattg

SEQ ID NO: 96305 - DNA, 609 bp, Homo sapiens
ggtcttattttaaaaacactagcccagcccaatgtcataaagcatttcacctatgtttacttatggcagtttcatagtttcaggttttacatttaagtctgtaatccattttgaatttagttttgtatatggtgagaggtagaggtctagtcctattcttatgcatgtagatatccagtttccgtaccaacatttattgaaaagactgtcttttcctcattgagttttcttgatacctttgtcaaatatcagatggctgttggtgtatgaatttacttccaagctctctattctgttccattggtctgtgtgtccgtttttatgccagtatcatgcgtcttttattactataactgaattttaagatttttttatatttctaaaagaatgtcattggtattataataggatttgcattaaatttgaagattagtaatatggtaattttaacaatattaattcttccaatccatgcaaatgggctatcttttcatttatttattccttcaattttttttcgcttaatatyttatggcttttagtgtagatctctttcatctacttggtcatgtttattcataggtatctttttttgttttgtgactattg

SEQ ID NO: 96306 - DNA, 398 bp, Homo sapiens
gaccatgttttggagtagagtctacaagtatactcaagttaagacgaggtcttactggtatagagtggctttttaatccaacaataggtgtccttataaggagagaaatttggagatacaaaaatagaaggaaaacagctgtgtgaagatagaggtaggaatcagagtgawgctgctacaagccaaggaataccaacaattgccagcaatgatcaggaattaggaggaggcaagaaagaatttttcctaagaaacttcagaggaggtgtgtttctgctgataccttgattttgaacttctcacctccagactgtgagaaaacaaatttctgtgttttaaaccaccaagtttgtgataatttgttatggtagccctaggaaatgaatacactctacatc

SEQ ID NO: 96307 - DNA, 355 bp, Homo sapiens
ctaaatataaagctatataaacatataatctagcaatctcaatcctaggcatgtaccacaaagaattaaaagcaaggagtcaaacagacacttgtgcaccagtgttcatagaagcattattcacaatagccaggaggtagaaacaatccaaatgcccatcaacaggtgaatgaatgagcaaaatttggtgtatatgcatcatacaatgaaatgttattcagccataaratgaatgaaattatgatacatctacaacgtagataacccttgaggacattatgctaagtgaaatcagctagacagcaaggataaataatttaatattccacttatatgagatacctgaaataggcaa

SEQ ID NO: 96308 - DNA, 491 bp, Homo sapiens
tagatcttttgcacttgcttctgcttggtgtattctccccaacagttctttgcatgactaccacctcccattgctcaggctgaacagcatcctcccttcagaaaggccttccctgaccaccttagctaaagtagcctctcccctttttactgacattatcttctttaaagtgcttattggtacctggattatctcatttattcatttgtttacatgtttaatctctgcccactagaatgtaagcttcttgatgacaaggcctctgtctgtcttgctcactattgtccacattacctggcactaaataggcaatcgagaaatatttgttgatagactgccttgcttcagacaacacggctagaaagggtaagagcttgggcttwatttcaacaccctggcctctccatgtgtctacctcctgaacttcagtgacttctatctctacttcttgagccatgtacttctacctctcataactgttttgcccagta

SEQ ID NO: 96309 - DNA, 521 bp, Homo sapiens
cacagtttagtttaactgcacactaattatttgtgtattttttctgctttcccatccagactataaattcctggaggacagagatatcgtcatacctttttgtaacccttacaaagccaagcccaagataaaacacacaacaggaatttaaggcccacagtccttaggcccacagctktttttttcttaccactaaactagcattgagttgtcactctatagacattttttgaatatacaaatattagttgattgatatgcaaagaaagtattccaggtgggaggtcctgaggaaatggtcaggacacacaaatggatggcattcggacactagacatttgagactagtaccaggatgagaaacagcagatactaaaaaaggacaggaaggtaaagatcaagtcttaccttataattttttcaacgcttaaagcttaggtatgaagtgagctaaaatgccttctaacttggcattcagtgattaaataattgatcatttgattaatctgacttgttgcctg

SEQ ID NO: 96310 - DNA, 493 bp, Homo sapiens
agcagtcctgttagaaacaaacaaacaaacaaacaaacaaacaaaacaccttcttcataatagttccgacagaatctgggatttgatttttttgtatcattttgggtaaattcccatccctgagtaaattagtctatccaggaaagtgggaccagctcattggctaggcccccaattgtaagtcctagggattataaaactccagtgaatggggtcagtttgaagcacaaacccagaactttggcctctaatcctagtgcatcttccattttattatttatttattkttttgagtcagggtcttgctctgtcacccaggctggagtgcagtgacacaatcatggctcactgcagcctcgaccttctgggctcaagccatcctcctgcctcagcctcccatgtagctgggactacaggtgtgcaccaccatgcctggctaagttttaaaatttttttttaaagatggagtctcaccatgttgcccaggctggtt

SEQ ID NO: 96311 - DNA, 579 bp, Homo sapiens
atttccccaccctggccgggactgtgtctgcctggaggagaaaatcattacaatcaggcaatatgagctgggctgtgaccaaattaacattgaatgtggcctgagttggtctgtggcttttgcctgccagscctccatttcagggtctcctaatagcacgatgtttggttatgggccacactccttcctctccactatgaggcccccacatgggcacgtgatccaggcctggccaattaatgtggtctgctcgccaagactccaggcttgaggcttgggtcagttgtgggcatgtgactctagttggattccatgagactcaatcaagggagtgttgttgaaatgtcaagaagtgctttactttctgttaggtttctaagctttgagaatatagcatatagttaccataaaaatcccacaagaggaggcctacataacagcgatggtagaaagtaaagaagtgcaaggctgagagactcccaaagcctgagtttaagtattacttgaatcctgttctgtcaggatcttctctctgtcccaaatcctccactttctcaagtttcattttcctgatatgtt

SEQ ID NO: 96312 - DNA, 592 bp, Homo sapiens
taaatagaatcttatttctcccatgatacagttatatcctggtgttattaatctctttctatatataattattttaaatgtgtctatccccaaccagaatgtgaactcctggacacttgaactggtagatattccttactcctgttatctccagagtcgaaacattagtgcctggacatcagtcatatttgtggacagaataaataacttgaaaatagaaatgttttagcaacatgagagcaacacggtraagataagaagtttaaattggctttaatgttatttttaatacactcatttatacgaaaaatggatatgattatatcttgcatatggcactgcttcgtgaaatcctaaaaatgttcccttgacaatttagtccattttctacactttcttctaaaaataaagtcagcttaggtcacatgtcatcaaacaaagcgccctttctccctgacaaaggcttctaataatattgagaataaaatcaggtgtctttctcatggccttcaactctctgcatgatctgccctctggctacctctcccactgaagcttccacctctgttgtcctccctcactccatccatca

SEQ ID NO: 96313 - DNA, 585 bp, Homo sapiens
ttactagtttcagaaatactttaaaatgagatttagataagtagtaaaatcagcaatgtcagttttattatatacgtatgatacaggatcatccgtagttgaaatgatgaagagaaaattgaaactggaaaatgtctcaaaatgacrgctataaagaggacacgagaaatgtaagatacctgtatctaaagcaagaccaaggttttatgggcgtgctcagaatcaaatgctcagatttatttttttattctgtagctgtttcttggtggagtataaaaacaaaatagaaactatgacattattactactgagataaaattaaatcagaaaactgtgtccccccaaaatcataggaatgaaatttaaccttcaggatgcgttattggatagtgtttaagggcctggattcctgagtcagaaagattctcattccaatggcaactctacaactttccatctgtgtgatcttgacctctgagctttgtctattttcacatcactattttgctacaaagctggactttatcatattcaggaccttggactttcagtgcatttaccttccgattacagcttagagggaaa

SEQ ID NO: 96314 - DNA, 585 bp, Homo sapiens
ttactagtttcagaaatactttaaaatgagatttagataagtagtaaaatcagcaatgtcagttttattatatacgtatgatacaggatcatccgtagttgaaatgatgaagagaaaattgaaactggaaaatgtctcaaaatgacggctataaagaggacacgagaaatgtaagatacctgtatctaaagcaagaccaaggttttatgggcgtgctcagaatcaaatgctcagatttatttttttattctgtagctgtttcttggtggagtataaaaacaaaatagaaactatgacattattactactgagataaaattaaatcagaaaactgtgtccccccaaaatcataggaatgaaatttaaccttcaggatgcgttattggatagtgtttaagggcctggattcctgagtcagaaagattctcattccaatggcaactctayaactttccatctgtgtgatcttgacctctgagctttgtctattttcacatcactattttgctacaaagctggactttatcatattcaggaccttggactttcagtgcatttaccttccgattacagcttagagggaaa

SEQ ID NO: 96315 - DNA, 544 bp, Homo sapiens
agacaggggaaacacaataacatcatacggtttaaatgagataatgcttttaaatagcccagcatttaaaaatactcaatgggtgttagctatgatgtcaataatgatgaagaagatgatgattattataatgactaggatgatgattcttgaccawccaggataaaaaagtactactatctctggctaatcattagaaaatgtaatcattgctttaggttctgtcattaaccttagccttctgttgcttattctatttaatccatagtcaagatgaaacatctccttggataaaaatgtgcatcttgatccttttaaaaattatttattccatagtaccctcaggatttagccacatagtctaaagatctattaagtaaaaaaaatttaaatggttctgcattcatcactgaaataatcaaatctagaatctgaaatcatgcattggggatcacaaaggcacagcctcatccatcttttaagcagaaatagaaaaataaaaggggaagtgggaactcctctcttaaagacatgtgatgggttg

SEQ ID NO: 96316 - DNA, 584 bp, Homo sapiens
ttctcaatttctgataaaggtcatcttctccaaattcaataattactcctttaaaaagatatgtggtcaattaataattcaaaagatgagacactttaattgcaaaggccactgcaaaactacctttataaatatggaataaggaatttattcacagagataaacgtcttgtatatatcttatctctttaacttgttagaatgtagatgagtgcctggatttttcatctgttatatggtggtgtgtaattgaggagggggtggagtgagrtgagacatgcttatcagtttgtctttgtattgattaggttaagacagaaaagtggagattgcctcaggcttctttcacggtaacagtgttcaacttcattcctttatccagccattcagccattcattcatccgacacctgcttactaatagctccagctatgtgccaggagtataagttcttggttttaataaggataagagatggtctcagcttttggtgaaacttcaccagaaatgcaaatttggctcttgggacagttagtattactgaggataattgtgtcaaagcccagagacaacataagagagttt

SEQ ID NO: 96317 - DNA, 567 bp, Homo sapiens
cagggtctcactctgtagcccaggctggagtgcattggggcaatcacagctcactgcagccacgacctcccaagctctagcgatcctccctcctcaacctcctgagtagctagaatcacaggtgtgcaccactatgcgtggctatttttatttttatttttatttttgtagagacagggtctccttatgttgcccagactgatcttgaactcctgggctcaagtaatcctcccctctcaacctcccaaactgttgggattacaggcatgtgtcactgcacctgtccataaaaatgttttataatgagataaattctatgattacctagtcgattaaatcctttttcatttgttttacttggaattggtaaacaggccaaatcakatctgcagatgtgttgctctggaccacccacagtattttattttttaaaaaattacttgccaaaattttcaggtcctcattttatataattgaacttgcaacttctctttgaaaaattaggaagtgtggacccactggggctgcatccctgaaaaggatgcccctgcatggccaggatcatct

SEQ ID NO: 96318 - DNA, 509 bp, Homo sapiens
ctcagcccctagtgctccttccatatttcccaactcactcagaccagataacctataccatagtcagccttagccagtacagcagtatcttccaaatgatctcaaaacctcatctgataggccttcatgttgtggtcataattcgacggcatacaaagggattccatagaagggagagaaactgcatggatgattgctacttcttctcccaaatgttttattagctaaccacatttcatcctttctccaaatctactgtcttacccttctctgcaatcccaaggattcagggaaataaaaaataactctcagtgctaaaaatgtattcttaggatttaaattttaataggataaataataaatgtactctcttaaactatacaattcagtggtccttaatatatacagagagttgtacaaccatcactgctgtttaacttcasaaaaattttcattaaaaagaaacctctacccctctgtcatctcccccaccccagtacctggaaacc

SEQ ID NO: 96319 - DNA, 552 bp, Homo sapiens
gatccatccattctttctccagtgtggtttttattcataggcaggctttccccaccccacaccacctctatctgcagtggtagaccctggcagcttagagttacgatgtcgtcagtggaagagagctttccttttccaagaagtcttctaacaaaaggtttgagtcttattacactagttggaataaaaggcttattcttgaaccagtcatagctacaagcatgcttaattctcattgaaatggaccaaattataaggtcctacaggagccagaggtaagttggccttrctgtatgaactagaagatgataaagaattgttccccaaaggaatattgaagaactactgccagaggagaaataaacgcaggtcaagcaaacaacagatgcttcaacactatactttctatatgctatctttgagtctaagattgttctcaggcctggcccaagctcaatcccttgctatactgctgtccttattgcagtaaactgttttgcctgtttttgctataataagacttgatactgccaggatcagaaactttttatc

SEQ ID NO: 96320 - DNA, 552 bp, Homo sapiens
gatccatccattctttctccagtgtggtttttattcataggcaggctttccccaccccacaccacctctatctgcagtggtagaccctggcagcttagagttacgatgtcgtcagtggaagagagctttccttttccaagaagtcttctaacaaaaggtttgagtcttattacactagttggaataaaaggcttattcttgaaccagtcatagctacaagcatgcttaattctcattgaaatggaccaaattataaggtcctacaggagccagaggtaagttggccttactgtatgaactagaagatgataaagaattgttccccaaaggaatattgaagaactactgccagaggagaaataaaygcaggtcaagcaaacaacagatgcttcaacactatactttctatatgctatctttgagtctaagattgttctcaggcctggcccaagctcaatcccttgctatactgctgtccttattgcagtaaactgttttgcctgtttttgctataataagacttgatactgccaggatcagaaactttttatc

SEQ ID NO: 96321 - DNA, 587 bp, Homo sapiens
ttttctaacaattcactttaaaaattcttctagaaaatgtttgtaacttttcataatgacatttgagttttaatttcaaatatttatttgatgatttttatatatttaattacacatactcatacacttcatctgacttacttctttttggaatctctctaatgtaagctttctctgcatttggtcttgcacccaaggatccgctgcatattcagattctagtagagaagtccaacaatttgctgcatctctctttgtctttgtaagaacaatacgaaccatttttctgtcctctaaaaaaaaaacacacacacacacacgcacaaataaattagagttcttcatcaagttgtttttttttttttttgagacagtatcactctcacccaggctggagtgcagcggcttgatctcggctcactgaaacctccgccccccgggttcaagtgattytcctgcctcagcctcccgactagctgggaatacaggcatgcgccaccatgcccggctaacttttgtatttttagtataaacggggttttgccatgttggccagggtggtctcaagaagttcttcattaaatttt

SEQ ID NO: 96322 - DNA, 504 bp, Homo sapiens
taagaattccaaagaatcacaatcaggataaaggaacgaaacccccatgtaggaaaagtaaaactactgaaatccaaagatgaagagaaaactctaacagtcagatggaaaaatccacaagataccttcaaaaaccattgaataacactttgggaggccaaggcaggcagatcatttgaggtcaggagttccagaacagcctggccaacatggtgaaaccctgtctctactaaaaaaaaaaaaaaaaaaaaaaaaaatgtagccaggtgtggtggtgcctgcccataatcccagctacttgggaggctgcggcaagagagaatcactcgagtccaggaaacagaggttccagtgagccgagattgcaccactgcactccatcctggatggtaragactctgtctcaaacaaacaacaaaaaaagcaagaataggaaagacaggtgattttcaccaagaacacaggaacaaaagaatcgaatgcaatgaaatattatcctcaatg

SEQ ID NO: 96323 - DNA, 571 bp, Homo sapiens
gaacagaatagagaacccaaaaataaagccacacagctatagccatctgatcttcaacaaagtcaacaaaaataaccagtggggaaaggactccctatttaatagatggtrctgggatagatggttagccatatgcagaagattgaaactggatctctacctttcgccatatagaaaaattaactcaagatagctcaaagatttagaggtaagacctcaaactctaagaatcctagaagaaaaccaaggagataccattctggacattggtcttgggaaagaatttatgattaagacctcaaaagcaattgcaacagatacaaaaattgacaagtaggatctaactaaaataatgggcctctgcacagtaaaataagctatcaacagagtaaacagcctacagaatggggaaaatgctctcaaactatgtatctgaaaaaggtctaatatccagagtctataaggaacttaaataattcaacaagcaaaaaacaaccacattaaaaagtgggcaaaagacatggacatttttcaaaagaagacactcaaatagccagcaaacatgtaaaaa

SEQ ID NO: 96324 - DNA, 571 bp, Homo sapiens
gaacagaatagagaacccaaaaataaagccacacagctatagccatctgatcttcaacaaagtcaacaaaaataaccagtggggaaaggactccctatttaatagatggtactgggatagatggttagccatatgcagaagattgaaactggatctctacctttcgccatatagaaaaattaactcaagatagctcaaagatttagaggtaagacctcaaactctaagaatcctagaagaaaaccaaggrgataccattctggacattggtcttgggaaagaatttatgattaagacctcaaaagcaattgcaacagatacaaaaattgacaagtaggatctaactaaaataatgggcctctgcacagtaaaataagctatcaacagagtaaacagcctacagaatggggaaaatgctctcaaactatgtatctgaaaaaggtctaatatccagagtctataaggaacttaaataattcaacaagcaaaaaacaaccacattaaaaagtgggcaaaagacatggacatttttcaaaagaagacactcaaatagccagcaaacatgtaaaaa

SEQ ID NO: 96325 - DNA, 648 bp, Homo sapiens
gaaaacaagaagtattatattgaaatgctaatctcatttcattaaatgaattgtggaggctgagatagtgatctgcatccacaaagaataatttctttaaatgccttgagctcaatattcccttctggacaacttttcatcttcttttttttttaaagtattaaattgtgctaaagcgtcccaactgagcttggtttttagatcatccaagctaaagggtatatactcagtggtgagggtgaggcactgatgcaccccaaaatctcctcttaaaaacagctgtgccctgccttctcaggctggcttacattgcctgaagcagctccccaaagctgagtagtgcttatttcaggaaatagcaaataatcacactgtttcaggtcaagtccattacaaagttggycaggtcaccgcaagcttctctcagaggctttggccccaaagcttccatatttattgggagtaaacctttatctaaaagagcatccattttggccccaaagcttccatatttattgggagcaaacctttatctaaaagagcatccatttcagttctctagggaggacagctgctgatccaagaatgttctttataatgagcttggggttgaggtcataaagttgttcacggccagctctgttcttg

SEQ ID NO: 96326 - DNA, 583 bp, Homo sapiens
atgatccagcaatcctaattctaggtatatatccaaaaggaaagaaaatcagtatattgaagagatatctgcacttcyatgtttattgcagcactattcacaatagccaagatttggaagcaacctatgtgtccatcaacagatgaatgtgtaaagaaaatgtggtacatatacacaatggggtactattcagccataaaaagaatgagatcctgtcatttgcaacatggatggaactagagatcattatgttaagtgaaataagccaggcacagaaagacaaactaagcatgttctcacttatttgtgagagctaaaaattaaaacaattgaactcatggagatagaaagtagaaggatggttttcagaggctgggaaggatagtgggtgtgggtgagagggaagtgggaatggtgaatgggtacaaaaaaatagaaagaatgaataagacctagtatttgcttgcacaacaggatgactatagtcaaaaatagtttaattgtacattttaaaataagcaaaagagtataattgaattgtttgcaacacaaaggataaatacctgagatgatggatactcca

SEQ ID NO: 96327 - DNA, 632 bp, Homo sapiens
taactaagcacttgccatgtaagtgccaaactctttacatgcatcatctcattttatccttgtaacagttccgttttacacaagtggagactgagacccagagaagtaaagtaagtaactgccccaaattacagtgtttagaagtgatggaaccaggattgagccaatcttggtctagatctactactttaaccacaagcaatactgcctctgcttatgagcatgtgtgagacacyttctaaatactacctagatggtcagaaagagctaaggaaggtgatgcctgacctgagtccttagggtaaggagaaaccaaccagtctgagaaagagaaaaaaggtgtttagagagcattgcaaggaaaggggaatggaacagacagagcatagaagactttttgggcagttaaattactctctatgatattacaatgatggacacatcccactatacgtttatcaaaacccataaaatgtacaacaccaagagtgaactttaagataaactatggactttgggagattatgagtcagtgtggtctcatcagttgtaacaaatctaccactcttttgggggataataatagtaataataattatgagggaggctatagatgtgtgggggtagggagt

SEQ ID NO: 96328 - DNA, 603 bp, Homo sapiens
tagaattcagaggttggagttctgatgattagctgatgcactcatgtaagttccctgttgtgggtgactccaaarggttcttcatttgagtcagacttatgatttcttcagaatggtcttttgaaaattactttttgattagtctaggcatgatacataattgcttctccaaaaccaaaaagggagggtgtggtctttgggcagcagggaaaaacttgagtttggctgcagccttttcttgttttgatcaatgtcacaagactatgcaggatgaaattagttagggttaccaaaaaattagacagtcttgcaggggaaaatgcatccctgtattctgccttttgctgagatatttcccttgtaaagttttggatgggcagtcagagccatttgcctagaaacaaaggtagagaggatgtgccagtccagctcatggcatttaccatggcaatgccatgctcaggtatggacatgtggtcacagtaagtgttgaaggcaggccttgaggactttgcatttagaaaagtaacaaatagctgcctttaaagcaaatttccccagagttacacaggttaccttgtacttggatgaagacatatgctt

SEQ ID NO: 96329 - DNA, 603 bp, Homo sapiens
tagaattcagaggttggagttctgatgattagctgatgcactcatgtaagttccctgttgtgggtgactccaaaasgttcttcatttgagtcagacttatgatttcttcagaatggtcttttgaaaattactttttgattagtctaggcatgatacataattgcttctccaaaaccaaaaagggagggtgtggtctttgggcagcagggaaaaacttgagtttggctgcagccttttcttgttttgatcaatgtcacaagactatgcaggatgaaattagttagggttaccaaaaaattagacagtcttgcaggggaaaatgcatccctgtattctgccttttgctgagatatttcccttgtaaagttttggatgggcagtcagagccatttgcctagaaacaaaggtagagaggatgtgccagtccagctcatggcatttaccatggcaatgccatgctcaggtatggacatgtggtcacagtaagtgttgaaggcaggccttgaggactttgcatttagaaaagtaacaaatagctgcctttaaagcaaatttccccagagttacacaggttaccttgtacttggatgaagacatatgctt

SEQ ID NO: 96330 - DNA, 513 bp, Homo sapiens
tttattggtaaagatctgtgtttaggcacaagctagtaaaattcagcaagacctattaacctgggaatcaacaccaaaaggtgcttctagatcaatattcacacaactgagccctctttggtagagaaaacyacaaacccaggctactttgaacaaatataaataagcttttcattgaagagactatataattgcagagagcaggtagcaaattgagtggatgcagaagtctgctaatgcatggggatgagggtttttcaagctttagtcattgatttaattcctgtttgcataaacgaggtgttaaaagatactacaactaacataatctaaaacagtgtgttagctaacacaaattcaagatagcatatatagtgtaggtacaaggtaatgtctatttactggtcagagtttaggcaagaaacaaaaccactctagatatcttgagaagaatggggtttgattcagagataggtatttgcgaaatcactggaagagttagtgaatggaatt

SEQ ID NO: 96331 - DNA, 537 bp, Homo sapiens
ctttcccaaattctcttagcaaaatggagatagaatcaaaactgaatcccaatctctggtccccattttgttacaatcactgtatttttcacaatattatctcaaactttacccatcgagatgaggttcctggtctcgcagctctctcacagatgattttaagccagggaaactgctattttttaatgcttattgttttctttgtttaatatgtattcattgtagagatttggggaaaataaaatgaccaaaaatcttactaccaattttgctgtctatacattggattcgcatcacagttttaacttaatgctagctaattcaacaatgtgggttcagggggaaataaaagaaattttaaaagccaaagccaaaaacaatttaaaactcctgatttacccaagaatctttcttcttcttyttttttttttttttttttttttttttgaaactttcctaagggaagaagttcaggttcctaatccacttttttttgcattacgatattcttttattgatattatttttaatacaaat

SEQ ID NO: 96332 - DNA, 578 bp, Homo sapiens
ttgtctcgggggctgggcatggtgacttacacttgtaatcccagcactttggaaggccgaggtgggcagatcaattgaggtcaggtgtktgagaccagtctggccaacatggcgaaaccctgtatctattaaaaatacaaaaaattagccaagcatggtggcccgtgcctgtagtcacagctactcaggaggctgaggcatgagaatcacttgaacccagtgagtggaggttgcaatgagctgagatcacgtcattgcactccagcctgggtgccagagtgagactgtgtctcaaaaacaaacaaacaagcaaaaaacagtgtgtctctggtagattgcatatacttggatcacttttttttaatccatcctgccaacctcttcttgtagtgcttaacaaactctgtagtgtttaatatgtttacatttaatacactgatggggtaggatttacaattggtattgtggtatttgttttctatttgtgttgttattgttttattcctctattcttccattactaccttctgttatattacatgaatattttctagagtaccatttttgttcctatattg

SEQ ID NO: 96333 - DNA, 578 bp, Homo sapiens
ttgtctcgggggctgggcatggtgacttacacttgtaatcccagcactttggaaggccgaggtgggcagatcaattgaggtcaggtgtttgagaccagtctggccaacatggcgaaaccctgtatctattaaaaatacaaaaaattagccaagcatggtggcccgtgcctgtagtcacagctactcaggaggcygaggcatgagaatcacttgaacccagtgagtggaggttgcaatgagctgagatcacgtcattgcactccagcctgggtgccagagtgagactgtgtctcaaaaacaaacaaacaagcaaaaaacagtgtgtctctggtagattgcatatacttggatcacttttttttaatccatcctgccaacctcttcttgtagtgcttaacaaactctgtagtgtttaatatgtttacatttaatacactgatggggtaggatttacaattggtattgtggtatttgttttctatttgtgttgttattgttttattcctctattcttccattactaccttctgttatattacatgaatattttctagagtaccatttttgttcctatattg

SEQ ID NO: 96334 - DNA, 578 bp, Homo sapiens
ttgtctcgggggctgggcatggtgacttacacttgtaatcccagcactttggaaggccgaggtgggcagatcaattgaggtcaggtgtttgagaccagtctggccaacatggcgaaaccctgtatctattaaaaatacaaaaaattagccaagcatggtggcccgtgcctgtagtcacagctactcaggaggctgaggcatgagaatcacttgaacccagtgagtggaggttgcaatgagctgagatcacgtcattgcactccagcctgggtgccagagtgagactgtgtctcaaaaacaaacaaacaagcaaaaaacagtgtgtctctggtagattgcatatacttggatcacttttttttaatccatcctgccaacctcttcttgtagtgcttaacaaactctgtagtgtttaatatgtttacatttaatacactgatggggtaggatttacaattggtattgtggtatttgttttctatttgtgttgttattgttttattcctctattcttccattactacyttctgttatattacatgaatattttctagagtaccatttttgttcctatattg

SEQ ID NO: 96335 - DNA, 470 bp, Homo sapiens
gaaaccccatgaatgtaaggaatgtgggaaagcctttatctctgattcacatcttattcgacatcagagtgtccatactggggagaaaccctrtaagtgtaaggaatgtgggaagtcctttcgtcgtggctcagaacttacccgacatcagagagctcatactggtgaaaaaccctatgagtgtaaggaatgtgaaaaggcctttacttgtagcacagaacttgttcgacatcaaaaagttcacactggggagagaccccataagtgtaaggaatgtgggaaggctttcattcgaaggtcagaactcacacatcatgagagaagtcacactggtgagaaaccctacgagtgtaaggagtgtgggaagccctttggtggtggctcagaacttagttgacaccagaaaattcatactggtgagaaaccatatgaatgtcagcagtgtggaaaggccttcattcgggcctcac

SEQ ID NO: 96336 - DNA, 557 bp, Homo sapiens
gtgattatgtccactggaatttcagtatactgtgaggctggaggccagtctggggatgatgtttttgcagaagaggtgaaatcagtcttggaactctgtaaaaggtgagtggacccaggagaagaaggtgtatttgttggtgtgactgagctggtgtccagggacatgttkgtcttcctaaatccagaagtcaaatgagaaaatggctcagcctcaaatcctgtggtctcaaaattagcaggcattgatgtggaaatagaggtttcagccatggaagagggagtacccactgggtatgtagccttggatggctccgagtggattgaaacagaggaatatagttcatgtccagaactggtggttcccacattggtcactgccatgcttgaagaaggatgaattttctctgtatctgtggtgacttcagaggcagccagtatttcaactgaggtgccactcagatttggagataaactggttccaggttctgtgcttgtgtctgtagtcttcaccatgcctggggtgaggagtgaagtcacagaaaaagaggaggaagg

SEQ ID NO: 96337 - DNA, 422 bp, Homo sapiens
tgaattccagaaggaactactgagatgcaaagaagcacagcagcttttgcacacatgcgtgggattagatggaaaacaagtggattgagggtctgccaatgaaagcgacccrtactgaagtccactggctctggttgagacccagaagagtcatgcatcagaataaaggtggacaggaaataccctggcctttgtagggactgagcctgcaccgatgacttcaattgcagcctgtatggaggacccctgaccatcccccagaagtagactcccatctcttctgcagcaagataacatgctactaggcctcaattcattgctaaacattttttaacaagtatctcacatttaacaaaaaaagatcagtcatatggcagcaaaatacaatgtcatatgaccaaaacatgaaagactgtgaaaat

SEQ ID NO: 96338 - DNA, 410 bp, Homo sapiens
ctgaattccagaaggaactactgagatgcaaagaagcacagcagcttttgcacacatgcgtgggattagatggaaaacaagtggattgagggtctgccaatgaaagcgacccatactgaagtccactggctctggttgagacccagaagagtcatgcatcagaataaaggtggacaggaaataccctggcctttgtagggactgagcctgcaccgatgacytcaattgcagcctgtatggaggacccctgaccatcccccagaagtagactcccatctcttctgcagcaagataacatgctactaggcctcaattcattgctaaacattttttaacaagtatctcacatttaacaaaaaaagatcagtcatatggcagcaaaatacaatgtcatatgaccaaaacatgaa

SEQ ID NO: 96339 - DNA, 659 bp, Homo sapiens
tttcttatcctccacacacccttcctccttcttgaaacctcctttcaaccctctactctctgtcatactttatttctgcagcattggctgaccacagacctctctagtttcccagagtgggggacagtccataggactaaggattaaggacttccttcgttatttcactccttctccttgaagcagatcattaggcataaaagctttgagccaaccgtaacatcagattgttccacaaatgacacataacatgaaaatagccatcatagcttggaataacaagtaagtgcatcccccctccttcatgcgatgtcttgcaggagccaagtctttctatctatatccaggcagatggtgcaattttcttgtccttcctcatgcaaacagctcatctccgaggatgaagatgtygccatttgggctgtgctctttgcttcaagttgtaattgttcaggttagcttgacacttgatggaacatctgtaattaatgtgtcacttagggaggtacaaaggaaggaaaacaccgagggaccattttaattgagaaagaaattcaacaattaattcaaaaaccctttaagcacctactatgcacaaataactgcttgggactagagctacgaagttgagaaaatggtccttagcttaaggaagacag

SEQ ID NO: 96340 - DNA, 563 bp, Homo sapiens
caggcaacaaggcaattaacaccgggaagattgatccaagattaggaaacccttccttgggggctaggattcagaatcaagactccagacttggaaacgaaccataaagggctcaagtagaaattcaggaaaaaggaccaagataaaattccaatcttgcaaactaaagctagcgaaaaacaagacttgatgtttttggatactgaaacccttgtgatagaaaaatagcaaaagaaaataggaagcacatgaacatagaggacactgagacactggtaggcattcctgggaacgcgagccccagtggctyaagcaacgctaagtcctcataataggcattgcatatgtcccaggattgatctgggaatggaggagttgctgagaactgctttacccacagtttcctgttatatatttagtgagcatttatcatgtgccaggcactgcgctagatgctgggttatagtaataaggaaaacagacaatgaccatgcaatcactggaaagccagtcaataaacaaagaaattgagccaagcaaattctaatttaatggagcccaaa

SEQ ID NO: 96341 - DNA, 563 bp, Homo sapiens
caggcaacaaggcaattaacaccgggaagattgatccaagattaggaaacccttccttgggggctaggattcagaatcaagactccagacttggaaacgaaccataaagggctcaagtagaaattcaggaaaaaggaccaagataaaattccaatcttgcaaactaaagctagcgaaaaacaagacttgatgtttttggatactgaaacccttgtgatagaaaaatagcaaaagaaaataggaagcacatgaacatagaggacactgagacactggtaggcattcctgggaacgcgagccccagtggctcaagcaacgctaagtcctcataataggcattgcatatgycccaggattgatctgggaatggaggagttgctgagaactgctttacccacagtttcctgttatatatttagtgagcatttatcatgtgccaggcactgcgctagatgctgggttatagtaataaggaaaacagacaatgaccatgcaatcactggaaagccagtcaataaacaaagaaattgagccaagcaaattctaatttaatggagcccaaa

SEQ ID NO: 96342 - DNA, 563 bp, Homo sapiens
caggcaacaaggcaattaacaccgggaagattgatccaagattaggaaacccttccttgggggctaggattcagaatcaagactccagacttggaaacgaaccataaagggctcaagtagaaattcaggaaaaaggaccaagataaaattccaatcttgcaaactaaagctagcgaaaaacaagacttgatgtttttggatactgaaacccttgtgatagaaaaatagcaaaagaaaataggaagcacatgaacatagaggacactgagacactggtaggcattcctgggaacgcgagccccagtggctcaagcaacgctaagtcctcataataggcattgcatatgtcccaggattgatctgggaatggaggagttgctgagaactgctttacccrcagtttcctgttatatatttagtgagcatttatcatgtgccaggcactgcgctagatgctgggttatagtaataaggaaaacagacaatgaccatgcaatcactggaaagccagtcaataaacaaagaaattgagccaagcaaattctaatttaatggagcccaaa

SEQ ID NO: 96343 - DNA, 563 bp, Homo sapiens
caggcaacaaggcaattaacaccgggaagattgatccaagattaggaaacccttccttgggggctaggattcagaatcaagactccagacttggaaacgaaccataaagggctcaagtagaaattcaggaaaaaggaccaagataaaattccaatcttgcaaactaaagctagcgaaaaacaagacttgatgtttttggatactgaaacccttgtgatagaaaaatagcaaaagaaaataggaagcacatgaacatagaggacactgagacactggtaggcattcctgggaacgcgagccccagtggctcaagcaacgctaagtcctcataataggcattgcatatgtcccaggattgatctgggaatggaggagttgctgagaactgctttacccacagtttcctgttatatatttagtgagcatttatcatgtgccaggcactgcgctagatgctgggttayagtaataaggaaaacagacaatgaccatgcaatcactggaaagccagtcaataaacaaagaaattgagccaagcaaattctaatttaatggagcccaaa

SEQ ID NO: 96344 - DNA, 432 bp, Homo sapiens
agcccgcaccccaccatgggractggaaatgacagatgttcactacccagaccgctttgcaactcggggtagccacacagccgggttctggcaagagagaaataaggagaattattctgaggaggaaaaatggggaacacagaaggggaggccccggtctacactgcctgatttagatgccagtgtgtgaaaacatgatgctgctatagacagtttgtactcaggaggggaacgaacaccagtctcagagatgccaaccagagcctaatgttgttgagcagctgaaccaaccctgggactgtctttgaaaaatttgatatgcaaacatgcaaaaaaatctttctctttcagttgggaagttttttttttttttttcagccgaaggtatcataacagatacagcattatacacctggagctccaagtgaccat

SEQ ID NO: 96345 - DNA, 432 bp, Homo sapiens
agcccgcaccccaccatggggactggaaatgacagatgttcactacccagaccgctttgcaactcggggtagccacacagccgggttctggcaagagagaaataaggagaattattctgaggaggaaaaawggggaacacagaaggggaggccccggtctacactgcctgatttagatgccagtgtgtgaaaacatgatgctgctatagacagtttgtactcaggaggggaacgaacaccagtctcagagatgccaaccagagcctaatgttgttgagcagctgaaccaaccctgggactgtctttgaaaaatttgatatgcaaacatgcaaaaaaatctttctctttcagttgggaagttttttttttttttttcagccgaaggtatcataacagatacagcattatacacctggagctccaagtgaccat

SEQ ID NO: 96346 - DNA, 432 bp, Homo sapiens
agcccgcaccccaccatggggactggaaatgacagatgttcactacccagaccgctttgcaactcggggtagccacacagccgggttctggcaagagagaaataaggagaattattctgaggaggaaaaatggggaacacagaaggggaggccccggtctacactgcctgatttagatgccagtgtgtgaraacatgatgctgctatagacagtttgtactcaggaggggaacgaacaccagtctcagagatgccaaccagagcctaatgttgttgagcagctgaaccaaccctgggactgtctttgaaaaatttgatatgcaaacatgcaaaaaaatctttctctttcagttgggaagttttttttttttttttcagccgaaggtatcataacagatacagcattatacacctggagctccaagtgaccat

SEQ ID NO: 96347 - DNA, 512 bp, Homo sapiens
gaattcgtatttaattgaacatacactggttgtcagacactgctcttggaactttttttttttttttttttttttttttttttttgttgagacagagtctcactctgtcacccagactggagtacagkgatgcgatctcggctcactgcaacctccgcctccgggtttcaagtgattctcctgcctcagcctccagagtagctgggattacaggcgcctgccaccatacccggctaatttttatatttttagtagagacagggttttgccatgttgcccaggctggtctcgaactcctgacctcaggtgatccactcacctcagcctcccaaagtgctgggattacaggcgtgagccaccatgcccagcctgctcttggaactttacaaacattataatttactttgatgacaaccctattaaatataaatgagtatccccgtttttacatatgaggaaacagaggttccaagtgaaagaatggacttgtctagtgacacagttagctggtg

SEQ ID NO: 96348 - DNA, 383 bp, Homo sapiens
atctgttctcttttctacagccttattttgtgttttctggtttctgttttttcctttgtggctttaaaaaagtttttctatctttggaaggttggtgaaatttcctttgctcacttttatatgtatgccatgttaaatgtagaatcacctttaaatcaagaaaaaaagacctgtatttctgttttctacttatgttcaaaagttaaacaattttaattttctaattttaacatttaacaattttaagtttctaattttccttaaaaaaytagaaaattttccttaaaaaattagaaacttagcatagttttgatgcaaggcaggcaagccctaaagtggggcttatcccacgagggttcttggcttcacccaggaaagaattc

SEQ ID NO: 96349 - DNA, 409 bp, Homo sapiens
cgaaccagctgtccttctgacagctcggtgttcagcttacagagaccacccctttcctccacagggagaggctcctccctctcctgggacagctcacaggtcctagtgattctctcaaccctaacaccgtctggcacgattgtgaccgctgaagtacaccacgagctccaggcttcagaaagtggtgctgagaacttgctccaagaagaagtcaaaccaaacttgcagttgatttggggtcatgtttaggtcagaatcaccgtgcccttgaacaagcaggtaggggggcttgatamcttaactttccacgtggacagaatttttttttttgttttgtttttgttttgcagacacagtctagctctgtcgcccaggctggagtgcagtggcacgatctcagctcactgca

SEQ ID NO: 96350 - DNA, 604 bp, Homo sapiens
actaaaagtacaaaaaattaggggggtatggttgcatgcatctgtggtctcagctactggggaggttgaggtgggagaatcacttgagctcaggaagtcgaggctgcagtgagttgtgatcgtgccactgcatgccagcctgggcgacagagtgagatcctgtctcaaaaaaaaattatcttattttagaaacatgtcagaaaaatcaaagaacawgcccagttgaaactacagtaagatcctttgattcaccttcaaggtttctttccacagctgattatgacttgattctgaaatcagagttttgaaaaggaacatagaaaacacttttagccagttattctgctaatcatcagaatcttcacatcatgtccagaagttgcatttatcagaagtggctgaggaggttttgcattgggaatcaaatattctcatcagagaagccccagactcactgaggcaatgtcactgagagatactacagatgacatgatcgtgacatctctgtggggagatcaggtccaggagcctgtctctaactaaggactcaggtgccccagcttatggtgactgacacatccctgtacagagcttgttgccaaga

SEQ ID NO: 96351 - DNA, 539 bp, Homo sapiens
agaattcatcaccagcatgctaacactataggaaatgaagtcttcaggctaaagaaaaatgatactgtagagaaaattatatgaacacataggaatgaagagcaattaaaatggttaataagtgaataaatttgaaacagcttattctgtaataaaacatctttttaaaaaacaaactcttttcaggcagggcgcagtggctcacgcctgcaatcccagcactttgggagtccgaggtgggtggatcacaaggtcaggggtttgagaccagcctggccmacatgggtgaaaccctgtctctactgaaaatacaaaaaaaaaaaaaaccacttagccaggcatggtggcacgtgcctgtaatcccagctacacgggaggctgaggcaggagaatcacttgaacccgggaagcagaggttgcagtgagccaagactgcaccattgcactccagcctgggcgacagagcaagactacatctcaaaaaaaaaaaaaaaaaaaaaaaaaaaaagaactgttttcaataaacatggagtttatac

SEQ ID NO: 96352 - DNA, 490 bp, Homo sapiens
tgtgatcaaaagtgcaaggtgggaggtaatttacattggctgattgatgaagacttgragtatcactttatgaagaaccaaactcttcagtgaattaattgtagacaggagtaggttcctgagacttcagatgcataaaatatttaaaagtaggagtttggccaaaaagatgtcctgaagtttagtgcattaatgaatgacttaagcatcagcacatctaagagaggcctagaaggaaatgcagtcttcatccagttacaaaaccatggtcagtgaaaaactagagagatatagtcatggtatcttttgggaatatatcccatgtcagcttagaagttaaggagagcactgtttaacaattttcttctttataggaaataattgatattaacaattgagattattacttcttgttcttaagcaatctatgctgatatctctgtttcacttccaaatataggctgcatatctaacaaagaaaagaaaatta

SEQ ID NO: 96353 - DNA, 632 bp, Homo sapiens
gggttagtggtcagctaatggttgaacagagtttttcttaaatgcctgaactaaaaattatttgtctttgccaagtggttcttggggtggagggtacacacctttgacagtcaggaagtttacaactctacctcaccatttactgattgtttctgcagawccttaaggtgagagttgagggccttctcaaatcttttctgagtaggtacacggccctgagctgtgtatatgcagccttccagatttccagaaatatgttggaacttttcaaagtccttaaggacatgtcatctctctacctttattctcaagatttttagttggcgttattatttgccacgctgttatctattgcctcaagcagcagcaacctaacctaagacactagcttataaatgtttttgacaaatcccttcccctctcaaaagcagatttagcaggaggctggctctataaagacaggagttttgaattggtcccacagagccactagacaggtaagaacaaataattaattacaattctttgctaatgatgtctcttctctctttagtatcaggaatgtggccttattttcacagctactgtcaagactaagtttactgttcttacttacaatgagcattgttctt

SEQ ID NO: 96354 - DNA, 460 bp, Homo sapiens
agcgaaattccatctcaaaaaaaaaaaattgcaaaaataaaaaaagaggaaaagacaggagacaaagagacaaaaagtgagtgagcaggtgaggagagagattgagaactatgagagacagcaactagtagaaaaaggaggcaggagactgcttgggtgccacagcacccacaccatcctcttgcccctgtcatttggacccaatagctgacccttgatagaggagagcagacctcgcagcagcctgagcctgggcagccgtgcctccaccatctccccactcagcagcctaagtcccaagctatatgtgatgcaactctcagagtctatggatgtgtaaaaatgtatactctggcaaacaacttacagatagttacctaatatatacatacatacatacatacatacatacatatatgtgtgtgtgtgtgtgtgtgtgtgtgtgtgtrtatatatacac

SEQ ID NO: 96355 - DNA, 530 bp, Homo sapiens
gtcctctgactagaaacagcaaattgttccttggactatttttctctctgtcagctagcatttccagttttcctgttaaatgtcttttttctttttccttttttttgagacaaggttttgctctgttgcacgatcacagctcactggagcctyaacctcctgggctcaagtgatcctcccacctcagcccccgtgaagctgggaccacaagtatgagccaccacacctggcaaaatttttttaattttgcagagacagtgtctccctgtgttgctcactctggtctcaacctgagctcgagtgatcctcctgccttggcctcccaaagtgctcgattacaggtgtgagccactgcacctggccttattatgtgtctatgtgtggattttctagtttattctgtttgggatttgtctggcttctagaatgtgtggggtcatgtctttcatcagtttttaaaattctgcattctatctaagtatttgctctgtcctattcttgcctctcctctcacagctaatgaagcactt

SEQ ID NO: 96356 - DNA, 572 bp, Homo sapiens
aagtatggatctcttaaatttttagatatttaaatattgtgctaatgatttgaaaagatcattcctgcctaaagagcaaagcttatgtgtttcaaaaatcagacatatttatacttttagtgtttgtggcatttcagctttagtgctggagttagttttaacaaattaggttgcaatatgtaatatggcacattctttcactaaaaaagatgttctataatgaaaaacactaattctatttctaatggtaaactagagttggaggtcccaccatggatcacaggtatcagagcactatcaagatcatttagataatgctgaggcagaagttggccttcagatcctgcctgaaattcaacctagaaaaamaaaaaattcttgataagaaaatgagcaatcttgtttaactcggaatgtgaatataaaataagtgaaatattttaaaatacagttcaagcatgttaaataaaatatttgatatatttataaaaaaattctacattctcctgtatcttttatctgtctactacataaattataattgttcctcctcatatatcataaagataaaa

SEQ ID NO: 96357 - DNA, 238 bp, Homo sapiens
atcattacataccaaactttttgtaacctactataatgttttaccactttaagtgaaatttagaaaacttaccatataggttctgtcactgtccccttggttagtatgcagttttcatctgtattacatctatatgcattgaaaatcccaaaagatgatgttacaatttttttatttcagcagttacatatattttaacaaacatrtaagtctatttggtttatccagagatttgcca

SEQ ID NO: 96358 - DNA, 570 bp, Homo sapiens
aaatatatgagccaataatttcctttttatgtttaagccagttttggataggttttcagttgcctccaacaggaaaaacagcaacaaatcttttaacttaggtaaattttaggcatttttttgtctcctctataatttattctatttttcttattttatttttaatgatctctgtatttctttccttaactttttcacttcaaaatgaataaagacggggagaatgactattaacataaagaatcaaaatagagtaggatttgtaaaatctaactcagaagtttgtgtgattgtggcagacaaatttgtgtgcatgtcatatatgtaagatatcatcttatagcttggttatgtagatgaaaaatataggaagactatatattgtcttcccccaaatgtctgcactggcctcattaatttgttgttgactttatgtaaaaactgtgaaggttacaatatagaactagggtctaaaccaaactgtacctgraggacctatagttccaagcagggcatgaaataaataaatatgaatttgtagaaaagaaaatttagcctacttgccaggaa

SEQ ID NO: 96359 - DNA, 604 bp, Homo sapiens
caccattctctacctcctcaagtcccagactttggtgttattatagattattctctttccttcaccgctgcctccaagatcacatcaccagcaagtccttttggttcataccacccaaacaggtctcaattcatccatgttcctctcccatggacaccttattgcaagctgccattttctcttccttgaactaycatggcctcctaatgtccttacttcctctctcctcccatagacaatttacgaaacattcagaatgatcttaacggagtttatgctctaggaaggaagacagaaaataaacacataagtaaataaattaaaaccattattaattatgataaatgagatgaaggaaatcaacacaatgatgtgataagcagagatgaggccatgagtctcctgtagatggtaagtaccttaatctgctcaggccatccctcataacaaagcaccatagagtcatggcttaaacagcagacttttattttctcacagttctgcatgttagaagtccaagatcaaggtgctatcaggggaggtgtccagcgaggcctctcttcttggcttgtagatggctgccctcttgccatgctcacacatg

SEQ ID NO: 96360 - DNA, 604 bp, Homo sapiens
caccattctctacctcctcaagtcccagactttggtgttattatagattattctctttccttcaccgctgcctccaagatcacatcaccagcaagtccttttggttcataccacccaaacaggtctcaattcatccatgttcctctcccatggacaccttattgcaagctgccattttctcttccttgaactatcatggcctcstaatgtccttacttcctctctcctcccatagacaatttacgaaacattcagaatgatcttaacggagtttatgctctaggaaggaagacagaaaataaacacataagtaaataaattaaaaccattattaattatgataaatgagatgaaggaaatcaacacaatgatgtgataagcagagatgaggccatgagtctcctgtagatggtaagtaccttaatctgctcaggccatccctcataacaaagcaccatagagtcatggcttaaacagcagacttttattttctcacagttctgcatgttagaagtccaagatcaaggtgctatcaggggaggtgtccagcgaggcctctcttcttggcttgtagatggctgccctcttgccatgctcacacatg

SEQ ID NO: 96361 - DNA, 562 bp, Homo sapiens
ttccacttacaagctgggtgaccttggccaaatttctcagcctccctgagcctcaatatccttgtaaaatgtaaaaaaataatgcctgcttgccaggcttgtgaggatgaaatgacataatatatgctaaaaatgcctaggcctgttcccagtaggtggtcagagctggtttccttcctctctctacccccttatattcattcatctctttttatttttgctgtagctcacactttagagaaggtaatacctgcttttcatttcttctgaaaaggctgcacaaatctagcatctatagtctggataattatccggagtcttgataatgatgtttatgagaacygtgccaaggaatgggacattctcatcctagctgaacactcgctgcatctcagaaaagggcaaaggcagcccaggccgggtgcacacaggccaaggaaggtcaatagcagtagcagaagccaagtcatttccccaccagggagaaccaaagggccagaagttaaaagaaaggacaagtttcccagacatctgtttctctcgggatttgtagcactgatcc

SEQ ID NO: 96362 - DNA, 540 bp, Homo sapiens
gcccaacagctcaccaataaattagggaagtatcaaaaatatcacagaaggaaaaaaaagacagaagttaaacatttgaaacttttttgactgacatgtgttaagtaattaagtaactcatctttactgtgtgttctgctgttaggttgcattatagttttgtgattttaaagcatctagtagagacagcacaaacctgtctgactaagaatcccaggcaaaaactgtatgctgacaattctgaagacayttatatttttatttcaccaacagttttaaaactacctttatttaacaaagattatctcatgtcatataagctgaaggtaatttcagttagtttctgttttattttatctctaggaaagtgcttagagcatagtgtgtactgtcagagaaattttatggaagctgtggactagattttaggtctgaatgtttccaaagcttatcggggtggagaaaatattcatttcttctaaaactagatttgttgcactttttcctaatttggtcttgaagatttagtctggaaagagg

SEQ ID NO: 96363 - DNA, 418 bp, Homo sapiens
gaattctattttgacagtaagcctcaatttgattaatactacacatttaacaacataaaaaataaccttagaggaaattcatttatgaatataggtaggaatgtttctttttctttttttttttycttttttttttttttgacagacagggtctcactctgttgcccaggctggagtgcagtggcgccatctgggctcactgcaacctctgcctcctgggttcaagcgattctcctgccttagcttcctgagtagttgggattacaggcacccaccactacgcccagctaatttttgtattttcagtagagacacagttttgccatgtcaagcgggtcttgaactcctgacctcaggtgatccacgcacctcgccctctcagagtgctgggattacaggcatgaaccactgcgcccag

SEQ ID NO: 96364 - DNA, 545 bp, Homo sapiens
ttaatcaaacatgactgctaaatattggacagggtgagagccacagggaatcaaaaggaaacatgctgaaaggtagtgtgtatgtgtattaaactttcctgagcaatttcaaagaggtagtagttgtgtgaagggtagaatatttgtaccatgatttggatttggtagaaatcttttcagtcagcagtgaaggcaaactggtcatagaagtcctacccacccttctatctcaaccaacttckaaggcatggagacaggtaattaagacatcacctggggctctacttgtcagatccccaaacgaactttcacaattaagttctttaagatcatttgggtattatgccttatgtttatttagctctttagagtttgtcaaatactttcacatatcttatccaaactgatttaaaaaattatttgtattttactttttaaattaaattaattaattcattttggcctggtaatgtcacaaaaaattatttttagaatggttttaggtttacataaaaattggcctgaaagtgaagaggattcccact

SEQ ID NO: 96365 - DNA, 545 bp, Homo sapiens
ttaatcaaacatgactgctaaatattggacagggtgagagccacagggaatcaaaaggaaacatgctgaaaggtagtgtgtatgtgtattaaactttcctgagcaatttcaaagaggtagtagttgtgtgaagggtagaatatttgtaccatgatttggatttggtagaaatcttttcagtcagcagtgaaggcaaactggtcatagaagtcctacccacccttctatctcaaccaacttcgaaggcatggagacaggtaattaagacatcayctggggctctacttgtcagatccccaaacgaactttcacaattaagttctttaagatcatttgggtattatgccttatgtttatttagctctttagagtttgtcaaatactttcacatatcttatccaaactgatttaaaaaattatttgtattttactttttaaattaaattaattaattcattttggcctggtaatgtcacaaaaaattatttttagaatggttttaggtttacataaaaattggcctgaaagtgaagaggattcccact

SEQ ID NO: 96366 - DNA, 545 bp, Homo sapiens
ttaatcaaacatgactgctaaatattggacagggtgagagccacagggaatcaaaaggaaacatgctgaaaggtagtgtgtatgtgtattaaactttcctgagcaatttcaaagaggtagtagttgtgtgaagggtagaatatttgtaccatgatttggatttggtagaaatcttttcagtcagcagtgaaggcaaactggtcatagaagtcctacccacccttctatctcaaccaacttcgaaggcatggagacaggtaattaagacatcacctggggctctacttgtcagatccccaaamgaactttcacaattaagttctttaagatcatttgggtattatgccttatgtttatttagctctttagagtttgtcaaatactttcacatatcttatccaaactgatttaaaaaattatttgtattttactttttaaattaaattaattaattcattttggcctggtaatgtcacaaaaaattatttttagaatggttttaggtttacataaaaattggcctgaaagtgaagaggattcccact

SEQ ID NO: 96367 - DNA, 545 bp, Homo sapiens
ttaatcaaacatgactgctaaatattggacagggtgagagccacagggaatcaaaaggaaacatgctgaaaggtagtgtgtatgtgtattaaactttcctgagcaatttcaaagaggtagtagttgtgtgaagggtagaatatttgtaccatgatttggatttggtagaaatcttttcagtcagcagtgaaggcaaactggtcatagaagtcctacccacccttctatctcaaccaacttcgaaggcatggagacaggtaattaagacatcacctggggctctacttgtcagatccccaaacgaactttcacaattaagttctttaagatcatttgggtrttatgccttatgtttatttagctctttagagtttgtcaaatactttcacatatcttatccaaactgatttaaaaaattatttgtattttactttttaaattaaattaattaattcattttggcctggtaatgtcacaaaaaattatttttagaatggttttaggtttacataaaaattggcctgaaagtgaagaggattcccact

SEQ ID NO: 96368 - DNA, 524 bp, Homo sapiens
ctgcattcttatcataactctctccttcttccacattcattcaaggcgttggggctcagaaatcaataccccaacaatacggcattttgacatgctaaactgaagatgaaccttcaaggtctctctgacctcctctcaaatcctgtatctcaatcctctgtctctcccagatcccagaatgaagttatttctgaaattcccttatctgcctaaagtgcagaactgccaaagaagaaaataatcacctctggtcctttccctgagagttcattaaccgaatttgtgttgcagaagaaagaccaaagtctgtcaacacacctggatagacttttgtcacaaaccattgtctgctttgcaggcccaagagactttgttccaggccactgtatgttcttcaagcccaytgaattctcctaaagatcatttacaatctccttaaaatcattcacatttccttatttcccttttccctaagaaaaagagtatataaccatctgtacccctattgcatggtggagtaatca

SEQ ID NO: 96369 - DNA, 620 bp, Homo sapiens
tacataaaataaagtgttggttcattacacatttgacatatagtaagagcttaataactggtagtagtagctgttgctaatatttgtagagaaagcttgcacccaggtgagtagagtggacaatcacctatccaaagtgaagttattcacctgcctattccagtgtttaaattccaaaccagaattcattcccatgggtttaaggattattccctattaaaatgtccaacacattaatcttctatctactatcagtgtttactgcttcgtaggaatttatcaccccgagagctaaccttgattcactcttttttttttttttttgagatggagtcttgctctgttgcccaggctggagcgcagtgactccctcttggctcactgcagcctccgcctcccaggttcaagagattcttctgtctcagcctcccaagtagctgggattataggcatccaccaccatgcccagctaatttttgtatttttagtagagacaggttttcaccaatgttggccaggctggtctcgaatgcctgatctcaggtgacccrtccgcctcaggctcccaaagtgctgggattacaggcatgagtcaccacacctggcccttgattcactct

SEQ ID NO: 96370 - DNA, 508 bp, Homo sapiens
agagtttattgaatatttatcatgtgtcaggcctgggaccaagtagtttgcacatatatctgcaatcagccacttctcttcatccgcacacctcagtccaagccaccactgtctatagctccgactactggagtaacttcctaattagttcccctgctttcattcttttctctctttttttttttttttttttttttttttttttgagacagggtctcatgctgttgcccaggctgaactgcagtggttcaatcacagcttactgcagccttgacttccccaggcccaggtgatcctcccaccttagccttcaragtagctgggaatacaggcacaagccaccacacccggctaatttttgtattgtttgtagaaatggggtctcaccatgttgcccaggctgatctaaaactcctgggctcaagcaatccacccacctcagccttccaaagtactgggattacaggcatgagccacctcatgcctggccctcattcttcactcttta

SEQ ID NO: 96371 - DNA, 582 bp, Homo sapiens
acaaatagagaaatggtcagaawattagataaatcctgattgtctatcatctaatgaattagaatttttaaaaatgtgaagaaaaaacccaaacttttaaagaaataattaagttaatttagaagagcagataaatatgagcctttatatcaaaaaggtcttatggtatacttagaccaatgaataaaaagtaatttacaatacagcatatcatttcagggaattggaggaaaagagaagtaaaatatttttgataaaatagaaacggggaatagatcacacaccaaggacaatgaataacggtattgacctctttatggcaatgctggaaacaaaacgccaatggaaaaatgcctttaaaatttagagggaaaatgttttctagtcttattccagataggacactacatctaaccaatctatcaatcaagtataaaggttaaaataaattcatttttacatatgcaaagccttaagaaatgtgcctccaatgtaccctttctcagaaagctatttgagcatatactccaccaaaacagctgaataaacaaagacagaaattttttatctaagcaaggagta

SEQ ID NO: 96372 - DNA, 635 bp, Homo sapiens
aaagcagaaagacaaaatacattgaggcaacctggctaaggtgacctattgtttgttaccattctccaacccgtgtgacccaggaatgacagggaaactcaggtgtggcatcctttttttttttttcacctacaatttgtggtattattagaaagatgccaggggagaaagacaagaaaatgagggacaaagagccaagctcctattcagagcctgtggatgagagaagagatgagtgcagggaagaagatggagacctatttctaatctcttctggggagatgtgtgtgaggcttagtttcytttaatttaaaatgcacttatgctgctgttcttagtgcacaggtgaattaaattgaggttgtgaatgtgatttctcttggagtcatttaggtttactgcttcaccagaacagctttcacactaaccctgtggagtcctcttaaaactgccacagctcctgggtgtggaggaatgtaaacagctcaatcccaaatctatctctaatattggagaaagaaatatctctctcacattcacagtctccctattatgtgcagcctgtgaagaatgaaaaatgccctgggggatggaggatggagagaagctggttagggagcaccaaagtacagtta

SEQ ID NO: 96373 - DNA, 635 bp, Homo sapiens
aaagcagaaagacaaaatacattgaggcaacctggctaaggtgacctattgtttgttaccattctccaacccgtgtgacccaggaatgacagggaaactcaggtgtggcatcctttttttttttttcacctacaatttgtggtattattagaaagatgccaggggagaaagacaagaaaatgagggacaaagagccaagctcctattcagagcctgtggatgagagaagagatgagtgcagggaagaagatggagacctatttctaatctcttctggggagatgtgtgtgaggcttagtttcctttaatttaaaatgcacttrtgctgctgttcttagtgcacaggtgaattaaattgaggttgtgaatgtgatttctcttggagtcatttaggtttactgcttcaccagaacagctttcacactaaccctgtggagtcctcttaaaactgccacagctcctgggtgtggaggaatgtaaacagctcaatcccaaatctatctctaatattggagaaagaaatatctctctcacattcacagtctccctattatgtgcagcctgtgaagaatgaaaaatgccctgggggatggaggatggagagaagctggttagggagcaccaaagtacagtta

SEQ ID NO: 96374 - DNA, 605 bp, Homo sapiens
cttcctaaaagtcagttagctgctaaactgcagcaattcaaagcagaaagacaaaatacattgaggcaacctggctaaggtgacctattgtttgttaccattctccaacccgtgtgacccaggaatgacagggaaactcaggtgtggcatcctttttttttttttcacctacaatttgtggtattattagaaagatgccaggggagaaagacaagaaaatgagggacaaagagccaagctcctattcagagcctgtggatgagagaagagatgagtgcagggaagaagatggagacctatttctaatctcttctggggagatgtgtgtgaggcttagtttcctttaatttaaaatgcacttatgctgctgttcttagtgcacaggtgaattaaattgaggttgtgaatgtgatttctcttggagtcatttaggtttactgcttcaccagaacagctttcacactaaccctgtggagtcctcttaaaactgccacagctcctgggtgtggaggaatgtaaacagctcaatcccaaatctatctcyaatattggagaaagaaatatctctctcacattcacagtctccctattatgtgcagcctgtg

SEQ ID NO: 96375 - DNA, 192 bp, Homo sapiens
ttgctgcagccagagaagctgcagaaaaacacggagctgggggtgaagggggacttaaaaggggaactacccggaaggacccaagaacacaaagacagagccactgsggttatctggctggtcagcaagggtatgcggcttcctccgcgctgcggaggctcccagagccaggtcacccattctgccagctca

SEQ ID NO: 96376 - DNA, 559 bp, Homo sapiens
gctcactgaagtttcttttgccaaaatcaccaatgatctacttgttcctaaatcaaatggacatttttcttttaacataattgaaccctttggatcacttaattgttttaataaaatggtccygtcctttggcttctgtgacatttcactcactcccctggtatgttttctacttcatcagccacttcttcataattttcagcttgttctgcctctccttatatgtttgccttcctgaagatcatgttttgggtcttctttttgtctcattttatacattcaccctgtgcagtctcattcactatcatggcttcagttataaagccataacaacatttatcttttacgcaataaccacattaaaaccataactagtactactaataaagcacaaactttattagaaattataattaggagtctgaatatcatggttccaattttgtgtttactattattaataaaaacgtgaccttagacaagtaataagccttccctttaagattcaatttcttttttataaaaaagcaattaaataccctctgaagcaatacacaaa

SEQ ID NO: 96377 - DNA, 532 bp, Homo sapiens
gggcccagactttaaaatcagagagatgaaattccaactctccactcactagctgtgtgaccttgggtaagttccttaacctctctgagcctcactctgcattctcactagtgaaattacaactgtaattgctactccatgaaattgctttgactactaaaataggaaaccctgtcaagggtataacatagtaggtgttgatgtatgttggctattacttttgctattatgtagcaaagcatagattactttggctattttgaaaaaacctgttgctatcaattaaggatagagtggctaaattaagtaaattctgtaagcaaacaaggatgggtctttaattctcctccacttttgatttatggctgaagatttgacagttatctgaagtctgactagcttgaaaaccaagacatctgtgattagacttaccttttgttcttcccattagtgtaatacattgttttaggacatctctgcyaacccactcccccaatatccatctagcttggagcctttatggccttcataa

SEQ ID NO: 96378 - DNA, 432 bp, Homo sapiens
ttaagagttgaaaaccactgctctgggcaaactgccctccggtgtcacacacaaaaaatcaatctcgttactaaagataaattttatttcaataaaaatgtaatgagcttgatcacctacccttttcacctgacttggctacaaatgactgccaactgtttaaaaaaraaaatccaaccgaccctcagagctaatatgctattacttttaaagattacagacaggccaggcgtggtggctcacgcctgtaatcccagcactctgggaggccaagttcctatttcttagtgttagaaagaaagagagagaaatccctcagaacaatcagcagcctggagcatagtttgagactcccactaacagagccaagagtctcaaactaggccaacaggtacccttggggaactctgctgaggctgaggcaggagaatt

SEQ ID NO: 96379 - DNA, 608 bp, Homo sapiens
taatagtatagatgtatataaaaagcagagtttattaaggagtattgactcacacgatcaccaggtgaggtctcacaataggccatctccaagctgaggagcaaggaagccagtccaaatcccaaagcctcaaaagtagggaygctaacagtgcagccttcagtctgtggtcaaaggtccaagagtcccaaagctgaagaactcagagtccgacgttcgagggcaggaagcatccagcacgagagaaagatgaaggctggaagactcagccagtcaagcccttccatgctgctctgcctgcttatattctagctatgctggcagctgattagatggtgcccacccagattgagggtgggtctgcttttcctagtccactgactcaaatattaatcttttttggcaacaccctcacagacacatccagaaacaatactttgtatccttcaatccaattaagttgacactcagtattaaccatcacagggggtgtctcaggggtcctggcgactgttccacagtgccactcccctctctgcccaatgctgtttccttgctttccagcaggtgctcctcccagtaaaccccctgcacccagatctccatcc

SEQ ID NO: 96380 - DNA, 591 bp, Homo sapiens
aagcagagtttattaaggagtattgactcacacgatcaccaggtgaggtctcacaataggccatctccaagctgaggagcaaggaagccagtccaaatcccaaagcctcaaaagtagggacgctaacagtgcagccttcagtctgtggtcaaargtccaagagtcccaaagctgaagaactcagagtccgacgttcgagggcaggaagcatccagcacgagagaaagatgaaggctggaagactcagccagtcaagcccttccatgctgctctgcctgcttatattctagctatgctggcagctgattagatggtgcccacccagattgagggtgggtctgcttttcctagtccactgactcaaatattaatcttttttggcaacaccctcacagacacatccagaaacaatactttgtatccttcaatccaattaagttgacactcagtattaaccatcacagggggtgtctcaggggtcctggcgactgttccacagtgccactcccctctctgcccaatgctgtttccttgctttccagcaggtgctcctcccagtaaaccccctgcacccagatctccatcccacag

SEQ ID NO: 96381 - DNA, 591 bp, Homo sapiens
aagcagagtttattaaggagtattgactcacacgatcaccaggtgaggtctcacaataggccatctccaagctgaggagcaaggaagccagtccaaatcccaaagcctcaaaagtagggacgctaacagtgcagccttcagtctgtggtcaaaggtccaagagtcccaaagctgaagaactcagagtccgacgttcgagggcaggaagcatccagcacgagagaaagatgaaggctggaagactcagccagtcaagcccttccatgctgctctgcctgcttatattctagctatgctggcagctgattagatggtgcccacccagattgagggtgggtctgcttttcctagtccactgactcaaatattaatcttttttggcaacaccctcacagacacatccagaaacaatactttgtatccttcaatccaattaagttgacactcagtattaaccatcacagggggtgtctcaggggtcctggcgactgttccacagtgccactcccctctctgcccaatgctgyttccttgctttccagcaggtgctcctcccagtaaaccccctgcacccagatctccatcccacag

SEQ ID NO: 96382 - DNA, 582 bp, Homo sapiens
tgtgtcttttggctcctgagatcagttgttgatgaaatgctgggctgggctcactcccagagtgggaggaaatggatgtgggaaccctcttggggagatgggcagttaccggggcccagagaaccaatgagggctttatcctgcagtcagagttcaacaccagccctycccagaatcaatcacaccctcctttccactatttcactgtctgccgtgaactaacagacagtggttgtgttgccctcagattcataggctgaagtctaacccccagtgtgatggtatcaggaggtgaggcctttggaaagtaatgagatcatgagggtggagccctcatgaataggattagtgcccttgtaagaagagatatgagagagatgatacccgtctctccaccacatgaggacacagtgagaaggcagccatctgcaagccaggagagagtcctcaccagaccctgaccatgccagcaccctgatctcagacttcccagcccccagaactgtgagaaataaattgctgttgtttaagcttcacagtctattataatttgttatagcagctcaagctaactaagacact

SEQ ID NO: 96383 - DNA, 493 bp, Homo sapiens
tttgctttctttcaatgtgcactttctgcaaaatgccatctgcacttgtttcctggggaaaccatctctctgaggtggstaagttctcattgtgaagatggggacttgcctaatgtttggcattccctttttgggggcacgtacagtgatttctgaactgacttgaaagaccattaacttggtttttactgccttttctggcttgcaaatttaatgcctggctcccaacatgtgtgaatggacaaacagcatcagcatcatctgggaacttgctagaaataaaaattctcaggctttaccctagacttacagaaccagcaactctgagggtaggttccagaagtctgtgagtttacaaatcttccaggtgattctgatccatgctaaagttggatctactgctctaaaccttagtttcttcctttataaaataatagtagtagtagctgtagcagtaataataatattggcttcatggttatagggggaattc

SEQ ID NO: 96384 - DNA, 493 bp, Homo sapiens
tttgctttctttcaatgtgcactttctgcaaaatgccatctgcacttgtttcctggggaaaccatctctctgaggtggctaagttctcattgtgaagatggggacttgcctaatgtttggcattccctttttgggggcacgtacagtgatttctgaactgacttgaaagrccattaacttggtttttactgccttttctggcttgcaaatttaatgcctggctcccaacatgtgtgaatggacaaacagcatcagcatcatctgggaacttgctagaaataaaaattctcaggctttaccctagacttacagaaccagcaactctgagggtaggttccagaagtctgtgagtttacaaatcttccaggtgattctgatccatgctaaagttggatctactgctctaaaccttagtttcttcctttataaaataatagtagtagtagctgtagcagtaataataatattggcttcatggttatagggggaattc

SEQ ID NO: 96385 - DNA, 541 bp, Homo sapiens
attttactcttcctgaagaaccaaatggtttccacttttcactttattttctaaggttttaccctctattgtcataaatgttttcatctggattttttctctgttaatatgctaattgcctccttctgaaagatccataaaaagttaaatcagaatgccaaattttttataaaatccatcttttgcatttacagacatggatgtggtgagcaaatagatcatttaccctctaaatcatatccttctcattgtccagtgtgtttcaagtcyttgggtttgttttctttaaacagaatatatagaattttatgttttcaaaaatgagcaacattgcattttcctttcagtcaattgcgttctgtcttttgaatgtcagctcagaaatcaaaagcgtgtcatccctccaacaaataattaatagcaaaagggtttaagaggaaataggaacaaggggagtttctgttgcagaagatgccacagcccctggcagtgaggtcctcagcactcaccttgccattgtaccagatgctttcatttccct

SEQ ID NO: 96386 - DNA, 630 bp, Homo sapiens
tggatgacatttatctctttctatttatggctacttcttcacaacctggacctctaaatgttgagtttatcagatgctrttccaaaatgtacatttggtggatactttctttagtgggttgaatagtggtccccaaaagaaatatccacgtcctaatcgccaaattctatgagtgttattttacttagtaaaagggtctttgtatacataattaaggatcctgagataaaatatttctgaatgagccctaaatcaaataaatggtgccctattaagagacaaaagaggagaagacacagacagaagagagggctgtgtgcagacagatgcagggattgtgttgatgcagccacaaatcaaggcatgctgacagccacttgaagctggaagatgcgagaaatggaatctcccttcacacctctagtagtagtgtgggccagatggcaccttaatttctgacttgtggcctccagaactgtgagaaaataatttctgttttagccacccagttttcgatgatttattatgtcagccataggaaactaatacactctctttaattttttattaccatgaaaggaaaaattaatttttcacaacttaaatataaataaagttatttagaattta

SEQ ID NO: 96387 - DNA, 443 bp, Homo sapiens
aagaattccatgatatgttcttggagttattaataaaaataactgctggttgacaggaaaggcatatggcaaatttaagatgcatggccacagtattttatttaaaaaaaaattctttcctacaccagggatgagwgtgtgtgtgtgtgtgtgtgtgtgtgtgtgtatgttttacgcaccagaaaaaccttcaactctgacaagccattgacgaggtgtttcagtcttcactagcttcctatttcattgctctgccattgagcccttgtaatactacgatgaataaagtaatcaaagcaattggctgcctgagatcttttttaatgcactgcttcggacgcagtacatatgctgtgcaaataaatacagaattagtgttcctgttggaagcatttggtgagaatgagtgatttgtcttgcttatgaaaggtgcatacatttcc

SEQ ID NO: 96388 - DNA, 582 bp, Homo sapiens
aaaaaaaaattaaaccaaaggttcaatcttggtttttatagtgtacttttttggttactaaaggggggaccaatgactccacttcctccttcttctatattttctttgatttcattttgttttttcttgtaatccagccatataccacaaattacacaaaattaaactatctgatatgagatacagtaataaaaaaaagtggcacacccacttagccgctgttttggccagaaggtctrctttggtatccaggtcatgagaatgaacggttgagcaatggaaaggcctaaatgctgtctgtatttgggaataatgatttgtatttcattcctgggtgttgtaatttcaccggtgctggtcagtgcatacggggtaaaacagggggctcccatttccccaggcctataaggcctgtcaggggagtgctgtgtgaaggggaaggattagaaaatggttgggagaaagcaggccctgactttgtagctaaaaatatgaataaatgaagttccacaccaccaactgagtaaaatttgatgataggggattactggaacattctattaacttgggttttgctttaaa

SEQ ID NO: 96389 - DNA, 582 bp, Homo sapiens
aaaaaaaaattaaaccaaaggttcaatcttggtttttatagtgtacttttttggttactaaaggggggaccaatgactccacttcctccttcttctatattttctttgatttcattttgttttttcttgtaatccagccatataccacaaattacacaaaattaaactatctgatatgagatacagtaataaaaaaaagtggcacacccacttagccgctgttttggccagaaggtctgctttggtatccaggtcatgaraatgaacggttgagcaatggaaaggcctaaatgctgtctgtatttgggaataatgatttgtatttcattcctgggtgttgtaatttcaccggtgctggtcagtgcatacggggtaaaacagggggctcccatttccccaggcctataaggcctgtcaggggagtgctgtgtgaaggggaaggattagaaaatggttgggagaaagcaggccctgactttgtagctaaaaatatgaataaatgaagttccacaccaccaactgagtaaaatttgatgataggggattactggaacattctattaacttgggttttgctttaaa

SEQ ID NO: 96390 - DNA, 582 bp, Homo sapiens
aaaaaaaaattaaaccaaaggttcaatcttggtttttatagtgtacttttttggttactaaaggggggaccaatgactccacttcctccttcttctatattttctttgatttcattttgttttttcttgtaatccagccatataccacaaattacacaaaattaaactatctgatatgagatacagtaataaaaaaaagtggcacacccacttagccgctgttttggccagaaggtctgctttggtatccaggtcatgagaatgaacggttgagcaatggaaaggcctaaatgctgtctgtatttgggaataatgatttgtatttcattcctgggtgttgtaatttcaccggtgcwggtcagtgcatacggggtaaaacagggggctcccatttccccaggcctataaggcctgtcaggggagtgctgtgtgaaggggaaggattagaaaatggttgggagaaagcaggccctgactttgtagctaaaaatatgaataaatgaagttccacaccaccaactgagtaaaatttgatgataggggattactggaacattctattaacttgggttttgctttaaa

SEQ ID NO: 96391 - DNA, 582 bp, Homo sapiens
aaaaaaaaattaaaccaaaggttcaatcttggtttttatagtgtacttttttggttactaaaggggggaccaatgactccacttcctccttcttctatattttctttgatttcattttgttttttcttgtaatccagccatataccacaaattacacaaaattaaactatctgatatgagatacagtaataaaaaaaagtggcacacccacttagccgctgttttggccagaaggtctgctttggtatccaggtcatgagaatgaacggttgagcaatggaaaggcctaaatgctgtctgtatttgggaataatgatttgtatttcattcctgggtgttgtaatttcaccggtgctggtcagtgcatacggggtaaaacagggggctcccatttccccaggcctataaggcctgtcaggggagtgctgtgtgaaggggaaggattagaaaatggttgggagaaagcaggccctgactttrtagctaaaaatatgaataaatgaagttccacaccaccaactgagtaaaatttgatgataggggattactggaacattctattaacttgggttttgctttaaa

SEQ ID NO: 96392 - DNA, 454 bp, Homo sapiens
taatttttgtgtttttagtagacacaagatttcactatgttgcccaggctggtctcaacccctgacctcaagtgatccacctgcctcagtctcccagagtgctgggactgcaggcgtgagccaacaagcccaggccacgatgtcttacttttcacctaaaacctgcctaaatggcatgcccagttaaaacaatctttttctgttacaataatccatgtaagagtatgacacattttctgaaagatttgtctaaaaaagagcctggtrtgtttactgttgctgctgaattggatttgactctgctgctgtatcagggccccttctgacaattcacctcttgcttcctttcctgctaattgtcctgttgactactatttttttttttttttggtaacagtgtctggctctgtcacccagcctagagtgcagtggcacaatcttggctcactacaac

SEQ ID NO: 96393 - DNA, 393 bp, Homo sapiens
gaggaactcctaattcaaaaccagtatctttctgataccaaaatctggcaaagacacaacaacaaaaaccytacatgccaatatctctctgatgaacagatgcaaaagtcctccacaaaatattagcaaaccacactcaaccaatgagatactatctcacaccactcagaatggctagtatattaaaaaaatcaaaaagtaacagatgttggtgagactgtggagaaaagggaacgcttgcacactgttggcaggaatgcaaattagttcagccactgtggaaaacagtttggagatttctcaagaactaataatagaaccaccatttgaccctgcaatctcactgctgagtgtatacccaaaggaaaataaaccattctaccaaaaagacac

SEQ ID NO: 96394 - DNA, 393 bp, Homo sapiens
gaggaactcctaattcaaaaccagtatctttctgataccaaaatctggcaaagacacaacaacaaaaaccctacatgccaatatctctstgatgaacagatgcaaaagtcctccacaaaatattagcaaaccacactcaaccaatgagatactatctcacaccactcagaatggctagtatattaaaaaaatcaaaaagtaacagatgttggtgagactgtggagaaaagggaacgcttgcacactgttggcaggaatgcaaattagttcagccactgtggaaaacagtttggagatttctcaagaactaataatagaaccaccatttgaccctgcaatctcactgctgagtgtatacccaaaggaaaataaaccattctaccaaaaagacac

SEQ ID NO: 96395 - DNA, 615 bp, Homo sapiens
cttgtgctgatggtgatactactcaacattaaaatcctgtgatactgtagtgtgtatctgtgaaattcttgaattacatgaaattctaaacttttttaaaggaagctaaattttatatgaaattctaaacttttttagaaggaaaacgaaattcttattggactgaaatcaagttatcaacattgttaaacgtgtaagtagaattatttaatcacaataatagcacyaattgtaaaagcaagtattaaagcaggatacttggctgtcttatttctaagggactaatgtgaatagttgtaaacctaacaacccattttcctgccaggtacacatacaaacacaagaagaaaataaattattggttcaatttttgagagcatccaacatttttatttaagcaacttagtctccatgaaaactatacttctgtctgtatttttaaagatgcctcttctcatgttaactttattccaagtatgtaaatgctaccagaaagagtaaaacatgatatacagacctttaacacattatgttctgtttcctcccctgttataacatcaattttctccagcaagcattttcgtgatggttgggaagagaatgcagcagctgatt

SEQ ID NO: 96396 - DNA, 581 bp, Homo sapiens
tgagctttggtgagatttttatcatttccatgtgtctggactacaagaagaaatcactgggggaagagctctataaatcagcgtccatgtcaagacaaatcaaaataatgcctctattatttcaatcaataaaccatttttattcccaacatctgatacacacagtgtgtgtccgtctgtttgtatttggaattggcagccttgccttataccaaaacaaacctttcaagacgtgtcaatgaaattaaaatttttaaaaggagaattcaatgtgaccctccttccctttcgagctactccattctcccctttttaagccgcacaccccaagtcagtargagagctttgcaactctgcaaaggatgaaattgctttgagaatttcagagaaaaggggtggcgggtgctattagggaagagaaaccgaaagcggcgacaggcaacgactgggactgaggaaagcctccctggctcctggctccaagatattccagaggacggtcctagggcggtctcaggagggtgtgacagtgttgctcccgcgctctgctaaaaaccaaaaacaacaactcccaccactgc

SEQ ID NO: 96397 - DNA, 568 bp, Homo sapiens
aagtgacatccttcagcaccggcagactgttcatcattaggggcagaggtaaaaagayaggaattccaggaagcaagagggagggaaaatatgcatttaatcctcataatggcagtttaagatgggcatttttatccccattatctgaagtgagaaaaagaaactgagagtgagctatgtgaacttgcccagagtcccagagttagtacatgtcagggataagattaaatcattccactgcacttacctgcaaagaataggactgtacgagcctcaaaatcagaaatgatatctagtgcctgaaattgttcttcatagaccccattcactcagaaatgttgctgtgatgtttttcctgtgctatgaagagtatcacaacatgtcactcttcgctgcagatcaagaggagccttcttggattccacctcactgtcttttcatgatctaaccttgtatctggcttccttgttacaaacacacgtcatacattccaaactgcatggaaaatagaaaagcaattctctacacttgaacatgcacatagaaaaacccagccattttggtgaag

SEQ ID NO: 96398 - DNA, 574 bp, Homo sapiens
ctttggtcagaaggcagcggcgggtaaggatggcttcctctcacagtgcttcttaggctatccatttaccaaggaattctaatctctttctctcacttcaccaggaaaggagggagtttaagatatagaactgggcatgctagcctcktttttcccttttgtggatttgtcataactgcagagaaccgatgttgtggtctcttgccagctacattgtgaaccttgcagtgaaagttctttgcctctgcaaagggagatttgtgcttgtgcagaactgcccatgccttagtaagcaggtctgtctaattctaagttcaatatctggtggctattgttggcataaacttaaagtacatcctctaacctagcctttttcagcagtaaacttaaaatattgaatctccatctgtctgtgtctcaagtggttcagaggtcaggagaggagagggacattattttatgactccctcaaactttaacaaagactagtgcagattatatttcgaagtaagcatgagatatattaaaaaccacatgtgggaattctttcctaattttagaggttttttttaaa

SEQ ID NO: 96399 - DNA, 565 bp, Homo sapiens
tcttgttgggacattctatttgcatgcaattgcattattccactgttggtgtctctatcagattctgcaagtgttaatgttgtatctgccacaataacattcaaaaaataaaaataaatagtggaggcttgaagcttcaaaagtaatcaaagagatacttccattataatctgttttcaccttcaaatgcattcatatttcttttggcctgaagtgagtttcacagagagtggatagaagcaaaagaaatgattgcatttaaggaagtttttgtctatgcagtttctccaatttctccttttatttgttcttctttccttttcatttctttttatcaattttctctcaacaaggtattatttttaatactttgaatgtatcatttgcagtatgttgaaaaggcaaagttggcaaatatgtttgctttcataagattgatttttttcttgcctrtgtttccatgagttgaatttctaactcagcctcgttcctcttatctttgtcttggccattcgctcagaaaaaaagagaaataaaagctacattttcagatttaaaaatgcat

SEQ ID NO: 96400 - DNA, 611 bp, Homo sapiens
ttctcacagttctggaaactgagaagtccaagatcaagaaggcaccagcagatcaagtgcctagtgaggctctgctttctagttcatagaaggcaccttcttcctgtgtgctcacgtgatagaagggggaacaaactctctgaggcttgttttgtggtggcactaatcccattcatgacagctcttccctcacaacataatcacctatctcccataccatcacctttacgataaggggttcaatatatacattttggggagactcaaacattcagaacatagcaggaaccatgaactgagaaagtgtgcaaatttctatccaagagattatgactgtatttactacttgctaccagttgaagaatgagtttcaaaatgtgctaaatctgtagttttttcaagtgtctgtgtatgaaagagagaaagtgcatacatgaaagagaaatagaagttttgcatgcattttgactgtataacactcctattttaaaaaaagaacatttaagttttaaaagcatagtgacatttactctyacttcaaaatctccttctctttccttatctagtttgtcccaccttggtagaaatgattttgctatcaaatcagaaac

SEQ ID NO: 96401 - DNA, 611 bp, Homo sapiens
ttctcacagttctggaaactgagaagtccaagatcaagaaggcaccagcagatcaagtgcctagtgaggctctgctttctagttcatagaaggcaccttcttcctgtgtgctcacgtgatagaagggggaacaaactctctgaggcttgttttgtggtggcactaatcccattcatgacagctcttccctcacaacataatcacctatctcccataccatcacctttacgataaggggttcaatatatacattttggggagactcaaacattcagaacatagcaggaaccatgaactgagaaagtgtgcaaatttctatccaagagattatgactgtatttactacttgctaccagttgaagaatgagtttcaaaatgtgctaaatctgtagttttttcaagtgtctgtgtatgaaagagagaaagtgcatacatgaaagagaaatagaagttttgcatgcattttgactgtataacactcctattttaaaaaaagaacatttaagttttaaaagcatagtgacatttactctcacttcaaaatctccttctctttccttayctagtttgtcccaccttggtagaaatgattttgctatcaaatcagaaac

SEQ ID NO: 96402 - DNA, 660 bp, Homo sapiens
ctctaactggttgaagagcttgacctacgaaagtctgacaaatagttggactattaagcattccctgaggtaacactttccactgagacctggtggctggttccttataatttatggctggtatagtaaaggcaaatttttcaaaatctttctccaccagaaaaatggtaaaaaagcaatcctttagatcaattataattaaaggccagtcttttgggatcatgaccagagaggacaacccgrgttgaagaggccccatgggttgaatgatggcatttacggctcttaagtcagttaacatacaccatctgctggattttttctgaattacaaacacaggagaattctaaggagagaaagtgggtgaaacgtgtcctttttaagtagttttttaactattttatgtagcgcccccaaattttccttagggagcagccactgtttgactcagacaggatgctgcaaggcaagtctgaattgctccttcaccataatgaactgtaagttgggcaataatgggcacagcgagccaagttgcagtgagcctagtttcaggctccctcccccagcactcacttggctgaggaggaggtggccatcgtggttttagcccctatgaccccgatgattctggacctttttcttttaactttaatgttt

SEQ ID NO: 96403 - DNA, 660 bp, Homo sapiens
ctctaactggttgaagagcttgacctacgaaagtctgacaaatagttggactattaagcattccctgaggtaacactttccactgagacctggtggctggttccttataatttatggctggtatagtaaaggcaaatttttcaaaatctttctccaccagaaaaatggtaaaaaagcaatcctttagatcaattataattaaaggccagtcttttgggatcatgaccagagaggacaacccgagttgaagaggccccatgggttgaatgatggcatttacggctcttaagtcagttaacatacaccatctgcyggattttttctgaattacaaacacaggagaattctaaggagagaaagtgggtgaaacgtgtcctttttaagtagttttttaactattttatgtagcgcccccaaattttccttagggagcagccactgtttgactcagacaggatgctgcaaggcaagtctgaattgctccttcaccataatgaactgtaagttgggcaataatgggcacagcgagccaagttgcagtgagcctagtttcaggctccctcccccagcactcacttggctgaggaggaggtggccatcgtggttttagcccctatgaccccgatgattctggacctttttcttttaactttaatgttt

SEQ ID NO: 96404 - DNA, 660 bp, Homo sapiens
ctctaactggttgaagagcttgacctacgaaagtctgacaaatagttggactattaagcattccctgaggtaacactttccactgagacctggtggctggttccttataatttatggctggtatagtaaaggcaaatttttcaaaatctttctccaccagaaaaatggtaaaaaagcaatcctttagatcaattataattaaaggccagtcttttgggatcatgaccagagaggacaacccgagttgaagaggccccatgggttgaatgatggcatttacggctcttaagtcagttaacatacaccatctgctggattttttctgaattacaaacacaggagaattctaaggagagaaagtgggtgaaacgtgtcctttttaagtagttttttaactattttatgtagcgcccccaaattttccttagggagcagccactgtttgacycagacaggatgctgcaaggcaagtctgaattgctccttcaccataatgaactgtaagttgggcaataatgggcacagcgagccaagttgcagtgagcctagtttcaggctccctcccccagcactcacttggctgaggaggaggtggccatcgtggttttagcccctatgaccccgatgattctggacctttttcttttaactttaatgttt

SEQ ID NO: 96405 - DNA, 660 bp, Homo sapiens
ctctaactggttgaagagcttgacctacgaaagtctgacaaatagttggactattaagcattccctgaggtaacactttccactgagacctggtggctggttccttataatttatggctggtatagtaaaggcaaatttttcaaaatctttctccaccagaaaaatggtaaaaaagcaatcctttagatcaattataattaaaggccagtcttttgggatcatgaccagagaggacaacccgagttgaagaggccccatgggttgaatgatggcatttacggctcttaagtcagttaacatacaccatctgctggattttttctgaattacaaacacaggagaattctaaggagagaaagtgggtgaaacgtgtcctttttaagtagttttttaactattttatgtagcgcccccaaattttccttagggagcagccactgtttgactcagacaggatgctgcaaggcragtctgaattgctccttcaccataatgaactgtaagttgggcaataatgggcacagcgagccaagttgcagtgagcctagtttcaggctccctcccccagcactcacttggctgaggaggaggtggccatcgtggttttagcccctatgaccccgatgattctggacctttttcttttaactttaatgttt

SEQ ID NO: 96406 - DNA, 406 bp, Homo sapiens
aaatctttccaatgtattgagagtggcaaagcctttaattgtagctcactcttaaggaaacaccagatamcccatttaggagacaaacaatattaatgtgatgtatgtggcaagctctttaatcacgagcaataccttgcatgccatgatagatgtcacactgttgagaaaccttacaagtgtaaagagtgtggcaagaccttcagtcaggagtcatcccttacctgccatcgtagacttcatactggagtaaaacgttacaattgtaatgagtgtggcaagatctttggtcaaaattcagcccttctaattgataaggcaattgatactggagaaaatccttacaagtgtaatgaatgtgacaaggcttttaatcaacaatcacaactttcacatcatagaattc

SEQ ID NO: 96407 - DNA, 405 bp, Homo sapiens
aatctttccaatgtattgagagtggcaaagcctttaattgtagctcactcttaaggaaacaccagataccccatttaggagacaaacaatattaatgtgatgtatgtggcaagctctttaatcacgagcaataccttgcatgccatgatagatgtcacactgttgagaaaccttacaagtgtaaagagtgtggcaagaccttcagtcaggagtcatcccttacctgccatcgtagacttcatactggagtaaaacgttacaattgtaatgagtgtggcaagatctttggtcaaaattcagcccttctaattgataaggcaattgatactggagraaatccttacaagtgtaatgaatgtgacaaggcttttaatcaacaatcacaactttcacatcatagaattc

SEQ ID NO: 96408 - DNA, 621 bp, Homo sapiens
aaagttttaattaaataattaattatagtaatggagtggctacgttgtctgggtaattgttgcatgccaagaaaatttaggacacagacacaagcgagaagtttaggatcagaggtttaataaacagaagagaagaaaaagagacggctctctccgtagagagaggggtctccaagggaaaggaccggctagtggtgaatgcaccgaattttatagtccattttgaggaggcagtgtctgatttgcagagggctcatagattggtcacatcaggtaaggtatgaaatttatgtagcgtgctgggaaagctggttgtcccaacttagtcttactatgcaaatagactttctagttgatctgcgccatcktgtctgctccttacagtacatgtggctggcagagacaggaagatggagctgccctcttgaaaatgtctagttcttagttcctgctggcattcactcacgcaagctccagcttgcttgtctatgtctgcagctcaactttacaggctggtctttgttagaaaatgatctggggctgcttttcatcaaaaagaaaagctttaccagggactctcatacccttgctaactgcctacgtgatttcttcttaactgct

SEQ ID NO: 96409 - DNA, 611 bp, Homo sapiens
ctaaacacaacaaaagcaaagcattattcacccagatggcagaagatagtagctcagatttcagtacaattgctacatgasaggcatgtcaggaagcagtgaggtccaagatatatgtgggttataaatactatgaaactcaaaatagtaataagttcacatgcccaaatgacattataaactaacatgtgaaaaaatactttatgcttttaattgagaataaatatgtcagaaataatatgattaggtagatatagtagcactgatatttgacaatattttcctttttattttacacacacacacacacacacacacatacatacacacttaccccatggtatattttaacccaggattttgcttctactttactctataaagaatatagtcccaggtgctacacatcagttttcattatctaaaagttatcatttttcattatgcataaaaatgatttaagacactttaaaatatcaggaaatattttctaaaattctgttccattctttgtgaagtgtaaaacatattcctttagtggacagggatccccttcttacatgcttattggatgatccatagttcttgattctcttaacaccagagcataa

SEQ ID NO: 96410 - DNA, 508 bp, Homo sapiens
tgttcctccccctcctacgtcacaaatttacccaagtgaaatcaggctaacataaacaccaagagtagcctggtagttaaaggaaaatcataaaaagagaagatatgacatttggctagagaaggagatcgtttgcattattgtagcttggtaataacaggagggcttatgggcacattttatcatggaatcttagatacatttttaacagcagctgacagaactatcttcttttttccttccaagcaaactgcctttytaagccattactttttagcaaccagcccaggtcagccctcaggcttatcaccccagcacctccagaactactggatctaggggaagtgctcttactttgggatggtattgacagtgtgagtgaaaaaaaaaaaaaaacatggcttcatagttcagcacttagggaagcatgagtaacctgagtttcatggtctcacaccctctctcaggaaccaatttactcttagatatgtttaaatgttcagaggct

SEQ ID NO: 96411 - DNA, 576 bp, Homo sapiens
aggtaggacatctctcaccaatatctgatgcataatagtgatgcatgagttttctcagtcactttgcaagcaggggacctctggccagccaagctcccgcctaggcctcacttgagcatgctacctgccacaggaaacagccagctcactcagcccacccgggctgtgcctggcttgtgcaccagctcagtctgtggttgggctggggatgccccagcctgcctgtgttataacttgcacctgcattcagcggttcctgagttcttgtcccttacccaagaaggatgaggatatgctgaccattgaagggtcatgagggcagagaatgttattgagagacaaaacagttctcagcagagagggaacaggaaaatggtctcacctgaagttgggttgtctctctcccagtgtggctgtatctggggctttttkgggctccgaataagggtgtgaatgctgattggtttctgagcatgcaaaaaagttaaaacaaaggtacaaccaaaaggtgggcataacactgcaaaaaaatctaattagggaaaggtgtgtatatgtaaaataggtgaaaggtag

SEQ ID NO: 96412 - DNA, 659 bp, Homo sapiens
caaccaaatattgtccatgtgcctcctgtgagctcactgtgcttctcgcctatagcattcctcacaatacagtttattgtcactgcctatttctgtattccccattagatttcactattttacacactatgaggacaaagactatatctgacttggacctcactactgaacccccagtatctagcacagagtcagcatatcgtggacactcaaacattccagaataaatgaataaacaagcataaacaactggcccatttggggtaacaatcctctttattactactgccataaatcagatcaagggattgaaggattgttctactttaaccactttaaaggaatagaatctatttagaacattgagagaaagctatcagcttcaaattctgaccaaatattgtttattagccaaaacagacaacagggccaactcaggcctmgataagaaacaatccatgagtttagtcaaagatctcatgagtgaccactcagacagaaaatttggcatctacctgccaactcctacagaaaccaagagccaagaactgcaaagaatgatcccagaggtaactgactgactgactgtacctaccagtagtcattatattactccccgttaaaggcttaaagggaggtcttgaagacaaaaatttata

SEQ ID NO: 96413 - DNA, 558 bp, Homo sapiens
catcgacatggatggaactggaggacactatgttaagtgaaataagtcaggaacagaaagacaaatatcacatgttctgattcatatgtgggagctaaaaaaaagttgatctcttggtatatttttaattcaacagtggtagtgcaagtaacaggtacatcccgggtggggcggggttggggggtgctgccagcctggtccatcagtgtactccatgtcgatacttttgtgttttgggggagaraatggacacggttggtgatttcagtgagatgattaagtgaagtttgcctaaaagcacttctactgtatattaagcaaaaaaaggtaagttacaatgccatatgaatagtcttatttttgtgaaaaaatatttaaacggctataaatccaggtgttatcagtgacacttattttattctttatatttttagctgttttctgaaatttttgcagttacttttataattaggaaaaaatggagctctgtccagtttttgaaaacgtagactgcaatgtcaaaacaagtcagtggcttactacacaaaatgtgactta

SEQ ID NO: 96414 - DNA, 608 bp, Homo sapiens
gactctaatgttccctgcctttctgattgtgggccttaagcccctcccaagagagggtccttccttatacctcaggggaaggaatgctgatgtcatgaagccttcttaaaaacccaagaggaccagggttcagtgagcttccagatagctgaacatgtggaggttcttgaacccagggcaccaggtrggctccatacccctttccccataccttgccctacatgtgtcttcatctgtatcccttgtaatcccctttataataaagtggtaagtgtaagtaattatttccttgagttctgtgaatcctttcagccaattaatcgaactccaagaaggagttttgggaacctcaacttgaagccagtttgtcagaagtttcagaggcccagacttgcgactggtgtctggggggtgtggggagcaatgttggggactgagcccccaacaggccagatctgacactatctctgggtaggtagcatcagaactgaattggaggacacccagctggagtctgctgcttggtgtgtagggaaaaactccacacattctgtgttgggaagtcttctgtgttgatgattgttgttgtggtggtgtcagagtagagg

SEQ ID NO: 96415 - DNA, 608 bp, Homo sapiens
gactctaatgttccctgcctttctgattgtgggccttaagcccctcccaagagagggtccttccttatacctcaggggaaggaatgctgatgtcatgaagccttcttaaaaacccaagaggaccagggttcagtgagcttccagatagctgaacatgtggaggttcttgaacccagggcaccaggtaggctccatacccctttccccataccttgccctacatgtgtcttcatctgtatcccttgtaatcccctttataataaagtggtaagtgtaagtaattatttccttgagttctgtgaatcctttcrgccaattaatcgaactccaagaaggagttttgggaacctcaacttgaagccagtttgtcagaagtttcagaggcccagacttgcgactggtgtctggggggtgtggggagcaatgttggggactgagcccccaacaggccagatctgacactatctctgggtaggtagcatcagaactgaattggaggacacccagctggagtctgctgcttggtgtgtagggaaaaactccacacattctgtgttgggaagtcttctgtgttgatgattgttgttgtggtggtgtcagagtagagg

SEQ ID NO: 96416 - DNA, 608 bp, Homo sapiens
gactctaatgttccctgcctttctgattgtgggccttaagcccctcccaagagagggtccttccttatacctcaggggaaggaatgctgatgtcatgaagccttcttaaaaacccaagaggaccagggttcagtgagcttccagatagctgaacatgtggaggttcttgaacccagggcaccaggtaggctccatacccctttccccataccttgccctacatgtgtcttcatctgtatcccttgtaatcccctttataataaagtggtaagtgtaagtaattatttccttgagttctgtgaatcctttcagccaattaatcgaactccaagaaggagttttgggaacctcaacttgaagccagtttgtcagaagtttcagaggcccagacttgcgactggtgtctggggggtgtggggagcaatgttggggactgagcccccaacaggccagatctgacactatctctgggtaggtagcatcagaactgaattggaggacacccagctggagtctgctgcttggtgtgtrgggaaaaactccacacattctgtgttgggaagtcttctgtgttgatgattgttgttgtggtggtgtcagagtagagg

SEQ ID NO: 96417 - DNA, 626 bp, Homo sapiens
cttctgtgaaccaaatagtggatctacaaaaatgaaaaaaagggagctcacagttcaggagaaggacagacagtcatagagagaggataatagagtaggataagctctgaagtgaggtgygtgcaggtctaccagggattcagggaagcatcttagagaaagtgaactgatatttgtaggggtttgacgaggaattgtgtaggtcgaagaagtatgaggcagagggaacagcaaaggcaaagtcatggagatttgtgagattatggcacgtgtggggaatttcaagtcatctgtatgatgcatgggtctaggtgacagagaaatttaagatgaagctgcagaggcagattcaagacagactgtggaaagtctatggtgctatattaaggaggtgaattttcttccatagccagcaggaagaagctgagaatgaaacagtggtgataatggcctatgtacaggaagaagaggtagaaaagaagcaagatgaacagttttgaagaccactgatctgacttcggtccttaaaaaaaagatttaaaagatatttaggagatagaatcaacaggatttggtgagcaattggatgtgggtcaaaggagggggaaaagctgaggatgggtttt

SEQ ID NO: 96418 - DNA, 611 bp, Homo sapiens
tatattgtaattctagatcatagattaaaccagtttagttgggattttctttttttaaatttccttttatatttttattttttccatttgccccagtcagaaggatagttgggattttgtattaattgcagcgaaaatcatcctaactgaattattggtttgctctgcattaggtaatgggtaatctcagtctcctaaaacctgatcatatctgagtgacaacaaaatcaaatgtccaagccttcaaaactaagaactctaagtcccatggagcagagattgctccaaaggttgccctcctgttgatatatgtctgggtgatgagctgccttacccagagagcatgaattctcttttctgtattactgtggaccttcttcaaactgcatttggctttcattrcacagtagctctttttcagcagacacaaggaaaatccagctctgtacataattgcataatgatgaattcaattgtatatgtgtatagtagtgtaacagactcagaatgacaggtgaaaaataattctcttcactttgccaaggtacatataattcaggactaaaacaatgagcatgatgagtagtagggctggaaatttgagctgtccg

SEQ ID NO: 96419 - DNA, 611 bp, Homo sapiens
tatattgtaattctagatcatagattaaaccagtttagttgggattttctttttttaaatttccttttatatttttattttttccatttgccccagtcagaaggatagttgggattttgtattaattgcagcgaaaatcatcctaactgaattattggtttgctctgcattaggtaatgggtaatctcagtctcctaaaacctgatcatatctgagtgacaacaaaatcaaatgtccaagccttcaaaactaagaactctaagtcccatggagcagagattgctccaaaggttgccctcctgttgatatatgtctgggtgatgagctgccttacccagagagcatgaattctcttttctgtattactgtggaccttcttcaaactgcatttggctttcattacacagtagctctktttcagcagacacaaggaaaatccagctctgtacataattgcataatgatgaattcaattgtatatgtgtatagtagtgtaacagactcagaatgacaggtgaaaaataattctcttcactttgccaaggtacatataattcaggactaaaacaatgagcatgatgagtagtagggctggaaatttgagctgtccg

SEQ ID NO: 96420 - DNA, 586 bp, Homo sapiens
aagtcttccatttgtgattcagattcccctgttgctaagaaaaaattgtaaatgctttgtttattctgaagtakaagatttcactctggatgtcgagtgcccatagtatctaaagcatccttcttttccattttctttaattatgtctctagaaacgagcagccatgtgttgagacaactgctactttagagacagcaccaaactcaatgggtcaggatgtaagagcagctttagaagctaatctaaactcaagagttcaggttctaacatggatttgtgaagtgagcatggtttgtttggtctgtcccaggtactattattattttacaggtaaagaaacggaggttgcccaaactcatgcagcaaataagcactgctggtagaacttgattcttgatatgtctgggtctacagtccttgttccagacccctctactccatgccctctttgcacggggaggcgcagactcaggatcattactctggctctctctgcttttctagaaaaggtgaaagataccctgaaatatttttccaaattggttccattctccccatctctttcaactctgaacacaagagaca

SEQ ID NO: 96421 - DNA, 586 bp, Homo sapiens
aagtcttccatttgtgattcagattcccctgttgctaagaaaaaattgtaaatgctttgtttattctgaagtataagatttcactctggatgtcgagtgcccatagtatctaaagcatccttcttttccattttctttaattatgtctctagaaacgagcagccatgtgttgagacaactgctactttagagacagcaccaaactcaatgggtcaggatgtaagagcagctttagaagctaatctaaactcaagagttcaggttctaacatggatttgtgaagtgagcatggtttgtttggtctgtcccaggtactattattattttacaggtaaagaaacggaggttgcccaaactcatgcagcaaataagcactgctggtagaacttgattcttgatatgtctgggtctacagtccttgttccagacccctctactccatgccctctttgcacggggaggcgcagactcaggatcattactctggctctctctgcttttctagaaaaggtgaargataccctgaaatatttttccaaattggttccattctccccatctctttcaactctgaacacaagagaca

SEQ ID NO: 96422 - DNA, 537 bp, Homo sapiens
ctgagttctgaaattggggcagtaataaagaaaccttaccaaacaaaaaaagccttaaaccagatggattcacagtcaaattctaccatatgtaccaagaagagatggcactaattctactaaaactattgcaaaaaattgaggaggaaggactcctccctaactcattctaagatgctagcatcaccctgataccaaaacctggcaaagacataatgaaaaaaaaaaaggaaaaaatcaaaaagaaactacaagccaatgwccctgatcattacagatgcaaaaatttttaacaatatacgtgcaatccaaatccaatagaacattaagaagctaattcatcatgatctagtagacttcattcctgagatgcacgtttggttcaacataggcaaatcaataaatgtaattcataacataaaaataattcataacaaaaaccatacaataatctcaatagacatggaaaaagctttcaagaaaatccaacatccctttatgacaacaatcctcaaaaaattggcatggaacaaacat

SEQ ID NO: 96423 - DNA, 582 bp, Homo sapiens
gaattcagtcttttctcttaaggccttcaactgattagatgatgctcatgcatattatggarggtaatatgctttactcaaagtctacagatttaaatgttaatcatatctaaataatacacaccttcacagtaacatctaaactggtatttgatcaaataactacatactgtagcctagccagattggcacataaaattaaccatcacactgtcttgtctattcatgataggactcctatcaacagaaagagagtgcaaagagtagactccagctcttcagagaaggaagcagaattaaggacacagagaaaccaagcctgggaattgtcaaagattatggatgagaaatggggactgctcaggattgagccctggaaatatctacaatatttaaagtggggtcagggcttagagaaaagggtttttcataagcttcaacctcaaatgtagttgcaacctactgatctctctatatttgacattaagatgcaggtggctgtccagtgggattgccaacagctggaaccataatttcaaccagctgagtgacagatagccgatgtatatccaggcagcgaca

SEQ ID NO: 96424 - DNA, 641 bp, Homo sapiens
gatgtgtccttttctagaagtcttagtagatagaccacataaaaataaaccctgaaaggctcccttctatgatctctaaccaagatgcaaaatcatgatgtttaatagtagtttgtataacacttaatgtagatgttagataacagtccagagtcagggagagagttgctgcagatatttagtgacacagtgatttaagaatactgaaggagactatcagtgatttttctggggtttcttttatattgttgagatggctaatgttactccaagatttattgtcacgtgattgagttcaaagatagaaaacaggcaatagttttccaacaatcatactcttacatcaccttgaccagatgtgggtcacaatttcatgcctgagatcaaaggatctccattcactatccagtcaaaattggratttgattaggaagaaggtaggcagtagttttggtgtaaacattaaatgctatacatgactccacctcttcattgtaatgtagacactaaaattttgatggaattgactttatcctcagtggcccttgattagtgaaagccaatatgagttgtcccattcttctctccatagtgattagttcaggaatttaggactaagacaattggtagatggtatgact

SEQ ID NO: 96425 - DNA, 644 bp, Homo sapiens
tgtggggtgtgtgtgtgtgtgtgtgtgtgtgtgtgtgtgtgtgtgtgtgtatgtatgtttggagttaataagcttagrtactaggggggaaaacactggaaagattataccacagataattaataaaaatcaattagtttgttaatgagtactctgtcagtacccaaggtgctggaaaccagctgggggaaggaaatcaggatccctgaataggacatttagaatgcttgagtcctgctgagaatttgagaggaaataactataagaagcactacttgggttaaaactggctaaatttcctcttgaggttacaattcctccagccaataaatctagtaaaaaagtgattcacctttagtgtatgccataaagcattttctgaggccttaagtacattgctcactgccctgtattaaaaacaaacccatagttgtaaatgtcaatgactaagaatattatagcccttgcatctttcttatgttagtagaaaagctggaagcacccattacctcttctatgactttttacactgtatttatgtaaatggcaaaagtcaaacatgagctgacagggaaatacaaaatctgtcttccagtggtctttggacgaaaaagcagaaaattccagtgacagcaactgacttt

SEQ ID NO: 96426 - DNA, 644 bp, Homo sapiens
tgtggggtgtgtgtgtgtgtgtgtgtgtgtgtgtgtgtgtgtgtgtgtgtatgtatgtttggagttaataagcttagatactaggggggaaaacactggaaagattataccacagataattaataaaaatcaattagtttgttaatgagtactctgtcagtacccaaggtgctggaaaccagctgggggaaggaaatcaggatccctgaataggacatttagaatgcttgagtcctgctgagaatttgagaggaaataactataagaagcactacttgggttaaaactggctaaatttcctcttgaggttacaattcctccagccaataaatctagtaaaaaagtgattcacctttagtgtatgccataaagcattttctgaggccttaagtacattgctcactgccctgtattaaaaacaaacccatagttgtaaatgtcaatgactaagaatattatagcccttgcatctttcttatgttagtagaaaagctggaagcacccattacctcttctatgactttttacactgtatttatgtaaatggcaaaagtcaaacatgagctgacaggraaatacaaaatctgtcttccagtggtctttggacgaaaaagcagaaaattccagtgacagcaactgacttt

SEQ ID NO: 96427 - DNA, 620 bp, Homo sapiens
aagagctaagaaaatttaaggagtacttgttttctttctttttttttaaacaaaatagaatccactatgttggagacttgatattatgtgcttgtcaaactattctcttttataaatgaggatacaatctagtgtgctcatggacatcaaatggatttgcatgaaaagttacattttatttgtgatttttaaaacatcacagtaaccataaactgagctggtttactcaacttttcattgttttgttgttgttgttcttggttataatacttgcaaactatggaaaatcacattgactaacaggataaactctatatgcattttatttcccaaggaattgtgttcactttatttttgctgaaggttgtatrttaaatcaatgtcatgtttttatactacttcttgagtaggaaattcagattttaaattctattatttcctccaaaatgaagagcagtgcttagttaaataaaagattgatgatatgtttcaaaacttattatttgaatataaatagctacatcactgagagcatgccagattgaacttctgacatttttccttcaatcttcaaatttccgttttaatcctcagtatatggtaatttgattattacagtg

SEQ ID NO: 96428 - DNA, 620 bp, Homo sapiens
aagagctaagaaaatttaaggagtacttgttttctttctttttttttaaacaaaatagaatccactatgttggagacttgatattatgtgcttgtcaaactattctcttttataaatgaggatacaatctagtgtgctcatggacatcaaatggatttgcatgaaaagttacattttatttgtgatttttaaaacatcacagtaaccataaactgagctggtttactcaacttttcattgttttgttgttgttgttcttggttataatacttgcaaactatggaaaatcacattgactaacaggataaactctatatgcattttatttcccaaggaattgtgttcactttatttttgctgaaggttgtatgttaaatcaatgtcatgtttttatactacttcttgagtaggaaattcagattttaaattctattatttcctccaaaatgaagagcagtgcttagttaaataaaagattgatgatatgtttcaaaamttattatttgaatataaatagctacatcactgagagcatgccagattgaacttctgacatttttccttcaatcttcaaatttccgttttaatcctcagtatatggtaatttgattattacagtg

SEQ ID NO: 96429 - DNA, 382 bp, Homo sapiens
aaaatattaatatgtcttcaacataagtatgtagatatttgtaccaactagagcaaattaacatataaagtcaccaaataagttaactaaaaacatttgctttaaagagcattagtgatttcagccggacgcagtgactcacgcctgtaatcccagcattttgggaggctgaggtgggcagatcccctgaggctgggagtttgagaccagcctggccaacatggagaaaccccgtctccactaaaaatacaaaattatccgggcgtcgtggcacatgcttttaatcccagctactcgggaggctgaggcaggagaatcacttgaacccgggaggcagaggttgcagkgaatggagttctcaccattgccctccagactgggc

SEQ ID NO: 96430 - DNA, 251 bp, Homo sapiens
ttcttattcctaacatttttctgaaacaaactagcrtataaattactgtctaaattttatattttatttggaaaggctaataggcatcgactcccttagtgctctctctcattttaagaagtataaaagagtttcaaagacagtattttctttacttctacagtgagttagatgctcatgattctggagaaacataaattatatttacagaggaaccataacaaaaatggaaaaggaagaatgcaaaatac

SEQ ID NO: 96431 - DNA, 521 bp, Homo sapiens
ctttcaggtcagcagggtactacttaacaaatggaaattaattctataatagtccagatgtattcaagcattatacagttgtgatttaaaggtatgaaaagaataatatcatgggtattwtatatatatatatatatatatatatatatatatatatatgttctccattaacattcatccatgtaagaagtatatctgttaatcaaggaagcttctacatacaagtacgtaaggcagattttttgtattgtctgtgtagattactaatcctgacacagtcttctcattaatagcatttagtataaagttacattgctctacaatattatggaaattataagaccattaatgacacagtgccctcatacctattctcctcaatttccttcccttattattccactgcttctctttctttccgtgatattttctgagctcagatttaatttaaaaacaatattttcttgattcctaccctcctctcagattacccccagcacctccttgtttatctaaagcct

SEQ ID NO: 96432 - DNA, 545 bp, Homo sapiens
gaccttttccagcttgactgcagcccatacttagctaragtgggtatttgtctattcctgtctgcatactgtgacttggagatgcctattattttgcttgctaaaatatggaagccaaccttgaaactggcagagaagagttaaatgatcagaaggcaatcgtcttcattcagcacgtctgacacatgaaagatcattaggactagcaaatataaacaagatcagggagtggtcttgggctttgaagagcacataccaagaacatcaagagaactcaatataaattcaatataaaagctactattcaaggccaattatctcttttgagttagaagagcccaatggagagccactcacgcaaatcaataccctttccttctctcagttggagccagacatctctaactatcctctgaattaaactggatttttaaaatgtttttctgtccctaaactctttaaatcctgaggtcatcctttctttgttccatcagtctggctccatgataccaattactccagcttgttaaagcagttattggcat

SEQ ID NO: 96433 - DNA, 545 bp, Homo sapiens
gaccttttccagcttgactgcagcccatacttagctaaagtgggtatttgtctattcctgtctgcatactgtgacttggagatgcctattattttgcttgctaaaatatggaagccaaccttgaaactggcagagargagttaaatgatcagaaggcaatcgtcttcattcagcacgtctgacacatgaaagatcattaggactagcaaatataaacaagatcagggagtggtcttgggctttgaagagcacataccaagaacatcaagagaactcaatataaattcaatataaaagctactattcaaggccaattatctcttttgagttagaagagcccaatggagagccactcacgcaaatcaataccctttccttctctcagttggagccagacatctctaactatcctctgaattaaactggatttttaaaatgtttttctgtccctaaactctttaaatcctgaggtcatcctttctttgttccatcagtctggctccatgataccaattactccagcttgttaaagcagttattggcat

SEQ ID NO: 96434 - DNA, 545 bp, Homo sapiens
gaccttttccagcttgactgcagcccatacttagctaaagtgggtatttgtctattcctgtctgcatactgtgacttggagatgcctattattttgcttgctaaaatatggaagccaaccttgaaactggcagagaagagttaaatgatcagaaggcaatcgtcttcattcagcacgtctgacacatgaaagatcattaggactagcaaatataaacaagatcagggagtggtcttgggctttgaagagcacataccaagaacatcaagagaactcaatataaattcaatataaaagctactattcaaggccaattatctcttttgagttagaagagcccaatggrgagccactcacgcaaatcaataccctttccttctctcagttggagccagacatctctaactatcctctgaattaaactggatttttaaaatgtttttctgtccctaaactctttaaatcctgaggtcatcctttctttgttccatcagtctggctccatgataccaattactccagcttgttaaagcagttattggcat

SEQ ID NO: 96435 - DNA, 545 bp, Homo sapiens
ttacagcacttccattaatcaaagttgattcgaattatagagaggatcaatgtttccaagtcaccatgcctatagcttggggtagctgccattcaggtgatcactgatacctattaaaattgttgggtcagtacatcctaaacaacaaaggacatgaaataattaaatagcaaggtcctttgtcaaaccgtatttaaaggcttaacatggaacatgccatgacaactgagtttctgtttaatagtgattccgtatttytattaaagaaacattctggagtttcttgtgacttttgtttaggataaaaagtaaaaaaataactcccttttctaccttcgacattatagcatagcaattcaggacaataaggtactcaggatatatacacacatatacacacagaaattattccagaaatagcaaataaatggcaataggcatcctacagaacacactggaggaataaactttcatcagcaatcaaattgataaaatagatacagttaaaatgaactttgaataaagttcatgagccaagcatggga

SEQ ID NO: 96436 - DNA, 567 bp, Homo sapiens
cttcgttttaagccatctgggattcccaggggcttcacagagaatcagggatgccaggagcaggaaggaaagaagtggaagcaaagggaaggctgaagcagctccttaggcagctctgtgtatgtgccaatatcaagcaaggtgctttatacatgctatcatagttaatttaagcttcgttaggctcatgatggggaggaaaacccaaggaagttagaaatggttgtccttagasgggggtgttcagacactgccctgcagagcccctaggtttggggtcagggggaagcgagtgctgaagggacgaggcagatccttctcaatcagagcagtgtgactttaccacattactactagggttttcatcaagattgttctggaggaaaggattccgatattataaatgcatgcttgataatcactatcttcagtaggcttttaataggtactcttgttagacatgtactaaaacaggggttcccccatccccggactgtggaccagtatcagtccgtggcctgttaggaactgaggcacatagcaggaggtgagtggtaggcaactgag

SEQ ID NO: 96437 - DNA, 613 bp, Homo sapiens
taaattgtgacaatttcatggacatttattagttccycaaattaatacttttataatttctcatgcctgtctttactgcaatctgtaaacataaattgtgaagatttcatggacatttatcacttcctcaatcaatacccttataatttactatgcctgtctttactttaatctcttaatcccatcatcttcataagctgaggacgtatgtcacctcaggaccctgtgatgatttcgttaactgcacaaatttttcgtaaagcatctgtgtttgaacaatatgacatctgggcaccttgaaaaaggataacagcgacgttcagggaacaagggagataaccattgggtctgactgcctggaagccaggcaggacagagccatatttctcttattgccgaaaatgggtaagagaaatatcactgaattatttccccagtaaggaatattaataattaacagccctgggaaaagaatgcattcccaggagaaggcctctaaaatggccgctctaggagtgtgtgccttatgcagttgaagataaggaatgaaacatgccctagtctcctgcagcgcccccaggcttgctaggattaggaaattccagcctggcaa

SEQ ID NO: 96438 - DNA, 613 bp, Homo sapiens
taaattgtgacaatttcatggacatttattagttccccaaattaatacttttataatttctcatgcctgtctttactgcaatctgtaaacataaattgtgaagatttcatggacatttatcacttcctcawtcaatacccttataatttactatgcctgtctttactttaatctcttaatcccatcatcttcataagctgaggacgtatgtcacctcaggaccctgtgatgatttcgttaactgcacaaatttttcgtaaagcatctgtgtttgaacaatatgacatctgggcaccttgaaaaaggataacagcgacgttcagggaacaagggagataaccattgggtctgactgcctggaagccaggcaggacagagccatatttctcttattgccgaaaatgggtaagagaaatatcactgaattatttccccagtaaggaatattaataattaacagccctgggaaaagaatgcattcccaggagaaggcctctaaaatggccgctctaggagtgtgtgccttatgcagttgaagataaggaatgaaacatgccctagtctcctgcagcgcccccaggcttgctaggattaggaaattccagcctggcaa

SEQ ID NO: 96439 - DNA, 543 bp, Homo sapiens
tctgattggatcgggcatcagagccctgtatgtgtggaggacacaggagttggaaacctaggctctagttagaaggtgttaggctattaggtttgctagattctttaatttctttcagatggagaagatagaacccacacaatctcttttcttctccaaatatcatgaaccctactcatttcacaaaagaaaatttatttccaacatccagtaaggtaattaactatctggggtagattgagatagtatttgaagcacttgtcttagtgcctctgtaagtctagattcctaatgacattcatmtaagagctaactaacctcctactgaggtctgattaaagttaacttacatacacctatgaatcatactgcttattctgaagaattttaaagcatgggactacttagtcgttgaacaattgtcacttatccttatttctgctccgttctcacttgcagctatatccactctcagctgccttctgtccccattgccccaaagaattgttctttctaaggtcattaataatctccgaaagaatt

SEQ ID NO: 96440 - DNA, 555 bp, Homo sapiens
agagtgaaagagtgagatagatcccaatacaataatagctgcacacttcaacaacccactttcatcactggacagatattccagacagaaaatcaacaaggamacgtcagacttagtctgcactatagaccgcatgaacctaatagatatttaccgaatatttaatccaaaggctgcagaatacatgttctttttctcagcacatggatcattctcaaggatagaccatatgttaggtcacaaaacaagcctgaaaacattcaaaactttaaaataatgtcaagcatcttctctgaccacgatagaataaaaaaacaaaaatgacaagaggatttttgcaaactatacaaatagatgaaaattaaacaatgtgctccagaataaccagtgggtcgataaagaaatttagaaaaaaatcaaaaaaattatagaaacaaattataatgaaaacacaacataccaaaacttgtggaatacagcaaaagtggtacaaagaggaatgtttatagctataaatacctacatcaaaacagaagaaaagcttcaaataaacaa

SEQ ID NO: 96441 - DNA, 578 bp, Homo sapiens
ctcaccatatgcaaaaatcaactcaaaatgaattaaagacttaaagcaagacccaaaactatggaactgccaaaataagaaaccacaggggaaatgttttgtgacattggtctgaaaaaggattttttttggataggacctcaaaagcataggcaacaaaagcaaaaataaacaaataagatgacgtaaaactacaaagcttctgctcagcacaggaaaaacaaagtgaagagacaatccacaatatggaagaaaatattttcaaactatgcctctgacaaggggtttatatccagaatatatagagaactcaactcaacagcaaaacaaaaaaacaaaaaaacaaataattgaactgggcaaaagatttgaatagagatttctcaaaagaaaatatacgaatgaccawcaaacatgaaaaaatgttcaacattactaatcatcagggaaatgcaagtcaaaaatcacagagatgtcaccttactgtagttagaatgactattatcaaagagacaaaaaatagcgaatgctggcaaggatgtggagaaatgggaactcatacacattagtgggaatgt

SEQ ID NO: 96442 - DNA, 570 bp, Homo sapiens
tacagtaataagtgtagcttggatcatattaatctttctaccaataccattgtaaaacatgatttttatactttttaatgaagtgatgtttgcaaaggcaacatatgtagggttcacaaaaataataatgaaacctgataggagcttgagacttggcctcaatggtcctgctctatcacagccccataaccaccatgagaatatgcctaggctagcctgakgagagagtacccagagaagagctgagtcatcttagttgagaccccagacattttggctaaaaccagccaaaatctgcaaagccaacccacagcttccttcagacacctaagtgaatctaactgagatcacaaggatcagcctgctgacttggttcatgagcaatagtaatacatactcattgttttaagctgctgagtttcagaatggtttgttatgcagcagtgataaactgatacaattagtgaactgaaagaagattcctgtaacgaaaccaagagacataacgtgaaattataaaattaaaagcatgaaagataagaataaaatactttcaaatacatttgttta

SEQ ID NO: 96443 - DNA, 595 bp, Homo sapiens
ttcacacctctcctccctccccatcatatttttttttttacttagttccagcatttttcctcaaccttgcctcaccgccaccctgagttcctcctccctaaaaagctataccacgttgtatcatacatgtccctcatgattagyggacttatattatggtgtttgttgatcttttctacacacatagcataagtactccttaatatatttaaaacacttgaagtgaaaaacaaacaaacaaacaactctttatgggatgagctctttcttccattttctccaaagggcttcagtgagaatctaaggtgtaagagactctggttgtaactgatctccctttatggctaaatttttgtaggagtgtttactggcctcctagctttcctgattttgaattaatcaggtatcggtgttcaattcctccattcacattcaagctgagattcaaagcccttctaatcaggctgtggactatacatatacatggccacctgctctctgaagaggccgttgtcttctgtttcccctaaacagacacatagacacaccagaccttcttatgtggtctgctagcctgtaatatgtactgccttca

SEQ ID NO: 96444 - DNA, 595 bp, Homo sapiens
ttcacacctctcctccctccccatcatatttttttttttacttagttccagcatttttcctcaaccttgcctcaccgccaccctgagttcctcctccctaaaaagctataccacgttgtatcatacatgtccctcatgattagcggacttatattatggtgtttgttgatcttttctacacacatagcataagtactcyttaatatatttaaaacacttgaagtgaaaaacaaacaaacaaacaactctttatgggatgagctctttcttccattttctccaaagggcttcagtgagaatctaaggtgtaagagactctggttgtaactgatctccctttatggctaaatttttgtaggagtgtttactggcctcctagctttcctgattttgaattaatcaggtatcggtgttcaattcctccattcacattcaagctgagattcaaagcccttctaatcaggctgtggactatacatatacatggccacctgctctctgaagaggccgttgtcttctgtttcccctaaacagacacatagacacaccagaccttcttatgtggtctgctagcctgtaatatgtactgccttca

SEQ ID NO: 96445 - DNA, 617 bp, Homo sapiens
catagttttcgccccaatcctgccaaaatcctgggtgacttcaatatcatgtggacgccaagtatttcttgtgcctcataacttcctataccatttcactacagccactctcatttctagccacctaaccctggcttgtctttaccagaacttgctgtctctgaaattgaaaatccaacttttaaccctctcatcttatcacagtgtctaacctctcagctctcaccctcatttatgcccacaaacctcttctggcctcatctagaccttcagtcttttggaatctttttttctcctggtatatctgctcttcctactttaaattatttgttcatccaagctagatccatttgactacattgccaatattagcaatgtccttgtttccattcctcctacaatccagaaaaactctgattggcatgaaccttatgttttctgccctacttgtaaacttacactgctgaacactaaagagaatattatgctcacacaaaaacagctagcattataatttcaactgagtcctccacattgttcagtaggtcygtaacaccttctcaggctttcctcattctcgttcttcacatgagcaggctcaatctttcagcaacacc

SEQ ID NO: 96446 - DNA, 597 bp, Homo sapiens
tgtgtcacgaattcttcccttaagcctttgtatttatcatctcacttaattcttatatcatcccttagatatctactactattattattattattatactttaaagatgaggacctgagccacagagatggtaaggaatgccctcagattagacagcagctactggggcagagtggaatgaaacccggacaacttctctccagagcccaggtaactagtcactttcaggycttctaaaccccaatctagtactccttagttatttaaaaagtgaagaataaattaaatatgaaagtaactccactaaaacataccacataaagtcaaaggaagaatgacaaactgggaaaaatatgtgtaattcatatcagagacaaagactaatttatgaagtgatcatagaaatatgtaagagaaagacaggagactcaatagaacaatggacaaaggaaatgaatagttcgcgaagaaaaacatatatatggcctttcaatgtatgaaaaaaatgtgcaatctgactcaataagagaaaggcaaattaaaaccgtgccaaaatacctattttttttttaacctatgaagttgacaaatatcaaa

SEQ ID NO: 96447 - DNA, 605 bp, Homo sapiens
cacccagtgttcagctccccagctgatgagtcttcccagcccaagtgacagacatgtgagtgaataagccatcaagatgaccccaggctgcagccaccatctgactacacctatgtgggaggtccatgagaaccgctcagctgagcccaggcaacccctggatttatgagcaaaagaaataattgctattcttttaagatactatttggaatgagttgttacacagcaaaaaagcaaaacaaaaagagagtagaaggtgatagtccattaaggtcctcaatgaatttagagaggaagctctgtgagggtctggataaagttttccaagctaagggaaaaataagtgcaaaggccctgatgtggcatgttggaggcacagcaagcatggtgttagagcagagtgagccaaaaagagagtgcaaatgccctggggaacagggaagggtgcagctccaccttgyaggccatggacaggtgtttggatttgattctgagcttgctaggaatacttagaagagttggagagcagaagtaacacaagtttgtgttttccaatgatttctgtggttgctggatggagaattgactactggggagtggacaaa

SEQ ID NO: 96448 - DNA, 363 bp, Homo sapiens
aatctccctgcaccattgtttcctaataattctatatcctggtcccccaaaatttcattagaatttgatgaatggcaggttaaaatggaaatattaaaaacataaatatgaaatatttatattttatatgaacttataatataaaatattaaaaacacataaaacttatggygccttctttatggaagggtggagataaatcatatagtgatctcagataagtggaccaggcaggtaacagcaaggaaattaatgaagacagctggatacaaatgtattagtgtgcttgtctgccacaacaaaatagtgggtggcttaaacaaaagacattttaaacaacaggcatagttgggtcacttaaac

SEQ ID NO: 96449 - DNA, 633 bp, Homo sapiens
tttgaattcataatatataatgagccagagaagtcgagataagagattggaggggcaaagaggaaggagaagatggggaaaatatataataacaatataatttcatgatgttccatgctttcttgctatatttttgtgttataaatttctaaatttgtaacaggtgagctaacamtagcaattgataaaacacaatccatttaataaaaagaggttaaataaaatgtaatatgaaaacaagtgcacacatgtgagccatatattactttattccaactatttccttgtataccatgccaataagaataaataaaagaaaatttggcctccaaatatgttatgtacttgctgtttttatttatttattttatatgggttatagcctatgagaagttctgaagagctaacaataaccttcttcatacaaactgggttttcactcaatgaaaaatagtgtagtacgattcagcttaatatgattttaaggaaggcaaaggtgtataaacaaagtacagaaatcatttatgtatagcttcaacttccatactgttaacgaagagttattgatcatgtggaataaagaacacaatggccagtcagttgcactttaagttacttttccacaagtggtga

SEQ ID NO: 96450 - DNA, 574 bp, Homo sapiens
ccaactctctggagatgtaacaaagccaacagattatgagaccctcattggtttgcttgaagcagagctcttgaaatgttgcaatgtaaataacttgtaataccaggaccactttgtcagcaaccagcaaaggctgcttagggatatagtgaatctgctcctcaagtaaatcctgagaaatttaatgtcctccaagctttcagctttctagctatggctcctttagcaactgctactgacttcatgccacaacaacaagaacaaaaatatggagctgcattcttttccattctccataaaaccagcatccaaactgcrttaatatggatgtgtgaacatttagcactgacatacattgttcttactgaggaaagcattagacaaaatattttctcaatgaatcattagagtaatataactaagagaatattatatacatttagaagttttttttaatctaaagcatgagaaaatactgtatttgaaagttagaaaactgcatttagttatactaaatcaatctgactttcactcatcctcacaaaccccctttaccttcattttgaattagaga

SEQ ID NO: 96451 - DNA, 436 bp, Homo sapiens
ggaattcatttcatcactgttggtaggtaaatcacaggtatctacttgcatgcattgatgtttaattgttacaactctaatttagatgttatagtggtgtcatayaacaggtacgggaaaatagtgattataagaacaataggattgaatgactcttgttaagcacaataattgatgctctaggaaaagatacttccaattaataggcattttaaaagtcataggaacgataaaaggattctttgagagctcacacaaacacattcttcttctgcagtgggaaggcatagatggcggaggaccaggaccaaaacctaattataagaatgacagagtagcccacctccaaagaaggtaaaactgttaaccaagggagcttgttatgtcaaaatcaggaccctggttgggaaaaaaatatgagtctgacacatgagct

SEQ ID NO: 96452 - DNA, 381 bp, Homo sapiens
gaattcatcctctggctgcttcaagctgggacactgtacttcttccgtcttcagagccaaccagttaagtaacctttgtgaaatacaaagaactgtggactgtattctgtactcaatggaggtccactggtgatttccacactggagggacatgatcagatttatacctcagacttacatcatgggctctcatgggtcctaagcttgctgatggtagattttgaactcctcagcctccataatcatgtgagccaattccttacaatcaatttcttwatatatacatatttttgtctcctgttggttctgtttctctggagaaccctagtacactactgatgtaggtgaaggaaatagagttttcttccttttttccaattc

SEQ ID NO: 96453 - DNA, 634 bp, Homo sapiens
tctataacaaattaccctcaaacttaacatgttaaaacaagaattgtaatattatatctcacatattttctcaggtgagaaatctgggagcagctgtactgggaggttctggctcaacagactcttgtgaggttgcaaytgagttcttgaccagtactgtcatcactgaaaggcttgacaggggctggaagattcacttgttggcaagatgcctcaagtcctcactatatgaatttttccacagtgctgcctgaatgtccttgtgataaagcaagtagcttccccagaatgagctatataagagcaagcaagaaggaagcttcagtgccttttatgacctagtttctaaagtctcacatcaccgtgtctactctattcaatttcttaaaaatgagtaattatgtacagattatactacagaagaagagctttagactccaacttttgaaaggaggaatataaaataatttatgatcatgttttaaaaccactgcactcacatatgtgctatcttcaataaactaaatacaaagccacagataggttaaaataaaatataaaacaagtactatgctaccactaatttaaaaaatctagggtggctatattaatgatagacaaagcaagaaacatt

SEQ ID NO: 96454 - DNA, 556 bp, Homo sapiens
aatctgtaattatatcatttttaaaattttttgaggatatatcactaatttatacatttttactaaagaattgtagaaatgtattattcaaaaatgtgcattaaaatatgcaaatgtaaaaaatggaaattgttttttaaatagcatatatgaaacaaacagaacttttatcttcctcatagtagtggctgcacacacttaaaaacaaagttcaggctgggcgcagtggctcacacctgtaatcccagcactttgggaggccaaggcaggcagatcacaagattaggagaccaagaccatcctggccaacgtggtgaaaccctgtctctactaaaaatatgaaaattagctaggcctggtgrcgcatgcctgtaatcccatctacttgggaggctgaggcaggagaatcacttgaacccaggaggcagaggctgcagtgagctaagatcgcaccaatgcattccagcctgggcggcagagcgagacctctatctcaaaaaaaaaaaaaaaaaaagttcattgataaatacatatattacaaaagtttcttgaaatt

SEQ ID NO: 96455 - DNA, 569 bp, Homo sapiens
ccagcatatagggacatccagcttgaggcatcctgaggcccactcacctgcatgggtgaggccaaaggggcccacttctccattatataccggaacatcatgaagatcttgtcagacagtcggttggcatccagtctggggtagggaaaatctctccagtggttgacatatttgtaaatggctttgctgaaatttctcaagggctgcatttaaaacacacaaccacagactgagaaaaatataaggacggggcagacgataaaataatttgagaagagagtgctgatgattagtaaatatgtaatggtttttagatgatcttacgactgcatcaaatacacatatagaaagtgctcagccacaaaagtgaaatgcaaattaaaagcataatgagccactactatccagaatgtctaaaatttaagatagtcaatgccaagtgttaacaagactaaggtgcagctggtattctcactgctggtagaagggcraattggttcaagcactttgcagaactctttggcactatctagcaaagttgaatatgcattccatttgacccaactatt

SEQ ID NO: 96456 - DNA, 561 bp, Homo sapiens
atgaccacccaatgtcaaagccaatggatcctccccacttcccaaaattttattataaaatttttaattatasagaaaaactggaagcactgctcagtgaatacctgtatatgtaatacctatatctgacaattaatattttactatattttctttgtcaatccatttattttttaaaattgcaattccaagtaacttgcagatttcagtatacttccaagcacttcagcatgcttaacatagactagagtttagtgcatcctgatattaagttggcatgactttttgccacaaatctctgtgctaaaattcccaaatccattcttaatctttcccaaccctcatattaaatgcctactgaatagttggctgtcagtcttataattctccttttcttgttgtatttcttctttacctttatggcctttctctctcaatagatcttctgtcccctttttcctaccaattctttaaatagtgatatgtttgatctctctagttttgactacattcttgtgtatctttccccttttcctctgtcttaggttcagtccccaagaa

SEQ ID NO: 96457 - DNA, 561 bp, Homo sapiens
atgaccacccaatgtcaaagccaatggatcctccccacttcccaaaattttattataaaatttttaattatacagaaaaactggaagcactgctcagtgaatacctgtatatgtaatacctatatctgacaattaatattttactatattttctttrtcaatccatttattttttaaaattgcaattccaagtaacttgcagatttcagtatacttccaagcacttcagcatgcttaacatagactagagtttagtgcatcctgatattaagttggcatgactttttgccacaaatctctgtgctaaaattcccaaatccattcttaatctttcccaaccctcatattaaatgcctactgaatagttggctgtcagtcttataattctccttttcttgttgtatttcttctttacctttatggcctttctctctcaatagatcttctgtcccctttttcctaccaattctttaaatagtgatatgtttgatctctctagttttgactacattcttgtgtatctttccccttttcctctgtcttaggttcagtccccaagaa

SEQ ID NO: 96458 - DNA, 551 bp, Homo sapiens
ggtccaggagcccaggaaggcataatgagacttggagaatattggatggtcagttaatgtcagctttatgaggtattgtgaagaatctccaatcctgaaacagtttagtaataactattcctaaggttgctgtgagatttagataacatagggtacacaacatgacaaatacactgcttgacctgtagtaggcactcagcaacaacagtttttcttctctctctcttttttttttaaacaactatcaaggcaagatgttcacttctccttttgtttctcaggtgcacctgccttggggttctgcagcttaggtttgtctcagggcagctggtgccactgtaggacctggcagtatccgaggagtttacagcagatggctgggcctaaggtgtacttcacctgaaggacttctagtatattggattggttacaagactgctttgaggagcacaatcctawgagagggaagcagtgtgatataccaggaagatcctaaggaaaactactcagaagtattgtgttctaagtacagtagttcgaccacttactgg

SEQ ID NO: 96459 - DNA, 498 bp, Homo sapiens
aatgttttctcacagtgtgtgacttgtcttttaatttttaaatcatgtctttcacaaaaaggaaattttaatttgataatatccaatcatacttattttaattaatcatgcttttgatatgctatttaagaaatctttgcctactccaaagtcctggagattttttcccatgttttcctccaaaagttttatatgctttaatttttatgtttaggcctatgaytcatttgaattaatttgtgtgtgtggtatataaattttgtgtatggtgtaaaggttaagattcatttttttcctatagggatatctagtttttccagtgcaattttatgaaaagattatccttttccccaccaaattactttgacatatttgttgaagatataatatcaatataatatcaatgtatcactctgttctgtttcattgacctacatgtacattctcatgccaactgtctcgattgctatagctttaaagtaagtcttaaagtagtga

SEQ ID NO: 96460 - DNA, 632 bp, Homo sapiens
atgttgttcacaatgtcaacctaccagtgagtgatccatctccaaaattccattttagagtagggtttccaggatccatccgatsccactggcttgtgttcattttctgaagacaagagatggagggttgcatgcaggttgctaggggactgctcctgtgagatacacctgcaaagaagtgaagaagacaggagtggaggaaaggcaaagggttgagctgacctgccacacagtttaactgagacctcagacaaccttctgagaagctctggagccatgatggttcttcagaattgtattaagacaagatttttgggcttttaaatgtctggactttgactgcagggcacaccatgggagagagaataaccttgagtaaggcagtttccttttgccaagggcaattcccatgcacaaatcaactgtgaaccttcaaaagctgaaacgctgagcatctgggtaaggaccttgaagagaggacctaaaaggaacaacaaaggatttcccctttttcctaatttctgcctctctgctactcaatcatgtggcagtgcctaagcctgtgttttaaggatttttttttttaagacagcagagtaagacacagagcaaaagcataaattataccagtt

SEQ ID NO: 96461 - DNA, 555 bp, Homo sapiens
tttttccaaaaagatttaaacccaagaaaagaatatgattgaaatattgaaaaggtttgttacagaaaagaaatcaaagtatgttacttaaaaattgtggttctgaactagataggaactatttttaatggaataatttgaaggacaatgtctctctctctctttatgtttatttaacaattatttattgattctgttctttgtatagtcttaagtactggggaccaaagagaatatatgactaagatgggctttcagccattcattcattcactgtatataggagattggatgactgatcttgactttgctgagaaattgcatwaattattgtcatttacaataaaaaagaaaattgttcttatattcactagatgcttaagtgtctcactagaccagtgtttccctgaacctggctaatcatcaaatcattagagacacctgctaaccataaatattcccaagcctcactgatggacccttaatccaatgggcatgttgttgggtagtgatgggattctccagttttatcaggtagtcaggtgattctcatac

SEQ ID NO: 96462 - DNA, 415 bp, Homo sapiens
tgcaactatatgcttgccttggatatagagtccaaatattctaattcctacagtaccattaatggcacccccacgtttggtggaaataaacaagatctccttggagatcccatttcagtcacctatccattaagatttaacaacccaagccagataattcccccagcagaggccaaaacaacaagcaattactgctggggcagacttccctttgcccaggttattcccctctggggactttttccctctctcacaggtgaagggttaaaaccccattgctctctcttcctgtccccggaacagaagtttttcttaasgcagctagcccttggtttgccttagaggaaccccataatatgtccttgtcaaattctattcagctccaacctctaggagtggccatttgtcccaaacc

SEQ ID NO: 96463 - DNA, 566 bp, Homo sapiens
tgttgctgggcctggaatattattagatgggtccattcaaaaggacttcaaactagatcacaaacttggcatcttataggaaaagtctgaaagtttattaccaagaatagcagattattctagaagtcctctagcaaaacgactcagactttccttctttgctcctacttcagaacccacctggtccatgacctacatactacccttactcttaggaatctgataataaatctggctaacacatttaatcactattaaagagaaattgtgggagaggggctgtggtcaggggcatttgctgcaaggggcagaatcagaaggtaagtttcacaagagctcctggtggcccacagctccctcctctgaccctgctagtcctcctgtgtgtctaacactcaagggagggttgcccagacctctcggccatgctgtccccagggtctttctcctctgtcctccactcttcctgcttgggtttctcttgcactctgcttgatcagttatatgtcaagtgttctagaycaaacatcattatgaaatccctatctcctgagcatgaagaattc

SEQ ID NO: 96464 - DNA, 509 bp, Homo sapiens
aaaactgtcttggtcagagacttttctcttgtcattagaggttttagtaaatgaaggtatatttatgtttcagaatcagggagccaagttcagcaaacactataatttcttggagctaatcaaggattaaagaaaaaagcaaagcaaagcaaaacaaaacaaaaagcactttaccactgaaccctagagcccttgaaaagaaaaggttttgctattgggtgaaagaagacgacacttcattcctaaaattgctgattgtttttctkgcttttgaacagttatgattgctgtaactctgtatggaaatatatttgccagttaataagtaagtcctgctgtgtttaaagcagcagccacagagctctcctcccctctggtctgatgctctcactgccactttctgtaagctgtgctggagtaagttgtgctgtggaaaagtgatagctgagcctgctgtccatgacaaacattgaaatattcaataaaaataagagacaggaaaggtgagt

SEQ ID NO: 96465 - DNA, 509 bp, Homo sapiens
aaaactgtcttggtcagagacttttctcttgtcattagaggttttagtaaatgaaggtatatttatgtttcagaatcagggagccaagttcagcaaacactataatttcttggagctaatcaaggattaaagaaaaaagcaaagcaaagcaaaacaaaacaaaaagcactttaccactgaaccctagagcccttgaaaagaaaaggttttgctattgggtgaaagaagacgacacttcattcctaaaattgctgattgtttttcttgcttttgawcagttatgattgctgtaactctgtatggaaatatatttgccagttaataagtaagtcctgctgtgtttaaagcagcagccacagagctctcctcccctctggtctgatgctctcactgccactttctgtaagctgtgctggagtaagttgtgctgtggaaaagtgatagctgagcctgctgtccatgacaaacattgaaatattcaataaaaataagagacaggaaaggtgagt

SEQ ID NO: 96466 - DNA, 459 bp, Homo sapiens
ctcacatttcccacaaggattttactgttattttacaggctgtgtggtttgactgttcaggcatttctatagggatctccctactggttttccagcttgactactgtcttcatttaggaaagcatgtatttatgagcaacttactggatttttcaattgttgttagaatgtagaccatttttgccttctgatgatttacagccaagccctgtgtaagatctggttctatggtatgaacttttttgtcctctgcttctgcctttacaagtgactctcagaaatgcagaccagaaaaatggcacccaaagcrtttctttaggagatcctatccctggatgagcctgtacacccagctaattttaagctttgtcaagtagtgagaactccattttgagtacctttccttgcctcacactgcttcccacttgcaaaggaaatatctaaaaacctgaaacttta

SEQ ID NO: 96467 - DNA, 527 bp, Homo sapiens
cccagcggtgctgcagggacagagattagagtggggtattattgcaaatgatatkctttctagggggaaaaaatgtggtatgggagacactgcttatagagtgatttgtgtgtattcatttttttactcatttacaaatagttattgcatgcccactattaccaggaactacgctaggaactgggaattaaaagggaaacaagaaacagtgcctgacttccagaagcccacgttctagaagaggagacagacaagtgaacagaaaatagtgcaacaggagaagagtgatgaaaagtctaagaagagggacatgagaccatggaggaggggcatgggaaagccaggaaaggcttcccagagaaagtgaaatctagaccaaggtttctcaatctcaaccccattgctactcagggaaagataattctttgtggtaggagtctttgatgtgaggggcattataagatgtttagcaacatccctggcctctaccgactacatgccagtagcaaccaccccaccctcactca

SEQ ID NO: 96468 - DNA, 671 bp, Homo sapiens
gatgcttcttcaaaggacatacaccaggaacttgtcttcacactgtctcattttcttattcaaataaatcaagaaaaaccaacgatttattatttctcccaattctgtgggttaattgggcttgggtagtgtttctgctggtgcagggtgatgtcactcaggcagctctattctgctgggagcctggctgagggcaaacatgcaaaatggcctctcatcctccaggttctctccatgtggcccctcattctttagcagtacagcctgagcttttgtgtagtgtggtaacttgcttccaagacagcaaaaacgggagctaccaggtttcktaaggacaaagcctaggtctgaaacagcatcatctctaacacattctattattggtcagagcaagtcacaaggccagttcagattcaaggagaggggaaagagacttcatctcttgactggaagtactcacagagatgggagtaattattgatggcagtattggaaaccacggtggctcagtctgtagtgtcttgcttatagggtccttttgagggataccaattgtcttagttcattcctgctgctataacaaaacaccttagagtgggtaatttataaacaccagaaatttatttcttacaagtctggaggctggaagtccaagatcaaggtgccagtag

SEQ ID NO: 96469 - DNA, 565 bp, Homo sapiens
ttaatcccttgtcagatggatcatttgcaaagatttttttcccaacctgtgagaagtctttccattctgattatttcttttgctgtgcagaagatttttagcttgatgttatccaatttttctatttttgccttggttgcctgtgcttttgaggtcttacacaaaaattatatgcccagaccaatgtcttagagcacctcctcagtattttctgctagtagtttcatagtttcaggtattatatttaagtttttaatccatttctatttgatttttgtatgtgrtgagagagaggggcctagtttcattttttctggtcattcagctttcccagcaccatttattgagagtactgtcctatccccattgtatgttcttggtacttttgccaaaaatgagttggctgtgaatgcatgaatttatacttgggttctcaattcttttccattagtctatgtgtctgtttttatgccagtaccatgctgatttggttactatagttttgtattatattttgaagtcaggtagtgtgatgcctccagttttgttctttttgctcagtatt

SEQ ID NO: 96470 - DNA, 623 bp, Homo sapiens
caaaaccaattaaatgtagtccaaccttgagaatcagcaagtaaaaacctctgaagccaagwgggctaacaggaaaactgaaggagaggagagaaatataccataagcattttcaaacctctgcttcaaattcttgtatttataaatggtctgggccagcagtgcaactctccctgtctcgctctttgttgtttattttttggagtctttaatgaccaatcgggttgctgaaatttacttgaagagtttattcttgattctgaggtataagattttctgtgtgaagatggctgggaatccacacaactctcctaaaataagcaccaagttttggaaagaattttctcttgtggaaaacatccatttccaaagagagccatcagcatgagattgcttttttttctttttaaccgcccccaacccaaggagaaagctgaggggagtcagtctgtgaagcagccaggaatcaactttcatgacagttttaacattcaaggcagacttttcccttggtcttttggaagaactgctgaaatctcaatgaaagttcatgaaattctgtagaggaatcagctgagtctagaaataagctgttccttattgtttcctctgtttccttatat

SEQ ID NO: 96471 - DNA, 586 bp, Homo sapiens
ggtgccttgggtcatcatccttatgcacatgacattcgagagccactgtgttatttcctagtgcaactgtgactcagtgtaatctgctttctttccactcctctgatttctgtgtgtaaattttcatgacaaaagttagacaaaataccatggactgaagttagatatagagcaactcatgtctcttttagttgctggtgattgcaaatktatctccatggccaaattgcttttgaggcactatatgtgatatttatctgtattgtgggaaggttaaagaagtgagaactctttccttgcttagtggtggcctgtgctctggaggtagagaggaagacacaggggccatggaggtgggacttacaggtgtggtacaggttgtataatcatgatggtgaccctgcatggagaagggaaagcttgaccttttccttggctcagggctatgcaaatagggctggcccatttctgagaggggaaggtagctgatatgcaggtgtgattccctagggcccagaaagacctgcctgccttctgcctttgttgtcatgcttcatgaggcctgaaatgttcactggtggttatt

SEQ ID NO: 96472 - DNA, 667 bp, Homo sapiens
ctggcagtggggaaaggatatctgtaaatcagttcaggtcactttctagaatggccttggggtctgatgggaagggtagtctactctctctcctctggaccagctccatgaactcatcctaagtctcagaagaatgattttaaagaataatgtcagagaacaaatattttatggcaatttgggtggcttacagtttgagttttgggctgataagttggggcaatgtggggttacacacatatcatcagggcctgttgtagatcctggtgatgatcactgaataagcatttattacgctgaatagagatttttaaatactgaaattagaatctttgagcatttataatactcctttgaaattacatttaaatttaygaaccagataaaaaattattgctttactttagaactacatagttttttagaaaaaaaatagaatatttttgttttgattgattattcaccatactcacttggtctgacatctgttagccatcgtttgaattatattaggccttgtggcaatttattattacaggatattgtaaaaattaacctcggcttggaggagtaagatttcacacggatcagaattttgaaaagaaaagtatcacaccactcaaatagagggatctgaacaatagtgtcattattggaatggaatgtg

SEQ ID NO: 96473 - DNA, 667 bp, Homo sapiens
ctggcagtggggaaaggatatctgtaaatcagttcaggtcactttctagaatggccttggggtctgatgggaagggtagtctactctctctcctctggaccagctccatgaactcatcctaagtctcagaagaatgattttaaagaataatgtcagagaacaaatattttatggcaatttgggtggcttacagtttgagttttgggctgataagttggggcaatgtggggttacacacatatcatcagggcctgttgtagatcctggtgatgatcactgaataagcatttattacgctgaatagagatttttaaatactgaaattagaatctttgagcatttataatactcctttgaaattacatttaaatttatgaaccagataaaaaattattgctttactttagaactacatagttttttagaaaaaaaatagaatatttttgttttgattgattattsaccatactcacttggtctgacatctgttagccatcgtttgaattatattaggccttgtggcaatttattattacaggatattgtaaaaattaacctcggcttggaggagtaagatttcacacggatcagaattttgaaaagaaaagtatcacaccactcaaatagagggatctgaacaatagtgtcattattggaatggaatgtg

SEQ ID NO: 96474 - DNA, 667 bp, Homo sapiens
ctggcagtggggaaaggatatctgtaaatcagttcaggtcactttctagaatggccttggggtctgatgggaagggtagtctactctctctcctctggaccagctccatgaactcatcctaagtctcagaagaatgattttaaagaataatgtcagagaacaaatattttatggcaatttgggtggcttacagtttgagttttgggctgataagttggggcaatgtggggttacacacatatcatcagggcctgttgtagatcctggtgatgatcactgaataagcatttattacgctgaatagagatttttaaatactgaaattagaatctttgagcatttataatactcctttgaaattacatttaaatttatgaaccagataaaaaattattgctttactttagaactacatagttttttagaaaaaaaatagaatatttttgttttgattgattattcaccatactcacttggtctgacatctgttagccatcgtttgaattatattaggccttgtggcaatttattattacaggatattgtaaaaattaacctcggcttgraggagtaagatttcacacggatcagaattttgaaaagaaaagtatcacaccactcaaatagagggatctgaacaatagtgtcattattggaatggaatgtg

SEQ ID NO: 96475 - DNA, 593 bp, Homo sapiens
cgtcgtgaacagttaaaaaaagaaaaagcagcatttggaaaacattctttaccaaggtttacctagtagtaaaatatttataagtaatattcattaatgagatttaacaataaagtgtccaacaataagataaatgttgttactatttcgaaacagcacacaaaatatagtggaaatgtatacataattccttaaaagtgcatattgtcatactcttagtcaaattttgcggtttgaaacggaacaaatccacggagtgagtttgatagagccgactgaaagtgcagctgctataatttgggcccagcatcagcattaaaaatgtgccattgtatgtattcctgttatgatgaataacaaaatagaagatagtgttctattgcaaatcacattcataaaaagtgagattctttaagcawgtttgaaaaactgctttcgagatagtgtacaccaaggattacaacatctcaaaaagggattaatcaaacacgattaaaagttgctattactgctacaatttacacattatgtcagtaatatatcttaaccatgacttttattatttgatagacaagacagttataataccctta

SEQ ID NO: 96476 - DNA, 569 bp, Homo sapiens
ggatctctatatgtggccctctgctttttatactttttcttatttaggcaataagttttaagttaactttctttaatgcactcctagtccttagcagaaatcatccaacgcagtacgcttttcattatcacttgccctgaacctcccacatgcctgggatattacacctgccagtgtatttcctttcaccacagatcccactcccgttcrctatcagtaaaagttttaacaattcaacactagtggctggggcctattactactccactcataatcattacctaccagctatttgggaattcagtttcaaaatctattttagtggctccatgggtcactattgtactaattgtcctaggtcaagctgtcagggaaatagactctgagatggagttttatatgtagttgtgtattggagaatgttatcaggaataacacatttgagacacacacacacacacacacacacacacacacacacacacagagcagaattgcacagagggagaggttaacctgcaaagcgatgccaatattggacttctcaaacaatgccatggagagatttg

SEQ ID NO: 96477 - DNA, 569 bp, Homo sapiens
ggatctctatatgtggccctctgctttttatactttttcttatttaggcaataagttttaagttaactttctttaatgcactcctagtccttagcagaaatcatccaacgcagtacgcttttcattatcacttgccctgaacctcccacatgcctgggatattacacctgccagtgtatttcctttcaccacagatcccactcccgttcgctatcagtaaaagttttaacaattcaacactagtggctrgggcctattactactccactcataatcattacctaccagctatttgggaattcagtttcaaaatctattttagtggctccatgggtcactattgtactaattgtcctaggtcaagctgtcagggaaatagactctgagatggagttttatatgtagttgtgtattggagaatgttatcaggaataacacatttgagacacacacacacacacacacacacacacacacacacacacagagcagaattgcacagagggagaggttaacctgcaaagcgatgccaatattggacttctcaaacaatgccatggagagatttg

SEQ ID NO: 96478 - DNA, 603 bp, Homo sapiens
agaccaggtggagataattgaatcgtgagggcagtttcccccatgctgtcctcatgatagtgagtgagttctcacaagatctgatggttttataaggggctcttccccctttgctcagcacttctccttcctgctgccttgtgaagaaggtgccttgcttcctctttgcgttctgccatgattgtaagtttcctaagatatccccagtcttgctgaactgtgtgtcaaacctcttttctttataaattacccagtctcaggctgttctttatagcagtatgaaaatggagtaatatagtaggacccaagaaattataacatgtactattgctatttacctggaattatcaataagttagatgacatttaattatttttggtaataaagaagtttgcgtactaytgtttttcatactgattgtttaaaagcttcaacatctgttttgtacacatacacaaccagatatttgtaaacaatttttataataagcctatagtataaaaaaggataattctacctagagttatcatgaggagggaatgatcttttatgcaaacctccatcagtagtgtcggaaactagcaggaaactacagtgtaatt

SEQ ID NO: 96479 - DNA, 586 bp, Homo sapiens
ctaagtacaaatagatggatgtcagatgaggtccaattagggaatccaccatagaacacatggaaaggtttcatggaaggaatggcactaggtcctgaaagataaagttggcaaagtgagaaaggaaagattggctggctgtcttggggcaagaaattcaaccccctgcagtggttagccccaatacattcatttccgtggtagttggtaataaagagatttaaattgtaactgaatttgataagaaactattgctgtaatttatcctttgtttttctgtgccttattttctttttctatgtcgttttaaaattatgcctttcaaatggagggtttttccttttttctgcttatgcaaaactaagcaaagaggggctatccatagagaaagcttgtcttctatctttttggagttgcctatttaatcccttgaagcctcaactgcattcccctgtatctgtgttgttygaaattcgtgccaataattgacaggaatgtaaatatcctggctctttcacctctcatggaggatgactctgtggcaggtgttttatcctggatccaagaacttcctcaatgaaaattc

SEQ ID NO: 96480 - DNA, 552 bp, Homo sapiens
agaagctccaagtctctacaagtagacctagcagagctggctgagtcagcaccccacagtgacactgtcttttgttttaagacaaggtctccctctgttgcccaggctggagtgcagtggtgtaatcttggctcactgcagcctcaatctcccaggcacaagcagtcctcccacctcagcctcccaagtggcttgtagaaatggggttttgccatgttgcccaggctggtcttgaactcccgagctcaagagatcctcctgcctcagccccctaaaatgctgggattamacgagtgaggcccctcgcccagttgacactgtcttcataaacctcaggcccctgcccccttgtgccccgtggccaaggaggactaatctgtggctgcaggccaggagaggctgagcactaatcccaaggagaagcccaggcttgactgtgagaaaaggcccctccctggctgtggggcatgtctccagccaagtctatctcccacatccagctctgctcaccttctgctcctccggcacctggatttttcttgccttcttcat

SEQ ID NO: 96481 - DNA, 552 bp, Homo sapiens
agaagctccaagtctctacaagtagacctagcagagctggctgagtcagcaccccacagtgacactgtcttttgttttaagacaaggtctccctctgttgcccaggctggagtgcagtggtgtaatcttggctcactgcagcctcaatctcccaggcacaagcagtcctcccacctcagcctcccaagtggcttgtagaaatggggttttgccatgttgcccaggctggtcttgaactcccgagctcaagagatcctcctgcctcagccccctaaaatgctgggattaaacgagtgaggcccctcgcccagttgacactgtcttyataaacctcaggcccctgcccccttgtgccccgtggccaaggaggactaatctgtggctgcaggccaggagaggctgagcactaatcccaaggagaagcccaggcttgactgtgagaaaaggcccctccctggctgtggggcatgtctccagccaagtctatctcccacatccagctctgctcaccttctgctcctccggcacctggatttttcttgccttcttcat

SEQ ID NO: 96482 - DNA, 552 bp, Homo sapiens
agaagctccaagtctctacaagtagacctagcagagctggctgagtcagcaccccacagtgacactgtcttttgttttaagacaaggtctccctctgttgcccaggctggagtgcagtggtgtaatcttggctcactgcagcctcaatctcccaggcacaagcagtcctcccacctcagcctcccaagtggcttgtagaaatggggttttgccatgttgcccaggctggtcttgaactcccgagctcaagagatcctcctgcctcagccccctaaaatgctgggattaaacgagtgaggcccctcgcccagttgacactgtcttcataaacctcargcccctgcccccttgtgccccgtggccaaggaggactaatctgtggctgcaggccaggagaggctgagcactaatcccaaggagaagcccaggcttgactgtgagaaaaggcccctccctggctgtggggcatgtctccagccaagtctatctcccacatccagctctgctcaccttctgctcctccggcacctggatttttcttgccttcttcat

SEQ ID NO: 96483 - DNA, 525 bp, Homo sapiens
taacctatcaataataatctcaaatgtaaacacattaaattcgctgcttaaaaggyaaagccagactgaagagatttaaaaatgacccagcaatatgctgcctataacgaactcacttcacctgtaaagacacgtatagactgaaaatgaagggatggaaaaagatttttcacacaaacagaaaccaaacagtgagcagaaatagctatacttatctcagataaaacagattccaagtcaaaaattgtaagagacaacaaaggtcattatagaaagataatgggatcaaatcagcaagaggatataacgttctaaacatatttgtacccaacattcgagcacccagacatataaagcaagtattattagatctaaagggaaagatagactccagtaaaataatagttggagacttcaacaacccactgttagcattggagagatcatctagacagaaaatgaatacggaatcattgcatttaaactgcaccttaggccaaatgaacccagcagacatttacagca

SEQ ID NO: 96484 - DNA, 525 bp, Homo sapiens
taacctatcaataataatctcaaatgtaaacacattaaattcgctgcttaaaaggcaaagccagactgaakagatttaaaaatgacccagcaatatgctgcctataacgaactcacttcacctgtaaagacacgtatagactgaaaatgaagggatggaaaaagatttttcacacaaacagaaaccaaacagtgagcagaaatagctatacttatctcagataaaacagattccaagtcaaaaattgtaagagacaacaaaggtcattatagaaagataatgggatcaaatcagcaagaggatataacgttctaaacatatttgtacccaacattcgagcacccagacatataaagcaagtattattagatctaaagggaaagatagactccagtaaaataatagttggagacttcaacaacccactgttagcattggagagatcatctagacagaaaatgaatacggaatcattgcatttaaactgcaccttaggccaaatgaacccagcagacatttacagca

SEQ ID NO: 96485 - DNA, 596 bp, Homo sapiens
ttttgctgtagtcactcattaatgagtggaggcagttgtagtcagaaattattttcctaccctattttttccagaattcacctttttctttcttttctgtattgttaaattcttccaaccattgatgatcaacaacatcttacaaaggaagttagcagatattatatatccttgaaataaataattttcaatgagatactggcttctattttgcttattggtttgwacatgactgaggattgcctgactctgtgccttgaggaggactcagaaatgctattataacgtcaaaaactgcaattacttttgtaccaacctaataaatgtagcagtagctctattgagcaatttgattttctacattgtaggaacaaaagcagttgtataaaattctaggctcattattttaaataaaaacgtctttctatttaaagggacacaggtggccttttatgccattgagttccaattaccctatcttctgctgagatctcaatgaattcctttaaaatctttctgaaataaacactgatattactattaataaataatttggcagcctaattcataaaagctttgagcaaatgtttctgaaa

SEQ ID NO: 96486 - DNA, 595 bp, Homo sapiens
tgtaattcattatgatgaggtcatagtagactaggtgtaatggttaatactgaatgtcaacttgattggattgaagtatgcaaagtattgatcctgggtgtgtctatgagggtgtggccaaggagattaacatttgagtcagtgtgctgagaaaggcagacccacccttaacctgtgtgggcacaagctaatcagctaccagcatggctagaatataaaacaggtagaaaaaagtgtgaaaagaygagactggcctagcttcccagcctacatctatctcccatgctggatgcttcctgtccttgaacactggactccaagttcttcagttttgggactcagactggctctccttgctcctcagcttgcagatggcctattgtgggaccttgtgatcatgtaagttaatacttaataaactccccatatatatatatagagagagagttttgtccctctagagaaccctgactaatacactagggtaggcccctaattcaatatgactagtgtccttacaaaaagggaaatttagatacataaatgcacacatgaagaataccatgtgcacatcaaggcagagatggggtgatgc

SEQ ID NO: 96487 - DNA, 572 bp, Homo sapiens
ttgtgataatactgtgagggatcaaagagttcagtttatttgagaaaaagtaggtgaaccattgagtttgaaactcaatgagggaagaagagaaaggtagaaaatgaacctcagacttaagcaggrccagatccttcagaaacaggattttacattttatctgacgtgcaattggaaaccactgaagtgttcaggcaggacaaggatatcatcagattttaattttaaaacatttttctgtcagctttgtggtgaatcaattgaggaagaggaaagatgagtgacatggccagttagagagcattactatggttccattaaagattaaagtgatttagcccagggaggtagcttcttcttgttggcttctgtcacccattcaaccactgtgggccgtgcttttggttatttgaggaaaccttgccacctccctgtggtctcactatggggagattgctgttccctatgccaatcatgctctaaaatgctcaaggaacttctctgttgttctcttcagagaaagtggaaacgaggtagatatattaaaaagtgagatcttcttcgtaaattct

SEQ ID NO: 96488 - DNA, 572 bp, Homo sapiens
ttgtgataatactgtgagggatcaaagagttcagtttatttgagaaaaagtaggtgaaccattgagtttgaaactcaatgagggaagaagagaaaggtagaaaatgaacctcagacttaagcagggccagatccttcagaaacaggattttacattttatctgacgtgcaattggaaaccactgaagtgttcaggcaggacaaggatatcatcagattttaattttaaaacatttttctgtcagctttgtggtgaatcaattgaggaagaggaaagatgagtgacatggccagttagagagcattactatggttccattaaagattaaagtgatttagcccagggaggtagcttcttcttgttggcttctgtcacccattcaaccactgtgggccgtgcttttggttatttgaggaaaccttgccacctccctgtggtctcactatggggagattgctgttccctatgccaatcaygctctaaaatgctcaaggaacttctctgttgttctcttcagagaaagtggaaacgaggtagatatattaaaaagtgagatcttcttcgtaaattct

SEQ ID NO: 96489 - DNA, 593 bp, Homo sapiens
gcaaactttagtttttataaaaaggtttctacttaatgcatttcttttaagcaatatttgtatgaacaatctattaagcatactttggaaaatttctacaaatggaaatcatgagtacaaattttcaaaatactgctctaaagtcacaagagctagatacagattatgccaacttctgtaataaactttctccaaacatttcctaaagatatcactgatatcaatctttacagaaactgaaaatttgagtttttaagaaaggtattttataaaactgtacaaatgaaacaaaataaatttccactgcatcattaaatattattcaatattacaatctactttaaagaaaacaccgaaaattcctcatttaggaattaataaactgtgctataaattcactctcagaaacaatactttcaracttgcagaagctgaggatcctaaacaccatctaactagactggttcagtgctaagtaaaaggcaaccagctgatgatagttatcagcatttagtagtgtaactgtaacagtagataactgaagtgcgatcactgtcgctagtaaggcctgcaatcattagctcatcaagtga

SEQ ID NO: 96490 - DNA, 601 bp, Homo sapiens
aagacactctgttttatagacgagtaaattcaattattgggctcatgtcatagttcaaatttctggtagccttcataatatgtgtgttttggaaatcatggcattgacaaactatttagaaaacatttaccttgactgctgttcatagagaaatgtgtgggtcttagactatattatatccatcggtcaaygatcgtttgttagagcattttaaaacattacatatcgattcaaattaatgaattttatgtcaaataccagttaacatattttaccatagacaataagtttatggctgtaattactgactgaagctccaaaaacacagcacaattatactgcagcacatatgtcagcccacttatgtcccttcagtttagaaaaaaatctaatgatatcacatggcacacattttttaatgagtgaaattacaagatacctaaattaagagaaccaattttccactgggaaatttggcggggaaatctaaaggtaaaccaattttctgaaggcagaataaaattttcaacatagctctaagttgtacccaaagcaaattattgccaactagtaatatggctctgataattagacttgattg

SEQ ID NO: 96491 - DNA, 638 bp, Homo sapiens
agaaccattgtgggcatcaaataaaactggatagtgtatgtgaaaacattttgaaaatcaactggaaagttctatacagtattggacagagttcagcatggtgtcttatacaatgtagatattaaacacattttaattgaattcatttagaggtggaattttgaatgcaatgtgttgaaaaatatggattttgctataataatactaataataatttaccatttgttgggtcctaacatacaactagtattgttttaaatgcyttttcaatcatttacttttctcagcaacttaggagtataagtactactattattcacatttcacggccaaggaaactgaagctgaaaggggttaaataagctgcctgaatcatacagtaaataaatgttagaggaaataagctatcttagttacagtgatattgttgtccataatttttttcctctagaataccagctcccatttctgcaatttcacttccatgagcttcctgaagatgaaaagagaggtttccccaccagttcagaaattctctgaagtctttcagggcactcatcaccagtgtggcagacaagccccttccactctcctgaccccagattgtctctggggttttgtgctttaggaagtattag

SEQ ID NO: 96492 - DNA, 457 bp, Homo sapiens
aattaaaacttgcttgaattaactcagggatgctatagctataagaattttcttataatcactttaaaattcattaagagtgagtgagcttttstgtatttttccatatgcttccatatcctctttttccatcaaatgcagtatgcactttggttccttgtgagtgaggacaatttgaagtttctaatgttgactccaaaggcatgaagtcacactcaccgagctgcatctaagtacctaactgggaaaatgttttgtgtggcatcaagtacctcatattagatcacagtttactctgtatgacagcagcatgggaagtgggttaaatgcattaagaaaataatttcaaagcccaggagagcttttgggaagttttactatgaatctttaaaccagaagcaatgactacagtgaggggacagtaggaatttcatgggattcaaaaagaggcagggaa

SEQ ID NO: 96493 - DNA, 600 bp, Homo sapiens
atttcaaagcttttatagacattgttgtatctgcgtttaaatcacaagtctatatcaattagttcattatgcatcttaaattgtaattatggagctcatctctcattttaatatgccaaattctcttaaacattactaayattttgtaattaccaaatatgaacatagcactgaccaaaagcatcaataagattgttttaattcttttaggcattcctgtacttaattctaaatttttctagggttaatgtttagctactaaaggaattatgtcatctccatcatttttagagttgcctaatcaccctgctggaggttgtggttgtataacatttaaagatttaagtcaagacattcattgaattctgacaaagcatactgagccctacttaagaacttaaaacagtggtcctttcgtcctcttactctgggaagctaaagtccatggtgcttggaatagctctgtgtctcccttccaggctgatcgtctgacaggtttaacttttcttttaggacagagattgtcttacccatctacctccaaaggctgtaaaacttgatggaatcctgcattccctaaatcagctgccatacttaatt

SEQ ID NO: 96494 - DNA, 583 bp, Homo sapiens
gtccttttgtgtgtgtgtgtgtgatatgccttttcaagtcttttgatcatgtttctataaacctrttttcttttctctagtaatttgtagttttgtttttacatattttgaaagctaatgctttgttggatatgtgtgtgtgtttatatgtgtgtgtgtgtgtagtatattttaatctaaacatatacaaataatcatatgtaatatataaaatttttatatgtatataaatcttttcttcagtgaagtttaagaaagggaagatgggtatcttcaccaacataatgactgatacggatttagaggagaaaagaatgttaaaatctatgcctccttgatgttaacgttgcactgccttctttactactatactatgaaactcagtgcatatgaaatcattagcagaatagtattgtgcttcagaagaacaaaagaagattctaaacccaaaagggatcctaaaggtaaatatatcctatcacaaacctcgcattgcagattaagtccttgagttccagtactcaaggatttgcagtagtgaaacataggtcaggactccctctctatacatttcctcccacat

SEQ ID NO: 96495 - DNA, 583 bp, Homo sapiens
gtccttttgtgtgtgtgtgtgtgatatgccttttcaagtcttttgatcatgtttctataaacctgttttcttttctctagtaatttgtagttttgtttttacatattttgaaagctaatgctttgttggatatgtgtgtgtgtttatatgtgtgtgtgtgtgtagtatattttaatctaaacatatacaaataatcatatgtaatatataaaatttttatatgtatataaatcttttcttcagtgaagtttaagaaagggaagatgggtatcttcaccaacataatgactgatacggatttagaggagaaaagaatgttaaaatstatgcctccttgatgttaacgttgcactgccttctttactactatactatgaaactcagtgcatatgaaatcattagcagaatagtattgtgcttcagaagaacaaaagaagattctaaacccaaaagggatcctaaaggtaaatatatcctatcacaaacctcgcattgcagattaagtccttgagttccagtactcaaggatttgcagtagtgaaacataggtcaggactccctctctatacatttcctcccacat

SEQ ID NO: 96496 - DNA, 613 bp, Homo sapiens
tgcttttcactgggtgaaacattcagaaaaaagccaagctccccatatattttcctttcagaaaaaaaaaccacctaactatttgacccaacctttcatttcaaaataaatttttactgctagcatggcatactacatgaaactgaatcattttaccatcatattttgacatctgcttaaatgggttcactcagtgaacatttactgagtgttactgcacttgcactaaatatgcgatattacttctcaacagagtcctgatcacactccaaaaaaattatattatgtttagatattttcaatctttcagtttttatcagaaaaggatatcgtttttagctattcctttgcaagtgcagagtagaaactatttgttaaaactgaatatgatcaaaagttgacactgtgctattttacatgtttcactacttaaaataataatacaaaggaatacaggctgtacgtgtaaaattatacagattaaaatatgaccccaaaatatcatcgatgcctaaaacctgccattctttgctgcaagtattttagaaattatattcacycaaaataagacaaattattttttcttaatttctggcaaaagattagcccctgt

SEQ ID NO: 96497 - DNA, 641 bp, Homo sapiens
agaggcaggtctcagtgctgagtcctggtggtcaagagacttgattgtatcagaaccatggatgcaggacttaacatagtttctatcactgccaaaaagcaaaatgtcagggggtgaatgcctaggctaacagccttagatcatccgtttcagatgttgatctagtcctggctgggcgtggtggctcacacctgtcatcccagaactttgggagactgagggggtgctgatcactggaggtcaggagttcgagaccagcctggccaacatggtgaaaccctgtctctactaaaaatacaaaatattagccaggcgtggtggtggcgtgcgcctgtagtcccagctacttgggaggctgaggcacaagaattgcttgaacccgggaggtagaggttgcagtgagtcgcgatggcaccactgcactccagsccaggtgacaggtgagaccctgtctcaaaaaaaaaaaaaaaaaaagttgatacagtcactagccctgacctaaacctagcaattgtatagaaaattggagggtctgactagccttcatagacctctttaaagaaagccaagggtttacttgatcagggcaaaatttacatggtttgacatacaccaaaaagaaccaccgaacactagagaga

SEQ ID NO: 96498 - DNA, 664 bp, Homo sapiens
gcgtcgcaataagacgcacacgttgtgccgccgctgtggctctaaggcctaccaccttcagaagtcgacctgtggcaaatgtggctaccctgccaagcgcaagagaaagtgtaagtaacatttttcaggccaactgtgttagcttttgtttgtattgcacttaagtgggggcataggtttgaactttatttggtgcctatcttaaaactcgtacatctgtatgccgatgaggtggcataaaactcgtgtrttaacaacacctacaaggtgtgtgggagaacaccgtttgaaatcttttctgaacttatgttttagataactggagtgccaaggctaaaagacgaaataccaccggaactggtcgaatgaggcacctaaaaattgtataccgcagattcaggtacagtttgtatgttcgatcataattggtccagtgggcttgaatgaaaccctcgtgtttacttgtaaaaagataacagtaccctgatggttactggggatgagatgttggaagctttttatttattgttgtttttgaggcagggtttcactatgttgcccaggcttgagtgtagtggcacgatcacggctcagtgcagcctcagtctccccagcctcaggtaatctcatctcagccgcccgagtacccgggactacaggtgtg

SEQ ID NO: 96499 - DNA, 599 bp, Homo sapiens
tggtgagtaaattgctagtgcattatcacaaatcgagccagtggcaccaaagtctactagcagtcaaactgtacttcactaacaatccaccaaaaaaaacgcaatttcacttaaggatgtccttgataaagtagcaaaaactaagatttgttctctcttgagaatacaactttttaatattctatatgatgatgtggsaagtatgcagaaagcatttctgttgcatactgacatatggtgcctgtctggaaggaacacattgtgcagttgctttagacaaaaactaaactatctactttttttcatgaaacatctatttacttgaatgaaaaacagacagaaaacaatagttattcagatttgaacatttggcagacattttcttaaaaataaataaaataagcctaacagttcatggaaagcaatttacagtatctgttgctgatgataaagtttttaagtgaaaattcaaattttggaaaacttgtatgtgcttgagaaattttcaatacctaagaacttttcatttgatattagaagtgctattaatgaatatgatttttgatattatgtaatgaaatgtttgcaagtttggagaa

SEQ ID NO: 96500 - DNA, 591 bp, Homo sapiens
tttttcttttttagagatggggtattgatctgttgcccaggctggagtgcagtggtacaatcatagctcacttgtagcctttaacttccgggctcaagcaatccttctgtctcagcctcccaagtagctagactagaggcacatgccaccaaacctggctgtttttcatttttgtacggatagaatctcactatgttgtacaggattgaagtagtattttcattactcttattctctgtattgaaactgaggatcaaagaggttccatgacttggccaagttcacacaacccatactcctggagcttgaactccaggcccgtttctcatgactctatattaaatgttcttcccagcatcgcatgttgacattaaaatctggcatttgatatttgatcttatacatacgcacacagtaagcaaccgggttccctctaagattatctttgattctyttctgagtttattctcctgggctattaagaatatatttgatttggacaatatttaatttctcacccaaagataaattttttagttttagattgaaagccagcgatgttgaagtaaaggtattacagaatctaaaacc

SEQ ID NO: 96501 - DNA, 439 bp, Homo sapiens
gacaccctgaaagtatatgagacccctagggccctagggatcactttttgacagcccattgctctgttataacaaaccttttccttctttagttcaactcgtgtttaccatctcctagagcagtaagtagcacatggtagatgcccaataaatatttgttgaataaagaatgaattaatgagctgggcgtggtggtgtgcttctgtagtcctagctactcaggaagctaacaagggcagattgcttgagtccagaagttcaaggctacaatgagctatgatagtgccaccrcactctagcctgggtgacagagtgacagaaccagatcccacctctaaaaaaagaaaagaaacaatttagccctgtggacacttgattgaaatttctttaccaccccagaaatgtacaaagacaaatatttcaaaaaagaaaacaataa

SEQ ID NO: 96502 - DNA, 439 bp, Homo sapiens
gacaccctgaaagtatatgagacccctagggccctagggatcactttttgacagcccattgctctgttataacaaaccttttccttctttagttcaactcgtgtttaccatctcctagagcagtaagtagcacatggtagatgcccaataaatatttgttgaataaagaatgaattaatgagctgggcgtggtggtgtgcttctgtagtcctagctactcaggaagctaacaagggcagattgcttgagtccagaagttcaaggctacaatgagctatgatagtgccaccgcactctagcctgggtgacagagtgacagaaccagatcccacctctaaaaaaagaaaagaaacaatttagccctgtggacacttgattgaaatwtctttaccaccccagaaatgtacaaagacaaatatttcaaaaaagaaaacaataa

SEQ ID NO: 96503 - DNA, 615 bp, Homo sapiens
aagtaactacagctacaccaacatgtaagaaccaccaaaacatgttgactgaaaaaaaaattcacaagagaattatatatattaattatgttgttaattatctctatgtgtacacatatataaacttctttgcaaattgtattgattgcttatttcatgcttatgaatttcaaaaacataaaatgactatattttgtttacaaatacatacaaatgtggaaaccctataarggaatgataataaagttcaggatgtcatttacctctgaggaaaggaggagtgcacgactaagaagtggcagggccttctgaggttctagcaatattccatttcttaagctggaggtttttataagaattcactttttgatttatatactatattaaatacagtatatatgtttaatacaatatactattttatattatatttaatatatattatatttaatatatactatatttaatataaatatacacaatatatactatatatttaacatatatatttatataacataggtacttttatataccctttagtagttgtgatatatttcaccagttaaaatgtttgaaacaaataataaagacttgacctagaattataactgt

SEQ ID NO: 96504 - DNA, 615 bp, Homo sapiens
aagtaactacagctacaccaacatgtaagaaccaccaaaacatgttgactgaaaaaaaaattcacaagagaattatatatattaattatgttgttaattatctctatgtgtacacatatataaacttctttgcaaattgtattgattgcttatttcatgcttatgaatttcaaaaacataaaatgactatattttgtttacaaatacatacaaatgtggaaaccctataaaggaatgataataaagttcaggatgtcatttacctctgaggaaaggaggagtgcacgactaagaagtggcagggccttctgaggttctagcaatattccatttcttaagctggaggtttttataagaattcactttttgatttatatactatattaaatacagtatatatgtttaatacaatatactatwttatattatatttaatatatattatatttaatatatactatatttaatataaatatacacaatatatactatatatttaacatatatatttatataacataggtacttttatataccctttagtagttgtgatatatttcaccagttaaaatgtttgaaacaaataataaagacttgacctagaattataactgt

SEQ ID NO: 96505 - DNA, 615 bp, Homo sapiens
aagtaactacagctacaccaacatgtaagaaccaccaaaacatgttgactgaaaaaaaaattcacaagagaattatatatattaattatgttgttaattatctctatgtgtacacatatataaacttctttgcaaattgtattgattgcttatttcatgcttatgaatttcaaaaacataaaatgactatattttgtttacaaatacatacaaatgtggaaaccctataaaggaatgataataaagttcaggatgtcatttacctctgaggaaaggaggagtgcacgactaagaagtggcagggccttctgaggttctagcaatattccatttcttaagctggaggtttttataagaattcactttttgatttatatactatattaaatacagtatatatgtttaatacaatatactattttatattatatttaatatatattatatttaatatatactatatttaatataaatatacacaatatatactatatatttaacatatatatttatataacataggtacttttatataccctttagtagttgtgatatatttcaccagttaaaatgtttraaacaaataataaagacttgacctagaattataactgt

SEQ ID NO: 96506 - DNA, 557 bp, Homo sapiens
tgtctgattatatgcctaaacaataactctatttgataaaaatcttaattacaactatccatactaatattcaactatcaatactaatattcaaagtatttcacaatggatcttatgctttctaaaatgcaaaacattagatctttccagcaattataaacagatgttaaatatttctttataatacatattcattatatattacatatatattgatctatatatataaatacttacaagcacgtgtatataaaattaacagtctcaaaccttgtcaaaattattctattacaaagtcaagtttttctttgatttaygttactattgtactttaaagttattcttcctttatgaagggatctgggaacactatatccagacacttaatgcaaactggtctactggacattacatggtgccaaaatcagatacttgtgaatttaacacacctaaggccatctttacattagtacattgctcacagcttcagcagaaagcatattggacaaagtcacctgctaaataacttggctcaggaagtcagaaaataagccact

SEQ ID NO: 96507 - DNA, 597 bp, Homo sapiens
gatagcaaattgtggtgccttaaacatgcatgtgcaagtatgttttttgtataatgacatcttttcctgtgggcagataccccgtagtgggattgttggattaaatagtccttctacttttagttctttaaggaatctccacaccattttccatagtggttgtactagtttatactcccaccggcagtataggagcattccctttctaccccatccacaccaacatctatttctttttttttattattattatagccatttgcgcaggagtaaggtggcattgcactgtgattttgatttgcatttccctgattattagtgacgttgaccattttttcatgtgtttgttggtaatttgtatrtctcctttgagaattgtcaacccacagagcgggagaaaatcttcacaatttatatatctggcaaaggactaatatccagaatctacaatgagcacaaacaaattagcaagaaaaaaatcacatcgaaaagtgggctaaggaggtgaatagacaagtctcacctttttctttaaatcatatagactatagttattaattgtagcttcaatgtagactaaagaagaagaatgtggtc

SEQ ID NO: 96508 - DNA, 599 bp, Homo sapiens
aattggactactatatataaaatgcagtgtgtacactttgcttcagaaacagcaactctcttgtcactcgagccatggtagaatctgattttgccattgccggattaccaaggaatgctcctaaggtggaggcaggttkgttgtatttgctcagttacactacttatcattgcttccctagttgcaaagttactattgttactaatattaatcattccttacacctaataatgggcttatatttttcaaagtgaatttcaacataggaactaagaattgatttgtattatagaataaaaaaataccattagaaaagatcatgcatgctgaaataggttgcaaagggaactgtgaaaccttctttgatggttttaaggagaaggaattcctggctgttttggatgatcatgttacatcatgccccagggatgatggaaaacaggaaagcacagtaatgagccagatcaatactttctatttctgtaaatgtagatgactagagaaatataaagtgtagaactcacttatgcattacaatcaacttagtttgagcacaatggcttattggtcttccaatagtcattgttgcctcagactgg

SEQ ID NO: 96509 - DNA, 584 bp, Homo sapiens
gtagttatggaccttgggccttgagaaataagaatgatattgcctgttggacaaaaggaatgtagatttactttctgagtaaataaacatcctgaatgtctcgagatatctccttgtgacttccatctactagtagaggaggactgagacaccctactctttgtggcatacctcactacgcaggcctttgggatttgaaggagcrtgactagaagtcctcttgggaagttggtaaagctaaaggtaaaattctcccttggtacaagttagatcaaacatggttcattttgtgcctgtgctgtatcaggtatctgaagtagattctttccaagcttaacctttcagacagtttttaatctataaatattagtgtttaaaagtcaaaaccctgtgaggtcattctaccatttctgttacctccctcctctcctcacgttaccacaaagctatatgtttctttttttgccaggtctaagatttttattagggtgagattagatttttcatattaggtggctggaaagtacagccagctgaaaactatcagccatttagactacatgcttcatttgaattgtgtttct

SEQ ID NO: 96510 - DNA, 588 bp, Homo sapiens
  misc_feature (1)...(588): n = A,T,C or G
gtttatatgttcgctttctgcttactgaccaaaatcttatcatgtcttagtcaaatttggcaaattgcttaatatctatagcccagttttgtcatctataaaatgaagatataataccaggctcacagaattgctacaaagattaaatgtgtgnnnnnnnnnnnnnnnnnnnnnnnnnnnnnnnnnnnnnnnnnnnnnnnnnnnnnnnnnnnnnnnnnnnnnnnnnnnnnnnnnnnnnnnnnnnnnnnnnnnnaatagagttttgrgaaagagatggcttttgttctttttctaattactgtccattttctcattatttttatagaaaattcaactatttatgattgtttagaaataccagaactcaagtgagagaatagaaacaccttggatacatttattatgcacaaacgaatgtccgggcatcctgagactactttgtgcttatctggacaacactgtctcctgctgtgtccagcacatccttctcgtcctctctcccattcagactgagcactgtggattaaggctctgatctgccaacagtgggggaaagtagcactttgcagctcattaattttgaaagac

SEQ ID NO: 96511 - DNA, 566 bp, Homo sapiens
ggtagcatgtacttcaagtgaaggtataagacagctttatgtcaagttaataataaggaaagacgtgtttaccaaaactaaagaaaatgtttccttttgattataaaagagatcaacatcagaatcacttgctagttatttatcttttgcaaaattacttagatttccagtttcctgtccagcttataaggcgcatagaagttataactctcatccttacaacaagaaaaaacttgaacaaactgaaaatcaacaacttttcttaggtccatcagataattgaggtcacrgggcaaaccactgccctcaaaattcatgagacaggtggatacaaagaatcatgatttactggagcagaagtctggagaaaaacttctgctagagctggtacagggggctgggcgggggcagtggggacttaaactatataatttgtaaattactgggagttcagtataggcaagtttgagagtttgaaattcttgtggggaagggggttggagggttaatgttagaagctgctacagtttgaatgtttttgtctcttccaaaattcatgctgaaac

SEQ ID NO: 96512 - DNA, 563 bp, Homo sapiens
ttttgtacttaatattgcatcttattgcctgcatattcagtttttaggaagattgatttaagagataaacctaaggttaattgtaaaataggaaaaaatggtcttatctcccatcatagtatgatttccctttccctgggagactattctgtgttagaagacaatccctgttttagaggccatctaagcttggagaattcccaccaagatgttaattttgtattattccttccaaatataatatcatttctagtgtagtatggacatactattttgtccacttactatgtactacatttcttttttgacaactrccttcccctctactctacctacacttcctacgccctatataatcttgacttttgatccaggcaacaccacttgtccttggctaggccaatacccattcttgagaatttttaagttgagacagagagatgcagggaaatttctcttctggaataaagctgtataacataaacttaataagcataggtgactatgtttacatcatatggaaaaatctagctttccaggagaaagaagaatatatagagatt

SEQ ID NO: 96513 - DNA, 563 bp, Homo sapiens
ttttgtacttaatattgcatcttattgcctgcatattcagtttttaggaagattgatttaagagataaacctaaggttaattgtaaaataggaaaaaatggtcttatctcccatcatagtatgatttccctttccctgggagactattctgtgttagaagacaatccctgttttagaggccatctaagcttggagaattcccaccaagatgttaattttgtattattccttccaaatataatatcatttctagtgtagtatggacatactattttgtccacttactatgtactacatttcttttttgacaactgccttcccctctactctacctacacttcctaygccctatataatcttgacttttgatccaggcaacaccacttgtccttggctaggccaatacccattcttgagaatttttaagttgagacagagagatgcagggaaatttctcttctggaataaagctgtataacataaacttaataagcataggtgactatgtttacatcatatggaaaaatctagctttccaggagaaagaagaatatatagagatt

SEQ ID NO: 96514 - DNA, 558 bp, Homo sapiens
tataattctcattttattaatcatttccttgggcaactttgcattcatttctagaaattttaggagtaaatttcaaaaattcccaccaaattgaaaatactggaatctcatatatgtttcattgcttatgtaatctttttcattggtaatgtacttgaggcacatttctgatctggttattcttaagaactatttattttctattatgaaagcaatgtcactatcacagtactgttgatcttgctttgtaaggaatttacacatttgtggctcagaaggaactatacagttggtcarctgtttgttgtatattcatgtattatccaaatgatgacataatgaggtaatcacttgattgttctgtggccattgcctgccttcctttgtgtgactgattttttttaagaagtacaaagtaatagtcaaagtgattttcttctttcaagaaaactttagtttgtaaacttgcgaagatttttaaaactggaaaatcctctggtgttgacttaggtacgctacatttttatgctgtgaatatatgtatcacttaaaatatac

SEQ ID NO: 96515 - DNA, 503 bp, Homo sapiens
gaagtagagaaaaaagatcagaattttttctctagcccattggttcatgaggtttgactgagacaaatataccgatcaaatttagcattctctktattgagacagtgaaagcatgtggtcaaaattttctcctgtctgaatggccacattcaatttattaattcattttaacttcaaacaaatcaaattattttcctacacatctaatctggttgattgctaatcactcataagatgactgacaggatgtgtccctatggcctctctgtctaatctccatgggatggcttgattggcttgggacttctattaaactgacattttacaggcaaggctctcatcttatctgtgaggttgtcttattcattattttccgttctcttttttctttttttttttttttgttctctgtggctacattttagctatatgaggttttaaagaacatgggtcattctccaacataggctccaagtcctagcctttgaggtagttgtgggatg

SEQ ID NO: 96516 - DNA, 503 bp, Homo sapiens
gaagtagagaaaaaagatcagaattttttctctagcccattggttcatgaggtttgactgagacaaatataccgatcaaatttagcattctctttattgagacagtgaaagcatgtggtcaaaattttctcctgtctgaatggccacattcaatttattaattcattttaacttcaaacaaatcaaattattttcctacacatctaatctggttgattgctaatcactcataagatgactgacagratgtgtccctatggcctctctgtctaatctccatgggatggcttgattggcttgggacttctattaaactgacattttacaggcaaggctctcatcttatctgtgaggttgtcttattcattattttccgttctcttttttctttttttttttttttgttctctgtggctacattttagctatatgaggttttaaagaacatgggtcattctccaacataggctccaagtcctagcctttgaggtagttgtgggatg

SEQ ID NO: 96517 - DNA, 607 bp, Homo sapiens
cgtgttctggaaatgatagtctctgactataactcagttaagaaagaacaagaagattgatagtgtttttgtcatttccgtaagaaattttgttaagaatactctttcttatttgttccagagataatgatataaatagaattcacttgtcaatacccaattacttttgatcagacatggagggattctatctacaaactgaatcaaaaaatcaattgtcattttgaagtcagtacattatcatttctttgtaattcaaagctgtggtagttagggctgttctcaaatggtctttttctccttctggttgtactttcatccacttaaatgtgatcatgtgactttctttagtcaatacaattctacgttatatttgcatgctattctatactataaagcattattatatatraaaactcataaagttatcaggataataattggaaattagcttaatctcatgcaaactgcaaaaaaagatgattctacaaacaatatatgtgctaaaagaaaaaatgacaagataaataatactgaatcactacaatctccaactaaaattgtctgactcaactaaggcaataaatttttaaaaactgaaatcaaa

SEQ ID NO: 96518 - DNA, 589 bp, Homo sapiens
tagcatcactattgtagaagctaagattgatctattgagaagtttttccaatttttgcattctgggaactgactgacctgtccaagacccatgactcatgactcaatcggtcctgtgtccccccacccagagatggactcagcacacaaggaccattttccatactccatgacttcatccccaaycaattagcagcatccattccatagctctcacccacaaaattatccataaaaaccctagcctctgagttcttggggagactgatgtgagagatagtgatattggagggatcagggaagtgctgggtagagaagggcatggtccctggcgagggctccacccctgggcctatgcccctggacctaggtgaggataggcactcccgtttacccaccaaaagaggtaaatttaaagcagagggagacttttggatggctgatggaggccctcgttaagtagtaagaatgaaactggagagaacaaaacaatataacttgaagatgagaatgaataagagagaggagtaaagagtaaaactaaagtcactgctggggaaaaaagtaatcaatgttatacttcttcattc

SEQ ID NO: 96519 - DNA, 491 bp, Homo sapiens
gagaatgcactaatagagatcagtaaacaaaaactgcaggaggtatttcaccaaaacttacaaaacaatgaggcaccagcagtcccattttggtgtcatttatagctgaatgaaacacaaaaatggatgcgtgtaggggagattgatggatgttttgagttgggataggctagagaaagcagcaataataaatggtccccaaagtctcagtaacttataagaacaaacgtttatttcttgctcacgttatctgtccatcattrctcagctgcagttctgtaacatcatgtctttatccaggagtcaggtaaattgaatatcctttgttggggccactacagctctcacggcaaacagaaaaaaaaaaacacagtaaacacacagtgtcttaccatgaaagtgacacttacatttacctttcctggccagagtatgtcacatgacaagcctgcagtccatggaataaggaagtacagcttgcccacagggag

SEQ ID NO: 96520 - DNA, 423 bp, Homo sapiens
tattcatttctatttttttacagtttatttattctttgatttaaaagaagtctttgatctgtttggaaattgtttcggtacataacattgaagggagttttcacatggctagtcaaakgttccagtataatttattcaacaattttgttttttctcttatcataggttaaattttcacatgtaatgaagtataatctaggctatctgttatgtttggttggatcaatataccacactgtttcaatcactatattttcaaagtctgtttaattatctgttcatgtgagttttggggtatgtatggtttgcctctgtgtccccactcaaatctcatctcgaattgtaattcccatgtgttgagggagggactttgtgggaggtgattggttcatgggggtggtttcccccatgctgttctcgtga

SEQ ID NO: 96521 - DNA, 613 bp, Homo sapiens
gttgttcaacatctttagccatcagtaaaacatgatttaaaaccaaaataagctaccacttcacactttctagcatagctataattaaaaagacagacgataacaagtgtggacaaggatgtggagaaattggacccttcatattccactggcaagaatataaaatgatgcagcttgatacgatttggctctgtgtccccacccaaatctcaccttgaattgtaataatccccatgggtccctgggagggacctggtgggaggtaattgaatcatgggggtgggatttttccccatgctgttctgtgatagtgattaagtctcacaagatctgatggttttgcaaaagagcagttctcctgcatgcactctcttgcctgctgccatgtaggatgtccctttgctcttccatcatcttctgccatcattgtgaggcctctccagccatgtggaactctgggttcattaaacctccttattaattagccagtcccaggtatgtctttattagcagcatgagactggrctaatacacagctactttggaaaacagtctggtggtcaccaaaacttaaacaaagcactcctggggctgggtgtggtggctcatgctg

SEQ ID NO: 96522 - DNA, 613 bp, Homo sapiens
gttgttcaacatctttagccatcagtaaaacatgatttaaaaccaaaataagctaccacttcacactttctagcatagctataattaaaaagacagacgataacaagtgtggacaaggatgtggagaaattggacccttcatattccactggcaagaatataaaatgatgcagcttgatacgatttggctctgtgtccccacccaaatctcaccttgaattgtaataatccccatgggtccctgggagggacctggtgggaggtaattgaatcatgggggtgggatttttccccatgctgttctgtgatagtgattaagtctcacaagatctgatggttttgcaaaagagcagttctcctgcatgcactctcttgcctgctgccatgtaggatgtccctttgctcttccatcatcttctgccatcattgtgaggcctctccagccatgtggaactctgggttcattaaacctccttattaattagccagtcccaggtatgtctttattagcagcatgagactgggctaatacacagctactttggaaaacagtctggyggtcaccaaaacttaaacaaagcactcctggggctgggtgtggtggctcatgctg

SEQ ID NO: 96523 - DNA, 593 bp, Homo sapiens
tggagtctgggaagtttgttacgatggacttccttatcaatgagggaagggatctccagggctatcttcattcatcttaggcctgtttccatgctctcctctttgtagccaaaggattaaaaacgccacatttctgctttccacagcatggtggggcaatgttttattcccacgagcatcatctacatgttattgctggagacactgagacagttkgaaatctgtagcaaaagtagcaggatggcatctctccatttcccatgtctttttcaagatacagtgttctaggtgccaaaacatccaaatgttatagaaagagtctctggactcagagagagtatttgaattccagattttccacttacaagctgggtgaccttggccaaatttctcagcctccctgagcctcaatatccttgtaaagatgtaaaaaaataatgcctgcttgccaggcttgtgaggatgaaatgacataatatatgctaaaaatgcctaggcctgttcccagtaggtggtcagagctggtttccttcctctctctacccccttatattcattcatctctttttatttttgctgtagctcacacttta

SEQ ID NO: 96524 - DNA, 490 bp, Homo sapiens
ttaaatatttataagctgggaacagtgacatgcacatctagtccctgctactcaggaagctgaggcaggagcatagyttgaatccagatttaaaggccaacctgggcaacatttagacatggtaagatgccatctctaaagaataaaaataaaacattaataaagcacctggccaagcgcagtgactcacacctgtaatcccagcactttgggaggccgaggcaggcagatcacctgaggtcaggagtttgagaccagcctggccgacatggtgtatcaggggaaccagcccccaatatttaagaaattataagagtattgattggggaagtgataaatgtccatgaaatcttcacaatttatgttcagagattgcagtaaagacaggtataagaaattataaaagtattaattttgggaactgataaatgtccattgaatcttcacaatttatgttcttctgccgtggcttcagccggtctctcagttc

SEQ ID NO: 96525 - DNA, 495 bp, Homo sapiens
tttaattgtaatgtaatcaaatccataatttcttttttctctccctccttccttcctccctccttccctccctccctcccttccttccttccttccttcyttccttctttcctttttagttcatcctcttagggtcataatcaacatgattttccattacctccaggtaacacttatattctcaagattttttttccttcttaataattctacttttcactaatttaatgtgtggcatatggcctttacttaatttttttcaatattccaatgctatctaccaatctatgtttccccaaatcatttatagttcaactttattataaatcaaattaacacacacgtttataactgcatgtttgtgtctatttctgagctctctgttatgtcatctttctttctgtctttgatgaataccacactggtttcattattattattattattatcatgactttgtactttatattatgtctagcaagatgtgtccccatt

SEQ ID NO: 96526 - DNA, 631 bp, Homo sapiens
tggtgaatatctatctccaaaatgcccttgaatggataattttgtggtcaaataaatttggaaaacatctcatactacactcccatctgggagagtcatagtgcatcttkacattttaaagcttctacagtttaaagaaatccatttaaatttaacacattatttcctaattaataatgagaaatagttaaagaatacccagtattatattattaacacttaggaaaaaccgtataagcagagtaacacacctggcacaaaataaagttatattaaatttcagatgaatgtgaatttgaacaaaaccttttatatgatgtcattaaatttttactctcaataaaacttcctaaaaattgaatgcgaaggagctgcatgattaaaataaacacagattcttctcaactcaactcagatatgacatttttctgaaagtctggatgtcttagagcattcattatcttctctatgacagtgactttttatatgcttgctgaaacagattttaactttttccctttttcagtccaaagaatgattgacatatggaatgtaccaatattaaaaaattctgattcttatttaggacacccatttttctatgaaatctgagcttataacaccaagaaat

SEQ ID NO: 96527 - DNA, 631 bp, Homo sapiens
tggtgaatatctatctccaaaatgcccttgaatggataattttgtggtcaaataaatttggaaaacatctcatactacactcccatctgggagagtcatagtgcatctttacattttaaagcttctacagtttaaagaaatccatttaaatttaacacattatttcctaattaataatgagaaatagttaaagaatacccagtattatattattaacacttaggaaaaaccgtataagcagagtaacacacctggcacaaaataaagttatattaaatttcagatgaatgtgaatttgaacaaaaccttttatatgatgtcattaaatttttactctcaataaaacttcctaaaaattgaatgcgaaggagctgcatgattaaaataaacacagattcttctcaactcaactcagatatgacatttttctgaaagtctggatgtcttagagcattcattatcttctctatgacagtgactttttatatgcttgctgaaacagattttaactttttccctttttcagtccaaagaatgattgacatatggaatgtaccaatattaamaaattctgattcttatttaggacacccatttttctatgaaatctgagcttataacaccaagaaat

SEQ ID NO: 96528 - DNA, 602 bp, Homo sapiens
aactcaccttatcatgatgcttgccctgctactcagcagcccagtgttatccaagcagagaaaaacaaaccacaaccacttcctactgaaggagctgagtcaactcaccaagctgcccatattcagctaagcaatccaagttcactgtcaaacatcgacttttatgcccaggtgagcgacattacaccagcaggtagtgtggtcctttccccgggccaaaagaataaggcagggatgtcccaatgtgacatgcacccggaaatggtctcactctgccaagaaaacttccttatggacaatgcctacttctgtgaggcagatgccaaaaagtgcmtccctgtggctcctcacatcaaggttgaatcacacatacagccaagcttaaaccaagaggacatttacatcaccacagaaagccttaccactgctgctgggaggcctgggacaggagaacatgttccaggttctgagatgcctgtcccagactatacctccattcatatagtacagtccccacagggcctcatactcaatgcgactgccttgcccttgcctgacaaagagtttctctcatcatgtggctatgtgagcacagaccaact

SEQ ID NO: 96529 - DNA, 520 bp, Homo sapiens
cacatggctgtcccagggcctggtccccaggtcatgtgcttaaagcttccaggcggttctcatcaygatgatgaagtacacatcagtgtcaatggatgcgctcacacctgcatagtagttcatgaactcctcaggggtcacctgcagtggaaaagttagaaacaaaaacgaaactttgcttctcactctgtcaatgggcgcccaccttgtgcacctgtaaatagaagggaaatagaggatttctttgtgtatgtgatcatggctgaggaactgatctaaaacaaaagaacaagtgaagctgaggatggtgtgagaacagcacctaggaagagagaaagaaagtcttgaaagtttctaagccaacctaaatggaaagtgacgcataggttgtcatcttttgtctaagggtgggagcccgtcggttcaggtaagggagactgaaactcagagtaagaaggaagtgctctgcaactgtagttatttctgtctttctgtgacacgtcagaaacaacatgtcatg

SEQ ID NO: 96530 - DNA, 520 bp, Homo sapiens
cacatggctgtcccagggcctggtccccaggtcatgtgcttaaagcttccaggcggttctcatcatgatgatgaagtacacatcagtgtcaatggatgcgctcacacctgcatagtagttcatgaactcctcaggggtcacctgcagtggaaaagttagaaacaaaaacgaaactttgcttctcactctgtcaatgggcgcccaccttgtgcacctgtaaatagaagggaaatagaggatttctttgtgtatgtgatcatggctgaggaactgatctaaaamaaaagaacaagtgaagctgaggatggtgtgagaacagcacctaggaagagagaaagaaagtcttgaaagtttctaagccaacctaaatggaaagtgacgcataggttgtcatcttttgtctaagggtgggagcccgtcggttcaggtaagggagactgaaactcagagtaagaaggaagtgctctgcaactgtagttatttctgtctttctgtgacacgtcagaaacaacatgtcatg

SEQ ID NO: 96531 - DNA, 573 bp, Homo sapiens
aatttgagtcaaaaaattgtttgcaaggactttgcttccatttctygtggcctatgtttgcccatgtgtgaattatttggtatttttgctttcctcaatgttttgaggctgtaatgatgaaaggcttcagtgtcaggcctgtaaaatctattgccctctattacttttttctatataaatagaaggtgacaatagcagcttttgtcactggcaatttcaaatccattattttgaatagaactgacattcaggtttttagttggtctgctataaagtaaaagatgcaaaaatgacagcagagtaaatttacctaggtataggaaaattgtgtatttacattttaaattgtgaaaaataaacttttgctggtctgccatctatagccaatgctatattgatggtaccaactggcttgcatttttaataaagataatagcatagttttggtggttcattttttttagcatttaaaataaaaaaaattgtttctggttggggacattatttctttcagtagtcagcttggccaaatctgtaaaagttatgctgtcaggcaatataccatttactcct

SEQ ID NO: 96532 - DNA, 632 bp, Homo sapiens
ttcctcaatgttttgaggctgtaatgatgaaaggcttcagtgtcaggcctgtaaaatctattgccctctattacttttttctatataaatagaaggtgacaatagcagcttttgtcactggcaatttcaaatccattattttgaatagaactgacattcaggtttttagttggtctgctataaagtaaaagatgcaaaaatgacagcagagtaaatttacctaggtataggaaaattgtgtatttacattttaaattgtgaaaaataaacttttgctggtctgccatctatagccaatgctatattgatggtaccaactggcttgcatttttaataaagataatagcatagttttggtggttcattttttttagcatttaaaataaaaaaaattgtttctggttggggacattatttctttcagtagtcagcttggccaaatctgtaaaagttatgctgtcaggcaatataccatttactcctgcttactcattactcattcatttactcatgagattgttagcattctcagaatgctggaaggaaagatttagatgataaagagtwgaagacttcaatcatatttcgagatgtcttgcaaacaaacgttaataaaatgctttgatgagaaa

SEQ ID NO: 96533 - DNA, 591 bp, Homo sapiens
atgtttaataaaggggagctcccctgcacatgctctgtctttgcctgtacacatgtgagatgtgcctttgctcttccttcatattctgccatgatcatgagacctccccagccatctggaactgtgagtccattaaacytctttcctttataaattacccagtctcgggtatgcctttattagcagcatgaaaacagactaatgcaccctgtttctacaaaaaaaaaaaaatgtttaaaaattagccaggtgtggtggcacctgtactccagctacaaggctgaggctggggaggagctcttgagttgaggagtttaaggctgcagtgagccatgatggcgtcactgcactccagcctgggcaacagactctgtctctaaacagatagacaaaagatttcagagatacacactgaaatattgagagttgaaattataaaatgtctgaattttgcttacataatctaggtttctacagggaatgagtgagggcatcgataaaataaaggtgaggcagataagtgagttatttgataaagctagtgaggcaaggtgtggtggctcatgcctagcacttagtaggtatatgtgg

SEQ ID NO: 96534 - DNA, 591 bp, Homo sapiens
atgtttaataaaggggagctcccctgcacatgctctgtctttgcctgtacacatgtgagatgtgcctttgctcttccttcatattctgccatgatcatgagacctccccagccatctggaactgtgagtccattaaacctctttcctttataaattacccagtctcgggtatrcctttattagcagcatgaaaacagactaatgcaccctgtttctacaaaaaaaaaaaaatgtttaaaaattagccaggtgtggtggcacctgtactccagctacaaggctgaggctggggaggagctcttgagttgaggagtttaaggctgcagtgagccatgatggcgtcactgcactccagcctgggcaacagactctgtctctaaacagatagacaaaagatttcagagatacacactgaaatattgagagttgaaattataaaatgtctgaattttgcttacataatctaggtttctacagggaatgagtgagggcatcgataaaataaaggtgaggcagataagtgagttatttgataaagctagtgaggcaaggtgtggtggctcatgcctagcacttagtaggtatatgtgg

SEQ ID NO: 96535 - DNA, 591 bp, Homo sapiens
atgtttaataaaggggagctcccctgcacatgctctgtctttgcctgtacacatgtgagatgtgcctttgctcttccttcatattctgccatgatcatgagacctccccagccatctggaactgtgagtccattaaacctctttcctttataaattacccagtctcgggtatgyctttattagcagcatgaaaacagactaatgcaccctgtttctacaaaaaaaaaaaaatgtttaaaaattagccaggtgtggtggcacctgtactccagctacaaggctgaggctggggaggagctcttgagttgaggagtttaaggctgcagtgagccatgatggcgtcactgcactccagcctgggcaacagactctgtctctaaacagatagacaaaagatttcagagatacacactgaaatattgagagttgaaattataaaatgtctgaattttgcttacataatctaggtttctacagggaatgagtgagggcatcgataaaataaaggtgaggcagataagtgagttatttgataaagctagtgaggcaaggtgtggtggctcatgcctagcacttagtaggtatatgtgg

SEQ ID NO: 96536 - DNA, 591 bp, Homo sapiens
atgtttaataaaggggagctcccctgcacatgctctgtctttgcctgtacacatgtgagatgtgcctttgctcttccttcatattctgccatgatcatgagacctccccagccatctggaactgtgagtccattaaacctctttcctttataaattacccagtctcgggtatgcctttattagcagcatgaaaacagactaatrcaccctgtttctacaaaaaaaaaaaaatgtttaaaaattagccaggtgtggtggcacctgtactccagctacaaggctgaggctggggaggagctcttgagttgaggagtttaaggctgcagtgagccatgatggcgtcactgcactccagcctgggcaacagactctgtctctaaacagatagacaaaagatttcagagatacacactgaaatattgagagttgaaattataaaatgtctgaattttgcttacataatctaggtttctacagggaatgagtgagggcatcgataaaataaaggtgaggcagataagtgagttatttgataaagctagtgaggcaaggtgtggtggctcatgcctagcacttagtaggtatatgtgg

SEQ ID NO: 96537 - DNA, 571 bp, Homo sapiens
tacttttcttttttttcccctttcctttccttcccttccctttcctttctgcttttccttggagttactaattaccaatttttaaaaattgtttgaatttctatagaattggctgggcacgatagctcactcctgtaataccagcactttgggtggccaatgcgggtggatcaccttaggtcaggagttcgagaccagcctggccaacatggtgaaaccccgtctctactaaaaatacaaaaattagccgggcatggtgrcacatgcctgtaatcccaactactcaggaggctgaggcaggagaatcctttgaacccaggagttggaggttgcagtgagccaaaattgcaccattacactctagcctggggcaacaagagtgaaactccatctaaaaaaaaaaaaaaacaaaaaaacctatagaattattctcaaactccacatgtgtaaatctcagacacattcagttcttcctcttggagccttctgattcgctccagtaggaagtggctgatctctcagcctgctgcagagctgtgagcttggtatttctgtccactatctctctggg

SEQ ID NO: 96538 - DNA, 427 bp, Homo sapiens
aattcaatgcttgggtcacctccagattcattttcacagtctttcatgttttggtcatattacattgtattttgctgccatatgactgatctctttttgttaaatgtgagatactygttaaaaaatatttagcaatgaattgaggcctagtggcatgttatcttgctgcagaagagatgggagtctacttctgggggatggtcacgggtcctccatacaggctgcaattgaggtcgtcggtgcaggctcagtccctacaaaggccagggtatttcctgtctacctctattctgatgcatgactcttctgggtctcaaccagagccagtggatttcagtacgggtcgctttcattggcagaccctcaatccacttgttttccatctaatcccacgcatgtgtgcaaaagctgctgtgcttctttgcat

SEQ ID NO: 96539 - DNA, 416 bp, Homo sapiens
tgaattcaatgcttgggtcacctccagattcattttcacagtctttcatgttttggtcatattacattgtattttgctgccatatgactgatctctttttgttaaatgtgagatacttgttaaaaaatatttagcaatgaattgaggcctagtggcatgttatcttgctgcagaagagatgggagtctacttctgggggatggtcacgggtcctccatacaggctgcaattgaggtcgtcggtgcaggctcagtccctasaaaggccagggtatttcctgtctacctctattctgatgcatgactcttctgggtctcaaccagagccagtggatttcagtacgggtcgctttcattggcagaccctcaatccacttgttttccatctaatcccacgcatgtgtgcaaaagctgctg

SEQ ID NO: 96540 - DNA, 525 bp, Homo sapiens
cgctttcattggcagaccctcaatccacttgttttccatctaatcccacgcatgtgtgcaaaagctgctgtgcttctttgcatctcagtagttccttctggaattcagcaatgaaactcagggaaatgggttccaaatgcgaggctgactttcgtcctgggtttccttcttctccatcttcacctcatgtctgtttactgccatgttagcaatttgatgtattcaatcatgggttttatattctgtttggtgtcccccattgttctcatcggagatcagaagcttcagatgcacttatgtcaactcaagagtagaatgcttccttagcttccctccagagtcaggttttgtgtttctagttcccaagtgsacagcaggagtagtgatgtcctcactggcttctcatttgcattaagctgtgagcttctttaccgtggggacaggaccctgctcccattgcattctcagcaccacaccacacactccttgttggaggccactccagacagcatgtgctgaaggatg

SEQ ID NO: 96541 - DNA, 525 bp, Homo sapiens
cgctttcattggcagaccctcaatccacttgttttccatctaatcccacgcatgtgtgcaaaagctgctgtgcttctttgcatctcagtagttccttctggaattcagcaatgaaactcagggaaatgggttccaaatgcgaggctgactttcgtcctgggtttccttcttctccatcttcacctcatgtctgtttactgccatgttagcaatttgatgtattcaatcatgggttttatattctgtttggtgtcccccattgttctcatcggagatcagaagcttcagatgcacttatgtcaactcaagagtagaatgcttccttagcttccctccagagtcaggttttgtgtttctagttcccaagtggacagcaggagtagtgatgtcctcactggcttctcatttgcattaagctgtgagcttctttascgtggggacaggaccctgctcccattgcattctcagcaccacaccacacactccttgttggaggccactccagacagcatgtgctgaaggatg

SEQ ID NO: 96542 - DNA, 394 bp, Homo sapiens
gttgctcaggctggggtgcaatggctccatcagctcactttagccttgaactcccgggctcaagtcatactgccacctcaacytcccaagtatgctactacaggaacacaaactccttttttaaattttttgtggatatggggtctatgttgcctaggctggtctcgaactcccaggctcaagcagtcctcctacctcagcctccccaaatgctgggattacaggtgggagctactgtatgcctggccttatctaagctgtttccctgaaaatccccgacttcgataatgattccattggccccaccatgccctgtcctgccttcctggctgtgcccaagcttggtccctgcctgcctgcctcactctctgggtctcgagctcctgtgacacat

SEQ ID NO: 96543 - DNA, 593 bp, Homo sapiens
caagcttcctagaagtacatacacattaatttatccaaattatgccaaactgctcaaaatacaggccagaatacataggaacatttaaagtgctcttgtaatggtatgtttttcttttttcttctttacctctagaatatcataattacctatttctccactccctacaaatacatttttatatcacatctgttttaaaggtggtgcactcccttataagatagcagcacctttgatggcagggacgtaaacttgtctctttgaatctttagtaaccagcaagatggttgacactgtggatttagaagtagttgttcatggaaagaataatgtaaatgaacaaatagatgaggtattttcctctgattaactagaaatkatcccacaactctttgcagtctctgctatggtaatttttgtgtgaacaaccttaacagttttaggagatcacattcacctactgctgaagctacagacgtcatttaaatggatgtgcatttatgtaacaagagtttcagaattcttttcaagatcaatctcctaaattatcttattaacattttgttctggttgactacattattaggactgat

SEQ ID NO: 96544 - DNA, 522 bp, Homo sapiens
aagaaaacatggttatatatacaatggaatattattcagccataaaaaaaagaatgaaatcctatcatctgcaggaacatgggtggacctggaggacattatattaagtaaaataagccaggcacagaaagacaaatatcacacattctcactcataatgggagttaaaaaactgatctcatgaaagtggaaagtagaatgttggttagtagaagctgtaatccctagcaagcttcaacaggggagccaatgctttcagtcagggggtggcaccacgtgtcttcaagatgaaatgcctcttggggacaaacatgctactttcaccaagtacataagctttctgcttgtcatacttargattgaacattgtacatccttcagaagtacatcctactcagatcttgggacagtatgatccccccattttgggcatttccctcatttttggtttgcattgggttgctgctgggagaaccaaatgtctggcagcttcttggtcccttaaaaaaaaaaaatgtgcag

SEQ ID NO: 96545 - DNA, 587 bp, Homo sapiens
gacctaagtgtgcttaggagagcttgttctcccctgtgcctcccccatctgggtggcggctacagtggcatcacctcagacttggcaaaaagggggacagagcccaacattaaactcttatgattgtgccagctgtgggcttgtgaccaaagaggacaggcccctctctggtaagcagtatggacaagaagttgtggggagtggggtctgctcaagtctccctgtcacagcagccyatagcagggtcggggaaattgtcccaggtatatgtaaaggagctttgtttccctgtccctccttggccaggtggtggctgcagccaggtcaactcaaactgggcctgagggcagggcatggcacagtattaaactctcaaaatggttccttgggcctgcaaccagggtaagaagctgtggggaatgtggttcactcacatctcagtctcaacagcagcccgcagcaaggcagaaaggaccctcccatgggtgcctgggagtgctgggtctcctctatacttacttgaagcagcacagcagcagcaaccatttctatagatctccagtatccaggttctcaaaacagcactc

SEQ ID NO: 96546 - DNA, 562 bp, Homo sapiens
aaaccaacatttgagtgcttactgtgtacttactattctaaggccttagcatattactcatttaattatcagcaaaataaatattcttgaaatagataaccgtttacacatcagaaaactgcagtagttacacaatatatttccataataaattggaaaatctaaagaataatttctatmaaattgtaattttttaatattctctagtaagggataaaatattaatagaccaatatccacagaagaaatttatatggtaattaagcaccaacaataatatttttaaataccaggtactgttagttttgtataagtattatctaacttttaaagaaaaaagtttttcattgtcgttatgaaagatagaaagtttttaaccttcattttatatagctaatgagttcttaataccataatcaattaacctaacacaaaaaagaaaacaagaacagctttgaaaacaattttgagaaaaaaaacagtagaggccttactacttctcagttcaagacttattgtaaagtcccatgtaataaagagttcaactcaatttttttaatgt

SEQ ID NO: 96547 - DNA, 654 bp, Homo sapiens
aatctagcaattattcagttaacagtgtaatttattgggtaagtctctggttaagagaactttgaatttcaattcatccatctaaattccatttcaagttgtgcttatttccaaatgcagattaaggtaatttttagttgttattgaaataaatttagtggtctttcaaacacatatatttaagaaaagtatttttggctaagaaaaaaaaagaagttccccacccggccggctgccctgtccaggagggaggtggggggcgcctccgcccggccagccaccccgtccgggaggtggggggcgcttctgcccrgccgccccttctgggaagtgaggagcccctctgcccggccaccaccccgtctgggaggtgtacccaacagctcattgagaacgggccatgatgacaatggcggttttgtggaatagaaaaggggaaaaggtggggaaaagattgagaaatcggatggttgctgtgtctgtgtagaaagaagtggacatgggagacttttcattttgttctgtactaagaaaaattcttctgccttggaaaaaaaaagaaaagttgagttgaaactcccaactataacttgtagtccacaagtatattttcatatttagtttttaaggcataatcatgttatttgaaaaata

SEQ ID NO: 96548 - DNA, 535 bp, Homo sapiens
agatctatgggactttgaacttgagagtaatgatttagagtatctggtggaataaatttataaggagcaaaatgttcaagatgtggcctggctgtttctagcaacctatgcttatactgtgagcaaagaaatgacttggaactggaatttacatttaaaagcaagtttgtccaacccatggcccattggtcacatgtggcccaacacaaatttctaaaaygtcttaaacattatgacatttgtttgcaaaaattttttagctcatcagctatcattagtgtcagtgtattttatgtgtagcccaagacgattcttctttttccaatgtggcccagagaagccaaaatattggacatctctttttaaaaggaaagcagactgtaaaagtttggaaaacttgcagcccagccatgtggtagaaaataaaaacccactttctgagggaggaattcaagctagctgtagaaatttgtgtaagcaaagagaactgaatgttaatagtcaagacaatgaggaaagtgcctcaaaagcattc

SEQ ID NO: 96549 - DNA, 524 bp, Homo sapiens
actttgaacttgagagtaatgatttagagtatctggtggaataaatttataaggagcaaaatgttcaagatgtggcctggctgtttctagcaacctatgcttatactgtgagcaaagaaatgacttggaactggaatttacatttaaaagcaagtttgtccaacccatggcccattggtcacatgtggcccaacacaaatttctaaaacgtcttaaacattatgacatttgtttgcaaaaattttttagctcatcagctatcattagtgtcagtgtattttatgtgtagcccaagacgattcttctttttccaatgtggcccagagaagccaaaatattggacayctctttttaaaaggaaagcagactgtaaaagtttggaaaacttgcagcccagccatgtggtagaaaataaaaacccactttctgagggaggaattcaagctagctgtagaaatttgtgtaagcaaagagaactgaatgttaatagtcaagacaatgaggaaagtgcctcaaaagcattc

SEQ ID NO: 96550 - DNA, 609 bp, Homo sapiens
ggggccttcatcttgccgggtcttggtgctattagggctccaagggaagcagggtggtttttcttctttagaaattagcaaaaccacatatgcctttggtaagctgaggctgagaagttaggccttggtgcccagagcgttctccatggagctgaagaaaaggcagcaggcatgtgtagtggaagaacgtgtgagcctgtctcagcaaaggaggggatttcacgctgggctgctcctaaggcaagctagttcagcatcaagcagagaagtgtttgcatcctggatgcctacagtggttcgcttgggtatgcagcaaggcttctgagagctggggttctcctttgccgaactctgtgtgcaccatgagatggcaatgamggaggtggagccctaatgaggcggagattgttggtttcccactgcacctccatgaagtcagagtcgccgacagtcaacatctgcaactccacctcccaggggtttttgtttctggccattcttgcacacgtcagaagcagccctcaccaatgctggaggaaagccgacaggtggataccccgagaatcctcactccttggctgtgaccaccttgtgctgtgttccacactg

SEQ ID NO: 96551 - DNA, 601 bp, Homo sapiens
aagctagttcagcatcaagcagagaagtgtttgcatcctggatgcctacagtggttcgcttgggtatgcagcaaggcttctgagagctggggttctcctttgccgaactctgtgtgcaccatgagatggcaatgaaggaggtggagccctaatgaggcggagattgttggtttcccactgcacctccatgaagtcagagtcgccgacagtcaacatctgcaactccacctcccaggggtttttgtttctggccattcttgcacacktcagaagcagccctcaccaatgctggaggaaagccgacaggtggataccccgagaatcctcactccttggctgtgaccaccttgtgctgtgttccacactgactctcaacattctccagtgggattcaggccagagacccatgccctaacccaaacatgccgacaactcaattccaattagctcctcatccccgcttttcctgcttcccagaaccctaatggtacttccgggaatcgccttccaggtaaaccaactacactcctcccttgtttgtggtctgctcccagggcagcctggcctgagacagctgctctcaagattggcttaggctcac

SEQ ID NO: 96552 - DNA, 475 bp, Homo sapiens
gatgggctaaaacaatgctgaatatgttataattcttctactcataaaagctytattttgatgtctactttatcccaaatctccctgattggaattttccaagacaggtaataaggtgctttggttggggcattttggcaactccctaaaaagattttgagcaaaatccttaaaaaattcgagacttaccactagtactcacatcccaaagggtgaatccggctgagcaggaatatttaagaccttgctcaggatttgaacttgagcctcagactctaccaaagctctgacatgtccacaaagaggctactggaaggcttcaggcctggaagggaagtttctgatgagattctcatcttaggatggatttcctagaaaaagaactgaaaatatggatctgtgtgaacacaattattcagaaatgactaatagaagagtgagaaagtggggcagagaggaaaatggcacccaagga

SEQ ID NO: 96553 - DNA, 475 bp, Homo sapiens
gatgggctaaaacaatgctgaatatgttataattcttctactcataaaagctttattttgatgtctactttatcccaaatctccctgattggaattttccaagacaggtaataaggtgctttggttggggcattttggcaactccctaaaaagattttgagcaaaatccttraaaaattcgagacttaccactagtactcacatcccaaagggtgaatccggctgagcaggaatatttaagaccttgctcaggatttgaacttgagcctcagactctaccaaagctctgacatgtccacaaagaggctactggaaggcttcaggcctggaagggaagtttctgatgagattctcatcttaggatggatttcctagaaaaagaactgaaaatatggatctgtgtgaacacaattattcagaaatgactaatagaagagtgagaaagtggggcagagaggaaaatggcacccaagga

SEQ ID NO: 96554 - DNA, 475 bp, Homo sapiens
gatgggctaaaacaatgctgaatatgttataattcttctactcataaaagctttattttgatgtctactttatcccaaatctccctgattggaattttccaagacaggtaataaggtgctttggttggggcattttggcaactccctaaaaagattttgagcaaaatccttaaaaaattcgagacttaccactagtactcacatcccaaagggtgaatccggctgagcaggaatayttaagaccttgctcaggatttgaacttgagcctcagactctaccaaagctctgacatgtccacaaagaggctactggaaggcttcaggcctggaagggaagtttctgatgagattctcatcttaggatggatttcctagaaaaagaactgaaaatatggatctgtgtgaacacaattattcagaaatgactaatagaagagtgagaaagtggggcagagaggaaaatggcacccaagga

SEQ ID NO: 96555 - DNA, 553 bp, Homo sapiens
ctgataattggaagtgatttagggtccagagttgaatcaggattacrgccgggggcttctagttcttagtccagagctttttccattgaaccatacctctgtacctcgggtagacctgtatgctttacatttcttggtgttcacttgcctactttgttctggattgaaggaggaagacaaggaggaagagaaagaagaaaaaaaaggaaaaaaaaaggcagacttcatatgtccctcccaactctttttttatccacctcttaaaggccaaggttatttactcatattttagtattatgtttaagcaataaaaaggtgtttttattaaagggtcaggtaaatagaatttttaaaatacctaggtcagtaaatgagatttcagtcattgtacaggtgtctttgacttctgcactttctatagtgatggctgcaccagcacattcagaggtgtttggcacatgttctagcctctggacgctccgcttcttttgaattgactgagggatgtgcacgggtgggaggagtccctgatgttgacacaggtgttgtcttt

SEQ ID NO: 96556 - DNA, 553 bp, Homo sapiens
ctgataattggaagtgatttagggtccagagttgaatcaggattacggccgggggcttctagttcttagtccagagctttttccattgaaccatacctctgtacctcgggtagacctgtatgctttacatttcttggtgttcacttgcctactttgttctggattgaaggaggaagacaaggaggaagagaaagaagaaaaaaaaggaaaaaaaaaggcagacttcatatgtccctcccaactctttttttayccacctcttaaaggccaaggttatttactcatattttagtattatgtttaagcaataaaaaggtgtttttattaaagggtcaggtaaatagaatttttaaaatacctaggtcagtaaatgagatttcagtcattgtacaggtgtctttgacttctgcactttctatagtgatggctgcaccagcacattcagaggtgtttggcacatgttctagcctctggacgctccgcttcttttgaattgactgagggatgtgcacgggtgggaggagtccctgatgttgacacaggtgttgtcttt

SEQ ID NO: 96557 - DNA, 423 bp, Homo sapiens
gaattctgtattatataacacagataaaggctacaagagactccataatttgactttttaccccgtatctccgagactggcctaaaacttgcaaatagagattcttccaaattaaacagtcattatgcttccatatttatgaagcattttttgctattttcctacatcctaagaagtacatcctgatgcaaaacacctgctccccataaggccatccagccaactgactccagaagagaagaaatgctgtcaagttattcagaagcacatttgcaagcaatgtaggcttcaggaagaacaaaaaggcaaacaaactttcccaatgggcaatttccagcaagcaaagggagtgactctttataggcaagaaaggccactgcwgaagagtggggtgagactgaaaacacaaacaggcaacggcca

SEQ ID NO: 96558 - DNA, 557 bp, Homo sapiens
agaacaacttaatagacatctatactcccaccctgtgctgttaacaactattaatattttattatgttcactttcagtcatttttcaaagggaaaacagtacataggtagctaacgtctcctaccagtgagtctttatttatttttcacagttgtaaaggcactctgaagaatatcattattgagcctgtacacaatacaaaattatacgacctttgtgtacatccaccactccctcagggtgaagtcttggaaatggtggaactgccagatcagtgggtgaatttgtactcctgcctgccataaatgataactcccttgtccctatattctagccaacactggctcattctaattcacttcaaaaaaaagtttcatttgagaaaggtgacattttattattgctttattttgtatttctttgatttctagtgatgtgacatatacacttaatatgtaccagccagtttataatttttctattattaattgcattttcacatcctgtgtgcttttgtttgttgggtattcatygtttctttttgagttaaaggagct

SEQ ID NO: 96559 - DNA, 594 bp, Homo sapiens
ttggaattctgcttcaccttagggactcaggtaagcagaagagaaaaaacatctcaagtaggaagaaaaagaaaaaaaaccccacttacaatgtcaaaattactcttgaaaatcacttaggaaggtaccatgttggaggttgttctatcaattttaaaaagaccagcccagtcattttctctccactatargaagaaatctgtttcttcagttggacaccaaatgaatggctagattagaggtcctgctgttttaaaaagttaataaagctgaaaaaaaaagcaccattctttaaatactccatatggtgtggtattctgtttgtaggaggcacacaaacaatagcagatttgaagccccatttcaggctcactatggggtctgcacatattgaatgaagtggcaggcagaattgcctgtatatttaagttattatttctttttcttaatttttttccccaaatcaaagtggttggatttgcagaaattaaatgtgcatgtgatacaactccacagttctagacagaccatgaaaagtgcctggcacttacattttcccatcctgggaaagcccagcttgcctccgagcccatc

SEQ ID NO: 96560 - DNA, 614 bp, Homo sapiens
cgcacataatggggatgatggatcagaccgataagatctcacacttatcacgagggcagcttgtctgtcatttcccacattatggagggtgtctttggtagattgtggtgtcaagtgtattctgaattatgggaagcccagtgcacttaattaccttatgtttctaataaggcgaggagcagcgtagtagcggggagagagctgggctccagggttttgctgacctaagttcattccctggctgtgtgagctcaggcacagcatctgccctctctgggctgcagtcacctcatctgttcagtggctgtcacggcacaatgggacctttgaaaagaatstccctttagatgaagggcaaggacagggaaaacaagacaattctgtccccagtaaattccaagtacctgtcaaatgtgcaaagcgaggttgattttcaggaaatgactccacccaggggactcaacgatttgactcctaaaatgaatcaaagcatattcttctgctttttgctagctcctttggggtatcgggcacagtgggtaggacgtggagttcaacccaacaaactaggggtttggctcaagtaccctggcctctcctttcatcgcctcaaa

SEQ ID NO: 96561 - DNA, 483 bp, Homo sapiens
gtttacacatttattttttatttttgttgtatattgacaaattatagttgtacgtatttatggggtatagagtggtgttatkatgtttaaatataatgtggaatgattaaattaagctaagtaacatatatatcaccccaatttttaatgttttgggaatgagaacattagaaatttcctttcttagtgatattgaaatgtacaggactcagttattagccatatttagcacagtgtgctattgatctaaaaagccaaacttattcttcctattgaactgagtctttgtaccctttggctatcatttctccagtatccccaaccccagcctctggtagccaaccttctactctctgcttctatgagctcaattagtttagattccacatataagtaaggacatgtagtattggtatttctatgtttggcttatttcacttagcataatattctccaattccatccatgttgttgcagatgacg

SEQ ID NO: 96562 - DNA, 450 bp, Homo sapiens
ttacaaaccaagttacatttacatgggtaaagatgggattcaaacccaagtctgcccagctcggaatcaatgtcatagcctgtgtaaagatttgggatgggctaaggagatacaaggatgacttctctttccttggcactgattgaatatgtctttataactatgttgagactggccaggagccartatctcatgcacagtcatttctgcttaattagcatgaggggtctcataattttgagtttcatagtctcataatattaatcctaaacctcagaagcaccctctgtttttcttatccacaaatattgggagggcgtcttagaatggattctcatcacaatttaattagaaaggaaatgtttaaattgctacacatgtatttccaggcagctcggaactggcccgtatctgtaatctcactgagcatacaaaacggtaacaaatgcg

SEQ ID NO: 96563 - DNA, 457 bp, Homo sapiens
gttttatcaggggtttccacttttgcgtcttcctcattctctctttgcctgctgccatccctgtaagatgggacttgctcctccttgccttccaccatgattgtgaggtttccccagccatgtgaaactgtacattcaattaaacctctttcttttttaaattgcccagtctctggtatgtctttatcagcagcatgaaaatggactaatacatcatcctatctgattaatacaggagagggaaaaactcatagcagcatatgtcatcyggagcctctccaatcttttttttaataatgcccaatttacagttttataaaaattacttgacctgtaaagaagcaagaatgtgtaagtgatgaacaagagaaaaatcagactacagaggatccagatatttgaattagcacacaagaacattaaaataaacatgattagtatgttcaaggagacagaa

SEQ ID NO: 96564 - DNA, 561 bp, Homo sapiens
acattcgggaatgcaataaaatggaatccctttggggatgtgctggcagtggagcaaggcagtagcaattagcactggccaaatcccagtgtcaataccactcctgcctacaggtaatcaccagaaaggtcaaatgttagtcgccctgtcttatgtgggctgaaaactgtcacaggcgatttctcgtaagggttctggaatcccactggggacggccacagrcaggaaaggcatcgttggccgctgcttcttggctcactcactccacgctcactgctcagaattctctgagactggtcttcctgcctccttcttactggtaacctaatctttccccctcctcttgcttgaaaattgtgtagggttcattgttccatgattgttattgaatggggctcttatgctctcacagaagacctaaatgatgactgcaaacaatgaagacaaatattttgctccaggaagcccaaatgccctctcacactctgccaagtttaaagaaagacgaaaacaaaaggtgtccctgttagttccccctaaggctcagggcatatgaaatag

SEQ ID NO: 96565 - DNA, 563 bp, Homo sapiens
tgacttttcaatgattaaaaccatagccagtgtgatgccaaaatgcatcccttaaatggaaagcctagttaactagtcttttcactctgttgggtacagagcatagactgggtaccatttaaacactattcttgtctttctcatccttgacaatcttatccattgtttatttctagtttgttgttagatttataccagctgtcaatagactatttctaagattttgtatttgcttctaattccctagaacttcagacagcctgcatggttaaagctattttacactgcatgaagctcctttttctcccttcttttgttccatttcttcttaacaagcagtttttattctttcagcaatagccactgctgcatgattgaatttgaagttcaacttcttgttttcaatttggggcttctcatcctcaatttgaaacttattgacaaacttctttgctaagcactctgtttcccatctctcaaaggcctgttctctgcagcctttgaatgtcacctttgcatgagtttgtatgagtttcttracgtagagaataagtatagttttt

SEQ ID NO: 96566 - DNA, 427 bp, Homo sapiens
aataaaaatgaacttcaattagctaaaggagcccattgtagcccaatgcaaggaagctaaaaattatgataaaacattgcaggagctgaaagacaaaataacaagtatagaaaagaatgtaactgaactgatagagctgaaaaatgcaatacaaacttttcataattttaatacagaatttcatgacacaatcacaagtactaatagcagaatagtgttcagagcttgaagactgtctttttgaaataagaggccgaaaaaaaacacagaaaaaagaatgaaaaggaataaacaaaacctccaagaactgtgggattatgkaaaaagaccaaacctgtaactgattaaggtacctgaaagagatgaggataatggaaccatgttggaaaacatacttcaggatatcatccaggagaacttccccaac

SEQ ID NO: 96567 - DNA, 585 bp, Homo sapiens
ctcaaagcactctctgggagcatgccaaaagaaacctctgaagaaaaaactgtgggtggctcattggtggatgaaaaagatccttgagtcaattcctattgagtacactttcctttctcttgttttgtaacccccctgtggacatcaattattctcactccaggctagaagatttcccactttcctgaacaagaggtctttggagaactgaatgcagatatttcctttcacttctgtggcttgaactctccataagttgtgtggtctgtgtttctattatttttaaaatgggaaaataaaagggtaaactgcaataagacctaccaaggtgccaaataaattcaaaataactttgcaattgcagtttcttcaactaaaacacctccatacattgaaattagagtctttactctttcaagcacagctgtggttggagaagtttgtgtaatccctcttgattatgtgagaagtgggcattgaaaagacaactgcagggaggtcagaaccccaaatcagtaatggcccatctgactgtcattagtgatgaaaaagcaccmatgaaaaatcctttactaatagtcatgc

SEQ ID NO: 96568 - DNA, 454 bp, Homo sapiens
tgggagggatgcttgtgattaggagttcaagactagcctaagcaacatagcaagatcctgtgtctataaaatgtaatttaatttaatttaaaaacagagtaaataccacacasatactaataaatgatacagcaatgacaagcctgaaacagcagtaatacatacagcaacataaatagtatctgaggaaaacaaagaaaatcagactgagatttataacctagccccatttataaaaatttaaaatgcaagtacacgaaacagcaatacacatttcacaagaacacatacaaacacaacgatatataacaaacacattaggttattttctggaggaaagaaggaaatagatatgagaaatggaacaaaataggatgaagaaataaaagaggggcttccccaggaccagtaatgataaggaaccatgagctaaggaatatgattaactcaaatc

SEQ ID NO: 96569 - DNA, 454 bp, Homo sapiens
tgggagggatgcttgtgattaggagttcaagactagcctaagcaacatagcaagatcctgtgtctataaaatgtaatttaatttaatttaaaaacagagtaaataccacacagatactaataaatgatacagcaatgacaagcctgaaacagcagtaatacatacagcaacataaatagtatctgaggaaaacaaagaaaatcagactgagatttataacctagccccatttataaaaatttaaaatgsaagtacacgaaacagcaatacacatttcacaagaacacatacaaacacaacgatatataacaaacacattaggttattttctggaggaaagaaggaaatagatatgagaaatggaacaaaataggatgaagaaataaaagaggggcttccccaggaccagtaatgataaggaaccatgagctaaggaatatgattaactcaaatc

SEQ ID NO: 96570 - DNA, 426 bp, Homo sapiens
gaattcaatgcttgggtcacctccagattcattttcacagtctttcatgttttggtcatattacattgtattttgctgccatatgactgatctttttttgttaaatgtgagatacttgttaaaaaatatttagcaatgaattgagrcctagtagcatgttatcttgctgcagaagagatgggagtctacttctgggggatggtcaggggtcctccatacaggctgcaattgaggtcgtcggtgcaggctcagtccctacaaaggccagggtatttcctgtccacctctattctgatgcatgactcttctgggtctcaaccagagccagtggacttcagtatgggtcgctttcattggcagaccctcaatccacttgttttccatctaatcccacgcatgtgtgcaaaagctgctgtgcttctttgc

SEQ ID NO: 96571 - DNA, 426 bp, Homo sapiens
gaattcaatgcttgggtcacctccagattcattttcacagtctttcatgttttggtcatattacattgtattttgctgccatatgactgatctttttttgttaaatgtgagatacttgttaaaaaatatttagcaatgaattgaggcctagtagcatgttatcttgctgcagaagagatgggagtctacttctgggggatggtcaggggtcctccatacaggctgcaattgargtcgtcggtgcaggctcagtccctacaaaggccagggtatttcctgtccacctctattctgatgcatgactcttctgggtctcaaccagagccagtggacttcagtatgggtcgctttcattggcagaccctcaatccacttgttttccatctaatcccacgcatgtgtgcaaaagctgctgtgcttctttgc

SEQ ID NO: 96572 - DNA, 426 bp, Homo sapiens
gaattcaatgcttgggtcacctccagattcattttcacagtctttcatgttttggtcatattacattgtattttgctgccatatgactgatctttttttgttaaatgtgagatacttgttaaaaaatatttagcaatgaattgaggcctagtagcatgttatcttgctgcagaagagatgggagtctacttctgggggatggtcaggggtcctccatacaggctgcaattgaggtcgtcggtgcaggctcagtccctacaaaggccagggtatttcctgtccacctctattctgatgcatgactcttctgggtctcaaccagagccagtggacttcagtaygggtcgctttcattggcagaccctcaatccacttgttttccatctaatcccacgcatgtgtgcaaaagctgctgtgcttctttgc

SEQ ID NO: 96573 - DNA, 374 bp, Homo sapiens
tggtcatattacattgtattttgctgccatatgactgatctttttttgttaaatgtgagatacttgttaaaaaatatttagcaatgaattgaggcctagtagcatgttatcttgctgcagaagagatgggagtctacttctgggggatggtcaggggtcctccatacaggctgcaattgaggtcgtcggtgcaggctcagtccctacaaaggccagggtatttcctgtccacctctattctgatgcatgactcttctgggtctcaaccagagccagtggacttcagtatgggtcgctttcattggcagaccctcaatccacttgttttccatctaatcccacrcatgtgtgcaaaagctgctgtgcttctttgc

SEQ ID NO: 96574 - DNA, 388 bp, Homo sapiens
aggctggagtgcaatggctcaatcagctcactttagccttgaactcccgggctcaagtgatactgccacctcaacctcccaagtctgctactacaggaacacaaactccttttttaaattttttgtggatatggggtctcactatgttgcctaggctggtctcgaactcccaggctcaagcagtcctcctacctcagcctccccaaatgctgggattacaggtgggagctactgtacacctggccttatctaagctgtttccctgaaaatccccgtcttgggtaatgattccattggccccaccatgccctgtcctgccttcctggctgtgcccaagcttggtcyctgcctgcctgcctgcctccctctctgggtctcgagctcctgt

SEQ ID NO: 96575 - DNA, 488 bp, Homo sapiens
cttgttgttgttattattattwttttttatgtggggacattcaagtgaactgctatatgcatttgcccccagtctctccttgtgagaagtgaatttcttcaacgtttatagaactgaggtattacattattggatgaattaagaaaacaatctaacctgatgtgtgaaaatttctgcttgtgagaatccgtgttatttcaattatccaatcaagagcctaattcgtataaaagaaacacagcagcttgttgctcatctttttatctaaggacggtttgtcttgacagagggtgtctggctgttttggggaaactattcctgaccttattttgactaaaaagttgcctgctgtaccaggtgagagaagctatcatttcttttataaaacttttagcttgctttttgttaagtgtgtttgaaagtcacttaaaagactgacttaaatatgaatattgttagtcgggctgtatattttttttatattaagt

SEQ ID NO: 96576 - DNA, 345 bp, Homo sapiens
ccacttccataacaagcagatgttataatgctttggccttccagaaagtcagcaagcaaaatgccttgaacatctccaaaaattgttgtcacgacctttgctcttgacaagtctccttttgttgcgactggaccgcttccacctcttggtagccattgctttgattgtgctttgtcttcaggatggtactggtgaagcaatgctttactkcctgttataattccttgaagaaaatgctttagaatcttgatcacacttgttaaaaatttccattaaaagctctgctcttctcagcagctggtctaagcacaatggttttggcatccaccaagtgaaaagtttgtt

SEQ ID NO: 96577 - DNA, 546 bp, Homo sapiens
cacttacaccgcttctcaacccggtacgcaccagaaaatcattgatatggccatgaatggcgttggatgccgggcaaccgcccgcattatgggcgttggcctcaacacgattttacgtcacttaaaaaactcaggccgcagtcggtaacctcgcgcatacagccgggcagtgacgtcatcgtctgcgcggaaatggacgaacagtggggatacgtcggggctaaatcgcgccagcgctggctgttttacgcgtatgacaggctccggaagacggttgttgcgcacgtattcggtgaacgcactatggcgacgctggggcgtcttatgagcctgctgtcaccctttgacgtggtgatatggatgacggatggctggccgctgtatgaatcccgcctgaagggaaagctgcacgtaatcagcaagcgatatacgcagcgaattgagcggcataacctgaatctgaggcagcacctggcacggctgggacggaagtcgctgtcgttctcaaaatcggtggagcwgcatgacaaagtcatcgggcattat

SEQ ID NO: 96578 - DNA, 520 bp, Homo sapiens
ctttctgaactaaatcaatgtacatcttatatacatatattgattaatgtctcatgcctccctaaattgtataaaaccaagctgtgcccacaagcttgggcacacatcatcaggactccctgaggcggtgtcacaggcatgtccttaatcttggaaaatgaacttcctaaatctattgagattagtctcagatactctttggtttacaggtttgttttttgtttcataacttcaattatttgacatgctaaagaaaatttgccaaatagcacattctcttgtttaygtgttattgttgttgcaaaaataatatattttatatataatttatcatctatgtacattaccaaattgagtagcagatttattagtaagacccaaagtaatgaaaagtttgaataccaattagcaacttagaaaaacaaattatgctacatttgtttgctgaaatgctacctattatttattaaaaaataaacaatacaacataaaaggtttaattctcagtatttctactgag

SEQ ID NO: 96579 - DNA, 578 bp, Homo sapiens
aatggaactaggaatgaccatgaaggaggtttcccatgcacatactcctgataacaagaacgaccatgaatggattctgcttaaccacaacctttgatagaagccaccatgaccttataaaaatcacwtctacaaggacatcttcccagaaaatcactgtttaaccctatattgatgccaaccttggtattgactctacaagcaaggaaaatactctcaaaacaatttatgtaacccacctcattttcactcataaacctatggattgacatcctggagtcactgctgcatttgttgttaattgtaattagccccttttacaatgtttgtgactgtttttctccgatgtctcttggaaaataaataatttacaagttgatggcagtaaagaagctatttaggacatttttaacatcctgttgaatatttctgcatagcacatcgatcccctaaaatacttcgctgtattggcatgtgataaatcagagtataatgctgaaggtaaaatggaaaatacatgggcttttgatgaatcaagtcatagggtgatattgtctttgcccttgaggaagcagacc

SEQ ID NO: 96580 - DNA, 534 bp, Homo sapiens
atgaccatgaaggaggtttcccatgcacatactcctgataacaagaacgaccatgaatggattctgcttaaccacaacctttgatagaagccaccatgaccttataaaaatcacttctacaaggacatcttcccagmaaatcactgtttaaccctatattgatgccaaccttggtattgactctacaagcaaggaaaatactctcaaaacaatttatgtaacccacctcattttcactcataaacctatggattgacatcctggagtcactgctgcatttgttgttaattgtaattagccccttttacaatgtttgtgactgtttttctccgatgtctcttggaaaataaataatttacaagttgatggcagtaaagaagctatttaggacatttttaacatcctgttgaatatttctgcatagcacatcgatcccctaaaatacttcgctgtattggcatgtgataaatcagagtataatgctgaaggtaaaatggaaaatacatgggcttttgatgaatcaagtcatagggt

SEQ ID NO: 96581 - DNA, 602 bp, Homo sapiens
tccatggaaaagagaatccttaggttcatggggtttttggagacattcaggtgagtggaggggagaaagaggacagggggtggccagccatttcaacaatactgggaatgattarcatctaagtataaaggtctgcatcactcaaaacaccctgcatgacaggctgacagaaagaaatccaaccccacagtggctccatagcaactctttagtatacttggtagtgaagctctttcagggaagaaacatccactcaagggactcagtgatgcttctctgagctataataaacagtgtattggacccaggtttctctgagttcaatgtgatgattacactcagctgctgctccgatgagtttaaatgagcatgtggcaatttagatgggcctggctgtgtggtatgttatatgtaaatctgaactatgtaaacataaagggcatgtctgaactagtgtgagggtgagagatcttagagggcccacacctcacactcttgtgcttatttgctccaggaacctccaggttcttcgagtgaaaatcgacatagatcctttcctggataaatcatccaaagacctaatctctgagaaatacacacgt

SEQ ID NO: 96582 - DNA, 534 bp, Homo sapiens
aatacttgacaaaatactaataagtggagttcaaaaataacccaaaattgttctaaacacaaattccttgacaattactttgggagtagagagttcataatggactccaaactcctgctttatcttcttctgattcccattktctgtgagatgagaaaatcagctctaattatgcatcacagggcaaatctgtaaaccaacagtgttcaatagaattgaagatcctgggggatcaggacatgagtcaggtgctggagacagtgtctcaggagcacccagtagatctcagaggtccctcctggacactcatgtgggacataagcgtcactttctcagagtcaccaatgagctgtgctggtgcctgatgggtccaggaaaagaccaaggcacctgctcagtgtgatggagagtgatggttccaaaaatgatctaggtggtctctatgctaatcaaatataggcttacagtgaggagcctgttctatacgggcttattcttcagtgaaaggatgtctgtccacaaatgtttgtaaat

SEQ ID NO: 96583 - DNA, 484 bp, Homo sapiens
aacaaaatgccatgtatacgctgagttaatgttaaaaaacatgtacaattgtttgactattacagcacaaaaatacaaaactctaatcattgaaacagtttatattgaggatatacattttctttaaatagggtctcactctgtcaacgagactggagtgcagtggcacaatcacagctcactgcagyattaacctcccaggcttaagggatcctcccacctcagcctttcaagtagctgctaccacaggtggaaccatacccaggtatttattattattatttttgtatagaaaagacctcactgtgctgccagggtgttctaaaagtcctgagctcaagtgatctgcctgccttagcctcccaaagttctgggattacaggtgtgatttttataattttactattttaataatagtattatttttaatcaagagaatatataaactaagcctaattttaacaaattgtcctgagagatcatt

SEQ ID NO: 96584 - DNA, 484 bp, Homo sapiens
aacaaaatgccatgtatacgctgagttaatgttaaaaaacatgtacaattgtttgactattacagcacaaaaatacaaaactctaatcattgaaacagtttatattgaggatatacattttctttaaatagggtctcactctgtcaacgagactggagtgcagtggcacaatcacagctcactgcagcattaacctcccaggcttaagggatcctcccacctcagcctttcaagtagctgctaccacaggtggaaccatacccaggtatttattattattatttttgtatagaaaagacctcactgtgctgccaggstgttctaaaagtcctgagctcaagtgatctgcctgccttagcctcccaaagttctgggattacaggtgtgatttttataattttactattttaataatagtattatttttaatcaagagaatatataaactaagcctaattttaacaaattgtcctgagagatcatt

SEQ ID NO: 96585 - DNA, 484 bp, Homo sapiens
aacaaaatgccatgtatacgctgagttaatgttaaaaaacatgtacaattgtttgactattacagcacaaaaatacaaaactctaatcattgaaacagtttatattgaggatatacattttctttaaatagggtctcactctgtcaacgagactggagtgcagtggcacaatcacagctcactgcagcattaacctcccaggcttaagggatcctcccacctcagcctttcaagtagctgctaccacaggtggaaccatacccaggtatttattattattatttttgtatagaaaagacctcactgtgctgccagggtgttctaaaagtcctgagctcaagtgatctgcctgccttakcctcccaaagttctgggattacaggtgtgatttttataattttactattttaataatagtattatttttaatcaagagaatatataaactaagcctaattttaacaaattgtcctgagagatcatt

SEQ ID NO: 96586 - DNA, 450 bp, Homo sapiens
gactccagagctcatgttctcacatgttgtgcgactttgggttaaaacacacctgaaacatttaatggctrttgtccttgatcatttgatcatcatctgcattttagttgatgtgatttttttaaacctcagtttgaaggaaagaaaaaaaaaatctatagactctatctaggccagaattacttctctctctttcccttggtagctgcgaatgtagccccaaatatgataggaatcaataaacactgcagctgttacaacactttcttggtcagctgttccaacagtatgagaaccacggcagcacaattattttatgggactaattctgttcctactggagacacatttattcttatgtaccaggacctccagtccatcgcagcctatgattatggagaaggaaagaaacattcttcaaattttcatcatacatgtggcaagagaaac

SEQ ID NO: 96587 - DNA, 529 bp, Homo sapiens
agggctgggacaaggccagggccaggaccaggaaagggcaatrtcaggacaagggcaatggcaggaccagcaatggggctagggccaggacagggacagggacagggtcagggctagggccagaatagcatgccggggtagagccaggccaaagtagggccaggacagggtcaggaccagggctgggccagggtatggccttaagtagcaaagggccagggccagggtccatgccagtgccagcgccagtccagggcagaggcagggccatggccaggtctaggacaaggctagggaagggccaaggtctgggtcagggtcagcacaagaccaggacagagccaagggagggacagggccatggtaggaccaggttaaatcaaggacaacacacctgcaaatccacttcagggccagggtcagggcagggccagttcagggccagggccaagacagggcgagggccagggctgtcagggtcattggcagggccagggccatggcaggaccagggtcaggagcaggggtc

SEQ ID NO: 96588 - DNA, 529 bp, Homo sapiens
agggctgggacaaggccagggccaggaccaggaaagggcaatatcaggacaagggcaatggcaggaccagcaatggggctagggccaggacagggacagggacagggtcagggctagggccagaatagcatgccggggtagagccaggccaaagtagggccaggacagggtcaggaccagggctgggccagggtatggccttaagtagcaaagggccagggcmagggtccatgccagtgccagcgccagtccagggcagaggcagggccatggccaggtctaggacaaggctagggaagggccaaggtctgggtcagggtcagcacaagaccaggacagagccaagggagggacagggccatggtaggaccaggttaaatcaaggacaacacacctgcaaatccacttcagggccagggtcagggcagggccagttcagggccagggccaagacagggcgagggccagggctgtcagggtcattggcagggccagggccatggcaggaccagggtcaggagcaggggtc

SEQ ID NO: 96589 - DNA, 582 bp, Homo sapiens
atgatacattgtattcccacacaccagccacaaaaaaagtagaaattataattataataccaaaaaacatgaaatagggataaatttaacaaaatatgtgcaagaactgtaaatgaagcttcagtgaaagaagttaaagacataaatagagaaatatctcatgttcatggacygaaaaactcagtatcgtaaacacggcaaattttccctaagtactccctccacttgtggccagtagccacataagtcaaaaaccggaaacaaaccaaatgtccattaacagaagaatggaaaaacaagttgtgatatagtcatacaaaagaatactactcagcaataaaaaggaacaaactactgataaatcagcaatgtggatgaatatcaaaaacattgtattgggcagaagaagctacacacagaagagtacacaccgtatggttccatttttaggaatttctagaacaggaaaagctaacctatggtgaaagaagtgagaatagtggttctttgtgggagagcaggtggcagggattgcccggcaggggcacaaatcagctttccaagatgatggacatgcctgta

SEQ ID NO: 96590 - DNA, 582 bp, Homo sapiens
atgatacattgtattcccacacaccagccacaaaaaaagtagaaattataattataataccaaaaaacatgaaatagggataaatttaacaaaatatgtgcaagaactgtaaatgaagcttcagtgaaagaagttaaagacataaatagagaaatatctcatgttcatggactgaaaaactcastatcgtaaacacggcaaattttccctaagtactccctccacttgtggccagtagccacataagtcaaaaaccggaaacaaaccaaatgtccattaacagaagaatggaaaaacaagttgtgatatagtcatacaaaagaatactactcagcaataaaaaggaacaaactactgataaatcagcaatgtggatgaatatcaaaaacattgtattgggcagaagaagctacacacagaagagtacacaccgtatggttccatttttaggaatttctagaacaggaaaagctaacctatggtgaaagaagtgagaatagtggttctttgtgggagagcaggtggcagggattgcccggcaggggcacaaatcagctttccaagatgatggacatgcctgta

SEQ ID NO: 96591 - DNA, 541 bp, Homo sapiens
accataatatttaatcacaaaattttactatagatagactttcatttttctctaactctacaacagtggagactattatgaamgtcagattttaaaaatatgtacagaaaagttaacatttagcatttcttctgatcacttgagggctattccagcatgtcaggagttagagacaacttccgtggagcagaagacagtgatgttcccgaagccctgccctttggaggtcacccaaaacctccatgggctatgatgacaacagctaccatgcaccgagtgtctcctggacaccagatctatgccatctttgacctgtaacaatgaatagagaggcagatattctaatctccttcacacagattaggagactcaggcacaaagcaattaaggtatcaattgacccttcaccacagtcatgcagatatttctagatagacactatctcgaccagttgattccctcattcctccttagttaagcagcccgtttttcacctcagcacatgtagtaggagcccaggtgccctcctctccgtctttgt

SEQ ID NO: 96592 - DNA, 578 bp, Homo sapiens
ggtgtgcaaacacttcagttttggagcattttggacttcaaatttttggattagggatacccgacctgtattagtgtggtattgcaggtatctttccactgtgtagttaataattttacattggtagcttaaagtcagctgtggtgaaggcatttacgctacagaaattggcaaatactaaaaatcggtgcttttttcctgtcaaagasttgcctattaaacatttaccagtacaccatggctcagaggtgagaagggatcaggtatcaaaagacattgaatgcattcctgacacttcaaactgtaaagtctagagtattggttcttgtattagctcatgttcctgaaaaaccagagcctatggcctgcatgaagcagtagttatttactgggaattgcaatcccagggcagcatgagttagggcacagagagatgagagaggaggatggatgcaaatacaaagtgatgcagtaccaagctggccactgcttcacagctcacagtagacactgccagttgttcatttccagacagagccttaggtcagcctgccagagggaggagcagggaggaagtg

SEQ ID NO: 96593 - DNA, 578 bp, Homo sapiens
ggtgtgcaaacacttcagttttggagcattttggacttcaaatttttggattagggatacccgacctgtattagtgtggtattgcaggtatctttccactgtgtagttaataattttacattggtagcttaaagtcagctgtggtgaaggcatttacgctacagaaattggcaaatactaaaaatcggtgcttttttcctgtcaaagagttgcctattaaacatttaccagtacaccatggctcagaggtgagaagggatcaggtatcaaaagacattgaatgcattcctgacacttcaaactgtaaagtctagagtattggttcttgtattagctcatgttcctgaaaaaccagagcctatggcctgcatgaagcagtagttatttactgggaattgcaatcccagggcagcatgagttagggcacagagagatgagagaggaggatggawgcaaatacaaagtgatgcagtaccaagctggccactgcttcacagctcacagtagacactgccagttgttcatttccagacagagccttaggtcagcctgccagagggaggagcagggaggaagtg

SEQ ID NO: 96594 - DNA, 547 bp, Homo sapiens
gagttcattcagaagtaggcatattacagaagtgtctctgaagaaattatgtgagttagaatgctcttagctgcaagtaacaaaacacagagcttgcaaatgaaatatttatcttactcagagatctgtaggtgaggggaaattccagattggatgccctggctggacgctgtcttcaaggacccctcggttcctgttaccctgctgggccatattcagtagatcatcttctgacccttggggttstatcaaatgggtgcaaggtgtggctgttactgactagcaatgtgtactattaactacctttattaagatgccagtggcctcttataggatgctcatataaactatgctttgggacgactggaaagtacaattactgacttgggtcactatttccttttcttctcttccaacagcatctaaagtctgcactagaattaaagaacctgaggttattctcttgggatttcacaaggcttaggttagccctcaagtcagatcattcaagagccaagtggttttggtggctctgggccctgaacca

SEQ ID NO: 96595 - DNA, 547 bp, Homo sapiens
gagttcattcagaagtaggcatattacagaagtgtctctgaagaaattatgtgagttagaatgctcttagctgcaagtaacaaaacacagagcttgcaaatgaaatatttatcttactcagagatctgtaggtgaggggaaattccagattggatgccctggctggacgctgtcttcaaggacccctcggttcctgttaccctgctgggccatattcagtagatcatcttctgacccttggggttgtatcaaatgggtgcaaggtgtggctgttactgactagcaatgtgtactattaactacctttattaagatgccagtggcctcttataggatgctcatataaactatgctttgggackactggaaagtacaattactgacttgggtcactatttccttttcttctcttccaacagcatctaaagtctgcactagaattaaagaacctgaggttattctcttgggatttcacaaggcttaggttagccctcaagtcagatcattcaagagccaagtggttttggtggctctgggccctgaacca

SEQ ID NO: 96596 - DNA, 439 bp, Homo sapiens
tgcataaaatatttgtctcccagtggctacggatgatgctgttggacatgggagaatggcttcctgtttgttctcaaccctcctgccttggttcttctcaaaccagagtgggggccatgtctctactccacactccatccaagaaattggagaaccatgcactactggggtcagtttgccagacttagcaaataaagtcacaggatgcccagttcaatttgaaatttagataaatgacaaatatattttagtataagtcaatcccgtgcaatataggaacctactcatgctaacaattctyattggttatctgaaattcaaactggactgggtactccctattgtttctggcaaccctatgctggggcatgttcctaagaggagttcccacggtccccagaccatccaaaccccgctttggaccactaagcacagttaa

SEQ ID NO: 96597 - DNA, 515 bp, Homo sapiens
accagggacatagagagggaccttggctagtgtcccaaggaagcctgaggcccacattctgggaggrtaatcaggaagatgggcccatctgagaggagccacaatttagatgtgagctaatgagcaatcttgagcatggacacaagagcggtacaatctatggccccaaattccctctaggtagctgtgcatctgttgaaccttcaataagcagctgtgagcaaatacatgccaggcctcttatgtcatctgaacaggactctaaatgtaccttcacctttgctttaaaactgagagtgagccaggtaacaaacctgcacgtgtacctcctgtttaagataaaaatagaaaaaaaaaaagaaagctgtaagtgaaccaggagtcttctaaggttatcctttgttttattttatactttgtgttctctttaatatggtttttcagcaccagtattttacaaatcagctctataagctgagaatctcattgtttttaaacttaagatcagttttatt

SEQ ID NO: 96598 - DNA, 515 bp, Homo sapiens
accagggacatagagagggaccttggctagtgtcccaaggaagcctgaggcccacattctgggaggataatcaggaagatgggcccatctgagaggagccacaatttagatgtgagctaatgagcaatcttgagcatggacacaagagcggtacaatctatggcyccaaattccctctaggtagctgtgcatctgttgaaccttcaataagcagctgtgagcaaatacatgccaggcctcttatgtcatctgaacaggactctaaatgtaccttcacctttgctttaaaactgagagtgagccaggtaacaaacctgcacgtgtacctcctgtttaagataaaaatagaaaaaaaaaaagaaagctgtaagtgaaccaggagtcttctaaggttatcctttgttttattttatactttgtgttctctttaatatggtttttcagcaccagtattttacaaatcagctctataagctgagaatctcattgtttttaaacttaagatcagttttatt

SEQ ID NO: 96599 - DNA, 560 bp, Homo sapiens
ccccattcaataacaatcatggaacaatgaaccctacacaattttcaagcaagaggagggggaaagattaggttaccagtaagaaggaggcaggaagaccagtctcagagaattctgagcagtgagcgtggagtgagtgagccaagaagcagcggccaacgatgcctttcctgcctgtggccgtccccagtgggattccagaacccttacgakaaatcgcctgtgacagttttcagcccacataagacagggcgactaacatttgacctttctggtgattacctgtaggcaggagtggtattgacactgggatttggccagtgctaattgctactgccttgctccactgccagcacatccccaaagggattccattttattgcattcccgaatgttctctctaccgcttgggtttttccttaacagttttttttattttatcctttcttaagagagggcagcaattctgtgttcattgaagtcttccataaaagagtgcctgtactctgaaggcactattttgacctttcagaaaatctggaccatataaggcaaatgac

SEQ ID NO: 96600 - DNA, 584 bp, Homo sapiens
gggtcacatctcaataaacccatcttaagttgaaaatactgtaagccaaaaatacgtttaatacacttatcctgtggtacatcagagcttagtctatcctacctcaaatgtgctcacaaaacttacattagcctacagcttggcaaaataatctaacacaaagcctattttataataaagtgttgactatctcatgtaatttattgaataccttaccagaatccaataaatggttgaaaataaaaaatagaatgggtatatgggtactcaaagtatagtttctactgaattcctatcacttttgcaccaagttgaaaaattgtagtgaaacaattgtaaattggggacatctgtagatggaaaaataggcacatgaaaaagaagctcaacataattggtsactagggaaattaaggccacaatgagatgccactacactcctatcagaatgacaataaaaaaaaatctatcaatactaagtgatggtaagggcatggagcaaatggaattctatgcagagctcgtggaaatgcaaagtgctacagccactttggaaaacagtttcttctaaagctactcatgca

SEQ ID NO: 96601 - DNA, 602 bp, Homo sapiens
aggaacacttacttgtccttcatatttttgagtggaagacagtaaaattaaaacaaaggagcagccaggcatggtggctcacgcctgtaatcccaacactttgggaggccaaggcgtgtggatcacctgaggttaggagttcaagaccagcctggccaacatgttgaagccccctctctacaaaaaatacaaaaattagctggcgcagtgacaagtgcctgtaatcccagctactcaggagkctgaggcaggagaatcgcttgaacccgggaggtgcaagttgcagtgagccactgcactctagcctgggcaacaagagtaaaactccatctcaaaaaaaaaggaaaaaaaaggagcaattcaataaaatgatagaaaaaaattggtgtgtgtgtgtgtgtgttctcacgtgcatgcatacacacaccggacaatcaaaacacatttttttttagttccatgcatgtgttctttaagtgttcacattatttaccaaagtgtttaataatgaagaatatattgcaatgagactattcccagagaatggaattgtcagatgctgtttttattccattaatatatttcatccactgtatgttgtg

SEQ ID NO: 96602 - DNA, 575 bp, Homo sapiens
gcaagtagggaagatattgctaaattcttttcctagcaaggaatattaataattaataccctggggaaggaatgcattcctggggggcagtctrtaaacagccactcggagtatctgtcctatgcggttgagataaggactgagatacgccctggtctcctgaagtaccctcaggcttattagggtagggaaaaaactccacccttgcaaatttgtggtcaaaccagttctctgctctcgaactctgttttctgttgtttaagatgtttatcaagacaatatgtgctcagctgaacatagacccttatcagtagttctgattttgcccttgtcctgtttcctcagaagcatgttatctttgttctgccttttgccctttgaagcgtgcgatctttgtgacctacaccctgttcgtacaccccccaactttaaaatcctcaataaaaacttgctggttttgtggctcaggttggcatcatggtcctaccgatatgtgatgtcacccccagaggcccagctgtaaaattcctctctttgtactctttctctttatttctcagccggccaacacttat

SEQ ID NO: 96603 - DNA, 373 bp, Homo sapiens
tgtcacaataactcagtgtctctgagcctcacttaccttaactgtaaatatgaacagcgaggattcatacagcagccatgaagttcaatataaggggtcttgcacaaaacttactcttcaaaagtgctcaaaaatatgtttccytctttcttcttcagtctattatatctagaatgcattagaaggcagttgaatgccaaaaaggaactcccagccattatttcacagcatatgtgtgaattgctagctttgctcttattgtaagtggctcggtttaatttctctacaactgaggggaaatgtccggcttcatagcccagaatacatgctttgtgatgtcttgatggattttattgattttatttcacaccac

SEQ ID NO: 96604 - DNA, 572 bp, Homo sapiens
gggattactagataggtattttgtaggatgcttttctattgaaatgtatccgatgtttttctcatgattagaatggagttgtgggttttggggaggaagatcctagaggtaaagtgccacttccattacgtcatcatagcaaggatctggcattaatttcctagagctgtcatcacaaaggaccacatactgggcagctgaaaacaccatgcatttattttttcacagttctggagaacggaagtctaaaggcaaggtgtcggcaaggtcctgctgctgctgaaagccgcagggggcagcctgccatgcttcttcctgccttccagggatttccctcgctgctgcggctggctctgcatcacttccctcatgtagcgttctcccctccggggtccatttctcttcacctcttctaatcaggatactagccatattggattaagggcccactctactccagtgtgacctcatcttagctaattacatctgcaatcactatttgcaaataagstcacagtccgaggttgcagggaggatgtgagctttgggaggacgtgattcgacccagtaaa

SEQ ID NO: 96605 - DNA, 402 bp, Homo sapiens
atctgagaaaggtctcagttaatttagaaagtttattttgccaatgatgatggtgtgacacagcctcaggagatcccaatgacatgtccccaaggtggtcagagcacartttagttttatacattttggggagacttgagacgtcactcaacatacgtaagatgaacattgtttgggtctggaaagacagggagggggcttcccggtcataggtagataagagacaaatgtttgcattcttttgagtttctaattatcctctcaaaaggaggcaatcagatatgcatttagctcagtgatcagaggggtgactttgaaagaatgggaggcaggtttgccttaagcagttcccagcttgacttttccctttagcttagtaattttgggggctcaagatatttc

SEQ ID NO: 96606 - DNA, 575 bp, Homo sapiens
  misc_feature (1)...(575): n = A,T,C or G
cacacgtgtgtctatacatatcctatctatacatattgaggattaacaggtgctagtagaaaatattaactttctttgtattaacaggtgttagtagaaagtagtagtaggtgctaagataaaagccataattaaacctcctggtgaatgaacacaccatcacctacaatcttaccaaaaatagaaccaagcacgtgtcctagtcaaacctctggattcaactgtcatttggataaaacgcaaaggatagtgaaaatgtcgatcttcactgagagtctcaccagcaaawttcacagtgtggacatcaagtgacaaaaatcccacatttttcaacaaatatattgtatgggaaagaaaactttgaaaagaaacctgtatgttagaagggattttaaaaacacgacaaatgaaaacaatgcgcaagactaaatcatagtgtcttggaatgcatgcatgaaggacacagccgtgaaaatgcaaggacgcctctactggaacagtcacgtttatcgtcacttttcaggagaaaggtggctgcaacntgaggagagtcacatgcaggacttcagggctgg

SEQ ID NO: 96607 - DNA, 575 bp, Homo sapiens
  misc_feature (1)...(575): n = A,T,C or G
cacacgtgtgtctatacatatcctatctatacatattgaggattaacaggtgctagtagaaaatattaactttctttgtattaacaggtgttagtagaaagtagtagtaggtgctaagataaaagccataattaaacctcctggtgaatgaacacaccatcacctacaatcttaccaaaaatagaaccaagcacgtgtcctagtcaaacctctggattcaactgtcatttggataaaacgcaaaggatagtgaaaatgtcgatcttcactgagagtctcaccagcaaatttcacagtgtggacaycaagtgacaaaaatcccacatttttcaacaaatatattgtatgggaaagaaaactttgaaaagaaacctgtatgttagaagggattttaaaaacacgacaaatgaaaacaatgcgcaagactaaatcatagtgtcttggaatgcatgcatgaaggacacagccgtgaaaatgcaaggacgcctctactggaacagtcacgtttatcgtcacttttcaggagaaaggtggctgcaacntgaggagagtcacatgcaggacttcagggctgg

SEQ ID NO: 96608 - DNA, 575 bp, Homo sapiens
  misc_feature (1)...(575): n = A,T,C or G
cacacgtgtgtctatacatatcctatctatacatattgaggattaacaggtgctagtagaaaatattaactttctttgtattaacaggtgttagtagaaagtagtagtaggtgctaagataaaagccataattaaacctcctggtgaatgaacacaccatcacctacaatcttaccaaaaatagaaccaagcacgtgtcctagtcaaacctctggattcaactgtcatttggataaaacgcaaaggatagtgaaaatgtcgatcttcactgagagtctcaccagcaaatttcacagtgtggacatcaagtgacaaaaatcccamatttttcaacaaatatattgtatgggaaagaaaactttgaaaagaaacctgtatgttagaagggattttaaaaacacgacaaatgaaaacaatgcgcaagactaaatcatagtgtcttggaatgcatgcatgaaggacacagccgtgaaaatgcaaggacgcctctactggaacagtcacgtttatcgtcacttttcaggagaaaggtggctgcaacntgaggagagtcacatgcaggacttcagggctgg

SEQ ID NO: 96609 - DNA, 520 bp, Homo sapiens
tgttagaattcagcaatgaagttttctggtcctgggatgttctttgatgggagatgttttattattgatatactctccatactcagtattgttctgttcagattttatctttcttcttgactttctctaggtaagttgcatttttctagaaattatctgctttttctaggttatccaatttgttggcttgtaattgtttatagtggcctcttatgatcctctgtatttctgtggtattagttgcaatatttcctctttcatttctgattttattgctttgagtattctctcatttttctagtctagctaatggtttgtcagttttatcttttcaaagaacaaattcttagtytcattgatctgttctattttctttcacagtcttttttgtatttgaaggacttgtatttgttaactggctcaagcctggacatttgttgaggtgctatgagtctctattgctctcatttctcttcactagacatagaaattttctgattacacgaatcaaataagacta

SEQ ID NO: 96610 - DNA, 535 bp, Homo sapiens
tgccataatttatcttagaccccaaaactcacagaggcacacatcatatctctaatactgctcaccaccacggcatgagtctctctctatcctcttctacgtgaagtgattatactgtcacctctggagctaactgtcctacagtctcaagatgcacacttttacaaccagaagcctatggactgggtgagggagcagaaacagccacaggtactgcccatcagggtaatgtaagtcagcrtgcaaacaactgatcagatgaacatgaatagcaaggtgccgaggcactgggaagagggaccggaaaactctataactgttgaaaaagactcaagcccttgggaagggaaatgcctacgaaattatataaagaccattttatccaagttggtcatcattcagatgaaaaccatgaggcccagaaaagtaaactgagtttccagaattcacacaattgatagaataggaaccagaattcaggcctcttgcttcctattccagaaagacaaattgcaataataatcaaataatatga

SEQ ID NO: 96611 - DNA, 399 bp, Homo sapiens
agaggcacacatcatatctctaatactgctcaccaccacggcatgagtctctctctatcctcttctacgtgaagtgattatactgtcacctctggagctaactgtcctacagtctcaagatgcacacttttacaaccagaagcctatggactgggtgagggagcagaaacagccacaggtactgcccatcagggtaatgtaagtcagcgtgcaaacaactgatcagatgaacatgaatagcaaggtgccgaggcactgggaagagggaccggaaaactctataaytgttgaaaaagactcaagcccttgggaagggaaatgcctacgaaattatataaagaccattttatccaagttggtcatcattcagatgaaaaccatgaggcccagaaaagtaaa

SEQ ID NO: 96612 - DNA, 630 bp, Homo sapiens
tgattgacaagtaagactaataatcccagatcatagtaaggtcttaacttcaagtcaataatctttattacttatggttcattcctctccctcatgttttccaataattttaaaatgcataattaaaacaattctcatttaaaaacatagtagccatgactaatgatcttccagtgggaaggtactaagactttacaacatgtttcttgctggggataagacagcctacagccagcattcaactcatttttctaaagtctatggatcaatttgaaatacagaaaaagtagaacagagataaagttaaaaaaagattaaaaatatgggaagaatgggagaaaggggagattagaagatatgaacaatgatttaaaaataaaagagcctcaaaggagaagagaaactgctaagcaagactaaggtaggatgaaatacagtagtctctgtttctgagaacacaggttaaaaagaacataaataaaataaatttatcacctttaatacactcattcaaggatgctactgagtttgactttgggaatttctcacctttaatacactcatctggggatgctacggactgtgacattgggttgcatttaamgggggagagaaagggcagttgcttct

SEQ ID NO: 96613 - DNA, 509 bp, Homo sapiens
gcattgggtagtctatagtcggcattcaagaggtacttcrgaagccaatctctacccaaatctttgctttattgctatagattattaagcagttccaacttacagacacaaagaatgacttgggattcaaattaaaacgagtttaaataggctgcaaaagctttcctcagcagagtgacttctgcattaaaaagccaaatgaatgcatatcaccattcaggcagaggaaccaccattttctacactctaagctgtaatgtctactcttaaaaaatataatagaatttacataaaatattaagtgaattgcatattatatcactgcacatcgtacctgtttgatacataaaagtaaaaacttgtttagtttatcttttgttagtgcattatccatcagatcatgctcaattgtgcttaaaagacaaaacaaatattatctaagccttaaaatagtcatgtattcattcattcattcaataaatcaattatttgtctttttaagcattcat

SEQ ID NO: 96614 - DNA, 509 bp, Homo sapiens
gcattgggtagtctatagtcggcattcaagaggtacttcggaagccaatctctacccaaatctttgctttattgctatarattattaagcagttccaacttacagacacaaagaatgacttgggattcaaattaaaacgagtttaaataggctgcaaaagctttcctcagcagagtgacttctgcattaaaaagccaaatgaatgcatatcaccattcaggcagaggaaccaccattttctacactctaagctgtaatgtctactcttaaaaaatataatagaatttacataaaatattaagtgaattgcatattatatcactgcacatcgtacctgtttgatacataaaagtaaaaacttgtttagtttatcttttgttagtgcattatccatcagatcatgctcaattgtgcttaaaagacaaaacaaatattatctaagccttaaaatagtcatgtattcattcattcattcaataaatcaattatttgtctttttaagcattcat

SEQ ID NO: 96615 - DNA, 509 bp, Homo sapiens
gcattgggtagtctatagtcggcattcaagaggtacttcggaagccaatctctacccaaatctttgctttattgctatagattattaagcagttccaacttacagacacaaagaatgacttgggattcaaattaaaacgagtttaaataggctgcaaaagctttcctcagcagagtgacttctgcattaaaaagccaaatgaatgcatatcaccattcaggcagaggaaccaccattttctacactctaagctgtaatgtctactcttaaaaaatataatagaatttacataaaatattaagtgaattgcatattatatcactgcacatcgtacctgtttgatacataaaagtaaaaacttgtttagtttatcttttgttagtgcattatccatcagatcatgctcaattgtgcttaaaagacaaaacwaatattatctaagccttaaaatagtcatgtattcattcattcattcaataaatcaattatttgtctttttaagcattcat

SEQ ID NO: 96616 - DNA, 544 bp, Homo sapiens
actgccacaacgtgtcttatctcacatgatgttcttaccatgtgatgttcacgttctcgttgagtcacacaatatatccaccctttccttgaaactggaccaccatttgaccaacctgatcaaaacagtaacgtcaaagcaatgctaagtcataaatacgccaagcacttctgccttgttcccttgagtactgactctgataacccagttatgctgagaagaagctgagtagccatgtggagaaggcacatgaatattttccagctgacagtctcaacttctcagctgacagccaaaaatacatgctggatatgtatgtgatgctgccagactttagctgttgagtctcactttcaagccacccctgttctagctacatggaggagacacaagctgtcccaaytgagccctgccccaaattatagatttatcagcaaaattaatgctattgttgttttaagttactaagctttgtggtgatttgttacatggcaatagctacctaaaacactcatcatgaaccatatcactcctgtgttctgtg

SEQ ID NO: 96617 - DNA, 610 bp, Homo sapiens
ctcagttcatgtatctctatggaggttatcaggcatgtttcctcttctgtctcatcatcatgacaacctagactgacctgtcatattacactgtccctcttgcctgttggaatgacagcaagacatgtcttatctttactgtgatttggttatatggatgctagagagggcatgattatacatcattgaaatcaaaagttgagctaggtgtggtggtgcatgcctgtagtcccagctattcagaaggctgaggcaagagaattgcttgagcccaggagttcgaggctgcagtgagctatgatcatgccactgcactccagsctgagtgacagagtgaaatcctgtctcaaaaacaaaacaaaacaaaacaaaactaattattttttaaaattaataaaaccaaacaaaaaacaaagttttaagttgttaggcttagagtagcttaacatagcatgatgcttcctgataataaagtgagcacacagagagtaatacagtcaagaatcccagtggcatgattttactactagatccagatggcccaagccgagatcccactcccccatatgtttgaatactggtgtattattagttacttaatagtttttag

SEQ ID NO: 96618 - DNA, 495 bp, Homo sapiens
catatggaaaaaccagtggccaaaaactttcagaatttgacttaaaaaaaaattaaatacacatccaaaatgttcaataaacctcaagtaggataaatatgtagagatccacacctagacaaatcataggcaagcagtcagaagacagaaagaaatagaaaaacaagcaagagaaaaatgacttattactacaagaggyaacaatgcagttaacagctggcttcccatataaaacaatagagggcaaaaagcaatcaaatgaaaaaactgttaaccaagagttccattatccagaaaatctttcttcaagaatgaaggtaaaataaagacattaccatataaacaaagacaaaataattcattatttctaaaatcttacaaatatattgcaaaattaataaatccagatgtaaaatatcacatgcatattatttggtttatatttaactcaataacaggaagaaaaagtttgatattggataataaggccggaca

SEQ ID NO: 96619 - DNA, 521 bp, Homo sapiens
aaaaccagaagtagaaaataaaaaggaaggagcagaaaacatatggaaaaaccagtggccaaaaactttcagaatttgacttaaaaaaaaattaaatacacatccaaaatgttcaataaacctcaagtaggataaatatgtagagatccacacctagacaaatcataggcaagcagtcagaagacagaaagaaatagaaaaacaagcaagagaaaaatgacttattactacaagaggtaamaatgcagttaacagctggcttcccatataaaacaatagagggcaaaaagcaatcaaatgaaaaaactgttaaccaagagttccattatccagaaaatctttcttcaagaatgaaggtaaaataaagacattaccatataaacaaagacaaaataattcattatttctaaaatcttacaaatatattgcaaaattaataaatccagatgtaaaatatcacatgcatattatttggtttatatttaactcaataacaggaagaaaaagtttgatattggata

SEQ ID NO: 96620 - DNA, 496 bp, Homo sapiens
ggccctgcctctgccctggactggcgctggcactggcatggaccctggccctggccctttgctacttaaggccataccctggcccagccctggtcctgaccctgtcctggccctamtttggcctggctctaccccggcatgctattctggccctagccctgaccctgtccctgtccctgtcctggccctagccccattgctggtcctgccattgcccttgtcctgatattgccctttcctggtcctggccctggccttgtcccagccctgctctggccctggtctgaaccctggccctgcaatggacctgccttggtcctgcccagaccctggctctggccctacctctaccctggccatacccttgccctggcctggaccccggtcctggtccttgtcctgccccagccatggccctggccctgccctgcctgtgccctgttctatcctgggctggccctgccatggcctggtcttgccattgccctgccctagc

SEQ ID NO: 96621 - DNA, 258 bp, Homo sapiens
ccattatactgtcacagagcacctttttccaaaataaatcacagtctatggaaactcattacatataattattataatttcagaaactctgagttctattttttctctaatctacctattttaatttttgaaataatattgatatattattaattaatgtgaactatggataatcaaatatatattataattactraacaataatggaatatacttaatcaacaagatacctcttgcaaccctatgtttaaagatgag

SEQ ID NO: 96622 - DNA, 620 bp, Homo sapiens
ttcccctaagtacaatgcttctgatgttgctccacagagggtggagtcttgaacacaattatagtcaccctcagatggcagtggcttcctcagcattctttttctctgtcttcccctcatgatgtagcagataagctccactaattgcctgctgtttgctcttttgtttgcaacaatgtctaggggaatgcattctatacaggcttgtccaattcaatttggacccctgcaggatacattttgaggttagtactcaatatatgttctgatctcaggaggctatttttaccagtctattttcctggttttctctgatagactagttagcctgcaagttagtttgcaagttcatctgtaatgaaggtaccagtcttctcttaattacttttcaccataatctccattgtttttgaaagaaccactgagcttaacttccccacattctgatgcaaagtcagttctttgggggaagtttcgtagcactcctttttgtaacctgtctctccatctgggcaaaatcccygaatcactactttgtagttggaaacagacacaatggcccacttctttcagcatgacacctctgaattagaaacgggttatttgacagagggaagtca

SEQ ID NO: 96623 - DNA, 620 bp, Homo sapiens
ttcccctaagtacaatgcttctgatgttgctccacagagggtggagtcttgaacacaattatagtcaccctcagatggcagtggcttcctcagcattctttttctctgtcttcccctcatgatgtagcagataagctccactaattgcctgctgtttgctcttttgtttgcaacaatgtctaggggaatgcattctatacaggcttgtccaattcaatttggacccctgcaggatacattttgaggttagtactcaatatatgttctgatctcaggaggctatttttaccagtctattttcctggttttctctgatagactagttagcctgcaagttagtttgcaagttcatctgtaatgaaggtaccagtcttctcttaattacttttcaccataatctccattgtttttgaaagaaccactgagcttaacttccccacattctgatgcaaagtcagttctttgggggaagtttcgtagcactcctttttgtaacctgtctctccatctgggcaaaatccctgaatcactactttgtagttggaaacagacacratggcccacttctttcagcatgacacctctgaattagaaacgggttatttgacagagggaagtca

SEQ ID NO: 96624 - DNA, 613 bp, Homo sapiens
aaaaatcaaagacaagatccatatggatgttaacctccgtgtgtcataacttagaagtrcgttgcttggattttttttcttactatagccctagatgtttgggcttacccttaatcgcagttgaataaagagtaaacaatacgcatattctcaatctgtgataagtattctatttgacttactatttttcaccccattacttccagtgatccagggagaatatgggcttctgtagcatccttgactgcctttctatactcctaggaagtgtaatggtctccctcttcatctggtaactgataccattaattagacctgacaaattaatgataggctatattaaccacatttgtctaagcatttcacagatatctcctgcttccagtgagagtcagttagacttaaataaaatatttcgaatcctgaatttccccataaagccaggttccctagtcccaaaattatctctaataggatttttttaagttattgtggtgatggtttaccagtgtacacacatcaggtaattataatacttgtaccataaaatagcagccctgttgacgaaaatatagcaaccagataaaacatatacttgttttgaagacaacat

SEQ ID NO: 96625 - DNA, 576 bp, Homo sapiens
atttgttgttacgtgcatacaggtttataattgttagatcttcttgatggattattacttttgtcattacaaaatgtactactttgtttcctgtaaaaaattctaccttaaagtccattagtctgacattagtgtagctaccctaatgcacctttagttactgtcyatatggtatacttatttgcatttttttactttaaatcaatttgtttctttgaatttaaagtctctgtaaaggaatatagttctactaagtttttagatctattctgccaactccaattttgacctgaaaatttaatccattttcctttaaattaattagtgataaagaaacaataattgctaccattttgctatttgttttctgtatgtcttatttagttttgtcctcaatccctcctgactgccttctcttgtgtaatatcagtatttctaaagtattatttaattattctttttttacaatcattttgaaattttctcttagtggactttctaggaattataactaacatcttagttattagcaatcttatttggattaataccaactcaatttcaatagtgtacaat

SEQ ID NO: 96626 - DNA, 576 bp, Homo sapiens
atttgttgttacgtgcatacaggtttataattgttagatcttcttgatggattattacttttgtcattacaaaatgtactactttgtttcctgtaaaaaattctaccttaaagtccattagtctgacattagtgtagctaccctaatgcacctttagttactgtctatatggtatacttatttgcatttttttactttaaatcaatttgtttctttgaatttaaagtctctgtaaaggaatatagttctactaagtttttagatctattctgccaactccaattttgacctgaaaatttaatccattttcctttaaattaattagtgataaagaaacaataattgctaccattttgctatttgttttctgtatgtcttatttagttttgtcctcaatccctcctgactgccttctcttgtgtaayatcagtatttctaaagtattatttaattattctttttttacaatcattttgaaattttctcttagtggactttctaggaattataactaacatcttagttattagcaatcttatttggattaataccaactcaatttcaatagtgtacaat

SEQ ID NO: 96627 - DNA, 576 bp, Homo sapiens
atttgttgttacgtgcatacaggtttataattgttagatcttcttgatggattattacttttgtcattacaaaatgtactactttgtttcctgtaaaaaattctaccttaaagtccattagtctgacattagtgtagctaccctaatgcacctttagttactgtctatatggtatacttatttgcatttttttactttaaatcaatttgtttctttgaatttaaagtctctgtaaaggaatatagttctactaagtttttagatctattctgccaactccaattttgacctgaaaatttaatccattttcctttaaattaattagtgataaagaaacaataattgctaccattttgctatttgttttctgtatgtcttatttagttttgtcctcaatccctcctgactgccttctcttgtgtaatatcagtatttctaaagtattatttaattattctttttttacaatcattttgaaattttctcttagtggactttctaggaattataaytaacatcttagttattagcaatcttatttggattaataccaactcaatttcaatagtgtacaat

SEQ ID NO: 96628 - DNA, 357 bp, Homo sapiens
cacctcaaatttaactaataaaaatttatgacttggcaaacaccccaggtatttttattgactaacaaatcagctatgacaatcttagcaacaaatcaagttatgctatggggtatgtccacacttycctgttccctctacaacaggagaaaatcaaatctttccaacatcctaacaaactgttactccctgtaaccaaatgtatcacagtatcgtctaccaaggcgttacatcctgaaactttcctacaaaaagcacagcttcaaagaaaccttgcaagctttcttgtaagctcctcccttcccacatcgcccctccccagagccaagaaataaagcacttgaaagaaacaacatg

SEQ ID NO: 96629 - DNA, 357 bp, Homo sapiens
cacctcaaatttaactaataaaaatttatgacttggcaaacaccccaggtatttttattgactaacaaatcagctatgacaatcttagcaacaaatcaagttatgctatggggtatgtccacactttcctgttccctctacaacaggagaaaatcaaatctttccaacatcctaacaaactgttactccctgtaaccaaatgtatcacagtatcgtctaccaaggcgttacatcctgaaactttcctacaaaaagcacagcttcaaagaaaccttgcaagctttcttgtaagctcctcccttcccmcatcgcccctccccagagccaagaaataaagcacttgaaagaaacaacatg

SEQ ID NO: 96630 - DNA, 331 bp, Homo sapiens
ccacctctgcgacagcactcctttcgagggggcaccagctgcagggagtctgtcccttacagacccgtgaccccgtgacagatgaataaagtacagacacacagatattctgctctgccagtccagctgagggtyccagccgcttataggctccctgctgagtcctgtaaacagttgctacttggccctgatcagctagtcagacgcgcatttattcagtatgattaattaacaaaagcttgagtcaacaccattagagtgtaacagacattgtggacttcccgagtaaaaagcatttaagcacccagggtcttaagattatatgagtaaa

SEQ ID NO: 96631 - DNA, 331 bp, Homo sapiens
ccacctctgcgacagcactcctttcgagggggcaccagctgcagggagtctgtcccttacagacccgtgaccccgtgacagatgaataaagtacagacacacagatattctgctctgccagtccagctgagggtcccagccgcttataggctccctgctgagtcctgtaaacagttgctacttggccctgatcagctagtcagacgcgcatttattcagtatgattaattaacaaaagcttgagtcaacaccattagagtgtaacagacattgtggacttmccgagtaaaaagcatttaagcacccagggtcttaagattatatgagtaaa

SEQ ID NO: 96632 - DNA, 331 bp, Homo sapiens
ccacctctgcgacagcactcctttcgagggggcaccagctgcagggagtctgtcccttacagacccgtgaccccgtgacagatgaataaagtacagacacacagatattctgctctgccagtccagctgagggtcccagccgcttataggctccctgctgagtcctgtaaacagttgctacttggccctgatcagctagtcagacgcgcatttattcagtatgattaattaacaaaagcttgagtcaacaccattagagtgtaacagacattgtggacttcccgrgtaaaaagcatttaagcacccagggtcttaagattatatgagtaaa

SEQ ID NO: 96633 - DNA, 549 bp, Homo sapiens
cacctacaaccatatgatatttgacaaggctggcaagaacaagcaatggggaaaggactccctagtcaatacattctgggataactggcttgccataggcagaagattgaacctagacctttaccttgcaacatgccccaaaattaaatttaaatggattaaaaatttaagtgtaagacctcaaactataaaaattctggaagataacctaggaaatayttttttgacatcagccttggcaagtcgtttttggctaagtccccaaaagcaattgcaaccaaaacaaaaatagacaagtaggacttaatttgactaaatagcttctgcacagcaaaataaactatcaacaggggaaagaggcatcctccagaatgggaggagatattcacaaactatgagtctaacaaaagcctaatatccagactccatagggaactcaaatcaacaagccaaaaaaaaaaaaccattaaaaaataaaaaatgggcaaatgagatgaacagatatgcctgaacagaagatatacaagtggccaacaaacatgaaaaatt

SEQ ID NO: 96634 - DNA, 540 bp, Homo sapiens
acaagccaaaaaaaaaaaaccattaaaaaataaaaaatgggcaaatgagatgaacagatatgcctgaacagaagatatacaagtggccaacaaacatgaaaaattgctcagcatcagtaattatcagataaatgcaaatcagaaccacaatgaggtaccatctcatgttagtcagaatggctattactaaaaagtcaataaataacatgttggcaaggctgtgcagaaaaggaaacactttacgtcactggcaggattgtaaattagttcagcaatcrtggagagcagtctcgagatttctgaaagaacttaaaacagaactaccaatttacccagcaatcctacaactgggtatatacccaaaagaaaataaatcattctaccaaaaagacatatgcacttgaatgcatcactgtgctattcacaatagcaaagatgtgggatcaatccagatgcccatcaatggtatattggataaagaaaacctggtatgtatacaccatggaatactacacagctgtgaaatataatgaaatcatg

SEQ ID NO: 96635 - DNA, 540 bp, Homo sapiens
acaagccaaaaaaaaaaaaccattaaaaaataaaaaatgggcaaatgagatgaacagatatgcctgaacagaagatatacaagtggccaacaaacatgaaaaattgctcagcatcagtaattatcagataaatgcaaatcagaaccacaatgaggtaccatctcatgttagtcagaatggctattactaaaaagtcaataaataacatgttggcaaggctgtgcagaaaaggaaacactttacgtcactggcaggattgtaaattagttcagcaatcgtggagagcagtctcgagatttctgaaagaacttaaaacagaactaccaatttacccagcaatcctacaactgggtatatacccaaaagaaaataaatcattctaccaaaaagacatatgcacttgaatgcatcactgtgctattcacaatagcaaagatgtgggatcaatccagaygcccatcaatggtatattggataaagaaaacctggtatgtatacaccatggaatactacacagctgtgaaatataatgaaatcatg

SEQ ID NO: 96636 - DNA, 540 bp, Homo sapiens
acaagccaaaaaaaaaaaaccattaaaaaataaaaaatgggcaaatgagatgaacagatatgcctgaacagaagatatacaagtggccaacaaacatgaaaaattgctcagcatcagtaattatcagataaatgcaaatcagaaccacaatgaggtaccatctcatgttagtcagaatggctattactaaaaagtcaataaataacatgttggcaaggctgtgcagaaaaggaaacactttacgtcactggcaggattgtaaattagttcagcaatcgtggagagcagtctcgagatttctgaaagaacttaaaacagaactaccaatttacccagcaatcctacaactgggtatatacccaaaagaaaataaatcattctaccaaaaagacatatgcacttgaatgcatcactgtgctattcacaatagcaaagatgtgggatcaatccagatgcccatcaatggtatattggataaagaaaacctgrtatgtatacaccatggaatactacacagctgtgaaatataatgaaatcatg

SEQ ID NO: 96637 - DNA, 560 bp, Homo sapiens
acatctttgcaagtgactaacaattggtgccatgagcagactgttcagacattgcccaccaacctgaggatctgtcttctcttgctaagttgctctgctgcttaatgtctggcatgtactttgacctgctgcttccggaggagttagtgctttgagctgtgccgctctgtttattgttctgccaaatttgtgaactaaaaactcagacttccacattacagggggaaatgacacaaatcgtggggtttgattcaaacataataaatctttaaatttttatcatgcaatatagtcacaaacgaatgaataaaacatttatcataagttttagtgataataatgaaaacattcttagaatcaagawttattacatatatttataatatatatataattaatatatataatatataaatatattttatattataaatatatataattatatataaatataatatatatttataatattttatatagaaatatatatatttataatataattatatatatattttttttgcccccgccgccgcggattcttgcccccgacgcca

SEQ ID NO: 96638 - DNA, 593 bp, Homo sapiens
gcttgcccagcagagctctcttgatccagctagaactggccagaactgactcactcaggaatgtgtagactttggcatcaggggctgctttaatttgcacaatttccaaatacctcttttttcttctttttctgatgagtcatctccctagacttgcattttaaagagatagatagttatcaggttccagagaagacgtggtagaacatttatatctcaaagacacagagctgagacttcaggttkagatatgataatttgcctaaaccaaaaaggaaggtgtaggtaaagttctagtcaagacaggatggccaggaaaaacaccttaaaccaaaggatggcttgctttgctgatttaagccaatggcttctttatcataagacttcccagtgatttagtcctccctctcttccagtgcacagagacatacccctccttacaaattaaaaatgttctttatagatggaaatttattttacaaaaatgtttcaaaataaccagatgaaaatcatccttatgccagaaagactttatttttttattactagaaatgaaacactaagtatttgttgtattgacatacttaggctta

SEQ ID NO: 96639 - DNA, 597 bp, Homo sapiens
aattattccctggcattactttttaaaaaacaatgctaaaaatgggcccccaatctcttctggattgtaaggtttcttctgagacctccactgttagtctgatgggtttctctttataggtaatatgaccatttctatagctgcctttaagattttcttttcttttggtttgaccttgtatagtctgatgactatgtgccttaggaatgataaccttgtagagtatctcataggcatgccctggatttgctccatctgtatgttgacctrtctagcaatattgtagaaatttttctgaattatatcctcaaatatgttttccaagttgattactttctcttcttatctctcagcaatgccaataaatcatatatttggtcactttatatgctcccatatttcttaaaggctttatttatttgctattcttttttctttgttattttctaatgtggctgattcaaaggactttgacctctgaaattctttcttcttcttggtttagtctgttgttaaggcatctaactgtattttgaaatacctgtagtaagttttttaactccttatgttctgattggctcttttaaaatatagata

SEQ ID NO: 96640 - DNA, 579 bp, Homo sapiens
ttttaataagcacatctgtgcattttctgtctcttgacttcgggaggaaccacttagaattctgagcttcagtttcctcaatagaaaaatgggaaaattaacccttctttgtgtacatctgaggagcaaggatgttaggaatatgacagtcttgtacaaactgtaaaacatcatatggccstgtagagttgtaatcagaacagtaaagtcctggacaaatcaagcaactcattacacaaagtgttggatgactgagttttaaagcttcaagctcttaatatactattcaacaccctgaaaacataaagttgagaaagggggaaaaaagaagggaaggacagcggcttcttctcaggggacccgaatgcccattaaaatgcatctagcaggggacataaaaccaatgagaaggagcaatttacttttactgctggggcaggagccatgcaactatttttactaactacggctgttcccgtctattagagtacctaaaatatttatgatcactgtctctgtgtgaaacactgtctgtcgcaagcagaaacattaacctgtgttggaatgtgtttgttgtca

SEQ ID NO: 96641 - DNA, 572 bp, Homo sapiens
ttgggtttaatgcttcacacaatggcacatttacaagaggtacaaaacacttattgagctttcagggccactgtaaggggcttgcagaatagcctctttgcaacccagagaattaatctgattcctctttcctcagcccacgcctacctccaacttcaattttacaggagtagtttcccaagagtccccaccccctccatttgcagaattaaggaagtggaaggactggagagttcagtgtgkaaaaacgtgtggagtaatctgcttgagacaactgtgttttagaaaaattcaggctgaagtgtggtctcatgtctatgtggctctccatgaactttttttttttttggtattttggcaatacggtcttggtctgttgctcaggctagagtgtagtgggacaatcatagcgcactgcaaacttgaactcctgggttcaagcaatcctcctacctcagcctcccaaagctctgggattacaggtgtgagccactgtgcccaggaactttgaaggtaaggttcatcaaattctcttggtgacctccctttactgaatgaagaggtgcactctg

SEQ ID NO: 96642 - DNA, 610 bp, Homo sapiens
gtttgttagggaatgctcttagaatcaacgcctgttagagagtgggaaaaggttaggaagaggaggaagtcaagaagtactgcttatacaaaactaaccccacaaggagctctacarctaaaatcaagcaacttacttgactgagcaaactcagagtccaactctacacatcctgtaccaattttgctattattctttgcttgtagttcctctagggaatggtattttgaccctcttatcaggttcagcacatctcaagctgttataggtctagtgtccaggatgagagtgaagtgacatccagaggaaactcttgttatctttcagagaagaaatgtctgaattgctttccagcaagaggaacttcctagcttttcaattgtgcaatgtgggccactgctgtaggctcagtagattcaggaaaatatgcaaaatcaagattttcaggttcatcaacttagctgttcccattccatatttttccagtcatatagtatctgctcttataaatttaacatctaatctgtcctctatccaacctagattctgaccttggcatagcaaatctgctttggctttaagttaatctgactagtaaatcctggtcctg

SEQ ID NO: 96643 - DNA, 590 bp, Homo sapiens
tgcacacacacacacacacacacaygaggggacttcaaaaattcatggaaaatgtatattatgaaaaaactgtgcataaatttcaatatttttgcacctaaataaactcgtactagtttgttataacatacgtgaacaagatctactttgaggcactcagaaggacaggacagcagtttgagaagagcccctatcaaagcgatatgtattctgctaatactgaagcaagaacaatcatcaaattcatggcgaaacttggcggtggaagtatggtgaaatcttgatgctttacaaaatgtttatgggaacaatgcccaaaataaattagcaatttcagtttacaaatcaataactcattttataaaggaataagattatgttgatgatgaagcctgcaatggcagactatgcacatcaatttgcaaaaaaaaaaatggtcttgtttatgccctaattgaaaagaactgatgattaacatcaaaaacagcagccaacaccatagacatctcaactgattcagcatacataattctgatggaaaaattaaagttgagcaaactttccacttgagtgcccaaactactgtaccc

SEQ ID NO: 96644 - DNA, 590 bp, Homo sapiens
tgcacacacacacacacacacacacgaggggacttcaaaaattcatggaaaatgtatattatgaaaaaactgtgcataaatttcaatatttttgcacctaaataaactcgtactagtttgttataacatacgtgaacaagatctactttgaggcactcagaaggacaggacagcmgtttgagaagagcccctatcaaagcgatatgtattctgctaatactgaagcaagaacaatcatcaaattcatggcgaaacttggcggtggaagtatggtgaaatcttgatgctttacaaaatgtttatgggaacaatgcccaaaataaattagcaatttcagtttacaaatcaataactcattttataaaggaataagattatgttgatgatgaagcctgcaatggcagactatgcacatcaatttgcaaaaaaaaaaatggtcttgtttatgccctaattgaaaagaactgatgattaacatcaaaaacagcagccaacaccatagacatctcaactgattcagcatacataattctgatggaaaaattaaagttgagcaaactttccacttgagtgcccaaactactgtaccc

SEQ ID NO: 96645 - DNA, 555 bp, Homo sapiens
acacaaacaaaccttgttttacaaattgcttagagatttgattattgcatcatgcattttgttgtaacaagaaaggtgatttaaaatcattagtcctaaaatttaktcctgtgtgtgctttgaagtcaaggggaacaatttgtcagctggttgatcttttgcttctaaagctagttaactgatcaatctaatgtcaaaggaacagagataaatgggagacattttactatgtagaaaacggtacatgaagataaatccaacactgtgctttatttcatctgcagttatctttgtagtaattgctttggaagactcaaggtgctctttgcacatagggagtgttagaagcctttaaatcatctgcatagactagtagcttcttgctgcgaatcttgctttgctccatttttgggtagagaggacaataatctcctactataaatgcaaatttggcaaggaccaaaggttgggattcttgactagttgtttattgaacaatcaattcatacatttctgaaatttcttgacatgcttgcaaagtagatccattcctta

SEQ ID NO: 96646 - DNA, 572 bp, Homo sapiens
gctctttgcacatagggagtgttagaagcctttaaatcatctgcatagactagtagcttcttgctgcgaatcttgctttgctccatttttgggtagagaggacaataatctcctactataaatgcaaatttggcaaggaccaaaggttgggattcttgactagttgtttattgmacaatcaattcatacatttctgaaatttcttgacatgcttgcaaagtagatccattccttattgaattcatttgattttcactatgaccataatgattaaactagttctggagtaaacgtttcctaatgaacagatttggatgtaccagctgttccagttatctctgtacaaaacaacccccccaactatctggcttaaaacaaaagacatatatttcataattttgtaaatcaaaaattgaaattgagtgacaacagcaaaggaaacttaaaaatatttagccatcaatgaactgtagggtccaatataccttcatttacatgtctggtaccttggatgcagggaatgattggaaggcttgtctagtagactcagctgtgactgccaatcagagtac

SEQ ID NO: 96647 - DNA, 572 bp, Homo sapiens
gctctttgcacatagggagtgttagaagcctttaaatcatctgcatagactagtagcttcttgctgcgaatcttgctttgctccatttttgggtagagaggacaataatctcctactataaatgcaaatttggcaaggaccaaaggttgggattcttgactagttgtttattgaacaatcaattcatacatttctgaaatttcttgacatgcttgcaaagtagatccattccttattgaattcatttgattttcactatgaccataatgattaaactagwtctggagtaaacgtttcctaatgaacagatttggatgtaccagctgttccagttatctctgtacaaaacaacccccccaactatctggcttaaaacaaaagacatatatttcataattttgtaaatcaaaaattgaaattgagtgacaacagcaaaggaaacttaaaaatatttagccatcaatgaactgtagggtccaatataccttcatttacatgtctggtaccttggatgcagggaatgattggaaggcttgtctagtagactcagctgtgactgccaatcagagtac

SEQ ID NO: 96648 - DNA, 572 bp, Homo sapiens
gctctttgcacatagggagtgttagaagcctttaaatcatctgcatagactagtagcttcttgctgcgaatcttgctttgctccatttttgggtagagaggacaataatctcctactataaatgcaaatttggcaaggaccaaaggttgggattcttgactagttgtttattgaacaatcaattcatacatttctgaaatttcttgacatgcttgcaaagtagatccattccttattgaattcatttgattttcactatgaccataatgattaaactagttctggagtaaacgtttcctaatgaacagatttggatgtaccagctgttscagttatctctgtacaaaacaacccccccaactatctggcttaaaacaaaagacatatatttcataattttgtaaatcaaaaattgaaattgagtgacaacagcaaaggaaacttaaaaatatttagccatcaatgaactgtagggtccaatataccttcatttacatgtctggtaccttggatgcagggaatgattggaaggcttgtctagtagactcagctgtgactgccaatcagagtac

SEQ ID NO: 96649 - DNA, 521 bp, Homo sapiens
tcacatattgctacccaattacattcaaaacccctcttcaaaccaaccctccctcaaagtggaacaagccagacctcgaatggcttcccttctrttgtagtttccttcagttatatctggctttcttatcatcatatcattaacataatgagggagggtggttgttgccagggcaaccagctggggttagtttttgttgaaaattcagtgcctcatggataaacaccaaccatgttgagctttagtctcatcttttgcttatggtggcaagtatgcaaatactaatacgttctcatcttctctttcttcttgctttctccaccctcccttcctcttgtcttgctgttgcttttcctcctactactcctggaaatcctttcttgtttgtgtgtttgattgttattactccccaagctctctttgaactgtacacttaataacaactcattttgtatctaaccaacactgattgcattgcctccttcaacacaatgaattatactttagagaaacacaatttg

SEQ ID NO: 96650 - DNA, 596 bp, Homo sapiens
agatcaactggtaaggaagcatgttacttgagttcacaagctagtcctgtaaccctgagcaatgtgctccaagtcactgtacctctgttttttcacctctacagtggaggttgagtttggatgagatttcagtacatgagatgcagaatgaaaaacatttagcaagtgtctggcatacagaaatgttcaaactgtgttcgctatagttaagaagagacggtaagaaacagtacagaaattcaaagattgaaaacaagtaaacaaatggttggtttatgtttcacagtggagaaattaacaagagtcagtgcatmtgtaaaggtggagataatcaaccctgctagagaaaaggaagactccaagttcacgtgactcctaggttagcagatgtgcaaatttactagagtcctaggccaatattcaaggacacatgctgccttcaagatggacacgactttcctcacagctctactgttaaggagtgctcagtacatgtcgctaataactctctgcagaattaaataaaaatacactctgggtccaaaattgtctccggcaaggatgtagaaatgcattcaataaatgcataatgattc

SEQ ID NO: 96651 - DNA, 503 bp, Homo sapiens
cagttaactttttttctattcagaaaccagctttatttcctattcagaaatagggctactcttaacaggagtacttattgttaagtaaaagtacatgatgtaatttcttctctagtaaaggtaagtattcaaaaagaacctctggattctcccacgcttgtaggaagttgttcacacagggggatggacctgcatgttagtttgctttcatctatccttgrgaatattgcactcttcagagtataacattcatctgtttgtttgaaactgcttatttgtcaccaatatacatagtttcctttcccatgtcctaatagaaattgttttattgtaaaatatataaattataaactatttcaattgtgcacaaagaacaaaaatattataaataataactatgattcatacaaatacattttatttcaggtgtaattattgggtatataggatggagtaatcctgctctgggattcagtcatgaacaaggtgagcctagctccact

SEQ ID NO: 96652 - DNA, 595 bp, Homo sapiens
aaactcttagccaggctgtctactaacgttctttctcttgacctctaatttctctcagaagaccagagcctatggtgctgatacgatagaaggcatagatttgagcctggatcccattcatcgtttctggyataacctgtgcttttcattttgtttgctttccctttataccctcctgccgtttcccttcttttcgttatctcttcttttctctgctcattgaggatgtttcctctggactttttccccgtcgaacccctccccccaccttcctatcaccttttatactattggaaagtgaatcagacccacaggtgtgtgttcttccagattcgctggccctcatatcatgaagcaccagcgtaagaacaagggcaagccctggctagggaggtggctggacggatatgcagtgcactaaacagaaggggcgttcgttacagcaagagcaagggcagcagacacacacctgctggaaaccagaagaaaatggtccgcagtgactctgagaaattacctttcttgttctgactcctttttttgctcactttggggtcagtgaacttatttattaaaacgtctaccatgccttaag

SEQ ID NO: 96653 - DNA, 500 bp, Homo sapiens
gctaggagatctcatattctgaaatttttagaatgtgggaaggaggatgttcaggagactggggctttgatgagggctgagttgcaaccacagggaacrctaagaaagatgacacagagcaaagcatgagctttgagcaaagaggaggcgaactgatttttttagggtaacaaaggttgagcgtgacagacctgacatgtctggccagctgccctaaggatgggacaaagggaggaaggctatgctgcagagctttgtagaggaagagctacttgaggagaaggaatggagttgttataaagattctggctaaagggaactgagtgatctttgcatctcaagaagtcataaaaatgggatgaatcaggagtcaggaaaagagagggagacctatggagctcacggaaacgtagagaacagccttggagcatcttgaagaggagagagaatggaagcaagatagctccaaaagaatgtctctgtcttactttggttgccac

SEQ ID NO: 96654 - DNA, 563 bp, Homo sapiens
agaatgcagtcagaaaaattcaaagtatgggctacgccacatgataaatggcttgtttccttaataaataaattgcaatgagagagagagcgaggttggggagccgtgtggagaagaagaaaagaaaacagaggaaggagagggatgggaaggaagaggagggaaggagaggagaggaaccacggattaaaagcaacctcctcccagcctccatctttctcctgtgctggatgcttcctgccctcgaacatcagactccaagttcttcaggtttgggagtggggagtctagtcctcaaaaactttttccaggctccarttctctggacagagtcaaattggttccatgtaaaggaactccctaagtcctgtctcacccagccaatgagatggctcctggctggaaggcttttcacccagccaatgagatggctcctggccccaaatgctgttcacccagccagtgagatggctccttgccccaaaggctgtggtcctgatttgggggcgtgccctgacaggtcttcaaaacagagcaggtctcgcccatatcacagcccactg

SEQ ID NO: 96655 - DNA, 528 bp, Homo sapiens
gatctcaagataccttggcaatgtggccctaccctgaagtagctctttcccagggagggagcaggcctgctgcggaggtgggtgacacagtgacacaakccaccagctgccacatcagcctgtgactgactcggcattgtacagaatcgcttccatggcatctaagaccacacccttctggatttgggaggtggcaacatactgagcatgtgctctggtgatgtcagggaagtgagtggggctacagcacccacggggagctccgaagacgggacaagggacgcagacgcttctattgagcagctggcctgggaaggcagttttctcaggtcactcccttgtatttttcaacagacttttaggtgcctacttaaacgggagctgggctcagagttccctagatgatgaggttggccactttttgtctggtctgagtgctgaagtgtgtgtgtgctgcatctgtacacgatgccagcagctccccactgggtcccccaagggtacactttctcgaccacacacacatac

SEQ ID NO: 96656 - DNA, 567 bp, Homo sapiens
tgtttcttttggggctcagaaactgataacccaaagcttggcattttgctgtgctgagtacctgtaattaaaggaaattaaaaggcctcagaagtagcttcagaggcaaakcttctctttgaccttctcctacttctgtcttcatccactctttctcccctgaagtgggtcatagatactagtaataaagaaattctctgacctaccttgtctgcaagccacagaaactacagttcttcttcctcaaggtaaatcttagaaactagaactcctctccaccagcatcaaccataaaacctagaaaggtcactctctcccttcttccttgaagacctttgtcagatacaaaagaagttcctcttcaaagatttagcttgttcagtgtccttgttctttgttccctacttccaaagccaaactaacttccttatcctttgtgcctccctgttttagtttcagtaaacaactttcctgccagtccttatctacagagcccacatctgctacccactctgtaaattacccctctcatcacaatggcttttcctgccaaaactgcccttcctg

SEQ ID NO: 96657 - DNA, 560 bp, Homo sapiens
agaatagtgcatctaatggaattaggatgttattttgttttatagatttgtgcctgttcctgatcaccatatgacaatcttttttcttcaacaaaatcctgtcagtcattcctgccaacatactgagttttggaagcaagacaaacagacttcattaggcttccaatacacatctggaaaagaaaacacattgcaaaactcaattgaattttgtcattttgcagctctggtagcaacagattacagcatgcactcatwcaaagtgtttgtcacttaacatacagagatcagaggacttcagatattgcctcaaaacatgcatgtgacaaattacttatttctacagttacagaagtttaaaattggagggaaagagaactaacttttttttttagatcttttaatgtgctaagtgatttacaaaggaaatattgtcccttttgctatttaaaatatttgtgagggaagccttatctttcagcttggtaagaaggcttacaactagtaattgtgcaggacgtcacaactagtaaatgatacaggcacaagtcaaatatatg

SEQ ID NO: 96658 - DNA, 626 bp, Homo sapiens
gtttaaccaaaagcagaggctgagaaaggggttaagtacaggtatcttatttgggaaataattcataagaaaggtactgaagtgaaatagggaagaagagaaaaccaaaataaagatgcatattatagtaagccactgctgtggatgactagagctttcagcctttctagaacattctgagaagacgtatgcacactatctcagagctatgcatctagaggaataaagggtggaaactgtattaactggcattggttaagtggggtcccaggatcgctaattctcttgcattttctgcttgcttgtgtatgagtgcaccaagtatcctacacagggtattcaagaagcactcargtagaaagtaagagatgtatgacacaggttcacggtgaagagctttgggttgctctcaagccaggctgatgaaagactgtttagaactggtcagtgcagcagtggctagagaaagaggttaggctgggataatttgtgcttggtaagaatacatccattcaagccaaagagaatcaaatagtgagcacttactgtgttctggctacagttctgagcactagatgccaggatgaaaatcataaaaatgtagaccctttgtacacactagtgtg

SEQ ID NO: 96659 - DNA, 626 bp, Homo sapiens
gtttaaccaaaagcagaggctgagaaaggggttaagtacaggtatcttatttgggaaataattcataagaaaggtactgaagtgaaatagggaagaagagaaaaccaaaataaagatgcatattatagtaagccactgctgtggatgactagagctttcagcctttctagaacattctgagaagacgtatgcacactatctcagagctatgcatctagaggaataaagggtggaaactgtattaactggcattggttaagtggggtcccaggatcgctaattctcttgcattttctgcttgcttgtgtatgagtgcaccaagtatcctacacagggtattcaagaagcactcaggyagaaagtaagagatgtatgacacaggttcacggtgaagagctttgggttgctctcaagccaggctgatgaaagactgtttagaactggtcagtgcagcagtggctagagaaagaggttaggctgggataatttgtgcttggtaagaatacatccattcaagccaaagagaatcaaatagtgagcacttactgtgttctggctacagttctgagcactagatgccaggatgaaaatcataaaaatgtagaccctttgtacacactagtgtg

SEQ ID NO: 96660 - DNA, 602 bp, Homo sapiens
actaggttgcttagctgttgtgataaaatatctttcttttcctccttgtccacatagctgagagccaaacatatgtagcaacaaactgaagttagcagtaagatgctattgatggtggagatcttctaaaacatggaaggacaaattatctctatctagctatctacctggaatattcctgcagaggagaatgcttctctagagatatttgtggttcctattgactgaactgaactatcgttgcagctccattttacatactggactttccrgttccaagtctacttgtccccttaaataagaattctgtttttcctgcttggtaattacttacaagatactgggatagacaaaggaaaagaaagaaagctttttagtttccttctgtatcacagaatctgtggtgactcttctatactaaattaacaaggaattcttagttcctcatgtctaagaccttgaatttggccatgaatgctgtctttcaaatctggctcttgaatgtaagtcttttaaattggtttataatcctgagctttcccaacattagtgagagactcagttctcaataattccaatttcaattgcttcagtttctactt

SEQ ID NO: 96661 - DNA, 539 bp, Homo sapiens
cccttctcccttggctgaacttggaagcagcacatccacctccagccctgggactgagtctcctgggggagggaaggaaactttgggtcttgtgctaacgtaaagggatccaggttctctaccccagcctagggtgagcagacagaacttcctggggtgcaaatctcctattccttttccctaagagactctggttctcrgacaccggctgtgagagataacacagcagtccagtggtcagattgatgaatttgggaggaggccttgaaacctctgatggggacacagattgagttgggactcagtgaaactttaccttccagttaggggccaagcttcggaaactgggtcacctgcgatgatgctgaattctgtgtaccaagaatggtaaaagctccgcccaacatggagctcgagcccacgaccctgagattaagagtctcatgctttgccgactgagctagccaggctgatgtaataatacttgcttcccaccctaatactcagaatcctcaaaacaggcgctgcaaaaacaaaaa

SEQ ID NO: 96662 - DNA, 539 bp, Homo sapiens
cccttctcccttggctgaacttggaagcagcacatccacctccagccctgggactgagtctcctgggggagggaaggaaactttgggtcttgtgctaacgtaaagggatccaggttctctaccccagcctagggtgagcagacagaacttcctggggtgcaaatctcctattccttttccctaagagactctggttctcggacaccggctgtgagagataacacagcagtccagtggtcagattgatgaatttgggaggaggccttgaaacctctgatggggacacagattgagttgggactcagtgaaactttaccttccagttaggggccaagcttcggaaactgggtcacctgcgatgatgctgaattctgtgtaccaagaatggtaaaagctccgcccaacatggagctcgagcccacgaccctgagattaagagtctcaygctttgccgactgagctagccaggctgatgtaataatacttgcttcccaccctaatactcagaatcctcaaaacaggcgctgcaaaaacaaaaa

SEQ ID NO: 96663 - DNA, 560 bp, Homo sapiens
cactacatagaaagagtcaccaaataaaaggcttctctaagtgatctgtgtccatttcaggatcttatgaatcaacagaactgactggtctccttgggactgtgttaaacctgaataggatcaggtcatccatccctccttaggtcccctgcagggctgaaggtcacaccagkgcttctttccatgatctgctcaggagccacacagaagggatacatgcctaaacagcatggagacaggacccccaggggtgttggggaacacagcagaactcaaggacttatagcaggagggaaaccctctctctctgccctttgaatggagtccaagcagtgttttccagtgtggtgcacagatgattcttagaattttgttttaaattacttaaaataatttcatccttttaaaatgttttgcatgtttttaatatgcaaggcatattaccatagtggtagaataaagaagtgaggagccctacccccaccagccagtgtgatatcaatggaggccttagtgggggatgtgaagttccaccctccagttgtaatgaggttctcctg

SEQ ID NO: 96664 - DNA, 635 bp, Homo sapiens
gaataaagaagtgaggagccctacccccaccagccagtgtgatatcaatggaggccttagtgggggatgtgaagttccaccctccagttgtaatgaggttctcctgccctctcaaatgaaggcagagtggggaactcggactttcacccccatttggcagtaatgagttggggtggtgtcagaatgttgtggtgcctgctaaaacagaagatttaaataagaaccagagtctcatgatataatagaaacattttcaagatacaattgaaaatcacccatcatatcaggaactaggaacatcctgacttgaatgagaaaagaaaattgacagatgccaacacctgcgtgacacatacgttgggattatgtgacaagaatcttaaagcagccactatgaaaatgcttcagtggacaattatgaacatttttgaaacaaatgaaagaatagaaactacagcaaaaaaaaaatkaaatgtctcaggggaaagaaaacagaagttacaaagaagaaccaaatggaatattcagaagtaaatttccagtttatacaaaacctgaaattaaaagaaaatctcagtgggtgagctcaacagcagaatggagggaatggagggaagaattagtgaagtgaaaga

SEQ ID NO: 96665 - DNA, 588 bp, Homo sapiens
ttattatttgtgtaatttaaatggcctaaatgtaccagttaaaatacagaggttgacagcaggcagaaaacataatacaactacatgctgtaggtaagaacttatttccaatggagtagtataagtaaattgaaagtgaaaggatggcaaatgatacatcattaatcaaaagaaagtggagcaggagtggctatattaaaatcagataaaatagacttcaaaacaaagaaaattaccagggacagagagaaatattacataataataaaagggccagttcaccaagaagataagacaaccctaaatgtgtacgtacctcacaaccgagctgcaaaagattcaaaacaaaaactgatagagctgagcagggaaacagacaaacccawgattgtacctggagacttcaaaatccctttctttaacattgatagaacaattaaaaaatcagcaagaatatagaagaatcatcaatcaacagggtccaaatggcttttatggaacactccacccaacaacagcagaatccacattcttttaaagtacccaagtaacacttaccaagagagttcataacctgggccataaaaa

SEQ ID NO: 96666 - DNA, 588 bp, Homo sapiens
ttattatttgtgtaatttaaatggcctaaatgtaccagttaaaatacagaggttgacagcaggcagaaaacataatacaactacatgctgtaggtaagaacttatttccaatggagtagtataagtaaattgaaagtgaaaggatggcaaatgatacatcattaatcaaaagaaagtggagcaggagtggctatattaaaatcagataaaatagacttcaaaacaaagaaaattaccagggacagagagaaatattacataataataaaagggccagttcaccaagaagataagacaaccctaaatgtgtacgtacctcacaaccgagctgcaaaagattcaaaacaaaaactgatagagctgagcagggaaacagacaaacccatgattgtacctggagacttcaaaatccctttctttaacattgatagaacaaytaaaaaatcagcaagaatatagaagaatcatcaatcaacagggtccaaatggcttttatggaacactccacccaacaacagcagaatccacattcttttaaagtacccaagtaacacttaccaagagagttcataacctgggccataaaaa

SEQ ID NO: 96667 - DNA, 648 bp, Homo sapiens
ccactgtatattgttgggccattgcctttctggaaatagcagtagagatggatgagggaagatgcaggtttgggtaattaaatcagtcaaggggaaaaaacagttgatttaaacaaaaaagagagatctggtgtacaagaatgtttccagtgtacaagaccctgcgggagaaacaaagatagtcgagacatactctcttttcttaaggagtgtacataggtgacaggaatgtacatatcaaaactaattaatgaaataaggcagcctgagggctgagtgaatggcagtagcagggaacgcagaaggggaaaaatattttatattggtgaattctggtaaggaattagctgacaggagactcaaaatacatatttaatccaaattggaaaatgtaagtcatgagccttggttaaaaaatatttcataataaattattctagatgakgtatttttaaaaaaattttgttttattgattcatcatatttgtacatatttatgaggtacctgtgattttttttttttgagacacagtttgttgcccaggctggagtgcaatggtgagatctcggctcactgcaacctccacctcccaggttcaagcgattctcctgcctcagcctcctgagtagctggaattacaggcacgt

SEQ ID NO: 96668 - DNA, 621 bp, Homo sapiens
tatctgacctgatgtcaacaagctctgctgttcccagtttggagctgtcatgaatagcgctgatgtgtgtgtgcttgaacgtgtcttttggagaacgtaccaccacatttctgttggacatatccttggaagtgggattgtggggtcataggctgtgtatgtgcccagcctcgggaaatctgtggcaagcagatttctgaaacattgcaccaacttacgttcacagcagcagtgagtgggggttccagttgctccccatcctcaccactcttggttttgccattttcactttgcaccttctggtgggtgtgttgtgtgtgggcagctccttatttcaaagtgatcaaggttagggctcactggtgagcccaggccacaggctctgggatrtgtgtgggtatcatgagaccttccgtgaagaatctctggttggagggccttgaagaccagctcttgtccagtaaaggctcctatggaacgtatagaattacccggcgcttgttagaaatgcagactcttggctgggcacggtggcccatgcctgtaatcccagcactttgggaggacaaggcaggaagatccctggagcccagaagttcaagaccagcctgggcaacatgg

SEQ ID NO: 96669 - DNA, 621 bp, Homo sapiens
tatctgacctgatgtcaacaagctctgctgttcccagtttggagctgtcatgaatagcgctgatgtgtgtgtgcttgaacgtgtcttttggagaacgtaccaccacatttctgttggacatatccttggaagtgggattgtggggtcataggctgtgtatgtgcccagcctcgggaaatctgtggcaagcagatttctgaaacattgcaccaacttacgttcacagcagcagtgagtgggggttccagttgctccccatcctcaccactcttggttttgccattttcactttgcaccttctggtgggtgtgttgtgtgtgggcagctccttatttcaaagtgatcaaggttagggctcactggtgagcccaggccacaggctctgggatatgtgtgggyatcatgagaccttccgtgaagaatctctggttggagggccttgaagaccagctcttgtccagtaaaggctcctatggaacgtatagaattacccggcgcttgttagaaatgcagactcttggctgggcacggtggcccatgcctgtaatcccagcactttgggaggacaaggcaggaagatccctggagcccagaagttcaagaccagcctgggcaacatgg

SEQ ID NO: 96670 - DNA, 621 bp, Homo sapiens
tatctgacctgatgtcaacaagctctgctgttcccagtttggagctgtcatgaatagcgctgatgtgtgtgtgcttgaacgtgtcttttggagaacgtaccaccacatttctgttggacatatccttggaagtgggattgtggggtcataggctgtgtatgtgcccagcctcgggaaatctgtggcaagcagatttctgaaacattgcaccaacttacgttcacagcagcagtgagtgggggttccagttgctccccatcctcaccactcttggttttgccattttcactttgcaccttctggtgggtgtgttgtgtgtgggcagctccttatttcaaagtgatcaaggttagggctcactggtgagcccaggccacaggctctgggatatgtgtgggtatcatgagaccttccgtgaagaatctctggttggagggccttgaagaccagctcttgtccagtaaaggctcctatggaacgtatagaattaccckgcgcttgttagaaatgcagactcttggctgggcacggtggcccatgcctgtaatcccagcactttgggaggacaaggcaggaagatccctggagcccagaagttcaagaccagcctgggcaacatgg

SEQ ID NO: 96671 - DNA, 515 bp, Homo sapiens
cttcataggaaaggggcaaataatttctagttctggccaggcacagtggctcgcacctgtaatcccagcactttgggaggatgaggtgggaggatgccttgaacccaggagtctgagaccagcctgggcaacatatcaagaccttgtctctaycaaaaaaagaagagaaaagaaaagagaaaaaaaataatttctagatcctcagcatctgctatgttccaggggcaggaggaagctctgtcttcactttggcagcaagcctgtagcctaggcattctcagcccgttttgctggagggggcatttgaggcctggccagcttagccagcctacaaggagtgttactggggtgaaaacagccagcggggaccagtctgcttgtggcccgccaggtgcctgggatggggaagcagcaaatgcccaccttcctgcccaaccccctcctccctcttcatggggggaactgggggtggcagcggctgccgggtgcgagcgggctcaggcctgtggccctgc

SEQ ID NO: 96672 - DNA, 515 bp, Homo sapiens
cttcataggaaaggggcaaataatttctagttctggccaggcacagtggctcgcacctgtaatcccagcactttgggaggatgaggtgggaggatgccttgaacccaggagtctgagaccagcctgggcaacatatcaagaccttgtctctatcaaaaaaagaagagaaaagaaaagagaaaaaaaataatttctagatcctcagcatctgctatgttccaggggcaggaggaagctctgtcttcactttgrcagcaagcctgtagcctaggcattctcagcccgttttgctggagggggcatttgaggcctggccagcttagccagcctacaaggagtgttactggggtgaaaacagccagcggggaccagtctgcttgtggcccgccaggtgcctgggatggggaagcagcaaatgcccaccttcctgcccaaccccctcctccctcttcatggggggaactgggggtggcagcggctgccgggtgcgagcgggctcaggcctgtggccctgc

SEQ ID NO: 96673 - DNA, 370 bp, Homo sapiens
gctgccctgccaacaaaaccataacgcaggaacaaacatcacaactatgccaaataatcaatcctacaatgtccaaaattttactttaaaactggaattaccagacttcctttctgcattaaccagtttaactagacagtaacgaaatattcctactttatgctgtgatagtttgtttgtttgtttgtttatttatttatttatttatttaagacagagtttcrctcttgttgcccaggctggagtgcagtggcacgatctcagctcaccacaacctccgcctcccaggttcaagcgattctcctgcctcagcctcccgagtagctgggattacaggcatgtaccaccacgcccgggtaattttgtattt

SEQ ID NO: 96674 - DNA, 508 bp, Homo sapiens
ttattatacagtttcatccttttagaaatatagaaagatcctaagtttgggcacagtaagacactcaatatagatctactactaaacaagtaagaccaattacacaattaatgtcctaataccccgagtggagaagtaaaatctacttgttttctgttgacttgaacgccttctcttctttgttgaattaatcaatctatttgactccaatgtcaaattaatmaatgtcactttagaatattaaaatgtacaattatgaattacacatttaattttaaaacacatcattctgatctctgtcttgattgatactagaagattatcttccaaactaaggtggaaaaaatgacagactttagctattggcaatgataggtcatttttttagggaagaggagtaaagagggccacctccataggtcagatatccctttgttctaagaagccaccacccctgtttcttcatatgaaaaaaaccagaggcatccagtggttcccaaaaccttct

SEQ ID NO: 96675 - DNA, 389 bp, Homo sapiens
cacctcaaatttaactaataaaaatttatgacttggcaaacaccccaggtatttttattgactaacaaatcagctatgacaatcttagcaacaaatcaagttatgctatggggtatgtccacacttccctgttccctctacaacaggagaaaatcaaatttttccaacatcctaacaaactgttaytgcctgtaaccaaatgtatcacagtatcgtctaccaaggcgttacatcctgaaactttcctacaaaaagcacagcttcaaagaaaccttgcaagctttcttgtaagctcctcccttcccccatcgcccctccccagagccaagaaataaagcacttgaaagaaacaacatggataatatttattaatagctcatgtacatatt

SEQ ID NO: 96676 - DNA, 591 bp, Homo sapiens
agtaggagagttccatgaatcaattacccctaaaatatatttctgtatatttaaggagttctaagcattgggttaaattccaaacagactctgaatacaagcatttatttagtaagagaggttagaataaatcaatcctaaattaggcacagctgccctccccccattgatcaaaaagacasgaaattacatttatttaaaaagttaatgttcctaatatattcaaatctaactaagccccaaaacggtctgacatcaaatcctccataaaagaggaaattctctagacttctaagtgggtgcccagagttcactcaagtgtccaggtatgaattacgattcaccagagtaaccggccttgcacttagggaaaacttccatcgcccaagaccagagtaggtcgatcccatcaacagtcacacaatctcatctcacgctccactaatgaatgttctgcctaaagtcagagcaatgccttagctggagttttgttttggttttttcaatattaccacgtgggggtcacagaaaggaacagaggttagaagagctctcacgtggcggctgaaagactggggaaccgagaaagtg

SEQ ID NO: 96677 - DNA, 566 bp, Homo sapiens
tttttaactgcaatttcgttttcaccaaccagtcagcaatcggagctttaacaataaaccggttgctcagttactccacgtgggtgccacgcaagaggctgggagtattgctcagcggggccaacgggaggctggcacttgcctgaaccgcttaagtgggggaatgaaatgcccaccgaagggcagggcagggaccctgctgtcccgtcactgaagatattcccagcctgtggsgagaagtgtaaaagaatgaatgaaagaaacgcacttggtttctgggaccaatgaccttagcctagaactgccgggacggtccaggaacgcaaaaatgtagagatgtgggagccaggggcgtagtgatgcaaggatgcagggacccagggactacgacctcccaacccccggcccgcgccccgtactcacgcacggagtggcaggctacgagcttggctgcctcctcgggcaccgggcaggtggggaagagcggcttgagcaggtaggtggcgaagaccagggccacgatgtactgcgatgaaggccggatgatgagcagctcgatccagagc

SEQ ID NO: 96678 - DNA, 585 bp, Homo sapiens
tgagtgtcttctacgtgccatgcccaagtctaggaactagagacacagcagtgaacaagacaatcgcctcatgaactgacattctggagagggaaactgacaatgaatagataaataagtgttttgcatgcttcttaggctttgggcaaatggcattatactgtacatatctcttgttgtattcacttagcatttatccatgttgatacatctacctctaattcatccattttttaaaatttttatatttatgtattatttatttattttggagacagagtcttgctctgtcacccagggtggaatgcagtggtgtgatctgggctcactgcaacctctgtctctcaggttcaagcaattctcctgcctcagcctcccaagtagctgggactacaggcatgcgcctccaagcctggctaatttttatatttttagtagagatggggtttcaccatgttgtccagsctggtctcaaactcctagcctcaggtgatccacctgcctcagcctcccaaagtgctaggattacagatatgagccaccacacccgctgattcattcatttttaactgctgtatagaattc

SEQ ID NO: 96679 - DNA, 356 bp, Homo sapiens
gacagggtctcactgtgttggccaggccggtctcaaactcctagcttcaagcgatcctcctaccttggcctctcaaagtgctaggattacctgcatgagccactgtgcccagcctaggaaagcatatttttgaggaataattatttctagtaatttctgttctaatctaaggggtttgaggttatcttttgacaatagatgttagctaggagagataagaaatggagcaagggaggggtttcatcccgccgtgttcatttgcttggctgtcctgaaattgcgaatacrcagttgttacctgctcccggtgggaggggggggatatttatttggcatcttgcaattgataggagctg

SEQ ID NO: 96680 - DNA, 356 bp, Homo sapiens
gacagggtctcactgtgttggccaggccggtctcaaactcctagcttcaagcgatcctcctaccttggcctctcaaagtgctaggattacctgcatgagccactgtgcccagcctaggaaagcatatttttgaggaataattatttctagtaatttctgttctaatctaaggggtttgaggttatcttttgacaatagatgttagctaggagagataagaaatggagcaagggaggggtttcatcccgccgtgttcatttgcttggctgtcctgaaattgcgaatacacagttgttacctgctcccggtgggagggrggggatatttatttggcatcttgcaattgataggagctg

SEQ ID NO: 96681 - DNA, 471 bp, Homo sapiens
gaattccgctgtgtggagcagctatgctcccttaggggtggctgggtatgagggctacagcctgtcctygagggtcccacctcttccccaactcccaagattcagggggtgggacttcccctggaaccctggaaagcagggagcaccgaccgccctggatgccaggaaggagggagtgatgctgcctttggaccctgagaaggaaggagcattgctgcctgtggacgccgggaaggaaaaagcaccagccgcccgtggaccctgacaaagagggagcattgccgcccgtggaccctgggaaggagggagcattgccgcctgtggaccctgggaaggagggagcattgcggcccgtggtccctggctgcgtgccctccccttgtctcctccacccaagagagaagtcgaagctctttttccaaagctctgtctcccccacctcctccagcttccctctaagagttcctgttg

SEQ ID NO: 96682 - DNA, 636 bp, Homo sapiens
gcacttctctagttttagaataactcagaactcattgattggcattgtattgagtctgtagatcaatttgggggaattgccaagttaacagtattgagtattctgattcatgaacatggtatgtctctccatttatggaggtctttaatttctyttagcagtgttatacagttttcagtgttcagctcctgtgcatattttgttacatttatctctgagtacttcatacttacagatgctatcgtattcatacttatggatactatcataaatggtattgtattttaaatttcagtatccagttgttcattggaaggatgtagcagtacaatagatttttctttactgacctttatcctgtgtcatttctaaatgaacttgttttagattttctgtaggattttttaaaaatatgcataattatgttacctttaaatagagttttgtttcttcctgtagaatttctataccttctcttactttaatgtgctggccatgatctttatttcagtgtattttctttataaaaatatttttgccttattcctcatctttgagtgaaagcgtccagcatttcaccattaagtctgatgttaccagtacatttttcccagatgctcttaatcaggttgaaga

SEQ ID NO: 96683 - DNA, 636 bp, Homo sapiens
gcacttctctagttttagaataactcagaactcattgattggcattgtattgagtctgtagatcaatttgggggaattgccaagttaacagtattgagtattctgattcatgaacatggtatgtctctccatttatggaggtctttaatttcttttagcagtgttatacagttttcagtgttcagctcctgtgcatattttgttacatttatctctgagtacttcatacttacagatgctatcgtattcatacttatggatactatcataaatggtattgtattttaaatttcagtatccagttgttcrttggaaggatgtagcagtacaatagatttttctttactgacctttatcctgtgtcatttctaaatgaacttgttttagattttctgtaggattttttaaaaatatgcataattatgttacctttaaatagagttttgtttcttcctgtagaatttctataccttctcttactttaatgtgctggccatgatctttatttcagtgtattttctttataaaaatatttttgccttattcctcatctttgagtgaaagcgtccagcatttcaccattaagtctgatgttaccagtacatttttcccagatgctcttaatcaggttgaaga

SEQ ID NO: 96684 - DNA, 636 bp, Homo sapiens
ttctgggaaagggaaggggagttggcccttatggctaattccttagctaggagtacctctgtgatgggaaaacagggatgagatgcggcacctggaataattggttgcgggcaatcagggaaggttcaggcacgtaatggaccaggagatgggaacatgtcctgttcattatttgaccttacggtggctcaggacctgcctgcctcatggtggggctctggcagtctcccctgggagctgcacgtgkttctcaccctctccactccagagaatctcctatctgtttgccaccttcctgggcaccatgcacccttggctgtttggcttccttagtagcaggggaggtaaatcttgtcttcaagatcagctttgaatgcttgaggagttttctgcaaggtatgctttccccagcttttccacagacaaaaacagggcttttcatgagtcatcatttctgttgagtcccgtatagctacagaaagtgtgagaatggatgaaacatgcctgcctggcagggtcttaaacatttcagctgccctgagatgtaccaaaggtgtgtggcagaaggttaaagagtcagctgactacctgctgtaaagagacagagctaaaaataatattctattctaccttatg

SEQ ID NO: 96685 - DNA, 636 bp, Homo sapiens
ttctgggaaagggaaggggagttggcccttatggctaattccttagctaggagtacctctgtgatgggaaaacagggatgagatgcggcacctggaataattggttgcgggcaatcagggaaggttcaggcacgtaatggaccaggagatgggaacatgtcctgttcattatttgaccttacggtggctcaggacctgcctgcctcatggtggggctctggcagtctcccctgggagctgcacgtgtttctcaccctctccactscagagaatctcctatctgtttgccaccttcctgggcaccatgcacccttggctgtttggcttccttagtagcaggggaggtaaatcttgtcttcaagatcagctttgaatgcttgaggagttttctgcaaggtatgctttccccagcttttccacagacaaaaacagggcttttcatgagtcatcatttctgttgagtcccgtatagctacagaaagtgtgagaatggatgaaacatgcctgcctggcagggtcttaaacatttcagctgccctgagatgtaccaaaggtgtgtggcagaaggttaaagagtcagctgactacctgctgtaaagagacagagctaaaaataatattctattctaccttatg

SEQ ID NO: 96686 - DNA, 407 bp, Homo sapiens
tggatattcccgaaggagaatacagcttatgaaagtgcctgaagcaaaacagcatagctccttctaggaacagcaaatctgttcaatataaatagagtcctgttgaagttaaggggctggacaatggtgaaagagccaagagagtagaagctggaactaaagatatgggctagggaaggcccaaggcaggctctgaaatgatttgtaaggcgtatktgctttaccacaggcagtggagagtgactggttagcttttcaagatgcaccattaccataatgatttccactgccagtgctctgggcttcactctgccttcactgatgtttcaatgaccattttctccattattatcttatatttgtttaataacttttccagaaggtcagtgtaaacatccagtgaattc

SEQ ID NO: 96687 - DNA, 590 bp, Homo sapiens
ttctccttgtgcaattgctccactgcgatcattgagtacagatctcccagctcctatccagccacgatgcatggtccttatcaataaataatacttccgtaaaggtctccagagatattaatccaaacaaactagaggctaattgccattccccagcacaaagctgcagtgacgatgattctttaattcyttctacgtgctcacagcccacggcgctctactctgctcactaactgtgagctgtagctacccgtttgcaagggaaaggaagggaaggggtgcaatcagacctgggagacgtatattaaaatcatgggcttccacttcctgcctgtgtggtcttgtgctagaactttgctgctcctctgcaaatggggaatatgaaaatcaacctagtgggattgccatgagggtcaactgaatacaacgcattgtatgtaaccctacagtcaccccccaaatggtccaactttaataagaggggcaaggggagccaagcacacaaagaatgctttcaaaataaactcagtttccttgtttcacaagaattttccattaaaacattttttttatttcatgagaaccttgat

SEQ ID NO: 96688 - DNA, 678 bp, Homo sapiens
tatagaaaacacctggagccccagaaagtggcctgccctgcactgcaggttgtccttgggcctcctatatatcttgctctggagtgtctttctttggatcctcttccaagggtctttcctaaccccagctccaaaatgtggtagactgatttccagaagccttcagagtcttttcagtcctttgtacttttcaaagcactttacacacatgattctgttttattcttaccamagccccatttagtagtaataggtggtgtttcctgatcttgctagaagccattcaagtgttaaatacttctatgtgcatcatcttgagtcattctcacaatgactctgagagtccagaattgctggaagcttatttttcagatgaaggaatggaggctcagagaggtgatgtgacttgcctgaggtaacacaggacataggtgggagttgaacccagttctgtttgattctgaagctccagttccttagccataaggctggaatggctcttatttccatttgacaattgagaaaaagagcctagggagtttaagtgtgaaaggttataaacaagtgggtgatgatgcccacatcaggacccagctcccagacctctcaccactgggctgcccggcctcatcgcccaggacctgtgagcacacgtatatgcaccagtccatgccaggc

SEQ ID NO: 96689 - DNA, 678 bp, Homo sapiens
tatagaaaacacctggagccccagaaagtggcctgccctgcactgcaggttgtccttgggcctcctatatatcttgctctggagtgtctttctttggatcctcttccaagggtctttcctaaccccagctccaaaatgtggtagactgatttccagaagccttcagagtcttttcagtcctttgtacttttcaaagcactttacacacatgattctgttttattcttaccaaagccccatttagtagtaataggtggtgtttcctgatcttgctagaagccattcaagtgttaaatacttctatgtgcatcatcttgagtcattctcacaatgactctgagagtccagaattgctggaagcttatttttcagatgaaggaatggaggctcagagaggtgatgtgacttgcctgaggtaacacaggacataggtgggagttgaacccagttctgtttgattctgaagctccagttccttagccataaggctggaatggctcttatttccatttgacaattgagaaaaagagcctagggagtttaagtgtgaaaggttataaacaagtgggtgatgatgcccacatcaggacccagctcccagacctctcaccactgggctgcccggcctcatcgcccaggacctgtgagcacacgtayatgcaccagtccatgccaggc

SEQ ID NO: 96690 - DNA, 726 bp, Homo sapiens
agtggcagttctatagagagggctggagttcagggaagggtctggtctggagataaacatttgagagtcattataatgaaaatggcaataaagtcataagactggataaaattttctagtaattagaaaacaattatcaattgcaagatgatgagtgagcaaagaaggttcaggagtggccagtgagataaggtgagtggattccagaagccaagtgaagaaagattttcaggaaagagagcgagggatcatcggtgtctrtgatcaagggaaacgataactgagaattgatcagtggattttgtcatggcaacatccgtggtgatcctaaccagggctcttttagggaagtagtagagataaaagcctgacagcttcaaatgagaatggcaagagaggatctagagacaatgagtttgaataacttttatttggagaagttttattctaaaaaagagcaaagaaatggggtggtatatggaaagggatgtgaatcaagagatggatttttaatttatatatatatattttaaaacaggagctattgcaatatgttttcttcttatgggaataatccagtggagaataaaaaaactgatgtttcagtaaaaagaggtgacagtaattacaatgtgttttaagatgttactatttaccttcactctgctaagtgctttatatgaatcatctcattaaatacccacacaaattctgcaaagcaagcat

SEQ ID NO: 96691 - DNA, 629 bp, Homo sapiens
atattgcttttggatttctatgtctagatgcttcctggcttctagatcatgctcagtggaagaggggaaaacaaattrgtgaattcatggctgtgggatctctaatccctgcaggcagctaaaagagttgggaattcaaagatattgatcagtgatggtttatagatgggatttcatagaagatggggatggattctggggcctgggcctctcaaaaatgcaggccctctccagagtgttaaagagatgggattatctaccccttgaatcatggagcagaatgagggcaggagcccctcaccctgagcacagcacacaggatgccccaggacaagccagtctctgctgtgacccaacttgatgtgccatggggaaaagtgtgggctagtagaaactgagcagaagcagccccatccatcctccaggtccagaaataatttctactatgtgacaaaaagcaaaaccagccagccagattggtgtatttttgctgctgaacattagagttcatgatctgattctgctgaagacctacacatgccagagccagtgagagatcctagccaggccagccaggcgccacctcatgtcagaatgtcacctgagcctttggcctgagcaggaagctg

SEQ ID NO: 96692 - DNA, 629 bp, Homo sapiens
atattgcttttggatttctatgtctagatgcttcctggcttctagatcatgctcagtggaagaggggaaaacaaattagtgaattcatggctgtgggatctctaatccctgcaggcagctaaaagagttgggaattcaaagatattgatcagtgatggtttatagatgggatttcatagaagatggggatggattctggggcctgggcctctcaaaaatgcaggccctctccagagkgttaaagagatgggattatctaccccttgaatcatggagcagaatgagggcaggagcccctcaccctgagcacagcacacaggatgccccaggacaagccagtctctgctgtgacccaacttgatgtgccatggggaaaagtgtgggctagtagaaactgagcagaagcagccccatccatcctccaggtccagaaataatttctactatgtgacaaaaagcaaaaccagccagccagattggtgtatttttgctgctgaacattagagttcatgatctgattctgctgaagacctacacatgccagagccagtgagagatcctagccaggccagccaggcgccacctcatgtcagaatgtcacctgagcctttggcctgagcaggaagctg

SEQ ID NO: 96693 - DNA, 636 bp, Homo sapiens
cattaatttccttccccatcacccttcacctgtttataatctctgcttattccctgscctgtgcttctgaggctccagcattttgtgactgcatgtccagaatgtgcctgtgtgaattgttagaatgagaagagcagtagatcaggagtctggtgagtggagttgctgcgggattaaaaccctaatagtcctatcttcatcccagggcagacgtgaagactcagtgagaaaacgtaaggaagcccttcccatgggacctggtgtaccataggtactccgtgccagatgcaaatataaaaagactcttcactctcctgacctcagtttccacacctacacgatgagactcatgtatatatcttctatttaatagggaccacaagctcaaggaaccgctagagcccttcttgaggacagaggacttaattgtctcttccttcccgaggccaatatagtcccttgcagataataggcagcctattaagaattattacatcaatcacaccacatagaaattccctcccacagcatcaaaatgaggaggtcatgtggcctattctacatgaatatctctaatgtgaagaagctcatcatcccaggatttagcccactgcctcattaaacaataagttcctg

SEQ ID NO: 96694 - DNA, 553 bp, Homo sapiens
aggcttggtggctcacatctataatcccagcccttggggaggctgatgagggagaatcactgggggttaggggtttgagaccagcttacccaacataacaagaccccaaatctataaaaagtaaaaaataaaaaataaaattagcctgggcatggtggcttgtgcctgtagtcccagctaccaggaaggctgaaatgtgggaggatcagatcacttgttcccaggagtttgaaactgcagtgaagtgtgatcgcaccactgcactcttccctgggcaacaagtcaagaccctatctctaaaaagagagagattccatatgcataccttatagatttggggtgggggggcccagggcagaagatcatcactattgttctcattgctgttaattacaaaatcctgtgtkcctgtttataaaaattataaaatcctggatgcctctggttccaattataacccagtgatgtgtccttggttccagcagaggcaatgctggggtaaagtttatcttgtgtcacatgcaatttgttctcaaaatggagcaaggagagc

SEQ ID NO: 96695 - DNA, 553 bp, Homo sapiens
cctctagtaagaaagtatagaagactacaatatgtctttatcatattcctcccctccatatcaattccagtttctgtgatattggttctattctttgttacctctaatgcaaatctgaaatttcaccatgactttttgaaaactcttatcttctgttcttatcccaacaggctctctttgtatctctgcatccaccttagtttcttgcctctcctgtaccacccatgattttgtttcaaactggctgtttttgacatgcaagtgggaagtcttatatttggaaaatataatttccagaactttaattttttctttaaatctccagagcaatggtttgttttgttttgtttttctattaagtacagattcccattttggtgctattgatttrtgtatttaactcattcaaaattacaaggaataaaactaagctctgtgctttgtaagagccaggataaatagtgtccctagtcatcacccagtttcccctggaatactggtcacagtttttcacctgatgggcttgggtttaagcttctcctgctccaatgaa

SEQ ID NO: 96696 - DNA, 547 bp, Homo sapiens
gcaaggccccctgagcccaggtgagcaatgttcttgctcattcccacagtgtagcttcatttgcttctgccttctttggctcccctattgcagctggtatgatgacaaaccaagttgaaggctcaatcttgtccaactcctaagcaaaatgtaatttagggctggccgcagtggcttatgcctgtaatcccaacactgtgggaagccaaggtgggcagatcacctgaggtcaggagtttgagaccaacctggccaacatggtgaagctccgtctctactaaaaacacaaaaattagccaggcgtggtggcgcatgcctrtaatcccagctactcatgaggctgagacgtaagaatcgcttggaccccagggggcagaggttgtagtgagctgggatcacgccactgcactccagcctttcgaaagagtgaaactccgtctcaaaaaaaaaaaaaaaaaaaaaaaacaaaaaaaaaaaacaatgtagtttaggtaagatgaagagcacctaccgaccaggccctgatcttctagcctgaccaacatac

SEQ ID NO: 96697 - DNA, 601 bp, Homo sapiens
ggctccttgcatggcgttggccactcagagggtctaaaattattgcatggtttgtttgctcagtattcatcaggtttggatagtcaagaagtctgtcttcatctctggggcaccagagatgaaggaagggacactatcactgttcttgtaaagtccacacgctagctggggcaatgatttgcaacaatcgactrtattatcttgtgaggagggtcatgttacaggttcagccttcggaaggacatgaggtcaaagcaaattctcaagaatgaggaatgacaggagacagagacgcggacggggcaggaagggttttgtgagaacagctgatggaagaaagcatttaatggcacctccagcggagtgcgtgcagtttagagcagacgcaggtggggccatggcagggcttgactaggagcaaaggtgggactcgcatgctaaggagtgagcttagacatgatactcctgcggcgaaagggacaaatgatggaggattttaggctgaaagtgacatgatcagatttggattttacagggactgatccggttgacatgcaggggatgaatgggagacagtgagttctgtctctgggtctttgaa

SEQ ID NO: 96698 - DNA, 368 bp, Homo sapiens
gagggtctgagtttgcttgtctcaccttgatgtacaaggctcaaaatctgactccatcctctaattcactcctcgccactcttccccacaatcccccttcccagccccaatcaccttctttgtgtccctcaaacacaccaaactcatgcctggaccaagtcctttcacttgctgtatgaagtaaatgctccatctagaacgctgtcttcccctattttaaaaaaatgtgtgcatacctgtcctcctatcattgaagtttcagcttaaatgtcacctctttggagagagagagaggccttccccattgtcctagttaayggtagggtgaccctgtcactctcattgccctattatgattttctccgcag

SEQ ID NO: 96699 - DNA, 582 bp, Homo sapiens
gtggagtagctatgaagaaaattgaaacagagtggcgagcgatgagaacgggcttgcgtagggtggaggccagagargccctcccagagcagctgacgtcctagtcaagactggaaggatggaaaggaattctcttgcagagagaagtaaaggcatatccaggcagggggcatggcaggtgcaaagaccctgaggtgcacggccctgtgttcaagccacagccctgctgcttcccagaaatgaaccttgaggcaagtgtgtgagttctcggagcctcagttccctccccatcaaatgggataataaccacgcctgccgcacaggagcgctgcgcaaatcaaaaatgactacccgtgaaaagaaaaacagcccagtgaaaactaggaaattcatcactatcatctcatccacaaatcacatcagtccttcccacaaggcaagctcctatcgactctgatgtttgttacctgcattttaagcaaatcatgtctctaagtcaggggagcagaaaagaattaagatctataaaattaacagagcccaatactaagaggcattaccagaaccaacatctttcccgaa

SEQ ID NO: 96700 - DNA, 563 bp, Homo sapiens
ttcctccagttaaatgtggctgtagatgttggaggctagggaggctagtaaatatcaaaaggaaaagggagtgggaattgctatcatgtaaaatatcaaagttaaaatactaaggtgcattttccctgaagggaactcatgtctgactgctgtattcaaatacgtagctttggtaacaaacaaaatccgtatatgcaaatcaacatatccaaacatgccaagactgcttttccactgcacttggaaggatatattatgcctaascctgcccaacaaattaaggtttgtgcctaaaatgttagattggactgtatgccagttagtctccatttattcctagtactctgtcctaagaatctttttaaaactatatcatgatgaattgaaatgaagataaaattgctcttttgtaactttatcttagtaatgtaaagattcagtaaattgatgagtcaggttgcagccctcatgtgaactgaaagaagttgctcgcttctgtgttgacttagatcaagacacgtcacgcatcctttctggggtagtacctgtggagccgggaaggg

SEQ ID NO: 96701 - DNA, 563 bp, Homo sapiens
ttcctccagttaaatgtggctgtagatgttggaggctagggaggctagtaaatatcaaaaggaaaagggagtgggaattgctatcatgtaaaatatcaaagttaaaatactaaggtgcattttccctgaagggaactcatgtctgactgctgtattcaaatacgtagctttggtaacaaacaaaatccgtatatgcaaatcaacatatccaaacatgccaagactgcttttccactgcacttggaaggatatattatgcctaaccctgcccaacaaattaaggtttgtgcctaaaatgttagattggactgtatgccagttagtctccatttattcctagtactctgtcctaagaatctttttaaaactatatcatgatgaatwgaaatgaagataaaattgctcttttgtaactttatcttagtaatgtaaagattcagtaaattgatgagtcaggttgcagccctcatgtgaactgaaagaagttgctcgcttctgtgttgacttagatcaagacacgtcacgcatcctttctggggtagtacctgtggagccgggaaggg

SEQ ID NO: 96702 - DNA, 613 bp, Homo sapiens
aactgtataacaaccaaaaaggagcatttgggggtatgttggatggtgttttgtttgtaaacactttgttatattgcactaccactttaatgatgacacttccttcattgatggcttggaagtgtcatttttataatttatgagttggggggattccctagtcaatgcataggaaatacattctttgtacaaacgtggtaaagagaggactggctttgctatggcacctaagttactcatgggtagttaagtttcatttctagagaaatgtcttagctgctgtggtccattagagttccctttggtacattcctacctcagtgtaccaaaccagggattccaaaaaccttccaaggagtgctagaaacaccgcagtatccccttccagaatgttggcgttcatgattcaagaggcctcccgtggtcagatgaagacctttggttaaatgggggaagaatgaggtggcgctttgactgtatcaatttaaagatgccggaaccccgttaaaaacacctggtggaagggaawggtgaggcggcccttttccactggctgctcactgagcactggagtccaggaagtcagtgagaagagagcagctgagtgtagcaa

SEQ ID NO: 96703 - DNA, 524 bp, Homo sapiens
agtgtcatgatatcacccttccactgagtactgccgacagctggggrgtaaagaaaagtcattgggacacactgttgtctccacatgccactgtgtctgtctgcaaatgtaggcaggctggggtcctgccccagggaagacagagtcataacagagtaataaagaggcatgtttgagacacaggagtgtctatgtctatcctcattcctccctcacagccatcaccagagcatgtttcttgcaccaggtcaacagacagtaagagacagtaagagaggcatgaaaagcccattgtccacacatgttgcagcttctttttggagaatgttttccaggccttttatgttctgtctctgattctcaggactctgcaaggtcagtgtgaccaccctgctccaaatctaagaaaacagaggtttccagaggaaggagaaattgtgcccagggtcacacagcttgcaagaggcagagtggaagttgattccagctctgcctgcaggaccctctcatttcccctctgtttc

SEQ ID NO: 96704 - DNA, 524 bp, Homo sapiens
agtgtcatgatatcacccttccactgagtactgccgacagctggggagtaaagaaaagtcattgggacacactgttgtctccacatgccactgtgtctgtctgcaaatgtaggcaggctggggtcctgccccagggaagacagagtcataacagagtaataaagargcatgtttgagacacaggagtgtctatgtctatcctcattcctccctcacagccatcaccagagcatgtttcttgcaccaggtcaacagacagtaagagacagtaagagaggcatgaaaagcccattgtccacacatgttgcagcttctttttggagaatgttttccaggccttttatgttctgtctctgattctcaggactctgcaaggtcagtgtgaccaccctgctccaaatctaagaaaacagaggtttccagaggaaggagaaattgtgcccagggtcacacagcttgcaagaggcagagtggaagttgattccagctctgcctgcaggaccctctcatttcccctctgtttc

SEQ ID NO: 96705 - DNA, 524 bp, Homo sapiens
agtgtcatgatatcacccttccactgagtactgccgacagctggggagtaaagaaaagtcattgggacacactgttgtctccacatgccactgtgtctgtctgcaaatgtaggcaggctggggtcctgccccagggaagacagagtcataacagagtaataaagaggcatgtttgagacacaggagtgtctatgtctatcctcattcctccctcacagccatcaccagagcatgtttcttgcaccaggtcaacagacagtaagagacagtaagagaggcatgaaaagcccattgtccacacatgttgcagctkctttttggagaatgttttccaggccttttatgttctgtctctgattctcaggactctgcaaggtcagtgtgaccaccctgctccaaatctaagaaaacagaggtttccagaggaaggagaaattgtgcccagggtcacacagcttgcaagaggcagagtggaagttgattccagctctgcctgcaggaccctctcatttcccctctgtttc

SEQ ID NO: 96706 - DNA, 524 bp, Homo sapiens
agtgtcatgatatcacccttccactgagtactgccgacagctggggagtaaagaaaagtcattgggacacactgttgtctccacatgccactgtgtctgtctgcaaatgtaggcaggctggggtcctgccccagggaagacagagtcataacagagtaataaagaggcatgtttgagacacaggagtgtctatgtctatcctcattcctccctcacagccatcaccagagcatgtttcttgcaccaggtcaacagacagtaagagacagtaagagaggcatgaaaagcccattgtccacacatgttgcagcttctttttggagaatgttttccaggccttttatgttctgtctctgaytctcaggactctgcaaggtcagtgtgaccaccctgctccaaatctaagaaaacagaggtttccagaggaaggagaaattgtgcccagggtcacacagcttgcaagaggcagagtggaagttgattccagctctgcctgcaggaccctctcatttcccctctgtttc

SEQ ID NO: 96707 - DNA, 546 bp, Homo sapiens
aacttgtttctgaccacagggcatccttcagcacatgctgtctggagtggcctccaacaaggagtgtgtggtgtggtgctgagaatgcaatgggagcagggtcctgtccccaygctaaagaagctcacagtttaatgcaaatgagaagccagtgaggacatcactactcctgctgtgcacttgggaactagaaacacaaaacctgactctggagggaagctaaggaagcattctactcttgagttgacataagtgcatctgaagcttctgatctccgatgagaacaatgggggacaccaaacagaatataaaacccatgattgaatacatcaaatagctaacatggcagtaaacagacatgaggtgaagatggagaagaaggaaacccaggacgaaagtcagcctcgcatttggaatccatttccctgagtttcattgctgaattccagaaggaactactgagatgcaaagaagcacagcagcttttgcacacatgcgtgggattagatggaaaacaagtggattgagggtctgccaatgaaagcg

SEQ ID NO: 96708 - DNA, 546 bp, Homo sapiens
aacttgtttctgaccacagggcatccttcagcacatgctgtctggagtggcctccaacaaggagtgtgtggtgtggtgctgagaatgcaatgggagcagggtcctgtccccacgctaaagaagctcacagtttaatgcaaatgagaagccagtgaggacatcactactcctgctgtgcacttgggaactagaaacacaaaacctgactctggagggaagctaaggaagcattctactcttgagttgacataagtgcatctgaagcttctgatctccgatgagaacaatgggggacaccaaacagaatataaaacccatgattgaatacatcaaatwgctaacatggcagtaaacagacatgaggtgaagatggagaagaaggaaacccaggacgaaagtcagcctcgcatttggaatccatttccctgagtttcattgctgaattccagaaggaactactgagatgcaaagaagcacagcagcttttgcacacatgcgtgggattagatggaaaacaagtggattgagggtctgccaatgaaagcg

SEQ ID NO: 96709 - DNA, 546 bp, Homo sapiens
aacttgtttctgaccacagggcatccttcagcacatgctgtctggagtggcctccaacaaggagtgtgtggtgtggtgctgagaatgcaatgggagcagggtcctgtccccacgctaaagaagctcacagtttaatgcaaatgagaagccagtgaggacatcactactcctgctgtgcacttgggaactagaaacacaaaacctgactctggagggaagctaaggaagcattctactcttgagttgacataagtgcatctgaagcttctgatctccgatgagaacaatgggggacaccaaacagaatataaaacccatgattgaatacatcaaatagctaacatggcagtaaacagacatgaggtgaagatggagaagaaggaaacccaggacgaaagtcagcctcgcatttggaayccatttccctgagtttcattgctgaattccagaaggaactactgagatgcaaagaagcacagcagcttttgcacacatgcgtgggattagatggaaaacaagtggattgagggtctgccaatgaaagcg

SEQ ID NO: 96710 - DNA, 573 bp, Homo sapiens
aagtagggaagatattgctaaattcttttcctagcaaggaatattaataattaataccctggggaaggaatgcattcctggggggcagtctataaacagccactcggagtatctgtcctatgcggttgagataaggactgagataygccctggtctcctgaagtaccctcaggcttatcagggtagggaaaaaactccacccttgcaaatttgtggtcaaaccagttctctgctctcgaactctgttttctgttgtttaagatgtttatcaagacaatatgtgctcagctgaacatagacccttatcagtagttctgattttgcccttgtcctgtttcctcagaagcatgttatctttgttctgccttttgccctttgaagcgtgcgatctttgtgacctacaccctgttcgtacaccccccaactttaaaatcctcaataaaaacttgctggttttgtggctcaggttggcatcatggtcctaccgatatgtgatgtcacccccagaggcccagctgtaaaattcctctctttgtactctttctctttatttctcagccggccaacacttat

SEQ ID NO: 96711 - DNA, 573 bp, Homo sapiens
aagtagggaagatattgctaaattcttttcctagcaaggaatattaataattaataccctggggaaggaatgcattcctggggggcagtctataaacagccactcggagtatctgtcctatgcggttgagataaggactgagatatgccctggtctcctgaagtaccctcaggcttatyagggtagggaaaaaactccacccttgcaaatttgtggtcaaaccagttctctgctctcgaactctgttttctgttgtttaagatgtttatcaagacaatatgtgctcagctgaacatagacccttatcagtagttctgattttgcccttgtcctgtttcctcagaagcatgttatctttgttctgccttttgccctttgaagcgtgcgatctttgtgacctacaccctgttcgtacaccccccaactttaaaatcctcaataaaaacttgctggttttgtggctcaggttggcatcatggtcctaccgatatgtgatgtcacccccagaggcccagctgtaaaattcctctctttgtactctttctctttatttctcagccggccaacacttat

SEQ ID NO: 96712 - DNA, 559 bp, Homo sapiens
ggaagttctgctgtcaccaggaatcagctggtgggtgaaagatgtgtgctcatagagtacttccagatgatattttaattgcacaaaagatcacaattttcttctcatccatgtcccgccgcagtgcagggggctgtgtctggcaaataaggatcaaatagtgtttgttggacaaaagacttcccaatgaagaaccaccaagcccattctcatccaccgtctcccttacgtttccttataattctggcaagcttagcccagcagtttaaagcatggaatccaaggttgaacaaattgggatcaaaccctgcctccaccacttactatttgtgtgacctggggcaagttacataatgtctctgtgtctcagtttccttrtctgtaaaatgggggaatgataacatacaaacatcatggggtgaccatgagcatttaatggaatactatacatataaagctcttggaacactacctggtctatgatgcatgtgattttataaaagtcagttactatcattattataatctcccattttacagaagagaaagttaaggctca

SEQ ID NO: 96713 - DNA, 614 bp, Homo sapiens
tcctagaagtgtcctttatgtctcagtttagagatcctctcttctggaaagtcaactctcatgctccaagactagcttagatgccaccctctgcgccacagtaaattgtgtttccctcatcacagcacttctcacattgcaatacagttatttgccagaatatgagactcaggagagctggggttatcccaagcaccatgcacagggcctggcacttacaggatgctcaagaattactggttgaataacgaatgaataaatgagactgagcagcctcagagcctccgccttgccctcaccctttgcattataacatcaagrctctgcagtaggtgagtaggagctcgtacctggtgctttgccaaggtgtgccagaccgaatcagggctcactgcatgcctcagatttatgccctatgctcatggctgtggggccagcctccccgatcacataaatcactatgcggcaatctggctcccaagctggggagcctctgaagctcacaacactttgcagagaagccgccagaattaggcataaatccacttcttgattggataagcaaacactccactgcatgaaatgatttactaaattacaatgcacagtgacag

SEQ ID NO: 96714 - DNA, 614 bp, Homo sapiens
tcctagaagtgtcctttatgtctcagtttagagatcctctcttctggaaagtcaactctcatgctccaagactagcttagatgccaccctctgcgccacagtaaattgtgtttccctcatcacagcacttctcacattgcaatacagttatttgccagaatatgagactcaggagagctggggttatcccaagcaccatgcacagggcctggcacttacaggatgctcaagaattactggttgaataacgaatgaataaatgagactgagcagcctcagagcctccgccttgccctcaccctttgcattataacatcaagamtctgcagtaggtgagtaggagctcgtacctggtgctttgccaaggtgtgccagaccgaatcagggctcactgcatgcctcagatttatgccctatgctcatggctgtggggccagcctccccgatcacataaatcactatgcggcaatctggctcccaagctggggagcctctgaagctcacaacactttgcagagaagccgccagaattaggcataaatccacttcttgattggataagcaaacactccactgcatgaaatgatttactaaattacaatgcacagtgacag

SEQ ID NO: 96715 - DNA, 580 bp, Homo sapiens
ttccaacagcacttaaagttaaagtagcctaggttagaatcttacttgacagtaatagaagtcaatagttaagcaccccacctccttctggtattgtaatggaagaccttaatcaggaaacttgagttctggtcccagctctaccattacatcccccaaatttggacccagctgtactgaacatctgtttttgtagttgttttcttgatctacaacttcctgcctttctctggtagcccacgtttttcctctgagaactagtcacactttgtttaatgatatgctgcacaaacctttggatccagatttgagcatgtagtttaaccctggctaatcagaccatttctccagcacggtgattgattcagsgacaggcatatagcttgagacaggcagaccaatgagaactagtcctgaggatttctatagaattgctctcattctttcagggttactaagaagataaaatgcaaaccccgagttattagtggccatttttcaccactatagaggagtgcccacctagaaatgaagcagggctgagaaataaagagagattgtagatgacattattcagagc

SEQ ID NO: 96716 - DNA, 486 bp, Homo sapiens
ttacaagctcatgcacgtgactggtcatttactggagcaaccaccttattttacccccacctctgccgccccctccaggtgttcccaccctgaactttactcactggtgactttaccccttctccacttctaagatatatttcaaacaattcgttcttacattatcacttaatattccttcccaatcattccagggccctcagtgcaataattctttcatctttataatcctccagcccattggttgtatcaccttttcattattcattaatctgctcytaccttctcttgcccccttcatcagcttagatttcatgacccatttttataatgactacctttaaaacatcttaaatcccaggcctcgcttttcttttatcttgttcagatggctagctaaacattagtgaagaaaaatcaaacaagcagaccaactagtttcacttaaaattcgtgaccacagacctcacgtgcatactcaatact

SEQ ID NO: 96717 - DNA, 593 bp, Homo sapiens
ctgccaagttggggatattaataaccsattttgcaggtgaggaaattaaggttcaaagatcacacaacctggaaatttagaccccaatttgcctatatcccaaagttccatgttttttcaattttacctcagggaagtgtgaggccctggtcacagcttcctgctattgccgccaagttgaactgatgtggcaaaatggtgtctggtagattgggattgcaatggcattagaatcatagctctggtctctcatgtgtcaacatttaccaagccttagctttgcaccagccttgaaggtaagtactgtgaacataaccacaaggagaaaaaaatgcccctcccagaaattagtctggtggtagcaaatccagtgggaagaacccagaaccagctgcccagcaaggccggctatggttagtgaagacaaatcatgagagccaagatcctgtcctgaacaccgaggggcccaagggggaggggagctaatttttgaggaattgagaaaagtgttacaaaagaagtgagacttaaaatgagacttacgaaaagataaagaattctcttagtagccagagatggaaaataggtttaag

SEQ ID NO: 96718 - DNA, 593 bp, Homo sapiens
ctgccaagttggggatattaataacccattttgcaggtgaggaaattaaggttcaaagatcacacaacctggaaatttagaccccaatttgcctatatcccaaagttccatgttttttcaattttacctcagggaagtgtgaggccctggtcacagcttcctgctattgccgccaagttgaactgatgtggcaaaatggtgtctggtagattgggattgcaatggcattagaatcatagctctggtctctcatgtgtcaacatttaccaagccttagctttgcaccagccttgaaggtaagtactgtgaacataaccacaaggagaaaaaaatgcccctcccagaaattagtctggtggtagcaaatccagtgggaagaacccagaaccagctgcccagcaaggccrgctatggttagtgaagacaaatcatgagagccaagatcctgtcctgaacaccgaggggcccaagggggaggggagctaatttttgaggaattgagaaaagtgttacaaaagaagtgagacttaaaatgagacttacgaaaagataaagaattctcttagtagccagagatggaaaataggtttaag

SEQ ID NO: 96719 - DNA, 508 bp, Homo sapiens
aatatttaaattcaaagtaattcctataaaatcccaacaaggaacttgagaagataatactaaaatttcacatgagagataaaagaggctgtaataaagaaaattttgaataagtagaaaaaaccaagggacttaccaggtatcaaggtaagtcatcattataaggtgaaaatacagaccaatgagattgaataggaaactccaaaacagatccaagcatttatggaaatgtaacatagaatataatggccatagaaatcagcaaagggaaagtgaactacatratcaatagtcctggtgcagctggttttccaaaagaagataaatagaaccaatcactttctcactccatgcacaaaaaattattccaaatggattaagacctaaatgtgaaaatcagaaccaaaaatgtagtggaatatgtagaagagtattatctttatgcctcgtaatagtagagttctcaaccattgctcaagtgcattattatttctttaaagaaaattaa

SEQ ID NO: 96720 - DNA, 604 bp, Homo sapiens
ggagtggacaggagtggatgcgataagatgtggtttgaagctgatgggtgccagccctgcattgctgagtcaatcaataaagagctttcttttgacccatttctgtgttgtgttcagtcttgagtcttttttatttgctcctttatggtccagggtagtcagaaggtatagagtctactgggagtatggcagaaaacaccctaaacccactggaaatcccgaaggtgatacaaactcttccaccttagggaatcatgctcactgattgagtgcctattgaatgctaggtcccagaaagttaactgttgtccttgttttacagacaaggaaacagagactcagagatggtaagtgagttgcttaaggttacatagctatgaaacagggaagcagaactttgaacccaggtctgtttgatacaaactcagaggtcctttcactgcatgctgttgcctcyttaaagcgaattaggagaaagggcatgggcctggtgaggaagaggctagctcaaaatgggatggggaaaaagtgttttaacacagacagtacttcagagtttgggatctaacctaccagcactccagaaaacaaaagatgatgatgt

SEQ ID NO: 96721 - DNA, 604 bp, Homo sapiens
ggagtggacaggagtggatgcgataagatgtggtttgaagctgatgggtgccagccctgcattgctgagtcaatcaataaagagctttcttttgacccatttctgtgttgtgttcagtcttgagtcttttttatttgctcctttatggtccagggtagtcagaaggtatagagtctactgggagtatggcagaaaacaccctaaacccactggaaatcccgaaggtgatacaaactcttccaccttagggaatcatgctcactgattgagtgcctattgaatgctaggtcccagaaagttaactgttgtccttgttttacagacaaggaaacagagactcagagatggtaagtgagttgcttaaggttacatagctatgaaacagggaagcagaactttgaacccaggtctgtttgatacaaactcagaggtcctttcactgcatgctgttgcctctttaaagygaattaggagaaagggcatgggcctggtgaggaagaggctagctcaaaatgggatggggaaaaagtgttttaacacagacagtacttcagagtttgggatctaacctaccagcactccagaaaacaaaagatgatgatgt

SEQ ID NO: 96722 - DNA, 604 bp, Homo sapiens
ggagtggacaggagtggatgcgataagatgtggtttgaagctgatgggtgccagccctgcattgctgagtcaatcaataaagagctttcttttgacccatttctgtgttgtgttcagtcttgagtcttttttatttgctcctttatggtccagggtagtcagaaggtatagagtctactgggagtatggcagaaaacaccctaaacccactggaaatcccgaaggtgatacaaactcttccaccttagggaatcatgctcactgattgagtgcctattgaatgctaggtcccagaaagttaactgttgtccttgttttacagacaaggaaacagagactcagagatggtaagtgagttgcttaaggttacatagctatgaaacagggaagcagaactttgaacccaggtctgtttgatacaaactcagaggtcctttcactgcatgctgttgcctctttaaagcgaattaggagaaarggcatgggcctggtgaggaagaggctagctcaaaatgggatggggaaaaagtgttttaacacagacagtacttcagagtttgggatctaacctaccagcactccagaaaacaaaagatgatgatgt

SEQ ID NO: 96723 - DNA, 586 bp, Homo sapiens
ttcaattactacttttaatagaagaggcaagaatgggcattttgccttgttcctgctcttaaagaaaaaatagttcagatttctaccattgagtatgatgttagtggtggctttttttttttttttttttttcaatatggagtttcactctattaaccagactggagtgcagtggcatgatctgggctcactgcaacctccacctcccaagttcaagcaattctcctgccttagcttctctagtagttgggwctacaggcatatgccaccacaccctgctactttttgtattttcagtagagatgggatttcaccatggtggccaggcttgtctctcttagctcctgacctcaagtgatctgccagcctcggcctcccaaagggctgggattacaggcatgaacctctgtgcccagcccagttgtggactttcgatatatgaccttaattatgttgaggtagcttccttatatttaaaatgagttaaatattttcattatgaaagttttttaattttgtttaatgctttttcttcatcaaatgagataattcagtattcattcatcattctgttaatgtggtgtat

SEQ ID NO: 96724 - DNA, 586 bp, Homo sapiens
ttcaattactacttttaatagaagaggcaagaatgggcattttgccttgttcctgctcttaaagaaaaaatagttcagatttctaccattgagtatgatgttagtggtggctttttttttttttttttttttcaatatggagtttcactctattaaccagactggagtgcagtggcatgatctgggctcactgcaacctccacctcccaagttcaagcaattctcctgccttagcttctctagtagttgggactacaggcatatrccaccacaccctgctactttttgtattttcagtagagatgggatttcaccatggtggccaggcttgtctctcttagctcctgacctcaagtgatctgccagcctcggcctcccaaagggctgggattacaggcatgaacctctgtgcccagcccagttgtggactttcgatatatgaccttaattatgttgaggtagcttccttatatttaaaatgagttaaatattttcattatgaaagttttttaattttgtttaatgctttttcttcatcaaatgagataattcagtattcattcatcattctgttaatgtggtgtat

SEQ ID NO: 96725 - DNA, 597 bp, Homo sapiens
tcagtcttcatgtgtgtggcacggccagagcttgcgcttckggctgtgtgtgtgtgtgtgtgtgtgtgtgtgtgtgtgtgtagatgaaccacttactcatttactgatgggcttggatgttgtgggggtggggagcagggtagtcacatctttaactctcaagccacagcaatgacctagggtccgagtggatgccctcagggtgaaggtagcttcaggttgctttgtgcctagcctgcctggcctgcgaaaggcccagtaagtggggaattcacaactatgtggagccttcttcagcccttctgaggtctcaggtctgaccctgacatactcaccagtgccctgcccttcccattttatcagaagctttatcctactgtaataggctgctccaaagaccagaattctgccccctcaccaccaccatgtgtttccaagtgaggcttggcaggggactcatcaacagagtcacttatgatgtgggtgcaggactacgttgcaaggcaacttttgtcactttggcctccatgtctggaagggcatggcgctgacgttgctggtcagtcacaggcagtgtctcagaaatactaggtgtct

SEQ ID NO: 96726 - DNA, 562 bp, Homo sapiens
agtagatacaagtgaggttgctcttaggaaatgaggaagggggtcccagaaccctacctgttctgccacatcctcctcccacctcatacatcattcttgaatctttggggtccaaacaacacagttcaaagaccactcatctagtcaaaaacctcattttacagatgagaaaacagaggctcagagagggtatgtcagttgtcgagggccacacagcaagttggcaatgaggttagaactggaaccctccctcctggctctctggtcaccaagcctaactgcataatacaatacctccrggtattgaaaagatgagctagttttcctcctctgggcaaccttggtggaaaggaatatccttcaagttgtgtcaacattatttgctcactctaggggctctgactacatagctgatttttttttaagatctttagctgaatcggtctgaccttgttagaacccttactggaatcttttcccagtgtcctattcaccagtatttcttttcattgagctaacttagaataacctagaacaaaacagaaaatgaaaacatgcatgg

SEQ ID NO: 96727 - DNA, 456 bp, Homo sapiens
tgcgtttccaacgccgggtcccggccaggscaggccttccaggccagcgcggaggccagactatcagtcactgaaatccaggcgagcatagtccgcctcctgggcaggatgattgaaaacctttggaggacgatgaggggaaatgtggaggttggaagtgctagggaagccgaagcagcgcgccacctcctagctcctctctatggaaaagacagctttgctgtcggaagggactttagagatcatgacttacaaaaactgcaaacctcctcttcagatgagaaggttaagcccaaacgggagggcaggtgaacagctcagggtcacagcggtccgtggtggagaccaactccagctttccatcgtggtcaatgtcccttttcggttcccgctcgcccgcccgaacactcgcccgcgcttcctctgggagacccctctttgctttcgttttgttcc

SEQ ID NO: 96728 - DNA, 517 bp, Homo sapiens
cagctttgctgtcggaagggactttagagatcatgacttacaaaaactgcaaacctcctcttcagatgagaaggttaagcccaaacgggagggcaggtgaacagctcagggtcacagcggtccgtggtggagaccaactccagctttccatcgtggtcaatgtcccttttcggttcccgctcgcccgcccgaacactcgcccgcgcttcctctgggagacccctctttgctttcgttttgttcctgggcaacagctgctcccamccccaacctccccagggaccctccagtcgccctcgctgacccgcggcttagggtccggaaaattaaactgcgaaaagataaacattatttccagtcggctttgcgggattaacgcttgtaataaagagcattagctggaggtttctttcaaggcactctcgaccccaccccctactagggggccaggtagacccctccggagaccgcagaggtggcagaggcgtcctagggcttccagttgagagtagggccc

SEQ ID NO: 96729 - DNA, 345 bp, Homo sapiens
ccactctgcagaatggagataatcaggagcagtgcgtgtccgccgtacacctccccgcctccccacacccggctgcccctggcctgctaggccgagaccatggccggcgtgtttggctgggcctggggctgaggcagcccctcagggcttttccctccttaagccggtgcgcctcttggggtcttttccggctgcggaccgygcaccctaggagccttgtacttactcctccaaccccggcaccatccggggccttgtccttctccgggccgggcaccccccggggcttgtcccccctgacccatgcacccctcgaggacttgattcccctcgccccggtgcaca

SEQ ID NO: 96730 - DNA, 612 bp, Homo sapiens
accatcacatgcataatttyttctactattaacatctctcgccatactggtaagtttgttacaattgacaaaaccacattgacacatcattgttacccaaagtgcatagtttgcattgggttcactcttggtcttatgcattctgtggcttaaacaaacatacaatgaaatgtatacagccttatggcactatacagaatagtttcactgccctaaaactcttctatgctttgtttattcatccctcctttcctccaaaccctggtaaccactgacccttttactgtcttcatcattttgccttttccagaatgctatatagttggtatcacacagtgtgtagtgttttcagattggcttctttcacttggtaatatgcatatataagtttcctccctgtctttttctgacttgatagcttatttcttttcagtgctgaataatattcaattttctggatgtaccacagtttatccattcccacactaaaggacacctttattgcttctaagttttggctcttacaaataaacctcttataaacatccatgtgccagtgttcatgtggacacaagttttcaactcatttgagtaaataccaagaagcacaat

SEQ ID NO: 96731 - DNA, 605 bp, Homo sapiens
ttgtgcagctccctagtgacataaaatcaatcacttacatccttgcatgtagtctttctcctgctcattgcacatactggtggagcaagacagctattaaaatccattaacctgatattcttctttaagttgagagatgtgtccagatgataggataaaatatttaagaaaaacgtttactagagagttcagatggtctgttttgtcaggttcaccctcactcactggaaaacatttcttttgttgaaacgttaagcagtgcmtccaggaaggaaataaattaattctaacttcctcagtgagtggcattttctgagtctgaagctcctcaacatggttccttagggtaatgatcacaaagtcaagagatcaagaccatcctagccaacatggtgaaaccccgtctctactaaaaagacaaaaattaaccaggcttggtggcatgcatctgtagttccagctactcgggaggctgagacaggagaatcgctggaacccgagaggcggaggttgcagtgaccagagattgcaccactgcactccagcctggtgacagagtgagactccatctcaaaaacaaaaacaaaaacaaaagggttacccag

SEQ ID NO: 96732 - DNA, 605 bp, Homo sapiens
ttgtgcagctccctagtgacataaaatcaatcacttacatccttgcatgtagtctttctcctgctcattgcacatactggtggagcaagacagctattaaaatccattaacctgatattcttctttaagttgagagatgtgtccagatgataggataaaatatttaagaaaaacgtttactagagagttcagatggtctgttttgtcaggttcaccctcactcactggaaaacatttcttttgttgaaacgttaagcagtgcctccaggaaggaaataaattaattctaacttcctcagtgagtggcattttctgagtctgaagctcctcaacatggttccttagggtaatgatcacaaagtcaagagatcaagaccatcctagccaacatggtgaaaccccgtctctactaaaaagacaaaaattaaccaggcttggtggcatgcatctgtagttccagctactcgggaggctgagrcaggagaatcgctggaacccgagaggcggaggttgcagtgaccagagattgcaccactgcactccagcctggtgacagagtgagactccatctcaaaaacaaaaacaaaaacaaaagggttacccag

SEQ ID NO: 96733 - DNA, 605 bp, Homo sapiens
ttgtgcagctccctagtgacataaaatcaatcacttacatccttgcatgtagtctttctcctgctcattgcacatactggtggagcaagacagctattaaaatccattaacctgatattcttctttaagttgagagatgtgtccagatgataggataaaatatttaagaaaaacgtttactagagagttcagatggtctgttttgtcaggttcaccctcactcactggaaaacatttcttttgttgaaacgttaagcagtgcctccaggaaggaaataaattaattctaacttcctcagtgagtggcattttctgagtctgaagctcctcaacatggttccttagggtaatgatcacaaagtcaagagatcaagaccatcctagccaacatggtgaaaccccgtctctactaaaaagacaaaaattaaccaggcttggtggcatgcatctgtagttccagctactcgggaggctgagacaggagaatcgmtggaacccgagaggcggaggttgcagtgaccagagattgcaccactgcactccagcctggtgacagagtgagactccatctcaaaaacaaaaacaaaaacaaaagggttacccag

SEQ ID NO: 96734 - DNA, 586 bp, Homo sapiens
gctgcatattctcacgctttgtatgcatgtgttggtatctctagcataaggtatcaacaaaccactgaccttatttattctctgtcaaaattcagaatctgtattctgtcatatgaggtataaacattgttaacatacacagtgtgatttttcagaaaacaatatttcagtgaagtcaacaaaataaacttctttctcctttaaaaaatgattatagaggggaagaattcaaaaaggggttctgggcagctgggctgtggtttgggactgggcgttgtttgctgtccatggtgctgatccattcttccctgcatcctgtgggggctcactctccagaagaaccacagaacggttacctgcagagttcttatctggaaccacttgacaaggtttcttttccctacagaggttgaagttgaggaaaaaactcctttaattgacttcaggattccaaataaacattgagtaaacttcaatgggactcagagccattgtttaatatctactccatggctrcatggctaggattgtgttctagtaaggaaatgaatggcatatccaatgtgtgaagaattgtctttctgtt

SEQ ID NO: 96735 - DNA, 533 bp, Homo sapiens
cttggcatggagccttggttgaagaaggagccccagccctggaagctagtgrtcccgcacatggggctctgggctgcccttatccccacctcccactcgagggcacttgtggcagcaggagtgtgggcaccaggcagaggacacacgtgccctccattattgaaagtcctctctgtgcactgcaggtcttcttgtgtaccaacacttttttcttcccatttctttctccatgtttaccatcaacactgtgagaataactgaagtttccttatccaaaaaaagggtgctactccagattccgccactactgttttcgaaaagcacaaaaccaacagagcctcagagggggctgaccctctttctggatcccacctccatccccccgaacttacgtagtgctttcctcagcagccaccgaggcctccagttccgtctccaaagatgatgggttccttccagtgggtgcaaagtgagagccccagtgattggtgttcatagtgggtcagtgtgaacaacgcccaatggcctgcctg

SEQ ID NO: 96736 - DNA, 610 bp, Homo sapiens
tcatgttatctacatgagtgaaaaatttagaatcagtactccattattcaatcgattcacttattcatcaaatatttattgagcacttatttgggtgctagagatacaatgacaaaagggctgacaactctgctaatgttaaggagcttaccatayaggagatttgttttgtatagcacttagatgacagactgccaggtagggtgactccacatagagccaattgaaggtgtatatgtatgtagcagaactacagtcatgctttgcttaatgatgggaatacattttgagaaatgtgtcattaggcaatgtagtcattgtgtgaacattgttgagtgtacttacacaagcctaaatgatatagcgtactacacacctaggctatatggtgtatcccattgtttctaagctacaaacctgtatagcatgttaccttactgtatattgtaggcaactgtaaaacaatcctaagtatttgtgcatctaaacatagaaatgttacagttaaaaatacggactataatcttataagaccattggtgtatattgtgaccattgactgaaatgtcattacatagtgcacaactattttcaggcttctacaagtata

SEQ ID NO: 96737 - DNA, 594 bp, Homo sapiens
gcctgtctaatagtgaggctggaccaggacagtagagagtcctcactggtccccatcactggactagcaagcatgagtaacaaggaacaggagaccactgctggacaaggggcaagcatgcatcaagaaacatccctccaaggtacaggtccactgggaattctgaaagctgcaagtaaagcaggaacattttaagaaaacaaaacaaaaaacctctggaaacccagcctctactctaagcacaatgctttgaagttggaggtacactgaaagcaaccacaaaaacaaaaacaaaaaaatcccaaacccacaccacatcctaataaactgactcaactccacttttcttctggacatgtacacaactcttctcctaagccttaaaattccagaggaaggaagtagattttaatttttctttttaaaaawtttttttattatactttaagttctgggatacatgtgcagaacgtgcaggtttgttacataggtatacacatgccatgatggtttgctgcacccatcaacccgtcatctatattaggtatttgaagtagatattttttaaagaagaaatatttaaagagaaattag

SEQ ID NO: 96738 - DNA, 364 bp, Homo sapiens
agaccattattctaagttaagtaactcacgaatggaaaaccaaacatcatgtgttctcagtcataggtggaagctaaagtatgaggatacaaagacataagaatgacacatggacttttgggactctcacgatagggtaggaggggcgtgaggaacaagactacacattgggtacagtgtatattgcttgggtgatgggtgcatcaaaatctcataaatcactactaaagaacttattcatgtaaccaaacacacctgttccccaaaaaactactgaaattwaaaaaaaaaaaaaaactaactacaactacctctcccctaaccaattcccgatccagcttctaccagcaactttaaaggggaa

SEQ ID NO: 96739 - DNA, 551 bp, Homo sapiens
aattctcttttatttgtactacaatgataaaccagtaacatggccacagaaagctttttgggagagcagtatcccaacttgtrtctgggagaaaagcgagatgtttagctgatagcactgacagcagaaaaattttcctttttatgttaggaaaacacagtctgtatcctgattgaggcctgtaagtggtatagatggtagaaaaaggatattctttcccatttatgacatttttttctaaggatgagtaattatttttactgataagtccattggcaagagatggtttttggtaagcaggctgtgttcaaattggataaaacacagaaacaatgtttaccaatattgccactctgtgaaatggactgtagctttatggctgtatacacattgagaaaggcattaagttcgctgcattttcactttaagattttctagtccacggaaatcaggaactacaggtgtcacaatgaagacagtggccagagtcctaataaataggtttatgcttttatactcacaaatgtgcaatcatttattttaaaaatgct

SEQ ID NO: 96740 - DNA, 589 bp, Homo sapiens
aggacccttttcacttttatttaaattttaggatcatatttccaatatacacacaaccacaatcaaactacatgaaacaattttaattttaaaaagactgcattaaatttataaattttgtttgttttttgttttttttttttggggggggggktttgtttgtttgcttatttgtttttgagacaaggcctcagtatgtcacccagacagtggtgcaatcttggctcaccacgacctctagagatcaagagatcttgagcaccacaatctctggtgctcaagcaaaccttccaccttaacctccagagtagctgggactacaggcatgtgccaccatgcctagctaattttttatttttattattattgtttttaaattttagtgagatgagatctcactatgtcacccagtctggtcacaaattcctgggctcaagtgatccacctgacttggcttcccaaagagctggaattaaaggcataacccatcatgcccagcccaattaatttttttatattgactgagtatatagcaatcttattaattcaatctaacagtttctagtttgattcatatgaaattattcga

SEQ ID NO: 96741 - DNA, 647 bp, Homo sapiens
cttataatttatatggaaccacaaaggatccagaatagacaaagctatcctgagcaaaaagaataaagctggaggcatcacattacctgacttcaaattatgctacagagctatagtaaccaaaacagcatggcactggcataaaaataggcayatagaccaatggaacagattagagaatctggaaattatacatctacaataaactcatttttgataaaggtgacatgaatatacattggggaaaggacactctcttcagtaaatggtgctgggaaaactagatatccatatgcagaagaatgaaactaactagatgcatatatgttgctatataaaaccaaatcaagttggattaaacacttaaatctaagaccccaaacaatgaaactactgaaataaagtattggggaaactctccccagcaaagatagatctagacaaagatttcttgagtaatatcccacaaacaggctactaacacagaagtggataaatgggatcacatcaaattaaaaagtttctgcacagaaaaaaaatcaacaaagtgaagagacaacctagagaatggtagaaaatatttgcaaactttccatctgacaaaaaattagtacaactgctatgaagaacagttgggagggtttgga

SEQ ID NO: 96742 - DNA, 596 bp, Homo sapiens
taaggtcaagatcctataagaaatctcagattctatattgtacctagtggttctatttttgtgatggaactttaaccgatatattcacattatttctagtacagaagtgcttatactttacttctgccattgtaaaatcacatcattccttctgaatttggagagtccagatcaatgtcagcagcccctagtatcattccygccctgcagagaatagtcaccaaagagctgttcaagtgtgtgtgggggctctctttctaatgtgtttctcaaagccctggtgaagggagagtcccaagactctcctggacagcagagttaggagagttagggtatagttcagtgagagttacataatgaatttatgtgcataattctgatatttctaagacttggatacctttctttacatataaaaaagtcagtcccagcatttcaacaatattcattgtaggctatgtctggatctaagttttagttcacctttcaggcatactattactgctactctaggccattcaagcaagcacactaaatctggagattttgctacatgcacttatatcaatgcatttagcttgattcaaacaattatt

SEQ ID NO: 96743 - DNA, 580 bp, Homo sapiens
cacaatgctgcctgtaacaggtacataccttaatatttcgatatataccttatttaatatttgcataaatgtatatttaaaatgtatagrcacataagcaaaacttggattaaaatatctgtaataccaaactattttcctgtaatattatatgtcaatatttccacatattttcaaatattatgtgaaaacatgaattttgatggctgtatactttcctgtcatgtatccacatctttcctctattgaaaatttaaattgtacctgctttttcaaattataaatactactatagtaaaaatactggtataaaaaagctcttgatagcaactgtgaggaaagattcctaaaattaagatgattgggtcaaaggtacacatactttaaagggttttttatagctattttcaaattattttctagaaaggacatacaatttcatgtacttactggttgtacatatcaatgttggtttcaatgtttgatttagaaatacaacatgaaaacacagctataatggaaatatctatgtagttttaagagaagaactatagtaagtaggtatattcaccagggaagg

SEQ ID NO: 96744 - DNA, 597 bp, Homo sapiens
aatgtgggtttgaatttcatgtctctaatgattactgatgttgaacattctttcacatgcttgttgccacatgtatgtcttcttttaaaaagtgtctgttaatgtcctttgcccactttttaatggtttgggtttttttttttttggtgttaatttgattacactccttataaattctgcatattagacctttttcagatgcatagtttgcaaatattttctcccattctgtaggttgtctgtttattctgttgtcagtttgttttgctgtgcagaagctatttagtttaactaggtcttayttgtcaatttttgtgttgtaattgcttttggtgtctttgtcataaaatcttttccaggtcctaccttcagaatggtatttcctaggttatcttccagagtctttatatttttagcctttatatttaagtctttaatccatctgaagttgatttttgtatatggtataaggaaggggtccagtctccatcttctgcacatggttagtcagtcattccagcaccatttattgaataacaattccattcaccattgcttgttttttccaactttattgaagatcagatggttgtaagt

SEQ ID NO: 96745 - DNA, 619 bp, Homo sapiens
tctgttttctttctccaattctctcccctctctttgttgtttagaatgtataattgaatgccagtaatatgatgggactctattctgtttatttttaggtaccaacatctcttgtctgaattacaatgaaagttctctaaaaagactcttatcccccaatactaatcttcttcagtccatttaccatctgaacgcaggatgatagctcaaaaacaaatttgatcatgcctctccctcccttttctttttaaaatctttcaaccgcttctcattgtgacawgtccaaagcctttggcatgacataggagcccttcgtaatcatctccctgttctttgcaagtctctgctctcaccacacttacacccatcccactgccatttccagtgaaatcaaactgcttgcactctctaaaagggcaatacttcccatatctcaaggcctttgcacacatcctccgtcatcatccttgtgtgactaacttctccttgtccttaagatttcaatttaaacattaagtcctctgggaccttctttgcatatctgtagcactaccacttctcctgctggctaaacctttgcatttctataactgtagagtattcaagtccccagtgaagt

SEQ ID NO: 96746 - DNA, 562 bp, Homo sapiens
tattgtcagatgccttgtctaccctaaaggatatacagtggttctcaaagtgcagtccatagaccagaatcctttacatttttgaaaaacattaaagacttcaaggaacttttatgtaggtcacatctattgatagtcactgtgttcaaaatttaaatagaaaaccttcaaaaattgcttattaatccatttaaaataacaataataaacacattccatgttagcataagcatttatatatagattaaaaagactgtgtttttctccccaaactaaaaaggaacactttttgcatttaaaaaaattatttaatactggctcaatagaagatagctaaattcttatatctgcttctgtgatatgttgtaatatgtaattttggtagaagtatatgaagaaaatttagcttcatgctactgtgtagttggaaatgagagaaatattttaatgtctttttcatataattttgsgtttcttttttgatacattagtcaaactaaacaggtggtagttttctaaaggttagttgcaatgtagaatctgaaattatatcaattaactt

SEQ ID NO: 96747 - DNA, 590 bp, Homo sapiens
ccttgttctacatgccattgtttccaccacattattccccttcacccagcttctgcatagctctttcagcaacacagtatctatccttctatatttcctcatgtttatgtaatggtatacaaacatgaatgcacatctataaatatacagaaatggaggttgtgttagccaaggtttcagcgggaaacagatggcaagttccaatgaagatcatttaaagagaacctaataatgggattgtttatgaaagtgcagagacgttattgaaaagtggaaggagtgtagctataccccagtgctttaatatttttaaggataaaaggaaaagggatcaggggagtggttaccagaacctgaaggaaagtcatatagaaagggctatctagagggaaatgataatgttcagagactcaaccaaccatgacctcattttccagcctctctccaatcatctgccagggctctgaytgattggctaaagctgatgagaagtcagagacttaagagtgtcccatccaggtcagtatcccagggcacagagcagagtggagagggtgaaaagtggatctccaggggagaaataaagacat

SEQ ID NO: 96748 - DNA, 611 bp, Homo sapiens
ttttgtggctgatagaatatttgtacacactttatctcatctgacttayacagaaatctcatggcagatatttttattgattgcatcattttatagataaagaaaataagactctgggaaatgaatggaattgcccaaggacaacattagtaagtagggaagccagtcctcataactaggtcaatgggcagtgaacgtgttttctactggacaacaaaaaaaaaggaagggagggaaagtgggaaggagagaacaaaagaaggaagagaaagaaaggagggaagagagggaggacaaaaggaaggatagaaagaaaaccgctaatttttaattgcaattttctaacattttgactagacatttatccttcttgctgtcctcattgatcttttgcagtgtggtcctacatcttgttattgtttacttgacataaaatatcccttaatactctaattactaattacgtaaaaatagagaattgaaatgttaaatatttcgattaagtacgcatattttagctaaaagtatgactcacaaaaaatcaaagtatattttccaaaatctcatttctactatggcttgtaatttcaggcaatgtaaggctgcttatt

SEQ ID NO: 96749 - DNA, 611 bp, Homo sapiens
ttttgtggctgatagaatatttgtacacactttatctcatctgacttatacagaaatctcatggcagatatttttattgattgcatcattttatagataaagaaaataagactctgggaaatgaatggaattgcccaaggacaacattagtaagtagggaagccagtcctcataactaggtcaatgggcagtgaacgtgttttctactggacaacaaaaaaaaaggaagggagggaaagtgggaaggagagaacaaaagaaggaagagaaagaaaggarggaagagagggaggacaaaaggaaggatagaaagaaaaccgctaatttttaattgcaattttctaacattttgactagacatttatccttcttgctgtcctcattgatcttttgcagtgtggtcctacatcttgttattgtttacttgacataaaatatcccttaatactctaattactaattacgtaaaaatagagaattgaaatgttaaatatttcgattaagtacgcatattttagctaaaagtatgactcacaaaaaatcaaagtatattttccaaaatctcatttctactatggcttgtaatttcaggcaatgtaaggctgcttatt

SEQ ID NO: 96750 - DNA, 601 bp, Homo sapiens
aattactgaataaagaagggaacaaatttctttgaagacagaatagaaaaaacctgtggaagcaaatatacaacgtatatttttatttgaagtatttcgatagaaaaaagtgtcattgacgtgtcataatgcctaraatttccacaatttcctccttcgagtagagtcatattttctagaaactcaaatatggcagaaaatgtgtcaccttgattagaaccatcagtatacatgaattcagcaagtaggcagtagaaaacacattctcaagagaactggtcaaaagagaggtaattttgatcaagaaaaagcattataaacttattgaaagtaacaaagcttgagagaattcttgagtaaggtggcggcatggagcaaaatatgcctagaaaggcagtccctcttctcacaagagtgtgctcataggtctatctgtggaatgtgtaaaacaatcatctgtggtcccagctctacgatgggtgccattcacaaagacacagcagttcagcatccaaaatcattaaaaaaaatttaacctacttcaatatctttttaaggcatcaaaggaaaagctgatttgtaatataaagcaaaactcctc

SEQ ID NO: 96751 - DNA, 594 bp, Homo sapiens
caacaccagccccaaatatgaaactcaagcattgggagccagcttttgcctttgtcgatttaggttatgcatttctctaagatttgacatggacatgtggatctacagctctgtaaaagagatacttttatcttcatattaygttggtttgaggaagaggagaagatgaaaaggggtgataaagtttgaatagtcaaatatttaaaggttttttttaaaagcactcattcaaactgtatttaaacttcataaatctaaagtactctgaatgcaattcaccttggattctgatttaatagcatacaacctgatcccactctaccccaacccttagaaaaaggatgtgagcaggagcagcagataaatactgggtgtataaacagttagacatagaaacttcgaataagatttggtagaataaaacctctgtagactagaaatgtacctttttattaattgggtagaatcatccttgttatctctgccacaagggagctgtttctgtctacactaggacaaatttacataaattaaaattttgctttaagtttcaagttttagagggaaggaaagaactatttactgattattaga

SEQ ID NO: 96752 - DNA, 594 bp, Homo sapiens
caacaccagccccaaatatgaaactcaagcattgggagccagcttttgcctttgtcgatttaggttatgcatttctctaagatttgacatggacatgtggatctacagctctgtaaaagagatacttttatcttcatattatgttggtttgaggaagaggagaagatgaaaaggggtgataaagtttgaatagtcaaatatttaaaggttttttttaaaagcactcattcaaactgtatttaaacttcataaatctaaagtactctgaatgcaattcaccttggattctgatttaatagcatacaacctgatcccactctaccccaacccttagaaaaaggatgtgagcaggagcagcagataaatactgggtgtataaacagttagacatagaaacttcgaataagatttggtagaataaaacctctgtagactagaaatgtacctttttattaattgggtagaatcatccttgttatctctgccacaagggagctgtttctgtctacactagracaaatttacataaattaaaattttgctttaagtttcaagttttagagggaaggaaagaactatttactgattattaga

SEQ ID NO: 96753 - DNA, 623 bp, Homo sapiens
tcttgaaaattagaacaaagtgagaaaatgatagaaatggaaaatattaaagagggagttcagaaaagaataaaaggctaaaaagaaaaacagaaagatacattttccaaataggtgatttgtttaatgtttgaaaactgaaaacaatgaaagagaataggattgtggtaaacaggacccacataaaattcatgaactatatattatatatttgatgtttggacatcaacacaataaaaatgagcaaaacagttattgtcatcaagacctcactttgaatcgattaagtaaaatccctatattttcacatcttttcttacatgaagattgatttaccaataaagacaatgagacaatgtgaggacctcggtttgactctcgccctgaccccatgctaggaagakttgggaaagaaggctttctggagatatgccatgccaactgtccataagtggtatacattctcttttagaaaacaattatccaaaaaaagttcaaaacattgtatttcatatcataagagttcagagaataaagagaattgtgtagtgctaataattttaaaaattggagaagattcatggaaggaagcagaacttgatctgagctttgatggaagaagg

SEQ ID NO: 96754 - DNA, 611 bp, Homo sapiens
caagtttgcctcaagttggctctgaatcctcatttaaagccatggctactgtcaggcaaccatctcatcataattttctccttctaggttctggtagctgctcctagttcggttccaggaattcaaactccttcccactcttttgttagcttcagaatgcttcattatccattgaggatttccctactcttaaatagttcttttattaagctctcttgtattaaactacttgagagtgccatttgcttccctccagaacactgacagaaaaaggagctaaaacttatatggttccaaatataagctaggatctgtttaagtgctttataaatgttaacctttataataactctacaggatactattataacccccattatataggtgagaaaactgaggcacagggagttaaaaaactagtttctgatctttttygaatttttcttttctctcagtttcttttttaatttgatttctgttattcttataacaatcacagttctgctgataagtgatttagtagacttcagtttctataacttaatcaagatagcaagtcaactgatactttcattaggatttaattttgagaggtattcccatcattatac

SEQ ID NO: 96755 - DNA, 606 bp, Homo sapiens
gctggtgttaggcaacaaacacttggtttatagttttatgttgagttgattgttgaaagtagtactttgtacatcaccacaaatatgggggtctgttgtgacccacagaatgatacgtggggctttacaggctgccattttaatcagaagaacaatggcataactagactattgtttcactttgcctttctaatgtaaagttctgaaaaagaaacatgtaactggctgtgagtaggtaaaacagaaaactaggaggaggaagwgaagaaggagaaaagggaacatttctgtgcttaccttaagttaaataaaccttactaaatacttttcctgattattctcaaagcataccctgctttctctgcaatcagggtcttaccctcattgccagcaacctgagtcattgtctcattttcaattttgacctgcaagtatccgagagttgtgaaagttttgttgttcttaaactctttctgaccaggaaagagccaaaagggaccagggctcaaggtaaataaaccttaggtagacagagcagtgtcaggaagcctcagagaaaatcacacatccaaaaaatgccgtatctcactcatgacaatctttcca

SEQ ID NO: 96756 - DNA, 550 bp, Homo sapiens
aagaattgaaactaagggtacagagaatcttttggaagcttcactctgaagggcagcaagggagacttyctttaaaccaactttcttgaagtataagccatatacaataaaattcaccagttctagctgtagtgttcaatgagttttgacaaatgtatatacctgtttaagcaccaccacaatcaagatatagaacatttgttttgttcgttttattgagacagtgtttgactctgtcacccagactggagtgcagtggtgaaatcatggcttactgcagctacgacctcccaggctcaagccatccccctacctcagcctcctaagtagctgggaccacggatgtgcatcaccatgactggctaattttgttttgttgtttgtttgtttttctagagacagtgtttcaccatgttgtccaggcttgtctcaaactcctgggctcaagtgatcttcccacctcagcctgacaaagtattgggattacaggcgtgagccaccatgcctgacctagaacattttcatcacctcaaaaatatcttttatgctc

SEQ ID NO: 96757 - DNA, 636 bp, Homo sapiens
attgcttttctgagaatttgctagcgatgtctgagcaagaaccaaaagggtttaacccacattgaattctgcagctgtttaataaagcaaacagcatcatccagggaataatagatgtgcagactgtctgctttaaaatgtgtttatatttccaattcacacagactgtgaattctcattgacaacctagagaccagacataaccaacacctcatgttacattggaaacatattagtatcaggtaaaaataaataaataaataaataaacaaactaactaaattaaaccaaaacaaaaagtgaaacaaacaaaacccagttctgatgaaaacccagtttatagtgagtccattgagtctgtctagccaccagatggtcattttcatgatcactgattaaataatggaaacattctacttccagtccagcagatgatcctggctgatgtctgaggttcmttgcttggggctgttacctagaatatattcaaacggcctttccaggtagctccctgggcttgctcacagcatggtagataattttccacagtgaagattcccatagagtcaggagaattgtatactaccattattccagagagtaaaacatcagctgtagccacaaccctacacaaag

SEQ ID NO: 96758 - DNA, 573 bp, Homo sapiens
gatgtcataattttctcctttaaagtatttcgaaaatcctcaatcacaagccaccactgcaaaataatttctaaataaataagcaatatttatttactgaacatttggtgaaatttcatcagatcagatttcacccaaaatttgatcagatttcacccaaaaatgctaaagaggcatttagtataytctaaaacacaatattaccctcaaattattcaacatattacctaaattgtatattatagaatattttgtcttgtgcatatatttatgtgccaccttcagaattgaaggtaatacatttatacacaacatatggaataaaatattctccataaaatttaggatatacaagtataaaattgcaagatatctgaaaactattttctgagttcttagaatacataggaacaactaatgaatacataaatgatacaagtaaaattaatcttcactgtagttcacaagtatgtaggaagacaggataacaaaataagagtaaaaacatttttactaattaagcaaatgacatcatttcatagaaacaagctcagtttgttgaaaaattcaacg

SEQ ID NO: 96759 - DNA, 573 bp, Homo sapiens
gatgtcataattttctcctttaaagtatttcgaaaatcctcaatcacaagccaccactgcaaaataatttctaaataaataagcaatatttatttactgaacatttggtgaaatttcatcagatcagatttcacccaaaatttgatcagatttcacccaaaaatgctaaagaggcatttagtatattctaaaacacaatattaccctcaaattattcaacatattacctaarttgtatattatagaatattttgtcttgtgcatatatttatgtgccaccttcagaattgaaggtaatacatttatacacaacatatggaataaaatattctccataaaatttaggatatacaagtataaaattgcaagatatctgaaaactattttctgagttcttagaatacataggaacaactaatgaatacataaatgatacaagtaaaattaatcttcactgtagttcacaagtatgtaggaagacaggataacaaaataagagtaaaaacatttttactaattaagcaaatgacatcatttcatagaaacaagctcagtttgttgaaaaattcaacg

SEQ ID NO: 96760 - DNA, 596 bp, Homo sapiens
ttaagaaacaataaagataaatgaaagaaagggaggaatgattgatttcatggttctgagaagtaggaagacacaaatttatgtacatagcttattggtagaatacatgagtcagtctaggcttggtgkctcaagtccataatccgtataatttgggagaccgaagcaggagaatcacttgagaccaggagtttcaaaccagcctggccatcaacatagtgagacccctaactttattatgaagaaaagatgaaagagataaagaaaagagaacctgagttaaagtgaataaaggatgtgtaagaggaggaggatgaagtcagaataaatatgtcatctaggaaatccaggtccctgcagtgctatgtgcagctatgggcagagatgaccagagctgagtagaggaagctgcattcagttccctatgagaagtaaaacaacatatagagaaacttacagaggatgacagaaagattttacagcaacttaagaaaagcaaaaacgcaaaatggttcagaaaaaaaaaaacacctaagaaaaatctataaggagctgatgaaaatgtgccatgatctagatgtggagctgctccagga

SEQ ID NO: 96761 - DNA, 510 bp, Homo sapiens
tgaagctgcagaccttactggtgagtgttacagcacttaaagttgttatgtccacagtttgttccttcsgatgtgtccagagtgtcttccttctggcaggttcatggtcttgctcacttcactaatgaagctgcagaccttactggtgagtgttacagcacttaaaggtgttatgtccagagtttgttccttcagatgtgtccaggggttctgtctctggcatgtcatggtcttgctcacttcaagaatgaagctgccgaccttagtggtgagtgttacagcacttaaggtgttatgtccagagtttttccttcagatatgtcagcgtttctccttctggcagattcatggtcttgctcacttcaagaatgaagctgcagaccttactgttgagtgttaaagcacttaaaggtgttatatccagagtttgttccttcggatgtgtccagagtttcttccttctggcaggttcatggtgttactcacttcaagaatgaagctgcagacctt

SEQ ID NO: 96762 - DNA, 542 bp, Homo sapiens
ttgtccattcaaattccagctcccagagaaaacttcctcttgtacagttttgggcttggaaaatatccttcaaactatctagccctgtcttatgtgaacacttttttagaaattcacagagaagatgaggttccccccccccctttccttttcatatccgatttactagatactcattgtaaagtctgccagacttccattgtctattttctttgatacaattttgaaagtatccatcatcagccaaaccagwacacgcaggtctggtttcatcctaactgttcatgcccataaccataaaaaagaagacacagattcatccctcatccctcaggtctcgttgatttgtgccaaatgagggcaattactagacatatggacacctcctctacctaatgaaaagctgactccctcattcagtcatgttttttatccaaatatgttttaagtgaaccagcaaaaccatgcagagccacttcacagagtatgcagtttgtggactgaaaatagagggatcaggagctgaaatccagcccatgctc

SEQ ID NO: 96763 - DNA, 603 bp, Homo sapiens
caggcccttctaatgcacattcaagtttgaaaagaactgaagtaaccttagcaccaggtggataawgatgatcatggaagctccttgggaaagacctgcagacagaggacccagaatgacatctccctgaaggcaaaagaaagctttttcatctgtggtgtaaaaagtgggattaaaggaactccctcccctagccaagagaagccatgagggactgtcccgtgaggaatggtgcattctagcccagatactacacttttctcacagtctttgcaacccacagaccaggagattctctcaggtacctacaccaccagggccctgggttttgaaactgggcagctgtttggacagacaccgagctagctgcaggagattttttcataccccagtggcccctggaatgccagtgagacagaaccattcactcccctggaaagggggatgaagctagggagctaagtggtcgagctcagtgcatcccaccccccatggagcccagcaagctaagatctactggcttgaaattctcgctgccagcacagtagtctgaagtcaacctgggaggctcaagtttggtggggtaggggcatctgccattac

SEQ ID NO: 96764 - DNA, 603 bp, Homo sapiens
caggcccttctaatgcacattcaagtttgaaaagaactgaagtaaccttagcaccaggtggataaagatgatcatggaagctccttgggaaagacctgcagacagaggacccagaatgacatctccctgaaggcaaaagaaagctttttcatctgtggtgtaaaaagtgggattaaaggaactccctcccctagccaagagaagccatgagggactgtcccgtgaggaatggtgcattctagcccagatactacacttttctcacagtctttgcaacccacagaccaggagattctctcaggtacctacaccaccagggccctgggttttgaaactgggcagctgtttggacagacaccgagctagctgcaggagattttttcataccccagtggcccctggaatgccagtgagamagaaccattcactcccctggaaagggggatgaagctagggagctaagtggtcgagctcagtgcatcccaccccccatggagcccagcaagctaagatctactggcttgaaattctcgctgccagcacagtagtctgaagtcaacctgggaggctcaagtttggtggggtaggggcatctgccattac

SEQ ID NO: 96765 - DNA, 521 bp, Homo sapiens
ctgaggctttgtttacactgcgagggtaaaactacctacacaagcttcagcaatggcagactcccctcccccccgccacctaaacttgagcatcccaggtcaaccacagacagctgtgctggcagtgagaatttcaagccagtggatcttagcttgctgggctctgagggggtgggactcactgagccagactacttgtccccttggcttcagccccctttccaggggagtaaacaattctgtctcgctggaattccaggcactactggggtatgaaataaaaattcctgaagcccccawttttgtgcttgaaacccagggccctggtggtgtaggcactggagggaatctcctggtctgtgggtttcaaagactgtgggaacagcatggtatctgggcccagtgcaccgttcctcactgcttcccttgggtaggggagggaatttcctgattccttgcacttcctgggtgaggtgatgccccaccctgctttggctcaccctgcgtgggctgcacccact

SEQ ID NO: 96766 - DNA, 596 bp, Homo sapiens
gctcaactgatcttcctggctaattttaagtagtaaacttggtaaaatgactactatagaataccaaccactctgattctcacattgaagatgaaagtgtacaaacctgaaactatgaatcctagaactaaaagtctttctagaaaacatawtaccaaaattcttctgcgttgtgttgttacatacacacaaagtatggtgattcaccaaatgtgctacttttatatcttatataccagacatatggacatgcatggacaattagaaacctactttaagtaagatagcaaggggtattcacagcacattccattccactccagctttatttgtttgccagaagagttcctggtctctcacatactaaacacatggtggatctgactaaaaggtatagaagaaaaccagaaaagaacagtgacagccaactgtagttgacaagggaacaaacatggagaagtgtgtcttaggagtcataagattcaacagctgtgtgtcctgaattaattggggcatagtgaaaggaatagaactagaaagaactaggaagctcaaagggagtataccactgtcttccctcttcttcaagtaaagac

SEQ ID NO: 96767 - DNA, 596 bp, Homo sapiens
gctcaactgatcttcctggctaattttaagtagtaaacttggtaaaatgactactatagaataccaaccactctgattctcacattgaagatgaaagtgtacaaacctgaaactatgaatcctagaactaaaagtctttctagaaaacatattaccaaaattcttctgcgttgtgttgttacatacacacaaagtatggtgattcaccaaatgtgctacttttatatcttatataccagacatatggacatgcatggacaattagaaacctactttaagtaagatagcawggggtattcacagcacattccattccactccagctttatttgtttgccagaagagttcctggtctctcacatactaaacacatggtggatctgactaaaaggtatagaagaaaaccagaaaagaacagtgacagccaactgtagttgacaagggaacaaacatggagaagtgtgtcttaggagtcataagattcaacagctgtgtgtcctgaattaattggggcatagtgaaaggaatagaactagaaagaactaggaagctcaaagggagtataccactgtcttccctcttcttcaagtaaagac

SEQ ID NO: 96768 - DNA, 609 bp, Homo sapiens
ccactgttggattaaaggaaatccttgccatagagactaagcacacaactttaattaactcatcattttctaattagcatccccagagccctgtgcctgggcagcttatgttgcagaatgtgccatcaagcttttccaaacagctttataaaataaagttttgttttcacaaacatttcttttaaaaagtttggaaaatggaggaaaacatttgagaaaagggtaaaccacccaaaagtcattcatataaaatcrcttaatgattttggtctatttgtttagagtcattgtatgtattttaactcaacatagttgagactatatcatatagagaagggcctttctctattttttcatttaatatcttgtgcaggcattcattttagtacaaaattgttatcagtaataacaattactgatatatcagcatattgtacttagtagaagtactgtaacatttaaccattgttgctacttacattcaaagtgaactttagaattaagtttctagaattccttataacattttaacttagaaatttcattcaacttaggaacttaacgttaaccagttaatttcaccactaaaaaacacacagactgtcacat

SEQ ID NO: 96769 - DNA, 620 bp, Homo sapiens
ctgtggagtctatcctggactttattcctatttccattgtctgtagtcaagctcctcacacacttattcctagattttgtaaaaacttctcatctgcctgctctggttcttgctgtttttttccagtccactgtgtaaacctttccagacaaaggttcttaaaaccttcttctcatgtggtcacatccctatccaattatcttaaatatgtcttttttttyctctttttgagatagagtctcacttcatcgcccaggctggagtgcagtggcattatctctgctcaccacaacttctgcctcctgggttcaagtgattctcatgccagcctcccaagtagctgggattacaggtgcctgccaccatgcccagctaatttttgtatttttagtaaagacagtgttttgccatgttggccagtctggtctctaactcttggccttaagtgatcccccaagcttggcctcccaaagtgctgggattatgggcatgagccaacacagctgaaattaaatatgtccctcttaactttgactttaggttctgcacgtttttctagatgcagttttttcacattgacctgatccttcaccaatatgcagcccacactctataaatgg

SEQ ID NO: 96770 - DNA, 494 bp, Homo sapiens
ttggggtcccaataggaaacagatggcactctcgagctgggtaattgagaagcgttcaataaagagactatttgcaaaggtgtaggcaccgtgtgatgtaaggaaaacacaagggatgtgcagagggctggcaaataacatagggagagcatcatgaccccatcacctggaggggaggggaggaagcactacgagtcctggggagtgagaggaccaccttggtagatgggccaagaagcctgagccaacctaccaggaaaaagccatgggaagaaataccccaacctctctctccctccaccctgcaatcacctgctgactcctgctgacctatctcaacctgaagccaaacaatagtgggggctagtaagtccaaaatctgtagggcaaatggcaggtatgaaagatgcggggaagagtagatgttgcagccttgagtcctcaggctggaaacccaggcagaatttctrtgttacagcctggaggcagaattc

SEQ ID NO: 96771 - DNA, 586 bp, Homo sapiens
gttcgctgcttgcggagtctaattaacaagagcgaggtctggtagaaagaaagtgactttattaaccaacactagtaaaggggaagctgctggattcctcctatccaaaggaactgctttgtrtctagcggggaaagcaagagttcaaaatgggaaaacttggtaaggaaggcatgcaggaattgtgctgattccaatgcctgtgtgtcttgctctggtggctgtcttgggtcccaggccacctggatctcaggctggcatcatcttaacaatggctgggttgttgactagtcaccttgaagtcatctctggaattctgtagcggggtctccagacttggtctgcctaaaaattagccccataataattatgtgcctttagacactagcatgcagttagataaatgtgaagggactatattcggtgagaaagagggacgtggagtccattttaaggctaaggaaaaaggcttctgcagtttgcttcaaggttatatgttgaaatccaagagaaaggaaaaaaaacgtttaaaatgcattttgaagttaagttgcctagttacagaatcatagactcgaggctggtg

SEQ ID NO: 96772 - DNA, 606 bp, Homo sapiens
gctgccaacaaatgcatgagaaaaggctatagagtctttctatgattcaggctaaaactaaatttgtaaaggagtcgaaacacacatgaatcatcccctcttgtccactgtgatcatgactatctccaagtcaaaagctagccaagaatcacaatgaagactagcctgttgtgacaactgaagttgtttgcactaaatatctccaccaaggaattccaacagcttctaacatctaccacataacaatttagattaattggcctattaagaccctcataatctggcaccatgatctctatcccatctaatttctgaccactttcctatatgggctaaggtggtctcactattccctgaacattcttgttcattcttaactccaaaacctttctcatatactttctctgtcttctagcactgtttccttcttcttcatctattcaaaccaatttattcttaaattccagtgytaggattatctgatctgtgaggtttgtcatgattgcaaatcatactgtttctccctgctctggatttctgtactgtccctcaagaactggaggtgcaagctaatgtttctattgatgtcaatcatcattaatggac

SEQ ID NO: 96773 - DNA, 609 bp, Homo sapiens
ctggcccactgtggtagagtactttcaaaaatattcactccttcccccttttacctccacaagggaaatatccttccccaaatccttgactttgggtttggctgcatggcttgccttggcagatgtgacasaaatagggggttgaaatgtgcttgagtggttgggcctggcctcttgcacccctatcattgcaacgagaagagtgtgtcttgactagtcattgcaacgagaagagtgtgtcttgactagtcactggtccaaggcacatgaagaagatgaagcagagccacccagctgacctgcagctctgtgagattaaatgattgctattttaagataccgagttttggggtggtttgtgacacagaatttttgtggcaatagctgatacacatcccaatagctccacaaacggtcattatcttcccaagttctgtttctgtccccagaaaatatcattcttgaccgaaaaaatgcaaatataatattttcctatgggcttctaactcaaacggcatagggtgtttcagaaaaatgttcctatttaattagttcagtttgtttttattcctgacatcatgcttccctctaagtactgtgagtgcacag

SEQ ID NO: 96774 - DNA, 609 bp, Homo sapiens
ctggcccactgtggtagagtactttcaaaaatattcactccttcccccttttacctccacaagggaaatatccttccccaaatccttgactttgggtttggctgcatggcttgccttggcagatgtgacagaaatagggggttgaaatgtgcttgagtggttgggcctggcctcttgcacccctatcattgcaacgagaagagtgtgtcttgactagtcattgcaacgagaagagtgtgtcttgactagtcactggtccaaggcacatgaagaagatgaagcagagccacccagctgacctgcagctctgtgarattaaatgattgctattttaagataccgagttttggggtggtttgtgacacagaatttttgtggcaatagctgatacacatcccaatagctccacaaacggtcattatcttcccaagttctgtttctgtccccagaaaatatcattcttgaccgaaaaaatgcaaatataatattttcctatgggcttctaactcaaacggcatagggtgtttcagaaaaatgttcctatttaattagttcagtttgtttttattcctgacatcatgcttccctctaagtactgtgagtgcacag

SEQ ID NO: 96775 - DNA, 659 bp, Homo sapiens
acagtactccattttattcatctgttctcttactactgggcttttgggtgattttcagttttgtgctatcataaacaaagctgtatatgactcttgctgtacatatgccaaactttctccaaggtattcacctaggaatgaaattactggttcatgaagtgtacttacctacaactttacagctaatgccgaattgttttccaaattagttttaccaattcctatgagcttattactttgcattctcaccaacrtgaaattgtcagaaattttagccaatttcacacctaatgctcagattttggttttcaaacaccattctgcaataaaaggaaccagcttccttggagaaatagctgattccagggctagggcaagtaataaacaagatgatcttggaatatcttgtagtgccagagagtaagaaaatgctccacgaaacaaaaacaaacaaaaacacagcagccaatcactaaggagctcctaattgccaaacctggaacaatcagagcagcaaaataaatacagtgtaccctagaacaacatgggtttgagctgtgagggtccacatacacatggatttccttccacctctgccaccctgagacagcaagactaacacctcctcttcctcgtcctcctcagcctactcagtgtga

SEQ ID NO: 96776 - DNA, 507 bp, Homo sapiens
attaataattctacttcattaagaacattcctaaatgaaactgactttttaaaactgtaagcattttttgcactctcagtgcaaatgtctgcacagtgatagaagtaaataatgtcttagtattattatgaaaatcattttgacctcatagacttcctgaaagagtttcagggaaacamcaccatatacaactgtaggaataaatggagcattttaaacagatcaaatatatttgcataatctatcccctgggaaagatcttgatataaatgggccaagattggaagacagaaaatgaggcgggattgatgatttggtgtcctggctgaatatcaactattgcctgtatccccattcccagaccttaagtctccaggcttgaatgagatgactctcccagcctgcttgttcccaggtgcacagccatagtgcttgtaaagggcatgagctttctaggcagacaggtctgtgtttgagtcctaactctgccctcatctatgtgtaaac

SEQ ID NO: 96777 - DNA, 583 bp, Homo sapiens
gtatgctagaaaaaagctatgcctgagagaaaaataagatgtagtctctgcattcaagaaatgcatcgcctgataaagaggaggatgtagaaaataattaaaacaaaatataataagtgtagctgaatgacttgggacagtaattcacaaaatgtgtagcgctcttataatagcaagtataagtaaaagatgtagttacccgagatttttccctgaattcattctaactactagctatctcctaatttatgatttttttggtccatcatctgtaattcctgcctaatctagtttaaaacaaataagtgaaagatgtgaatcattaagaacaaagaagaaawagtaaatcactattatttataatatgaaattccaattctgagttaatatttaaaatgttactgtatatctttttaaaggtaaaacttttgaaattttctctttctcatgtgagtgtggttaaaaggatgaacagaaaaatacacagaaacatttaaaagaaagatagatctgaaacaacaacatattttaattattaactgatttacttcctaccaccctgtacttcctggcatccccagat

SEQ ID NO: 96778 - DNA, 609 bp, Homo sapiens
actataacccattgcttgttttgtatgaccttgaagccaagagtggtttttatatttttttagtcatggaaaaatatccaaagaagaaaatactagaggacacttgaaaattacatgaaattcaaatttctgtgtccaaaataaagttttattggactgcagccatacttgtttgtttacatcttgtctatggctgtggcagcatggaattgttgaaccaaagactgtatgcccacaaaacctaaaatatttacagcaaaactactgcagacctctgatttaccccagtttaacatacttcaaattttaaataaaaatttgttcacttaaagccttagtcttttttgtttttgtttttgtttcccttagaaaaggttaagaaaaaatgtagttaccaaccatasgtcaactaatcactaaaaataaaagatagtttattttcatattcttcttgtgtatgtactttgcgaaaagcagtatatttctaaatatatgaattttagtgatacggtcaactgtaaaacttctgaatccaaacaagcccaaatagtgcaatactaactagtaaccgtttccagagctctagaaaatgtgaaaacatgtccttaa

SEQ ID NO: 96779 - DNA, 595 bp, Homo sapiens
gagtaatattccattgcaccaatattttgtttttccattcacccactaatggaaatctgggagggctttgagtgaagttggagagacgagtgtcttgtaacttgccytgtgctgtgctatttactagctatgtggctttggacaagcgcctaagctggcttgtgcctcagtttcctcgtttgtttcatgtagataattatattggattcttaaaatagttgaatgaattgtatcaaataatgccagaaaagctcatagcataatacttggcaaataatgggccctcaataaataatagctgttttattgtaggattatatgagaaaagggggaaagaaagaacacaaatgtgtgttatagtatgtgtttagtgtgtgtttgttctgttgtagctgctgaaaccttcatgctttgtttaaaaaaaaaaaggcatatctgttttctctgctttgtggtttagtgtttttggcccccaccccatcaataaacatgaaattttacattttagaagcagttcactagacagaatgtctgtagtggaatgttacataattcacatttagatttgaagagctcattataaaaaacctgacac

SEQ ID NO: 96780 - DNA, 595 bp, Homo sapiens
gagtaatattccattgcaccaatattttgtttttccattcacccactaatggaaatctgggagggctttgagtgaagttggagagacgagtgtcttgtaacttgccctgtgctgtgctatttactagctatgtggctttggacaagcgcctaagctggcttgtgcctcagtttcctcgtttgtttcatgtagataattatattggattcttaaaatagttgaatgaattgtatcaaataatgccagaaaagctcatagcataatacttggcaaataatgggccctcaataaataatagctgttttattgtaggattatatgagaaaagggggaaagaaagaacacaaatgtgtgttatagtatgkgtttagtgtgtgtttgttctgttgtagctgctgaaaccttcatgctttgtttaaaaaaaaaaaggcatatctgttttctctgctttgtggtttagtgtttttggcccccaccccatcaataaacatgaaattttacattttagaagcagttcactagacagaatgtctgtagtggaatgttacataattcacatttagatttgaagagctcattataaaaaacctgacac

SEQ ID NO: 96781 - DNA, 604 bp, Homo sapiens
tgctgtacgccaatctgtctatgtctggtagtataattatttatgtcactaatgtttcratatctttgtatgtattcaggttataattattgaggaataaaatatataaaagtaaaatactggtgtacctacgcgaggaggtactccagtctaggcagagaccagcaaacatattaaaagctataatagttatcttccttcctctatcacattataaaatctttaagggcagtcttagtttctttagagacattcctattgcctagcacagaaaactgccttccaataaaatgtatttaaaataaattaactctagcaaatctttccaaaatttttaatttccctatactctagtaagaatccatagcttttcataatttatacttgcctatcattatagaatattaggcccacacctaagatttgctcaccaggcaacagctgttcactagtttattattttagtaaatataattttttaatattttacctggataaattactaaatcctttatattcatattatcatgtcgtcttttcagaggggctacttttacttctcattatataggtgagaaatctgagaccatggagacatgactag

SEQ ID NO: 96782 - DNA, 604 bp, Homo sapiens
tgctgtacgccaatctgtctatgtctggtagtataattatttatgtcactaatgtttcgatatctttgtatgtattcaggttataattattgaggaataaaatatataaaagtaaaatactggtgtacctacgcgaggaggtactccagtctaggcagagaccrgcaaacatattaaaagctataatagttatcttccttcctctatcacattataaaatctttaagggcagtcttagtttctttagagacattcctattgcctagcacagaaaactgccttccaataaaatgtatttaaaataaattaactctagcaaatctttccaaaatttttaatttccctatactctagtaagaatccatagcttttcataatttatacttgcctatcattatagaatattaggcccacacctaagatttgctcaccaggcaacagctgttcactagtttattattttagtaaatataattttttaatattttacctggataaattactaaatcctttatattcatattatcatgtcgtcttttcagaggggctacttttacttctcattatataggtgagaaatctgagaccatggagacatgactag

SEQ ID NO: 96783 - DNA, 604 bp, Homo sapiens
tgctgtacgccaatctgtctatgtctggtagtataattatttatgtcactaatgtttcgatatctttgtatgtattcaggttataattattgaggaataaaatatataaaagtaaaatactggtgtacctacgcgaggaggtactccagtctaggcagagaccagcaaacatattaaaagctataayagttatcttccttcctctatcacattataaaatctttaagggcagtcttagtttctttagagacattcctattgcctagcacagaaaactgccttccaataaaatgtatttaaaataaattaactctagcaaatctttccaaaatttttaatttccctatactctagtaagaatccatagcttttcataatttatacttgcctatcattatagaatattaggcccacacctaagatttgctcaccaggcaacagctgttcactagtttattattttagtaaatataattttttaatattttacctggataaattactaaatcctttatattcatattatcatgtcgtcttttcagaggggctacttttacttctcattatataggtgagaaatctgagaccatggagacatgactag

SEQ ID NO: 96784 - DNA, 604 bp, Homo sapiens
tgctgtacgccaatctgtctatgtctggtagtataattatttatgtcactaatgtttcgatatctttgtatgtattcaggttataattattgaggaataaaatatataaaagtaaaatactggtgtacctacgcgaggaggtactccagtctaggcagagaccagcaaacatattaaaagctataatagttatcttccttcctctatcacattataaaatctttaagggcagtcttagtttctttagagacattcctattgcctagcacagaaaactgccttccaataaaatgtatttaaaataaattaactctagcaaatctttccaaaatttttaatttccctatactctagtaagaatccatagcttttcataatttatacttgcctatcattatagaatattaggcccacacctaagatttgctcaccaggcaacagctgttcactagtttattattttagtaaatataattttttaatattttacctggataaattactaaatcctttatattcatattatcatgtcrtcttttcagaggggctacttttacttctcattatataggtgagaaatctgagaccatggagacatgactag

SEQ ID NO: 96785 - DNA, 585 bp, Homo sapiens
tagctgtgaaagtcctagataacaccttcttccaatataaggctgttttgtctacattgaaaatttgttatgtggtataaccaacttcatcaatgatcatagtgagatcttcaggataacttgttgtagcttctatatcagcacttactgcttcaccttgcactttcatgtgatggaggtggcttctttccttataattcatgaaccaaggtcttctaacttcaaaattttctcttcagcttcctcacttctcttagccttcatagaattgaatagagttagggctctaaatcaggatttggtttaaggaaatactgtgtctkgtttgatctatccacaccactaaaattctttccatatccactatcaggatatttctcttccttatcagtcatgtgttcactggaactgcacttttaatgtcctttaatctatatcttgtttgccctgagaaataagtactggcagtgagctgcacagagtgggttgagatcttttcctttgcattcacgacttggctgtctggcacaagaggcccagcttttagcctctctcagctttcaacatgccttccccactaagctt

SEQ ID NO: 96786 - DNA, 583 bp, Homo sapiens
ctagttgcttttttttgcttttgaatttttttaaggggaatcatctatattgtttgcggaatttatttatttatttattaatttattatttttgagacggagtcttgctctgttgccaggctggagtgcagtggcacgatctctgctcactgcaacctccacctcctgtgttcaagggattctcctgcctcagcctcccaagtagctgggactacaggcatgcattatcacacccagctaacttttgtayttttagcagagacggggtttcaccatgttgatcaggctggcctcaaactcctgacctcaggtgatccatctgcctcggcttcccgaagtgctgggattataggtgtgagccaccgctcctggaaggaatttattttttttaattctgtgtttttaagatttttattttagtgaaactataatttattcatttttattgtttgccatttaaaaaatataacacaatttaactatgtatattactatggattagcatttgagttgttttgaatttttttttgtgttacaaacaatgctgcaattgatatttctgtgcatatgtgcattgaattct

SEQ ID NO: 96787 - DNA, 583 bp, Homo sapiens
ctagttgcttttttttgcttttgaatttttttaaggggaatcatctatattgtttgcggaatttatttatttatttattaatttattatttttgagacggagtcttgctctgttgccaggctggagtgcagtggcacgatctctgctcactgcaacctccacctcctgtgttcaagggattctcctgcctcagcctcccaagtagctgggactacaggcatgcattatcacacccagctaacttttgtatttttagcagagacggggtttcaccatgttgatcaggctggcctcaaactcctgacctcaggtgatccatctgcctcggcttcccgaagtgctgggattataggtgtgagccacygctcctggaaggaatttattttttttaattctgtgtttttaagatttttattttagtgaaactataatttattcatttttattgtttgccatttaaaaaatataacacaatttaactatgtatattactatggattagcatttgagttgttttgaatttttttttgtgttacaaacaatgctgcaattgatatttctgtgcatatgtgcattgaattct

SEQ ID NO: 96788 - DNA, 583 bp, Homo sapiens
ctagttgcttttttttgcttttgaatttttttaaggggaatcatctatattgtttgcggaatttatttatttatttattaatttattatttttgagacggagtcttgctctgttgccaggctggagtgcagtggcacgatctctgctcactgcaacctccacctcctgtgttcaagggattctcctgcctcagcctcccaagtagctgggactacaggcatgcattatcacacccagctaacttttgtatttttagcagagacggggtttcaccatgttgatcaggctggcctcaaactcctgacctcaggtgatccatctgcctcggcttcccgaagtgctgggattataggtgtgagccaccgctcctggaaggaatttattttttttaattctgtgtttttaagatttttattttagtgaaactataatttattcatttttattgtttgccatttaaaaaatataacacaatttaactatgtatattactatggattagcatttgagttgttttgaatttttttktgtgttacaaacaatgctgcaattgatatttctgtgcatatgtgcattgaattct

SEQ ID NO: 96789 - DNA, 516 bp, Homo sapiens
gctatactatattcgatagatatactatactatagatatagtatattctataaatctatgaagtagtcttctttttcatcaagtgttgaatttccatacattccacattcctcaccttaggaatttagtactaacctgactattggctatggcagacattctcaaaatttagcctgtctcagaatgtccaggaaggcttgttaaaacacagatagctgagccccaccttcccctagrtttcactgcaataatcttagaatgggacctgaaaattttcattttttatcaattctttggtaatgctgatgttgttggttgggaaggaggtgagggaatgcatcttgaaccaccgaactaaagtgttaagctgttaagttgtatctcctctcaagcgttaacatttaacaggggtcaaagagttttgacacctaagaaagttagtgattgaaaactgtactgtggtgatcactctgcacctctctgaaatgctaccaaaccaaaattgggcatagaaat

SEQ ID NO: 96790 - DNA, 602 bp, Homo sapiens
atgattgctcagctactgtcttttatacaaacactatatccaccatggtgtcctccaaaaatgaggttttctgtttgccacaaggttataaatgctcatgcactcggcaccactcctttaattatcatattgctcaatttatctttataagccacctgtctcctattacacaaaacttgctttaaaagtggaaggagaatgttactttcaggacttgataccagtggtttttttttttttttkttttttaaattctgcttattaatataacagaatatcgttggctgaaaggacaagtagagggcacatccctaatatcaagcataaggcaggcatctattttgcattaataacctgtaattcactgggcttccaggaagttattttttctgttcttttatcccatcttttttgaccattccaccttgtgaaaaaggctactgcccctgcccatacttcttcaggcatcatcagttcagcgtgttcaagccaattttcagctatgcacctttgagcttcttctggccattcaagcacactttatctagaaaaatgagaatctctaagtaccaaagaagtagtgtctcctgggagcaggttcc

SEQ ID NO: 96791 - DNA, 606 bp, Homo sapiens
ctggccactttatttacctactcaagcctcagcaatactgggcacccctcccccagcctcactgccrccttgcagtttgatctcagactgctgtgctagcaatgagccaggcttcatgggtgtgggaccctctgagccaggtgcagaatataatccctggtgtgctgtttggctaagacagttggaaaagctcagtattaggggtgggagtgttctgattttccaggtaccatctgtcccagcttcccttggctaggaaagggaattcccgaccccttgcacttcccgggtgaggcgatgcctgccttgcttcagctcacactccatgggctgcacacactgtctgacaagccccagtgagatgaacctgctacctcagttagaaatgcagaaatcacttgtcttctgtgtggctcaccctgggggctgtcgactggagctgttcctgtttggccatctgggaacctccctggcttgtaggatttctgatgaaagatcctttgttagcctgataaggtttcctttgtaggtgacctgccccttctctctagctatcttttatttatatttatatataatttttattatatatgtatatatataatt

SEQ ID NO: 96792 - DNA, 606 bp, Homo sapiens
ctggccactttatttacctactcaagcctcagcaatactgggcacccctcccccagcctcactgccgccttgcagtttgatctcagactgctgtgctagcaatgagccaggcttcatgggtgtgggaccctytgagccaggtgcagaatataatccctggtgtgctgtttggctaagacagttggaaaagctcagtattaggggtgggagtgttctgattttccaggtaccatctgtcccagcttcccttggctaggaaagggaattcccgaccccttgcacttcccgggtgaggcgatgcctgccttgcttcagctcacactccatgggctgcacacactgtctgacaagccccagtgagatgaacctgctacctcagttagaaatgcagaaatcacttgtcttctgtgtggctcaccctgggggctgtcgactggagctgttcctgtttggccatctgggaacctccctggcttgtaggatttctgatgaaagatcctttgttagcctgataaggtttcctttgtaggtgacctgccccttctctctagctatcttttatttatatttatatataatttttattatatatgtatatatataatt

SEQ ID NO: 96793 - DNA, 604 bp, Homo sapiens
accactaacatgtatacttaaaaatggtaaagatggtaaattatatatgtatatttggtctaaataaaaaatacataagtgaataaaagatattaaaccaaaaaataaaaattgaaggaagtgcaagtaaaaagcaaacaaaaaattttcacagtggttcttaactctggctgtacattagaatcatctgggccctgccccaaactaaatcaaaatctctggaggtgggacctgggatatagttgtttttccaaagattcttatgtgattctatcgagcagacaatgttgcagatctagttgggaaagagacttacacaagttgatggtaatgctgtgatagaggcatgaaaaaagtgctattgaaatcatacattctgcttggggctgcaatagaatatgagctcaatgagggtagaagcctttgtctgttttgtttactgatatgtctcaagcactagagcctttatttctagcacagccrctcaattcatattgttgagctgtagctttaagagtgaacaaatagaatatcagcaaggcaaggtatgggaaaggcattcaaagaagaggtacttggaaaataaaaaaataaaaaaaaaagt

SEQ ID NO: 96794 - DNA, 534 bp, Homo sapiens
ttgaaatattgggatttacatactgaaaatatgtaacattgttggaaataagtatctcctaagataaaggaaattataaaactaggtacacctgaaaaggattctgaatttaatgtcttaacagattggaaaggcaattatttaaagaaaatttctttttgaaggaagactcatgaattagtgaaaaaaaaggtcatatttcaacaagttcagactaaggtaatatgatccttaggcaagagatattaaaaagaaaaagttagtagagaggatattstaacaacgttattataaattgatcccaataaggaaggaaagggggaaatatttgaagaaattaaagtaactgccattctaacaagataaaaaatcagtctataaaagagacatgtatacaaggataaatagcagtgaatcatttcaagaaggttagtaccccagatatctaagactcttgaaaaattctgaagattttatattttaaccttttagagaaatttttggaacaagagaaaaaaagactgataggtttct

SEQ ID NO: 96795 - DNA, 588 bp, Homo sapiens
taatcttaatacctaaatttaaaaagcaaaaattgtttgttagttatctctccattaggggtatgcttgttacacttaactaatattcctgttcttgagttagggcccctttccactatccaaggaaagctaggaaatatcgattccttttataattttttttttccatttcagttgaacaccttattttagtgtsaaattttttcaaataatttcaaataacttgccttcaggtcatataggtaaataattatttcatttcctttaaagtgttgcataacattatattgacccattaactactgattttagtttttcactaagaagaaattcttccatttttaacttccaatttctcgaagcagacaataataatgtaagtgtatttctctatgtatggaaggttttaggtagctaggactattaaaatgaatgtagatgcataggttttatgaaatatttttcctttaagcaaatagaaaatactggttatactaagagattagatcaggaaagaagtttttgtaaaattagtccaaagataaaactgtttatgaggccaggtgcggtggctcacgcttgtaatcc

SEQ ID NO: 96796 - DNA, 607 bp, Homo sapiens
agatgtaggctaggaggctaggccagtctcttttcacaattttctgtctgcttatattctagctatgctgacagctgcttagattgtgccgacccagattaaagttgagactgcctttcccagcccactgactcaaatgttaacctcctttggcaacaccctcacagacacaccatggatcaatattttgtatccttcaatacaatctagttgacactcagtattaaccatcacaacataataaaggccatatgtgatgagcccacagtggacattgatgagcaaacagctttccctctaagatcagcaacaagacaagaatgaccaatcctgctacatccattcaatagagaatactctgggagtcctagccagagtaattcggcaagaaaaataaataaaagaattaacattaaaatattttaaaratgcacattctctataaaaagcagtatagagtagtcccttcttatccgtgggggatacattccaagacctccaatggatgcctgcaaccacagataataccaaacattatatatactgtgttttattttatacatacatccctatgataaagtttaatttataaattaggcacaaagaa

SEQ ID NO: 96797 - DNA, 627 bp, Homo sapiens
aaaatttgtatgatgaattaatgcatggcatcagccactggaaaaaatatgattaaaaaaagtattaagaacttttgctaggtctatcaaattgtaagctgtgacagagctctcacccaggcagtccaattctagaactttaatagatgtcctgcataatgtaattttaaaagtcattattaaaatatttgaaagcaaaagtttataaaacagcatagagtaaaataatggtaaaagtaatcaattttagtttagagtttgttttttataattttgcgagttgaaataaagaatataaattaaattatatatgaatttcatctttaaaactgaatattstaattgatgattgggtaaatttcacaaagtgaaaaatggtactttaaacatgacatatttaatacatgaactggattttttctaaagcaaaataaaatgtctataattataactctatcatgtttttgtacttgcttagtagaatgctagtgtttatagtagtgggaatatgctgcaaattaagcctatttagtgcttttttctaattgttggcaacacaaggaaagctttaaaaattacaggaatgtatttaaaattacattatcgttaactttcatggaaatttag

SEQ ID NO: 96798 - DNA, 573 bp, Homo sapiens
agctgctgtgggggaggcgcagctggggctgtgcagtcaagggagcaggtgagggctggaaacaggtgatcccagtaggagctcaatgccccactgagttggtgtgtgggaggctgcgcttctgggtgcagctacagccaccctgcaacagcttcagacctggtcatccctttgttctcagggggctgaggagcaccctgcccccacaggcttggaagtgtgtgctcctgttccctggcttctcctggctcccagcacccggyctggtggagcaaaagtgtggatgtgccccagtagctgagcccaggtgctgtcatgacctgactgagtgtgtgcatgctttgggccacgctgacatgccagccccctgttgcctcaggcccctctggaaactgtttctgaggaggaaactttggggatgaaggaccacgggagggaggccacggggctgagggagggcgggcacaagcctgtgtctgtcccttggtgcacagaggcctgtggctgcctcttggtgcagacatcgtggatgccgtggaaggcatgttgacggcagctggaggcagacaggtt

SEQ ID NO: 96799 - DNA, 573 bp, Homo sapiens
agctgctgtgggggaggcgcagctggggctgtgcagtcaagggagcaggtgagggctggaaacaggtgatcccagtaggagctcaatgccccactgagttggtgtgtgggaggctgcgcttctgggtgcagctacagccaccctgcaacagcttcagacctggtcatccctttgttctcagggggctgaggagcaccctgcccccacaggcttggaagtgtgtgctcctgttccctggcttctcctggctcccagcacccggcctggtggagcaaaagtgtggatgtgccccagtagctgagcccaggtgctgtcatgacctgactgagtgtgtgcatgctttgggccacgctgacatgccagccccctgttgcctcaggcccctctggaaactgtttctgaggaggaaactttggggatgaaggaccacgggagggaggccasggggctgagggagggcgggcacaagcctgtgtctgtcccttggtgcacagaggcctgtggctgcctcttggtgcagacatcgtggatgccgtggaaggcatgttgacggcagctggaggcagacaggtt

SEQ ID NO: 96800 - DNA, 573 bp, Homo sapiens
agctgctgtgggggaggcgcagctggggctgtgcagtcaagggagcaggtgagggctggaaacaggtgatcccagtaggagctcaatgccccactgagttggtgtgtgggaggctgcgcttctgggtgcagctacagccaccctgcaacagcttcagacctggtcatccctttgttctcagggggctgaggagcaccctgcccccacaggcttggaagtgtgtgctcctgttccctggcttctcctggctcccagcacccggcctggtggagcaaaagtgtggatgtgccccagtagctgagcccaggtgctgtcatgacctgactgagtgtgtgcatgctttgggccacgctgacatgccagccccctgttgcctcaggcccctctggaaactgtttctgaggaggaaactttggggatgaaggaccacgggagggaggccacggggctgagggagggcgggcacaagcctgtgkctgtcccttggtgcacagaggcctgtggctgcctcttggtgcagacatcgtggatgccgtggaaggcatgttgacggcagctggaggcagacaggtt

SEQ ID NO: 96801 - DNA, 616 bp, Homo sapiens
gttacactcaatgagaatatatgctgcatttctataatttctcaaatttcttatactcaaatctccctgtgtctgcacaggaattaaagctttgaacatcaatgtagtcagtatgtattcagtggctcttttctctgaagaccaaagaatgtcctctgtcaattttctttcttttttcccttgaagttctrttgtttggatatcttacctagattctataaatgtcttatttttgcccttatttttctttactttgtctttttgttgcattctgttgaagagttttacatctaaaatatataaatattccattgaattataaaaatctgccataagatttttgtctaaaatctttaaaaaaatacttttgtgggctattatggttcccactagccatacgtggctactgagcattgaaatgtgattaggccaaattcaggtatactgttaagtataagtacagtacacaacaattttgaagacttaatataaagatttatttcaatattcttttcttttcattgtgtttttgtttcatgaatctaatgatttttgtttttattgtgtctctttgaatgtctatggtagttttgtaccgtcaactaacctaagttgg

SEQ ID NO: 96802 - DNA, 602 bp, Homo sapiens
tgtcttcatgcttttttttattaagttgatcttcaatctctgttattctttcttccacttgatcaattcagctattcatacttgtgtatgcttcacaaagttctcgtgctgtgtttttcatctccatcagatcatttatgttcttctttaaactggttattccagttagcaattttatcaagtttcttagcttccttgcatggggttagaacatgctcctttagcttggaggactttgttattacccaccttctgaggtctacttctgtctattcatcaaactcattctctgtccagttttgttcccttgctggtgaggagttgtgatcctgtggaggagaagaagtgtgctggtttttggaatgttcagcctttttgcactggtttttcctcatcttcatggatttatctacctttggtttttgctgttggtgaccttcagatggaggttttacgtggacgtactttttgtttatgttgatgctactgctttctcttcgtgagttttccttctaacagtcaagtccctcttctgcatgtcygctggagtttgctgggggtccacttcagaccctgtttgcctgggtgtcaccagcagaggc

SEQ ID NO: 96803 - DNA, 525 bp, Homo sapiens
tcattagaacacgtggggaatgcatgaaaatttacagctgcactcttaggcaaaaaccaaggttcaggcataattgctactaattatctcattgatgagattgattgaggaaaatattcttgattatctgccacatgctttaccctctaaaccagaacttgccaggtgaccttatcaattatccatcgaagtccatggctacatcgctgtgaaaaacagtaggccatcatctgactccccaccttcccactctatcattgcctctcttgattccctaatattaatgtgcataagaatcatctggggattctgttaaaatgtccagaaccctgagaggttctgaccttttagtaggtctggaagagcrcccagaaaaatgcatctttggtttggtttttgtttttgttttgttttggagataggattgcattctgtcacccaagctgaagtacagccttgctgtacttcatatagctcactacagcctcgaccttctgagctcaagcaatcctcctgcctcagccc

SEQ ID NO: 96804 - DNA, 512 bp, Homo sapiens
acttcttttcatctgttatacacagggcttagcacagttcccgacattcggttcraatgaatgacggaaggaaagcagctttgggtagtggggtgctattaagttttattggcaggagatcagtcatgaactttaaggcactggttttaatccagcggaggtactggaagccaattgcagtatgttgaagaatggagaatgactaggagttaaagaactggagatagtatactctgaagaagtttgataaagggacgacaataacacagtttcaagtaaaggaaggtttttttcctcaaaggaagtcataagccttttagaggagacaaaattatttgaaaaagtaaatttgaacaagaaagctgagttgaatggaatcaggaacatgcatagttgcttccctccaagataacagcaaagaaaataagagagagggttttaagataaagaaaggaatattaagggaaccccttggcttagcatagtgaggtagcaggagatggaataggaat

SEQ ID NO: 96805 - DNA, 593 bp, Homo sapiens
cagaaggatagccccatttcattgatgagaaaactgaggcttggggaattcaaaaaaatgtgcccaaggtcttgtaacttagagatgaaaatttaaactctaaagcctaagaccattacaatgaatattctgccctgaagaagttcatgatctgatagagacatattttaggtgcgatgactattaattcattctaaatttcatgttataaattcttactgtcacttcagttatttgaaagcttttgccaaaagcccttgagggatgacattgtccagataatgacttgacagcctcagaatgtggactatcctagtagtaataacatcaaagccttgaaagtgtgcctggcagtgtgcttcatggacatattcatttgtgaagctctccctgggcttgccctctckcacattccaaacgagtccttaggctcttgtatttccttgccttggggaatttttgcacgcagcacgtaaacaaaaactgctggaagtctatgattcctcctgtgttcagtaaatgcttatggcagattgggtagaggaggtggagaaaagagggattctaagggtcaaagaaggacaagagaaagc

SEQ ID NO: 96806 - DNA, 550 bp, Homo sapiens
ttggggcagctgacctgggtactcctgcatccagaccctgcttgcccatgggctcatcccctgcccatctttgtcaggcaccacagttatctccacctcaaataatatatttgcagttttccacagtatcggtgacatatttttacattggctggaatcttcttgccatttctttgatttcctcttttgaaataggaagatcactttttataacttgactgagaacgggatgaaatgcctatttcacatagtctgtctcaggctctaatgctgtttggcactgtgtgaaaaatacaatgtgggaacatgggatgacccatgttcctctgtagaatattgctctcgcttctgtgtcctcgcaagctgtgctcactcttgcatctgtgcctttgttggctgctttcctagcctgggctgccttcacgtgtcagctgctttctttcttcaatgcgcatctcaaagttttmttctagctgtggagcttggaaccttccacccatgcttgacttctttcctccctgtataagtggagtactcactgcaacccata

SEQ ID NO: 96807 - DNA, 581 bp, Homo sapiens
atctcccagactcagttgattcttgtgcctccaccacctaagtaactgagactacaggtgtgcaccaccatgcctggctaatttttttgatgttttttrttgagacagggtcttactatgtgtcccagactggtcttggcttcccgggctcaagtgatccatctgccttggcctcccaaaggctgaaattacagctatgagcgtgcccaactgtaaactgatatatgttattagaatctgcaccatatccaaatgaactttaattttcttccactcttcaagtttggaggaagaaacacatcatttttattgctggtgtcaatttttaagaaaaaaatttcactttaacaaaaccaggattttaagatgaaaacaaagtagaatcaaacaaaaagaaacaacaattgccccccagctcccccgctcaaggaaaaacacctgtgccgttgctcagccacaggatcagtccaggcctcctgtggccactagctgcagtggttggttgtgtgcactgcactgccctctgctgggtgggccagctcacatcttaattttttttttttttttttaaattgtggtaa

SEQ ID NO: 96808 - DNA, 604 bp, Homo sapiens
cacttccacataagtgatgagtttgctaaatgattatgatattaatgattatgagtaagtgaatgtatttatccaaaattaaactaccwtttgttgaacatatattatgtaccaggttcggagccgtatctgtggtaaacaaagctacataaaatgtatctgtccgtggagactcttggtttagataggatgaaaggtagactaaatgaatcatagtacaatgagatggggacaaaaataaaagtgagtgccagttgtgaaagtggcaccaaagaggctgtgatgggctctacttggaggagtcaagacagaggggcataagtggggtcttgaacactgagtgggagttatagaagcttgaaacaaaggtgaagggaaatggaaactgattccaagcggtaggattcattttaaagtgtaatgaagtctttctaaaattggtactatcctggaaaaataattgtgtttaaggtttgttagggctgcattcatttgcagcttgcaggaagcccaattaacagtgctttcaacaggtaaatatttatttgtttcaggcaacaagaatgtgattgtaggccagctgggtctgggatgacggttcagt

SEQ ID NO: 96809 - DNA, 447 bp, Homo sapiens
aaagtttttgccgtttattttgccacctagattgtgctgaatggataagtgaatgaatatgtttcttttgatactgaagcaagtgggttttttcttttattttttgtgattaaatatttggttagtttcttttttcctcttaatttgttcttacttgtcctttattccttagagccacataaggaagggcagggggaaagaatttgaattatctcagtgtttttttttttttgtttttttaaaggagatagaatttgctcttgctattyatttcaagaaattggtgatcttgcatcagccggcttgtttttgaaagatgtttttcttggcatccatgcaaactaacgatatgaactgtatcaaacccagagtggcgtgggccttccttgtactgccttctgacttcttcagctgctatgtctgtacttgccctcctatgtgccctga

SEQ ID NO: 96810 - DNA, 554 bp, Homo sapiens
tataatggcatcaccagttgttcattaatctcctttcccttatgtaaagtctccttttgtcctccctctgccagtctgtaagttttatcatgacatttatacatggaatggattgttaccttttctgggaggagaataaaccataaatatgaacgaggcattaaaagagcttaacataaatcactaagaaaaatcygtagactgtgagaatataaaaatcgctgtgaattataaataatacagcaaggttatataaatcattttatgtaaaggcagacatatatttctacttctcacagtaaggcccagtgattttaatatcattggttggccagcgtctatagtaggaatataggcatggaatatagtagaaagttccatagtgaaaattctgggagatcattggtagcatggaacagtgatacttactttctgttggagattgcatttgctttatattgttatcaaagtatcaaaagaaatcttacattttctctctatatttgctcttggataatagcacgcagatctgtaatcatttaaagaatgaaaat

SEQ ID NO: 96811 - DNA, 577 bp, Homo sapiens
ccaattataaaagatgcttaactttgctaatagggaaatgaaaagtaaaaccctggtgagattccattttacacctattgattgacaatacctaataagcttgataacaccaagtgttggcaaggatgagaagaaacaggaactcttgtatattactgatgagaataaattactacaatcttttaagcaagcaatctagaaatatctggtaaagttgaagatgtccatattctgcaactcagccattctgcctttatgtgttagcctaggaaattgtcacacatagaaataaaagagacatgtacaagggtgttcrttgtagcactgtctacttcaaatagaaagaaagcagaggaatgcataaatgtagggtgatgtttcctccatacagtagagcagttaaaataaactagttgcacatgtatccacatggatacatctcagaaacatactaagggtaatgtaaactgtaaaagagtatataatatatgtaatgtaactattatatatgtgatatagtgattgtctatattctgtattatagataaaccttttttgagatataagtttgatacca

SEQ ID NO: 96812 - DNA, 491 bp, Homo sapiens
ctttttttgtggctgcgactctgtcctttttgagacagcagccactccttggttatggagttggggactgagatacttggaaataattgatgcctttggcagagatggaacactggaacctgttcttttttggttccagcatctatcatgttatttttaytatttttttttttaaggaaaacctaagtcttaggtctgggggttcaggtaggatacataccacttctgtactccagggactagcacatgaccaatcagagcactccatcccttagtgattggttcagagaagagcatgcgacccaaccccagtgagttcagacctaggtttagtccagggtctagttcaggtttgaagatggacaagagtaaatcctttgaactttagtggcttttgctttttgtttcacaactaaagcagctaataagcaatataaagggataaagaggaaaacctggaggtggtgaagcctgcaggtggatcccacttc

SEQ ID NO: 96813 - DNA, 468 bp, Homo sapiens
tcccagagacactgatttggcagagtttgggtggagcccagagacctgcctgtgaatgggtttcccatgatcactcagttctccatcatttaggaaccttgacaccagatgattcaagtctcattacctcctccttktctcacctcaccactatccctttccagttgcagtcatctaaaagcccaatcttggtatcagtaatgatcattgtgctggggctaatattatttttgtgaggcacagaaacccagcaaaggcttttaagtgaatacttggtaatagaacaatcaagttaaaagatcagtgtgacacagagcatgaaataggaaagtatcgtggtcaattgatttggaccacacttacgggtttgtgaaatgaatttcattttctggaccaaatggaagccctgcttataaatcactgccggtcttggagattaataaaggaaacaggcttgattaagaattc

SEQ ID NO: 96814 - DNA, 583 bp, Homo sapiens
ttttttattttactttaagttctggggtacatgtgcagaacgtgcagttttgttacataggtatacacgtgccatggtggtttgctgcacccatcaacccatcactacatgaggtatttctyctaatgctatccctcccctagcctcccacccgctgacaggccctggtgtgtgatgttcccctccctgtgtccatgtgttctcattgttcaactcccacttatgagtgagaacattcagtgtttgattttctgttcttgtgacagtttgctgagaatgatggtttccagcttcatccatgtcctgcaaaggacatgaactcatccttttttatggctgcatagtattccatggtgtatatatgccacattttctttgtccagtctagaactagaaataccatttgacccagcaatcccattactgggtatatacccaaaggattataaatcatacgtcttttatactgtaattttattacagtataaaattccttttatttattccttttatactgtaattttattacagtataaaaattccttttctatgtttagatatacaaatacttcccttttgtgtt

SEQ ID NO: 96815 - DNA, 618 bp, Homo sapiens
ggagctgccctgggaactgggctctgcagcagtgcggctctagggcccggagcccgggagagcagagatgggggctcccaggacaggaaactcagggaggagagagtcgggtggcttccrtgggacggggtgctgtggcagcttgtgtgagccagtagctatcataactaagcccaatcgggacgtgaaaacttggattccgtgggaatttatgaagaggaaggctctgatgacaaagaagtcatcgatgaggagggggatgagggtcactggcaagcttgcttccttatggaaagaaaagtgaacacccaactactgctgcaaaatgggatcaaaggatgagactctcgctgtcagggaataaactgctgcagaactcttagagattgcaaagacctttcaacaacagcctgggaggccaggtgccatggctcatgcctgcaatcccaacattttgggaggccaaagtggcaggatcacttgaagcccgaagttgaagaccaccctgagcagtgaagtgagacactcccatctccataaatctattttttaattagccaggagaggtggtgtgtacctgtaatcacagctactcaggaggctgaggcaggaggatca

SEQ ID NO: 96816 - DNA, 618 bp, Homo sapiens
ggagctgccctgggaactgggctctgcagcagtgcggctctagggcccggagcccgggagagcagagatgggggctcccaggacaggaaactcagggaggagagagtcgggtggcttccgtgggacggggtgctgtkgcagcttgtgtgagccagtagctatcataactaagcccaatcgggacgtgaaaacttggattccgtgggaatttatgaagaggaaggctctgatgacaaagaagtcatcgatgaggagggggatgagggtcactggcaagcttgcttccttatggaaagaaaagtgaacacccaactactgctgcaaaatgggatcaaaggatgagactctcgctgtcagggaataaactgctgcagaactcttagagattgcaaagacctttcaacaacagcctgggaggccaggtgccatggctcatgcctgcaatcccaacattttgggaggccaaagtggcaggatcacttgaagcccgaagttgaagaccaccctgagcagtgaagtgagacactcccatctccataaatctattttttaattagccaggagaggtggtgtgtacctgtaatcacagctactcaggaggctgaggcaggaggatca

SEQ ID NO: 96817 - DNA, 686 bp, Homo sapiens
ctctaacctgtgttgtagtaattagtgttttaatgttcttacatatatattgagtagatcattagctgcttgaagacatatttatttgtcctgtttccctcatcacactacctaccatatagtatgtcagtcactatgcgtaaaagtctggtagggataaaaataaaataacargaagtcctttacttcaatctcctcctccaaatagaattgtgcctgaatgatttccttcagtattcattgaaaaaatattaaaaatgtgagtccagagctcattagagagaatcttccttcaattctcttcagatctgagaattttccttgtgaaggagttaaagctcaaagaagagttgtgacaatactaaagcatttggagaggagagaggaaggcgggaaactgaaatatttggaaataaatgtacacatttggaagacaagaaaaaaaaaagcaaaacaaaacatgaaaaaaggagtgcccaaagaaattaggaaaacattaagacaataacatatcaaggaggttacagtatgagataatcataaaatgttgggattagcaatctgtgacttttaaagcatcttttccagagatgggtgagggtataatggattttaattgagatctcctttaaatacatttctaataaagaatttcacaagttcacaccacgtaccaaacacaaagt

SEQ ID NO: 96818 - DNA, 546 bp, Homo sapiens
tattcatttttcagtcttgcatcaaagctttgctaactctcctactgtctgttataatacggtctgaagaaacctcgactatgtctatatcatgtagaatatcagaccattttcactatactgacagcatcatggtaataaatatgtataatcaggaaatggcaagtacaataaaagccttggtaagacacatgtgattcaaaagatgtaaagtgagcccgatggtgattcacaggtttgctatcaataaatttgtaagggtctagtggtccagaacagactgggacattagtttcaaagaacaagatarattattccacctcacactttcaccacaaagaaaagaaagttcaatccctgataggctgataagttttcttgagttttggcagcaacatattctacagatgacagcattttccaaagctccatcctatgcacccagtggcatagagagcttccaacactgaataggactcataattcagtagcctctaatcgtaggtagtatctgtagtgaaagaggtatcgtgtggagtatatggc

SEQ ID NO: 96819 - DNA, 502 bp, Homo sapiens
ctcctacaaggaatgctgaagggagtacttcaaccataaagaaaaggacactaatgagcaataaataatcacttgaaggtacaaaactcactggtaaaagtaagttcacagaaaaacacagtatattataacactgcaactgtggtgtgtaaactactcataacgtaagtagaaagacaaaaatgaaagacaaaatattgaaccaattaaaaatagtaactacaacaacttttcaagacatattacaataagtataaatagaaaaaataaaaagttaaaaagtgggggagatgaagttacggcatagagttcttattagctttttttatgcaaayagtgttgttatcaggctaaaataatgggttataatattttcaagcattatggcaacttcaaccaaaaaaatacagtgaatacacaaaaaaataaaaagcagaaagctaaattatatcaccagcaaaaaaatcaccttcactagagaaagacaaaacaaaagaaagaa

SEQ ID NO: 96820 - DNA, 596 bp, Homo sapiens
tgaaatttgagtcaagacttgttgacaaaactaatccagatatgcagacatctgggcaaagtccatatctggaaaaattactgccaaatgcgaatgtgaaaagaacttggcaggatgggaacagaagtaaaggcatacagtacattcacactttcaaatcaagccaagatttcttagttatgcctatttgaagcacccttatctgaaacattgcctgaacctctctattttagatttagtgcacttcttgaaggaatatgaaaatgaacttgaaaaaaaaagttcatttccttattgagtggacaaagagagagagattagaccattaaggggaaccaaggtagatagttatgtttaaaggaaaatttcttctattttgctaaagtacaaccaggaaagaaaacaatcatctccctagtcagtccagatgctttyaccaaggtgctgaaaacataaacaaaaataatctgagaagagattatctgaaaatgagaaatctgattaaggcattttgatgttaaatatgacttttttttttttttaccaactactccaagtgagtttctccaataattaattactagcattaaagcaaa

SEQ ID NO: 96821 - DNA, 642 bp, Homo sapiens
tcatttgcacctcctctggggatttgcatttgggattcctttttgcatatttcaggatgctctctcttcattcctcctctgtctcaatttactcttttttggctaatgaaaataaaagattattaatcatttaaacacgtgtttgtgcaagacagagtgctaagwactacacaaccattatctcatttaattcttacaattctgagctccctaagctccaaataattaatttgcctaggattccatagcttgtcaataacagtgctaggctttaaatccagtttctttgccttcagaacccatgctcttgacaactataccagagatgtacttgtggccttcctccctgcccataagagaggtcagtttcttccagatcaatatctggagtgagatagcctcttcaatattttgcgtcaattccagtgcctgctggactaaggtacgggcatcttctgctccaatttttacattatctggctttgctagagtcagacaaatgttgtttgcacaagtcttgtatttctccagcaattccactctcaatccatttgcaagattttctctgtggtgacatctgagggtgcaaagttccacttcctccttaatctatagctgtactgaaaactgaaacctgtagtc

SEQ ID NO: 96822 - DNA, 447 bp, Homo sapiens
ctacttgggagactgaggcacaagaatcgcttgaccccgggaggtagaggttgcaatgagccgagatcatgccactgcactccagcctgggcaacagagagagaccctgtctcaaaacaaaaaaaataaataaaaataaaaataaaaaatcccaatgaagatagtcataataaacagtcttcttaatttcatagctgccccmaccgtgggcacacccttaataataaacttctgctgtggctccaaatgatactaggttttaaaaattacatttgactagaacctataaacagtaaaagtacagaatttaactacctgccactcagtgactaatttctcactagagctgactgcaagtcactcaggaaacatcagccatgcccaccaaggcctttgaaacctaccaagctctcccttgcatatgctactgatcgctgagaaccatga

SEQ ID NO: 96823 - DNA, 547 bp, Homo sapiens
cttctggcttgctattattttatgaggtgtagaatataagaggaggggcaagttcagtagaaagtgtggatttgggtgtgtttggcttgtgttccctgttgatcatccaggtagaggtgaccagttgtcagctagtgctgccatcacagaatatcacagactgggtggtataaacaacagaaatttattttctccattttaggatctggaagtctgagattagggtgccagcatgggcaggttctggtcagagtctttttcctgacttgcagtggtcactttytctctgtgttctcacatgcaggagagagtgcaagttatcattctacctttctcttcttataaggtaacagtcctgttggattagggccccactcttatgacctcatttaaccttaattatctcctacaaaccctagctccaaatacattcaaaatgtttagagcttcaacctatgaatgaatttgggagagtagggatatttcagtccataacagctagacatcagtcttgaacttagtgacacctaagaattggaagtatagt

SEQ ID NO: 96824 - DNA, 547 bp, Homo sapiens
cttctggcttgctattattttatgaggtgtagaatataagaggaggggcaagttcagtagaaagtgtggatttgggtgtgtttggcttgtgttccctgttgatcatccaggtagaggtgaccagttgtcagctagtgctgccatcacagaatatcacagactgggtggtataaacaacagaaatttattttctccattttaggatctggaagtctgagattagggtgccagcatgggcaggttctggtcagagtctttttcctgacttgcagtggtcactttttctctgtgttctcacatgcaggagagagtgcaagttatcattctacctttctcttcttataaggtaacartcctgttggattagggccccactcttatgacctcatttaaccttaattatctcctacaaaccctagctccaaatacattcaaaatgtttagagcttcaacctatgaatgaatttgggagagtagggatatttcagtccataacagctagacatcagtcttgaacttagtgacacctaagaattggaagtatagt

SEQ ID NO: 96825 - DNA, 586 bp, Homo sapiens
tggaaaacgtattcggggaataaatctaagcatatatgctatgtttacacagagaacagactaggtaaaaatagtttttcttggaggcagttgtgaataaccatcaggacaaattgaagttctgttctgtaatatctatccctaggaatgtttaaatatttataaaaatttacttaaagtatttaatattttaatacacgcaacacatttgtatgtaatcctaatttttttgatagaagatgctagttacaaagaaattatgttacttttatattttaagtacaattaagggcagatgccttatgaaatgttttaccttcttgaaggcccttcattcctgggatatttatgtagttctctctctctctctctctctmtctatctatctatctatctatctatctatctatatatatatatatatatacacacactaaaaatttacatataaatttatatataaattttatttatatgtataaataaaattttagacagctgtaaccagccctctctctcctttgcccattcccccacaaataaaatttttaaagtaaatatcttaatagcctatctgattcagaat

SEQ ID NO: 96826 - DNA, 586 bp, Homo sapiens
tggaaaacgtattcggggaataaatctaagcatatatgctatgtttacacagagaacagactaggtaaaaatagtttttcttggaggcagttgtgaataaccatcaggacaaattgaagttctgttctgtaatatctatccctaggaatgtttaaatatttataaaaatttacttaaagtatttaatattttaatacacgcaacacatttgtatgtaatcctaatttttttgatagaagatgctagttacaaagaaattatgttacttttatattttaagtacaattaagggcagatgccttatgaaatgttttaccttcttgaaggcccttcattcctgggatatttatgtagttctctctctctctctctctctctctatctatctatctatctatctatctatctatmtatatatatatatatacacacactaaaaatttacatataaatttatatataaattttatttatatgtataaataaaattttagacagctgtaaccagccctctctctcctttgcccattcccccacaaataaaatttttaaagtaaatatcttaatagcctatctgattcagaat

SEQ ID NO: 96827 - DNA, 404 bp, Homo sapiens
gtacaagatgaaagaagtagtccagcatataaaatttgaggtgcaaggttaaacaggtcacttgacctccaaggtgcctgtgtggtctcttccaagagtactttcctttgtttcctgttataaagctgttaaataaacttccatcctgctctgaaataaaaatatatatattttttatcaattatctaagtcagaaaaaggaaaggctcaattaagwgactacttgcataatatatcctgtctagattgaaaggccagctttttccagttcacaaatatttatcttcatattgttttgtgtaccccataagaatttccttttctaaaagctttttaatgatatcccataccatttgtaaattttatctcactaattataaattcatcaataaacattcttgtta

SEQ ID NO: 96828 - DNA, 554 bp, Homo sapiens
taggggcagtaaattgtgggtttgtaactaggaaatgtatggggaaaactatgaggagattagggttattttagtaagcttgtttgcataggtccattccagtgttgactcmtaacttctggtgacgagaacaatttttgctttctaatacagtgggaaggggtggggggatttgtatcatgggaaactttgtgaccttcttttaggcagaaacagggagatcagaaacagcttcctgcatgtgctctttcttaagaaagagcctgcagcttaaaataacccatatgacaaagtggcatatttggggatgcatgttctgatccctttcaccgtctgtaaactgataaaaagacatgctgcagagaaagtcaccataatcaacacaatgcttccaagactaggaagcagataggattaaaatttcgctctgtggaaaagacatgggctcaactctaacaccttaagctatgaaggtcaatttaaagcacacagaagtatttgatatttgcaatatattcaaaggcatgacagttttattttcacattatgtaagt

SEQ ID NO: 96829 - DNA, 595 bp, Homo sapiens
ttgttctcactgttttcaaagaaattcttgatttctgccttaatttcattgtttacccaaatgtcatttaggaacaggttgtttaattttcatgtaattgtatggttttgagtgatcttcatggctatttttatagcgctgtggtctgagagtgtggttggtatgatttcagcttttttgaatttgctgagaattgtttcatggctgattgtgtgtttgattttacagtacatttcatgtgcagatgagaagaatgtatattctgttgtttttggggtgaagagttctgtagattatctgttaggtccatttggtcaagtgttgtrttcagttcctggatatttttgttagttttctcccttgatgatctaatattggcagtggggtgttgaagtctctgactgttattgtgtggttatctaagtcttttgtaggtctctaaaaacttgttttatgaatccgtatactcctgtgttgggtgcatatatatttaggatagttaggtcttcttgttgaattgaattatatgcaattatgtaatgtgcttgtctttttgatcattcttggtctaatgtttgttttgtcttaaattaga

SEQ ID NO: 96830 - DNA, 539 bp, Homo sapiens
tttcttatttctttttttttttttttttttttttttagacagagtcatgctctgttgcccaggctggaaagcactgacacaatcttggctcaccgcaacctccacctctgaggttcaagcaattctcctgtctcagcctcctgagtagctgggattacaggcatgcaccaccacgttcagctgatttttttgtatttttagtagagayggggtttcaccacgttggccaagctggtctcgaactcctgacctcagttgatctgcctgtgtgagcctcccaaagtactgggattacagatgtgagccaccacgcccagcttatcttgtgatttatacttgttttagtcttccacagagagagactttctcatttgtttttatatctcctgctgctcttagcacagagcttatacactgtagatgatcaacaaatatttttgaagtaatttaatctagagtaatttgagactcaaaatatttctgcaaggcaggcagcgctggtattcttgtcctcattgatgacttgcccactgtcacct

SEQ ID NO: 96831 - DNA, 584 bp, Homo sapiens
taactaagctccaatgtcaattttcactctaatattttctgccaaatattgggattctgagctgctttctgttgtctgcatggtacgatgggagattgggggcacgaggggaagcctaggaactctccacggggagattttaatatgagaccattgcataaagcttacatattcaggataagaataaggaaggagggacacattgtaccatagagtggacataaatcatgccctcggtgctaagtggagaaatctatcatttcagtttatgctaccagtgttgcttgaaaagcctcaagcaaaaaaayttaagaaaggacctagattggtaggtcctgggactggtagtatcccaaggtgacttaaacagtaatcctctccaaggaaatgcatcatcaactatgatgtttgagtactctccacatgaaaatccaaggaatataggtgtattcttaaaaatgcaaaccacaaaaagacacatgacaccatgagtaagagccagcaaaatctgaaagaaaagatttcagatattgaaatctaatccaatatattaaatcataatgtttaatatgttaaaaatcatg

SEQ ID NO: 96832 - DNA, 584 bp, Homo sapiens
taactaagctccaatgtcaattttcactctaatattttctgccaaatattgggattctgagctgctttctgttgtctgcatggtacgatgggagattgggggcacgaggggaagcctaggaactctccacggggagattttaatatgagaccattgcataaagcttacatattcaggataagaataaggaaggagggacacattgtaccatagagtggacataaatcatgccctcggtgctaagtggagaaatctatcatttcagtttatgctaccagtgttgcttgaaaagcctcaagcaaaaaaatttaagaaaggacctagattggtaggtcctgggactggtagtatcccaaggtgacttaaacagtaatcctctccaaggaaatgcatcatcaactatgatgtttgagtactctccacatgaaaatccaaggaatataggtgtattcttaaaaatgcaaaccacaaaaagacacatgacaccatgagtaagagccagcaaaatctgaaagaaaagatttcagatattgaaatctaatccaatatattaaatcataakgtttaatatgttaaaaatcatg

SEQ ID NO: 96833 - DNA, 631 bp, Homo sapiens
tcagtcaattaaaaatattttgcatcattaacatagtctatctgggtttaaggttttgatctgtgctctaattcttgattttacgtgaaccacttcaaaagagtcatggttgcaggggttgccagaatactctcaggtttgagcaatttttgaatgattgatttttgaatgaggaggttttctgacagtcttttcccttgcttcttataaacagttatttgttcacactgtccatttgtatctagcattcacattggctgctcatgtgaaagatttccaaaatggtgtctcattcattttaataattaataccctttcctcctaacccttatttttcatctagatttaggttattcatagtttggtgggaatatgcatgaatgcaattccatgtgtcttaaaacttcccattcagtattaaactttggtaacttcatacttctctcccaatgccctgataaactataaaattgcaaccttagttgatctgtttcacccactttctttttcrgcttctattttctactttagaggcaataaaacttttacatgttttataagatgcatttgaaaagagagcaaaactcagagttctggttgacctcaaatttggactatgtggaaatgacca

SEQ ID NO: 96834 - DNA, 597 bp, Homo sapiens
aaacctctacttaacctcactccttgtgtgtccacatcctttatatccttggcatgaggcaatgaacctcagatattacctcagatgaatgacagtgtttcattatgatatggtttggctctgtgtccccacccaaatctcattttgaattgaaatccccaagtgttgaaggaaggacctggtggggggtaattggatcatgggggacattcccctcccatgatagtgatagttggtgagttttcacgagatctgatggtttaaaagtgtgtggcagtttcccccctcggtctctctctcctctctctttctcccttccctgccaccaygtaagacgtgccttgcttccccatcacctttcactgtgattgtgactttcctgaggcctctccagccatgtggaagtgtgagtcagttaaacctctttttttaataaattacccagtctggggtagttctttatagcagtgagaaaatggactaatgcacctcacagagggatgagggcaggaaaggctgaagtactgtggccattcttcccaagcaatcaccatatgcaagtgcacttaaaatgttgacagacgtgtcgaaattgcc

SEQ ID NO: 96835 - DNA, 532 bp, Homo sapiens
tggtatcagcctctgggaatcagcgtaacattcttccctgttggagtttattccactaggatgttatcatcggtgccctagcaggactcccagaacccttgggaagtatttttggatgcaacattactggaggtcattttaacagaaaagtgaaagcttttctttgctggggccaatccaaacataaacagttcaggcaattttggttttctttagaacttcaaaggcctttgctactcttgggacagttcccctgggcatggaaatatgygagtgacatagtcgtgatgcaagaggcagcgtgtgactgcgttgcattacgtgggtagctttcaaaataggctcatgcaggttaaaatgtgagcatatttagatggcttttccaaagtgatcacttaaggcccttaaaaaactcagacagtagcatgctgttgggtgtctgatttatatctggtggtggacttctggattggaaccagaaatcattgtaagtgcagtttgttagtgttctatttattcatttatttatttt

SEQ ID NO: 96836 - DNA, 577 bp, Homo sapiens
aaaatcaaaatgttcaaaattgttcctgaagaagaaaataaaacagaggcaacaaaaaataaccagttttactgtgagaaaactttccaggaaaaaacaaacaaacaaaacaaaacaaaaaacaggaatctgtagatttgggaaaaaagaaaaaagaaaataccccatccttccagtaaaattaatagagaattcattgcttaattcaatataaaagaagactccttcagcatcttgacataataacaaatcaccagcagtttagagaaaattttagcctcaggtatctcagcagtactggatgccacaaaagaatgaagatatgcttgcacagtggtaacgaaaaaaaatggtttgcaagtattccatgtcaattttatgagtcatcatttattggcaaggaaaaagaaaacattcctacctttccaaggactgaggatagaggcgacacatgggatatatatgcgaagactatggcagagtctgctggttgtgtctcctgcttccgtcagggactraactctgaaatgaagaaggcacacagccatccagagttacaatgacactttccaaattc

SEQ ID NO: 96837 - DNA, 351 bp, Homo sapiens
caggctggagtacagtggtgcaatcatagctcaccgtagtctgaaactcctgggctcragcaatcctcccatctcagcctcctgagtagctgggaccacagactatgtaccaccctacccagctaggagagggggagggaggagagggctctgccccagagaggagggcgtggccctgacttggagctaatggaacagagaagctccattgtgtctctttctcaaggcacctctcaggagttccgtcctgagcataaatccaatccttgagtgaataaatattgtgtggcactcagcctggaaagcctgcccttccccatcctgcccatccatgttcttctgttttggaag

SEQ ID NO: 96838 - DNA, 603 bp, Homo sapiens
ttgaattatcatcccacacaagaaagaatgtatttgggttcagtgaatcaaatgattgcttggtcaaacatacacacacactcacacacacacacactctctctcacaagtaacacacttaagtaatagtacattttttagtttctcgaaacatcagaaaggaaagaatgatttcctttaaatttcacaaacaataatgttataaatttttaattttactagtaaagctcacaatattaaagaagaaaaattaggaaaatatgagtyatactttaataaactatattctatcccaagtgtagttctgttttgctttcatattttgatgcaattgtttgtctttaggttttgaaaagttttcttagaaattgcattttttaaaatttgcttaatactagggctatagctctgagtgaacagaaaaaaaaaaaagaaaaaagaaaaaaatccaactaatgaaaccatctgggtataagctgttaaattatttttttaaacaatgtatgttccatagctcttttccctccttaaagttagcagggtttgaaaaccttactcggtttcttcgataagaggtaaattgccttatattcactcagaaga

SEQ ID NO: 96839 - DNA, 603 bp, Homo sapiens
ttgaattatcatcccacacaagaaagaatgtatttgggttcagtgaatcaaatgattgcttggtcaaacatacacacacactcacacacacacacactctctctcacaagtaacacacttaagtaatagtacattttttagtttctcgaaacatcagaaaggaaagaatgatttcctttaaatttcacaaacaataatgttataaatttttaattttactagtaaagctcacaatattaaagaagaaaaattaggaaaatatgagttatactttaataaactatattctatcccaagtgtagttctgttttgctttcatattttgatgcaattgtttgtctttaggttttgaaaagttttcttagaaattgcattttttaaaatttgcttaatactagggctatagctctgagtgaacagaaaaaaaaaaaagaaaaaagaaaaaaatccaactaatgaaaccatctgggtataagctgttaaattatttttttaaacaatgtatgttccatagctcttttccctccttaaarttagcagggtttgaaaaccttactcggtttcttcgataagaggtaaattgccttatattcactcagaaga

SEQ ID NO: 96840 - DNA, 554 bp, Homo sapiens
catgaggctaagtatcctcattcaatgtaagcaaattaaattgcagcctattcagctttctccctagggccatcccccaaccacagactaatctggatttatatagttttgcctgtggccaatgcgtttttgaagggaaaggagtttggatatagatgcaaataaatagatgtacagatagccattcatttattataaattgtaagaggaagtcggtgtgatcacttccttctcattggatmagtgaggttctaaaaataggttttcaacatttggagaaagtttatttgcctgaatatgagtactaacatctcttccctccctagaaaacaatttttaagttgggcccctgcgagtcagcaaatttccatctggggtccatctctgtcacaattacatctttttattccagaacaattaggattgagtgtaaaaactgcacaattaataagcaaagattttgaatgacacagagtagtagaatgttctatttttgtatattcccggaatcacagatttcattttgtgctgagccttatttgtctacaaaatcc

SEQ ID NO: 96841 - DNA, 569 bp, Homo sapiens
tcattatacaaggccagtattaccctgataccaaaaccagataagcacacatcaacaaaagaaaactacaggccaatatctattttgaatattgatgcaaaaaacctcaacaaaatactagcaaaccaaattcaacaatagaatagaaagatcattcatcatgaccaggtggtatttaccccgggatgaaaggatgattcaacatatacaaatcaatcaatatgatacaacatatcaacagaatgaaggataaaactatatgactttttcaattgatgttgaaaagaactagataaaattcaacatctcttcatgacaaaagccctaaaaatactgggtatagacataacatactgcaacatggtaaaagtcatataagacagacccacagctagtatactaaatgggaaaaaactgagagcctttcctctaagatctggaatatgacaaggatatacactgtcatcactgttattcaacataatactggaagtcctagctagagcaatcagrcaagagaaagaaataaagggcatccaaattggaatggaagaagtcaaattatcctt

SEQ ID NO: 96842 - DNA, 565 bp, Homo sapiens
ctttccttcctcccacagccaaacagaatgactggtaagaaaagatttgctctcaaggtaaaacgctggagcaaattacagaaagtctctggtctgtctgggaagagtttgaagtcctaagagaaaagcaccctggagctttggacaagtcctaactgccacagcagataggactggggaaactagaaattataatctgcccctgagggaaagaatttatcccacttcacctcgagagtcacttcttgttttggcaactgtgtgggtmtccaggctccctgcctatattaatcaatctagtcattcaattaattatgaataggcaatcaagactaacaagagagttgagaacaatcagcaccatgggtgttagcaataataagactgcctaggaaacaaatcatctgagaaaaaagataattaaaatatatacttaatatcgttagagattttcaaatgatactgcatttttaaaacaaaaccaggctgtcatgataaaataaagaatgacaaaaagttcttgaaaattaaaatatgatttttgagaacaaaaataatgaatttt

SEQ ID NO: 96843 - DNA, 623 bp, Homo sapiens
gaggcttcaggaagtaaaacagtactccacacagtgctcgacaagtgtttgttgaatccagtgaatgaatggctccagactgaattaaatcacattaaaatataaagtgctggtaacattgcagaggcaatgtggaatagcaaaagaagcagcagagatattctctggggttcgacatatctgaattttggccccgtcacccttgtcttggtaaattacttaaactttttttctgagcttttgctcccctctattttaaattggattaatattattatagctcacagggtagttgtgagaatacatgtctatcacagtgcttgttacttatcagtcactcaatagatattaaaacacttctgctaattcttggaacccaacaagaggcctttgaactcttgacccaatatgaagytaagtgaaaaattcagccagcaagcatatgaagtagttagatttggcagtgggtcacagagtgggcctatcagcccagtctaagagtataaaactctgcttctcctaaaatatatttcacacacacacacacacacacacactatatatgtgtaatattttattgccttttcacctctttgtgtcttcctttgcttttgaatccacag

SEQ ID NO: 96844 - DNA, 567 bp, Homo sapiens
attaaaagcaaaaagttaaaaaattaaaagtttatgaagtaaaaaagttacagtaagctaagactaatttattattgaaaacagaagtttaaaaaaaaatttagtgtagcctaagtgtacagtgtttataaagtctacagtggtgtaatgtcctttgccttcacattcacttaccattcactcgctgattcacccagaacaactttcagttctggaagccctattaatggtaagtgccctatacaagtataccattaaaaaaaatctttaatttaacatttttatggtatcctctctatatctacatatgtttaattcacaaatacttagmattgtgttactattgcctatagtactcaatgtagtaacttgctgtacaggtttgtagcctagaagcaatagattatgccatatagcctaggtttgtagtaggctataccatcaaggtttgtttaagtatactctttgatgtttggacaatgaggaaattgtctaaggatacatttctcagaacatacccacgttgttaagcaacgcatgactgtaattacttgtggttgagaattg

SEQ ID NO: 96845 - DNA, 558 bp, Homo sapiens
attatgccatatagcctaggtttgtagtaggctataccatcaaggtttgtttaagtatactctttgatgtttggacaatgaggaaattgtctaaggatrcatttctcagaacatacccacgttgttaagcaacgcatgactgtaattacttgtggttgagaattgggaagctgtttttcaagcacaagtaaataaaggtcaccattccttttagactttaaattacagttggattttgaaatccttaagaagcagtttggttttcaattcattactcttctaatggtattaccattttctcaatatttctcatttaagatggaagcacaaacgaattcatagtatgtataggcactcatatctcttttttttaagttcaggggtacaagtgcaggtttcttacataagtaaatgtattgtggggggttgttgtacagcttatttcatcacccatgtattaagcctagtatccattagtgatttttcctgatcttctctttcctctcaacatctaccctttgaaaggccccagtgtgtgttgttcccctatatgtgtcc

SEQ ID NO: 96846 - DNA, 558 bp, Homo sapiens
attatgccatatagcctaggtttgtagtaggctataccatcaaggtttgtttaagtatactctttgatgtttggacaatgaggaaattgtctaaggatacatttctcagaacatacccacrttgttaagcaacgcatgactgtaattacttgtggttgagaattgggaagctgtttttcaagcacaagtaaataaaggtcaccattccttttagactttaaattacagttggattttgaaatccttaagaagcagtttggttttcaattcattactcttctaatggtattaccattttctcaatatttctcatttaagatggaagcacaaacgaattcatagtatgtataggcactcatatctcttttttttaagttcaggggtacaagtgcaggtttcttacataagtaaatgtattgtggggggttgttgtacagcttatttcatcacccatgtattaagcctagtatccattagtgatttttcctgatcttctctttcctctcaacatctaccctttgaaaggccccagtgtgtgttgttcccctatatgtgtcc

SEQ ID NO: 96847 - DNA, 652 bp, Homo sapiens
ttagtgcagctttgtttttgaatattatataataagttggagaggctaagtgatattttccayagacttcagcatttgttcaataacttacgaaaattctatttggtctcactaagtgaaatagaagaaaaatatttttaccttcaaattttagctttgtttaccctttcaattgtcaagatcaagtctgtatttctggctcccatttcaaattactcaagtttatatctactataaagaaacaatagcccatttgtatatgaagcacctttttgcaggctgttgtacatgggcacgttagatctgctttcccagcacaatagcattttgaatattttacagctattcctgaggtgagttcattcactgacatctgtctcaaaacagtaagcattttgtattcaccttgtctgtgtgttctaaactcacacatcttttatttttccttgagggagatcataaatgcaaagatgtataattagccaccccgtctacctgttttgtggcagtcattcttgtatgcggcattttatttgtaaagagctttaatgtgaacattaacaacaatttatgaagcactccactcaaaaacagaatctgggatggagtacataatgataaacaaaaacggaacatgtgcctgcagacagct

SEQ ID NO: 96848 - DNA, 652 bp, Homo sapiens
ttagtgcagctttgtttttgaatattatataataagttggagaggctaagtgatattttccatagacttcagcatttgttcaataacttaygaaaattctatttggtctcactaagtgaaatagaagaaaaatatttttaccttcaaattttagctttgtttaccctttcaattgtcaagatcaagtctgtatttctggctcccatttcaaattactcaagtttatatctactataaagaaacaatagcccatttgtatatgaagcacctttttgcaggctgttgtacatgggcacgttagatctgctttcccagcacaatagcattttgaatattttacagctattcctgaggtgagttcattcactgacatctgtctcaaaacagtaagcattttgtattcaccttgtctgtgtgttctaaactcacacatcttttatttttccttgagggagatcataaatgcaaagatgtataattagccaccccgtctacctgttttgtggcagtcattcttgtatgcggcattttatttgtaaagagctttaatgtgaacattaacaacaatttatgaagcactccactcaaaaacagaatctgggatggagtacataatgataaacaaaaacggaacatgtgcctgcagacagct

SEQ ID NO: 96849 - DNA, 628 bp, Homo sapiens
gggtatagtttacataaaatcatatttaacaatttcaggtgcataattcaacaactgttaacaaatatatatatatatatatatatatatgtagttatgtaatcaccacccaaagtacgatccattacgcatgacatttcccacatctcctcaccctccccccaaccacctgtccctgtccctattaaaccatcatctkctttctgtcactatagctttgtgtattttatgcttttatataaatggagtcatagattatgtggtatttatgtctagtttcttatatttggaataatgcttttaaaatttgttcactttgaaatttagtagtttgctccttttcattgctgagaattattcattgtatttcattacatggatacaatatgatttgtttatccatgggctaattgatgattattttagtcttttcctaatttaggactattgagaacaaagttgctatgaacactaaaggacaagccttttatgggcatttatgttcatttagttacttacacaattagctaggacttgtattgctaagttctatgataaatgtatatttgtctttacaaggaaatgctaatacatgttccaatgtcacctgtattattttgcattgctg

SEQ ID NO: 96850 - DNA, 628 bp, Homo sapiens
gggtatagtttacataaaatcatatttaacaatttcaggtgcataattcaacaactgttaacaaatatatatatatatatatatatatatgtagttatgtaatcaccacccaaagtacgatccattacgcatgacatttcccacatctcctcaccctccccccaaccacctgtccctgtccctattaaaccatcatctgctttctgtcactatagctttgtgtattttatgcttttatataaatggagtcatagattatgtggtatttatgtctagtttcttatatttggaataatgcttttaaaatttgttcactttgaaatttagtagtttgctccttttcattgctgagaattattcattgtatttcattacatggatacaatatgatttgtttatccatgggcyaattgatgattattttagtcttttcctaatttaggactattgagaacaaagttgctatgaacactaaaggacaagccttttatgggcatttatgttcatttagttacttacacaattagctaggacttgtattgctaagttctatgataaatgtatatttgtctttacaaggaaatgctaatacatgttccaatgtcacctgtattattttgcattgctg

SEQ ID NO: 96851 - DNA, 628 bp, Homo sapiens
gggtatagtttacataaaatcatatttaacaatttcaggtgcataattcaacaactgttaacaaatatatatatatatatatatatatatgtagttatgtaatcaccacccaaagtacgatccattacgcatgacatttcccacatctcctcaccctccccccaaccacctgtccctgtccctattaaaccatcatctgctttctgtcactatagctttgtgtattttatgcttttatataaatggagtcatagattatgtggtatttatgtctagtttcttatatttggaataatgcttttaaaatttgttcactttgaaatttagtagtttgctccttttcattgctgagaattattcattgtatttcattacatggatacaatatgatttgtttatccatgggctaattgatgattattttagtcttttccyaatttaggactattgagaacaaagttgctatgaacactaaaggacaagccttttatgggcatttatgttcatttagttacttacacaattagctaggacttgtattgctaagttctatgataaatgtatatttgtctttacaaggaaatgctaatacatgttccaatgtcacctgtattattttgcattgctg

SEQ ID NO: 96852 - DNA, 393 bp, Homo sapiens
ctgaattcttccaactcagcttacaccattccttggaaaataaattccctctatgttttcagcttttgatctattcactttaacaatatttatgtgaattggtgctattccatgtggatgacagatgatgcagttttatcaacgctttgttggttgtcttttgttttctaataatttatttatatagtatttcctagtagattatctcctggcttcagtcttttaataaagttcatcttattttctgaaataaaatgctttaattattacccataatayagtgaccataattctctcatcgaagctgcctcttctactgtttcttccccatacaagaaaattgcaaagataataccggctatgtgctgcttgaaacacaaggaacccatgact

SEQ ID NO: 96853 - DNA, 532 bp, Homo sapiens
ttcttattctacttttggtcctcaaacctgttcttttgtatttctttttgcaaccmaatggaaatatctctggcgaatttcatagttttccaatcatttgagactgtaacagacctattttatttttaggtatttaacataccagcataataattattgtttgcccacttactttagaatcttagagagggttcttgtagtatttgtccttttctttctctctccctgctcaacttcctctcctcacttactcctctgacttttcctccccactcaggacactaggctgtggcaaggagaaaggatgagacttagctagtaatattaacacttgtcacttggtgaaatgttctgcttcatgagaagcattccaatgctggctcatttagggaaatattattgttttgtttttctgagatttctgagattacctccacaccacacagtaaaattatttgatgtagattaaaaaataaggtggaattgcacttgattctgtagctattccctctccaccttgccctgctattgc

SEQ ID NO: 96854 - DNA, 552 bp, Homo sapiens
tatatttattgacagaaaatgacagtaaattgggatacctgagcttggactttaagtatattgtcttacaaattctgatgaagtctatgaatgctatatatttacaattaggcacaaaatgtgaggggatgatgccctgctaagaaaaatagcaatagaatttatattttgtttatttctcaggtataggaacaagagtgatgcacacacttgttttcttttcctttcttctcttttcttttcaaggatacaatacattttattaactgcaatcaccatgctgtgctttaggtctccagaacttattcatcttataactgaaagttgataccatacagcaatcatctctccccttccctcaccttccagcccctagtaaccactatttactccttttggtgtgagtttgactttttaaattaatttaatttaattttaagttctgggatacatgtgaaggacgcacaggtttgttacataggtaaacgtgtgccacggtgggcaaacacttcttttctaawttctaaaggtcagtgttttgagactttacat

SEQ ID NO: 96855 - DNA, 590 bp, Homo sapiens
tttcatcactcgcagattggaactacaaaaaatattaaagaatgttcttcaggcagagaacaaataatataagatagaaatttagaaagatgaatggcaaatgccattcaattataatcatagaatgtagaagtcttttattctcatatataaatctcttttaaaacaattctgtgaacaaaataatacaaatgtgtatattatatcatagaaataaaaataacaacatcagtagcacatgaggagagaaacagatgtagaatcttaycttctttcaagatacataaaaagtagcattatatttgaaaataaactgtgataagttaaagatgtatattgtgatccctggaggatctactgaaaatttaaactaagagatgaggaagtagccaatattgaagagaaagtggaattataaaaagttttcatttaactcaaaagaagacaggaaaaaaggaatggagaaaaatggaacaaatataaaacaaactagaagttggcagattcaaaaccaaccatattgttagttatattcgatctaattggaataatctaaaagcacaatctattgacagagatcaagctgacta

SEQ ID NO: 96856 - DNA, 616 bp, Homo sapiens
gcttttctttttcatttgttttaacaacaaaatggaataaaaatgagttcrgcctgtgtagattttattcggcttatccaaaagttcaaccactgaaaaactctaccctcatctctccactgagttctatgatgaaaagacagaataataacaataacaaaatatttataaatgttaattaaaagattataatctattttccatgagacaatgaagtagcagtaatttcaaaaattttgcaaatatagaaaatttttctagtggtgttgaatgtaatgagagacagtgatcttggtgttgatgatagcaaccttgatgtcagaggtctcctcttcctaataacagtccaactcttcttcttccatctcacactgccattatcactactttcaccagcaatgtattattgttatcagatattcattacagagctgaatcagctaatgaaatttagttggttatttgcagttattactgctttactttttactttaaaatctattgatagtaagcaattttatttcagaaaacattttgaaaaatgtttataatgacttatgtaaatacactcatgattttccttcttgtaattcttttattttcctagtgaattcct

SEQ ID NO: 96857 - DNA, 616 bp, Homo sapiens
gcttttctttttcatttgttttaacaacaaaatggaataaaaatgagttcagcctgtgtagattttattcggcttatccaaaagttcaaccactgaaaaactctaccctcatctctccactgagttctatgatgaaaagacagaataataacaataacaaaatatttataaatgttaattaaaagattataatctattttccatgagacaatgaagtagcagtaatttcaaaaattttgcaaatatagaaaatttttctagtggtgttgaatgtaatgagagacagtgatcttggtgttgatgatagcaaccttgatgtcagaggkctcctcttcctaataacagtccaactcttcttcttccatctcacactgccattatcactactttcaccagcaatgtattattgttatcagatattcattacagagctgaatcagctaatgaaatttagttggttatttgcagttattactgctttactttttactttaaaatctattgatagtaagcaattttatttcagaaaacattttgaaaaatgtttataatgacttatgtaaatacactcatgattttccttcttgtaattcttttattttcctagtgaattcct

SEQ ID NO: 96858 - DNA, 559 bp, Homo sapiens
ctttttgtggtagttccacctccatcgaaagtgagcctgcactgcttggacttgcacaaagggtggagtccaactcccactccctacacagagtggcagcctcccagcaaaggatggcgggcaaaccacagagttgtccgccctgcactggggaaagaggctccaacctgagcccatgttggtggtagccaaggagaaacgtgtgtccatgggctgaagctacactgtggccaggagccgaaggataaagtctatttgaactaaaggtcatgggccctgcaccagggatgcaattaggttcctgcctgctcaggatgaggaactggtgcacacccactaactctttcccctgaaacttcartgcaccccaacatgaaccccccttgcaacccttctcccactgtcaggaagggtgtgaccaatgatcatcagtctacacaaaggagagctggctcttactctagagtgccaattactggagactgaagcctgaattgcaatgccaaatgaaaaaaaaacctgctgccaaaatggcatagtgttagtgcatgagacaagc

SEQ ID NO: 96859 - DNA, 627 bp, Homo sapiens
ttatctaatgtaagtaggcctatttccacaagtttatatattccaaagcacaactaaataattttaatatttaatcttttacacagattaactttcaccatttaatttgttttgttctcttgcttttataaaggtgcatttcaacatctttttatttgtatgctttatttaaaaaaatacttgtctamaagtttctttttaaattttatttcattcattgatagataaaattatatgtatttactgtgtacaacataatattttgaagtacacatatgttgtggaatgactaaatctggcacatagttatttcgtggtgagaaaacttgacatctattcttctcagcattttacaagaatacaatatctcattaactacagtcaccatgctgtaaaatagttctcttgaacttatttcttctgtctaaatgaagttttgcatcttttaatcaacatctccctaaccatctcagctcctggtaaccaacatgctactttctacttcaatagaattttctcattgtggtgttaatttgcatccccgttactgatgttggtaatttttttcatatacctgttgcccattagtatatcttcctttaagaaatgtctattcagtttctttgc

SEQ ID NO: 96860 - DNA, 596 bp, Homo sapiens
tggaggtcatcattctaagtgaagtaactcaggaatgaaaaactatactgcatgttctcacttataagtgggagctaagttatgggtacacaaaggcatacagagtggtataatggacattggagactcagaaaggtggagagtgagagtggatgaagggtaaaaatcctatatattrgatacgatgtatactactctgatgatgggtgcactaaaatttcagacttcatcactgtgtaattcatctatgtaacccagaaccacttgtaacccaaaaagctattgaaatttttaaaaaataaatttaaaaaacacaaaatactttgtactgtattttttaatttgttatctctctcaatcactcagtaactgtaaactctgagagatgatatcttctttgtttacatttctctcataaagcaccttgtctcactataaataggatctttagacatacagaagactaacattgcagagacgaagcacaaattctccaagtcctccatcactggcaatgatggtgaagacactcttacatgctgcagttcctaaactctgtgtgtgtgtgtgtgtgtgtgtgtgtgtgtgtgtgtgtg

SEQ ID NO: 96861 - DNA, 596 bp, Homo sapiens
tggaggtcatcattctaagtgaagtaactcaggaatgaaaaactatactgcatgttctcacttataagtgggagctaagttatgggtacacaaaggcatacagagtggtataatggacattggagactcagaaaggtggagagtgagagtggatgaagggtaaaaatcctatatattagatacgatgtatactactctgatgatgggtgcactaaaatttcagacttcatcactrtgtaattcatctatgtaacccagaaccacttgtaacccaaaaagctattgaaatttttaaaaaataaatttaaaaaacacaaaatactttgtactgtattttttaatttgttatctctctcaatcactcagtaactgtaaactctgagagatgatatcttctttgtttacatttctctcataaagcaccttgtctcactataaataggatctttagacatacagaagactaacattgcagagacgaagcacaaattctccaagtcctccatcactggcaatgatggtgaagacactcttacatgctgcagttcctaaactctgtgtgtgtgtgtgtgtgtgtgtgtgtgtgtgtgtgtgtg

SEQ ID NO: 96862 - DNA, 596 bp, Homo sapiens
tggaggtcatcattctaagtgaagtaactcaggaatgaaaaactatactgcatgttctcacttataagtgggagctaagttatgggtacacaaaggcatacagagtggtataatggacattggagactcagaaaggtggagagtgagagtggatgaagggtaaaaatcctatatattagatacgatgtatactactctgatgatgggtgcactaaaatttcagacttcatcactgtgtaattcatctatgtaacccagaaccacttgtaacycaaaaagctattgaaatttttaaaaaataaatttaaaaaacacaaaatactttgtactgtattttttaatttgttatctctctcaatcactcagtaactgtaaactctgagagatgatatcttctttgtttacatttctctcataaagcaccttgtctcactataaataggatctttagacatacagaagactaacattgcagagacgaagcacaaattctccaagtcctccatcactggcaatgatggtgaagacactcttacatgctgcagttcctaaactctgtgtgtgtgtgtgtgtgtgtgtgtgtgtgtgtgtgtgtg

SEQ ID NO: 96863 - DNA, 579 bp, Homo sapiens
aatcaaagatttccttttcaacagcaataaatccagtcaaatcctatttggtatggcacttgccatagcttgtaaaatctgaagttgctaaattatgtatttcaatagtaattccttacaaattaataggaagtgctaaattaggacaartggcctccaattggatccagatgctcaatcctagactaggtagaaagtgtgaaaaattaggaactgtactgattctttctctgagtttgttgaaggagccaagttcttccagcatggaatgtaaacacttgggaaggtagcctaagagaagcatgtgttacgtggcagcctgagtcccagctgtgtttacactgagattccaaaatatctgagcctggaaggacagctgtggtgtaaggaggaacagaggagcctcctgggacagaatgaccccaaagggaaagagagaagctggttcaaaaccaatgggccagggttcaaggggtggtgtggtcattaacaaagcagggtgaccatcgctcagcttatccaggagactcacatccaagtcccaagggtgatgatggagaaaatgctgaaacctgttga

SEQ ID NO: 96864 - DNA, 579 bp, Homo sapiens
aatcaaagatttccttttcaacagcaataaatccagtcaaatcctatttggtatggcacttgccatagcttgtaaaatctgaagttgctaaattatgtatttcaatagtaattccttacaaattaataggaagtgctaaattaggacaagtggcctccaattggatccagatgctcaatcctagactaggtagaaagtgtgaaaaattaggaactgtactgattctttctctgagtttsttgaaggagccaagttcttccagcatggaatgtaaacacttgggaaggtagcctaagagaagcatgtgttacgtggcagcctgagtcccagctgtgtttacactgagattccaaaatatctgagcctggaaggacagctgtggtgtaaggaggaacagaggagcctcctgggacagaatgaccccaaagggaaagagagaagctggttcaaaaccaatgggccagggttcaaggggtggtgtggtcattaacaaagcagggtgaccatcgctcagcttatccaggagactcacatccaagtcccaagggtgatgatggagaaaatgctgaaacctgttga

SEQ ID NO: 96865 - DNA, 570 bp, Homo sapiens
ttgcacatgtagcctgaacctaaaataaaagttaaaaataaccatactcccaatactataattaatgacagttcatctacattgattaagtataaaatacatgattcactcattagtgatagtatagctacattgactattaagtataaaatacaattcattcgttgtaattttgtcttttcaataaattcgaagttttcacaatccgtgttaaaagaatcctttcaaatgttactaaaatggaaactcctgaggatagacagactgaattgccagctggtaccatcttcttggtgcctggaaacaatctcacgatccttaagtctaccaattatccgaatgtcaaatgcctaagtggccttgagaatgatatcttgaatattgccatacatataagctgagtatgttttgttataagcaacgggaaccaactctggctaacttaargccaaaggggatttgtgagagggatgtggcaagagttcacagaactgtaagaagagatgaacaatcaggcttcaggaagaacatgaacagcctcggctgcacctgcagcagtgtgtgggtgcc

SEQ ID NO: 96866 - DNA, 561 bp, Homo sapiens
tggcactcactggcgactttggaacctagcacgggcactccggcagcccagagggagctcgtcccttttcaagcccagcaggcatcagccggctgcgcccagtgcggggccacggagcccgaacccttgcctgccagcgagcgcccagtgcagccccgactcccacctctgcctgtctctccacacctccccgccagcagagggcaggccttggccagccccagagaggggcccccacagcgcmgcggcggactgaaggggtcttccagcgcagccagagcagacgctgaggccaaggaggcgccaagagcgagcgagggctgctagcacgttgtcaactctcaaaagtacctcctacccttattctggtcctttcctctctagcacttactgctgttggcaattgactataatttaccaattaaagtatgatctgtctcctctcattagagtatgacatgcatgaggacaaggaccttgtcttagctgttccctttacaaccctttctgaaacatagtaggcacttggtaaataaataaatgagtcaatggatgactttt

SEQ ID NO: 96867 - DNA, 561 bp, Homo sapiens
tggcactcactggcgactttggaacctagcacgggcactccggcagcccagagggagctcgtcccttttcaagcccagcaggcatcagccggctgcgcccagtgcggggccacggagcccgaacccttgcctgccagcgagcgcccagtgcagccccgactcccacctctgcctgtctctccacacctccccgccagcagagggcaggccttggccagccccagagaggggcccccacagcgcagcggcggactgaagggstcttccagcgcagccagagcagacgctgaggccaaggaggcgccaagagcgagcgagggctgctagcacgttgtcaactctcaaaagtacctcctacccttattctggtcctttcctctctagcacttactgctgttggcaattgactataatttaccaattaaagtatgatctgtctcctctcattagagtatgacatgcatgaggacaaggaccttgtcttagctgttccctttacaaccctttctgaaacatagtaggcacttggtaaataaataaatgagtcaatggatgactttt

SEQ ID NO: 96868 - DNA, 561 bp, Homo sapiens
tggcactcactggcgactttggaacctagcacgggcactccggcagcccagagggagctcgtcccttttcaagcccagcaggcatcagccggctgcgcccagtgcggggccacggagcccgaacccttgcctgccagcgagcgcccagtgcagccccgactcccacctctgcctgtctctccacacctccccgccagcagagggcaggccttggccagccccagagaggggcccccacagcgcagcggcggactgaaggggtcttccagcgcagccagagcagacgctgaggccraggaggcgccaagagcgagcgagggctgctagcacgttgtcaactctcaaaagtacctcctacccttattctggtcctttcctctctagcacttactgctgttggcaattgactataatttaccaattaaagtatgatctgtctcctctcattagagtatgacatgcatgaggacaaggaccttgtcttagctgttccctttacaaccctttctgaaacatagtaggcacttggtaaataaataaatgagtcaatggatgactttt

SEQ ID NO: 96869 - DNA, 561 bp, Homo sapiens
tggcactcactggcgactttggaacctagcacgggcactccggcagcccagagggagctcgtcccttttcaagcccagcaggcatcagccggctgcgcccagtgcggggccacggagcccgaacccttgcctgccagcgagcgcccagtgcagccccgactcccacctctgcctgtctctccacacctccccgccagcagagggcaggccttggccagccccagagaggggcccccacagcgcagcggcggactgaaggggtcttccagcgcagccagagcagacgctgaggccaaggaggcgccaagagcgagcgagggctgctagcacgttgtcamctctcaaaagtacctcctacccttattctggtcctttcctctctagcacttactgctgttggcaattgactataatttaccaattaaagtatgatctgtctcctctcattagagtatgacatgcatgaggacaaggaccttgtcttagctgttccctttacaaccctttctgaaacatagtaggcacttggtaaataaataaatgagtcaatggatgactttt

SEQ ID NO: 96870 - DNA, 634 bp, Homo sapiens
tggtacatggcataaacacttgataagaaattattaaaatctagtttttttgtgatgcaggtaaatattgggcttactcaattgaaataccccatacttcaatagagttcagttacaaattttcaagtttcctctttatatcataacctttgggaatagaatttaggttcctaattggaaagattttgagggttgctaggaaatcttctcctatgccaacaaatagtcctccaaaagaagacatattgagaagctcagaagtgcctcaagtgacatttatttattaatttgacaactattttatttgctgaagatgtcagtcatttcaacagttccttctcagttttatgtgaaaataataactcgtttgaggcaggacttggaggagagtggagaaatgagtatggggaaagaagatctggagtgtagggktggttatattggtgcctgatacaaagacctatggtacttctctaactttttcgcatcatggaacacatcgaaaatgatattatttgcatggtccacagagtaagccgtcgtaacaactgaagatgactcatccagaggctctggcctcctacttcagcaaaccacccctaggctgaggggcctgttatctcagcccactgtg

SEQ ID NO: 96871 - DNA, 438 bp, Homo sapiens
aatttaagattctttattgcatgtctggtaacaaggacataggaatgaatgtagtcacttataaacagaggagacaatgagatgaggacataaccttgtcctgcagaccctcaacattcaaaggtagagcagagaaggagaatatgtaaaggagcctgaggtaaagttgccagtgcarttagaaagagaaatgggaaagaatgagggagagtctaatgaggggaagacagtggtactttcagggaaggtgagggctgagctgtcctactgaacctggaaacagactccactgatgaccttaggaggatctggtttagtagaatgaatgggatagaaacacgattggagtaagttgaagaggaaacacaaaaaagagaaattaagaatactgcgtatagaaaattatttggggaagtttgtttgtcaagtggaaaaagg

SEQ ID NO: 96872 - DNA, 612 bp, Homo sapiens
caagtaagtctcttttctttataaattaccttttctatggcattctgttatagtgactgaaaacggactaaaacagaagttgctgcttcttggaacaatatggtttttccctcttcagcttctgagggctcccccttacaattactaccrtcttcttagtcttcttgtccatctaccccattgccatctctggtcaattctagaaccaccatcattctccagttagaagttattattgtatacaaacagcctggctgactagatgtaacaagtgtgaacacctgcacatgaatagaggaaaagtgtggaggaaactctgggtgtagcttcaaccaaaggtttgtttgggtgactgaaggaaatccaagagatagcataaggcaatgcatgcatgtatcagaaagagaggagaaaatttatttagctcagaggcagcaagcagtcatccctaccctctcactatggggaactgcaagaggcattcatttaccgtttttatttaaaaaaaggagccaggatcacacttggttatcccctctaaaatataatcttaaaatcaaggatgctgaattatttatatttgtatctgcaggactgctatgctgtctggta

SEQ ID NO: 96873 - DNA, 521 bp, Homo sapiens
ggtgccatttgaagggtttagtgaagacaaatctcaggttttctttactctgtccctctccctgggtgcctacgcacataaatgtgctcttgcattctctttcacctgcaataaaaaagagtgaggtatactgatctacacttatcacctaccaagctctytaaggtaaggtaagtcccttcctgttatgttttcactttcaagacctacataccccacccaaagaaggagcctttgcccagccattaggacttttttttttttttttttgcagggttgggtgatgtatggagaggagagggaaagaagtaatgaggaagagagccagaaggctggagtcactgccagagagagagagatagaaagagcaagagagacagattattatgggggctattaaatttgtattttacacacacacacacacacacacacacacacacacacacaatgtgatattgtcaggcctctgagcccaagcctgcacgtatacatccagatggcctgaagcaaatgaagaa

SEQ ID NO: 96874 - DNA, 515 bp, Homo sapiens
aataaggagggcaggctaagtttccattagacatatagaacagatgcaaatagaagagagggtaaattgtcttggagggttgttagcatgatcacttctgccaacttgaaagtctctaagtgttacactttcagcttccaccaccagcacattctatgtatgttttagaatagccgtatggcatctccctctcaaatattttttcttgccatcataagttgctcattwttctggtccctaatacactggatggtatccttaaaatctgattggagttctgtagttggcttatgtactgacttcaatccaggatatcagtgttgtaaaggaatcaagtaaatagtgaaagtagaaacaataatggcaatggtatagtgtgttccatgtagaggaataaagcatgttgatataccaaaactctagggttagacttacttggctgttggtacaatatgtagcaacatcaaagtaatttaagagcctgctgttctgtttcactgacactctgtggatga

SEQ ID NO: 96875 - DNA, 585 bp, Homo sapiens
ctttgtggagaccactctatcagaaaaagtatgtatgctgatgcactgatgtggggacagaggtttcagccagggcaacttggattgtggtcagcccagctagaaggaagccactggactgtcatagtggtctccaagaacaaaacaacttccttcaatccttttggggaaaaagttccttcaccttttttatgtaaaaagactaccatggcagaaaaatggtgaataaacacagtagtatacagggaagtccagagtccatatcctgggcaaagtagagactgcctggattaagtcttccacatagggtagagagcaagaagagttaaagtgaaatattagcaacagagagttaggaaaaaatggagataagatgttttaggacccgaagtaagaaattgcctggctcttagtggaawggtgctttaaaagtccccttacagctgagcttgtgaatgagaatagacctgttcagaaggctttaggttgccttggactttggcaggaagtcattttgacagaacatcttcttttttttaacctgtgattgtgtcatgctgctgtagccacggtctgtgttttgtg

SEQ ID NO: 96876 - DNA, 559 bp, Homo sapiens
tattcttagtgaaaaaggtcaatctcaaaaggttaggttgatatgattacaatttatataattatggaggcggagaacagactagttgttccagggaataggatagggaaaatrtgtggtggatgggtggtacaaatataaatgggtagcatgaagcagttcctttgtgctgatagaacagatttgtactttggttgtagcagtggtttcatgaatctatacgtgggaaaaattatatagaattatacatacgcacacaaacacacataaacatatgaatgtaaaaatggtgaaaataaattctgtagtctagataatagtgtagctgacagcattttaccaatgtcgatttcctggttttgatattgtagtacagttttataagatgtcacttttgggggaaattagtttaagggtgcaagggagcctatgaacaagttttataacttcctttttgttattttaaaatgaacagttaaaaaaaacaacaacacccggtttgtttctgttttaatgttgcttgtcgaagatctccctccctctatagtatacacactta

SEQ ID NO: 96877 - DNA, 559 bp, Homo sapiens
tattcttagtgaaaaaggtcaatctcaaaaggttaggttgatatgattacaatttatataattatggaggcggagaacagactagttgttccagggaataggatagggaaaatatgtggtggatgggtggtacaaatataaatgggtagcatgaagcagttcctttgtgctgatagaacagatttgtactttggttgtagcagtggtttcatgaatctatacgtgggaaaaattatrtagaattatacatacgcacacaaacacacataaacatatgaatgtaaaaatggtgaaaataaattctgtagtctagataatagtgtagctgacagcattttaccaatgtcgatttcctggttttgatattgtagtacagttttataagatgtcacttttgggggaaattagtttaagggtgcaagggagcctatgaacaagttttataacttcctttttgttattttaaaatgaacagttaaaaaaaacaacaacacccggtttgtttctgttttaatgttgcttgtcgaagatctccctccctctatagtatacacactta

SEQ ID NO: 96878 - DNA, 590 bp, Homo sapiens
ggctctttcacatatttgtgtattggatcatggttgcgtagtgtagaaaggccttagcagggacgattggggtcccttgactgtcttccacatctcattccccagcaggcttgtctgaccttatttttgtggcaaagacagacaagtaaaagaacaagtgaaattgtgtgagtgtttttttatgcttttggcttactgacatcccagtggctgaagcaagtcacttggttgagccaggaaaccaggggtgggatagagtgccgtgcccagagagggagaggactacaaagttgcaggacaaaggcatgcatataagaagagggtgaagaattaatgcaagcaatcctccacagtcttttcttctcatttcctggatttcttaagtgaggggttacgtttcaccctgttttcacacccacagtcttcatagaaacagcccaaagagggacattctgttgattctagatttgttacctagattgatccttgattaggatgttttagcctaamtttctaattccttaataattacaacaataaattgattcgtggtaataataattatcaaattctttctatgtaacagacat

SEQ ID NO: 96879 - DNA, 630 bp, Homo sapiens
cttgtgctatcaaacttctgcttctccttgtcataaaatttatctgtgcattcaaagaagcagctttttttcctttttttttttgtgtgtgtggatggttgggtgagatagttctatttagaaagaatgaaaaagaaaaagaaaagatttcatgtatacttatcacatactgattttgttagacttttggttgtgaagaattcagcctgaaagaaactgggatcaattataggaagtatgtattggtgaagaggaactaaaacagctcaaatttccagcttctttctccatctttttcagggtctctcccatagcatctctgaattggttctgtgtctgagccattctttctctgccaatttcccttgcttattcagatctttaatttctttatagttctggctggcatagagctcactgacattgtcctgcctgactgcttttagcttcagctcttaaaaattgctccatctccttgtgtttctgcattcttcagattcctaagaataagaatcttattgtcttagcccgcctttgtattccatatyatgccataagtcattggccttccagttcatggtatggtagattgcaaagagtcataattccccatccctccctgtagccaca

SEQ ID NO: 96880 - DNA, 590 bp, Homo sapiens
gaaaagtgagatcagagaaaggccacagccttagtcatggccctcagacaaacaaaccttggtggttcagagaggacagaaaatggagcaggccaatcacctagtagggcttgttacctgtgtggtttacaaggacaccttaaaaaagattgtccaatgagaaacaagctgccccctcaaccatgtccactacgctgaggcaatcactggaaggtgcactgtcccagaggacaaaggttctctgggccagaagcccccaaccagatgatccaacaacaggactgagggtgcctggggcaagcgccagctcaagtcatcgccctcactgagccccgggtaygtttaaccattgagggccaggaaattgacttcctcctggacactggcacggccttctcagtggtaatctcctgtcccagatgactgtcctcaaggtccgttaccatctgagaaatcctggtacagcctgttaccaggtatttctcccacctcctcagttgtaattgggagactttgctcttttcacatgcctttcttgttatgcctgaaagtctcatacccttattagggagggacatattagccaaagc

SEQ ID NO: 96881 - DNA, 616 bp, Homo sapiens
tggccgctaagtaaagagaaactggaggctttagacaaattagttactgaacaattagaaaatgggcacatagctccaacgttttccccttggaattctccagcttttgtaattaagaaaaaatcaggtaaatggagaatgttaactgacctaagagccatcaattaagttatacaacctatgggagcattacagccaggattgccttctcytgctacaattccaaaaaattggccttcaatagttatagatttaaaagccggtttctttactatccccttagctaagcaagactgtgaagagtttgcattcacaattcctgtggtaaacaacctgcagcctgctacacattttctttgtttcacagatgggtctagtaatggtaaagcttattctggatcaaaaggtaaagttttccagatgccttatacttcagctcaaaaaggggagcttgtagctgtaattgaggtattgactgcttttgatatgcctattaatgtgatttctggttcttcatatgtggttcattacacagagttaatggaaaattctcagttatgatttcatacagatgaacaactgatgacttaatttacccaattgcaaacagcagtta

SEQ ID NO: 96882 - DNA, 611 bp, Homo sapiens
aaatcgcaagtatacaatgcattattattagttatagtcaccatactgtaaattatatttccagaatttattcatcttattacttaaagtttgtaccttttgatcaacaactccccatttccaaaatcctgactgttgaattacagtcaatttccaaaatataagaaaaaatttagaccaagattcttggaaaagcatcttactttagtattagcaaaggcttaataatacatctttcaacacagactcctctttccctcagagccagtttattctyagaatgagtcaagtcagagaaatgagtgtatacaatggagaattttgaggcttagcctgccactttgttatttaaagtaagctaaattccaataaattattgtcaagttcaaaaagaactgtatttactcctttgtgacccttagtcaaactgtgtataatgctgtttcctgtacaagaaccacctgcacagataagtcttgatatatgttcatgatcttttggcaaaatataattcaacttgattttcaaagccctgttatattttcctcatcttatagatagggactatgtttgcaacactgttcaaactaaaggcctaaacaagattatag

SEQ ID NO: 96883 - DNA, 624 bp, Homo sapiens
attagtcagaatttacataatgaaaagacaataatttctttcatgattatttcacacagaatttattaaatgtgatcgcagtatttagaacatcccaagggcttgagatataggcagagcaggcattctgaggttgacttgaggcttggggaaggaagcagagtattaagtggcccacctacccacgactaattagagacctagatcccaagtctgcttacttccagtccagttctccttctactacattgcagtaactttttctcaaaaacaacagaagcagaagctaaattatgcacaggaacaaagaaaatgttcctgtagtcrgggactgaaatacatttatatagcagcatgttgaaaacttggttgaattcatgggcaccttacttgaagaggctcaaggatataatctccttccctaatagaaaacctactgaggaagtcattctttatgccccaaagatccaatgatggaaagtatagaagagctcactaggatttctatttaaacttgaagtaggagactaggaaagaggttgttagagcagccatcctgcagttttaacataaaggtttagggactttgaacagatgacaggagctttctgggaggtttttgaa

SEQ ID NO: 96884 - DNA, 662 bp, Homo sapiens
ctaaatgccagtggtatctccaattcattgtgacttcaagaaagatgcccacaaatttttaaaatacatcctaagttatcaccccctcagataaccacttgtacatgcatttaataaataatttgttgaataagttacctaattagtataaatatgaattttttctcccctaaatcttttgcaattatagtataagatgtacgagtttagggactgaagttactttatattttcaatgaacaatcgtttgaaggagattttttcaaagcaggtaactgcttgaatttagagtccacaatttttcctcagatttaatttatttaaaaacagactagaagtaatcctcagcaattatcattcctggaaactaaatctgtatctttacctggtgtattaaatgaatcaaaacattatactaccatcatttcatattaaattaggctactaattttaaaagtcacaaacacacmcaatttttgctttgtgccaaaaagctaattttagaggcatagtggtgagttatgcagtggttttttaaagaaataaatctaccaggtgctagaaatatataatataaaccactgtaatttacagggtacatgtaaccttgtatagccattcgtgctggtggtagatttgaaaagttagagtaggcccaggca

SEQ ID NO: 96885 - DNA, 613 bp, Homo sapiens
tgtaattctttaccttatttttgcaattgttttgttagtttgaagttgaagtaaaagaaaattatttttaaaaatcagcaattgagctggtttttggatttggaagagagtaactaaagcatccgtattcctggttacctttctgagaacagcacagcagtgaaaatttatccatttaatgtgccctatatgttcacagtaagtcagtcactttgctgggcattgggagcataagggcacatcattcttgtctttgaagagttcacagggcactgtaggacaagttaaatatgattttacaaagcaatagtagagcgttgctgaataagaagacaaaaaaagtcagttaacccattagaagagatgatggaagggtgggcaaggaaggmtttccagatgggtgatgcctgggctgatctttgaaggatgagcaggagaaagccagatagatgagtggggaaggcaaccatggtaatggcagcagcctatgcaaagacatgaaaatatggagcacttggcagagtgatgagaggacagagctatggtcaatatcatgggctttgaaatcagaaatcagacagactttttatttgaatgccatttcttccattta

SEQ ID NO: 96886 - DNA, 577 bp, Homo sapiens
aaaatgccaaataaaagatatttttatgccctartttattcctctctatatacttttctttttttcagaaatcacatctttattttcatgcccaattgctcttttgcaaaaatatattttaaatcttttaaagtccccacaaacttttatagcaagttttaaagcaactttttagttgcaaattagaatgcaaagtagttggacttagatggaggtaaaaggaaaatttctattacagcatctgcaaattacaagtgaaagtcacttataacttatcctgcagtgcttttgaaaaacttagcttgttttcttcaaagaagaaaaatgcttcatgaaaggtctaataaaacatttaaattactaaggatgatttgaaaatttaagttttatggaatttagatgattactggaatcccagaaagtggcataatggacataatttttataacaattgagaattactgtgcacatgatacacttgcattgatttgcatttaaaactatacttaacccaagtaaccaatcaaaaagaatttttttggcaaatataattcctcttgataaaaaccttaggttg

SEQ ID NO: 96887 - DNA, 464 bp, Homo sapiens
gtttccctgaaatatagtttgtagaagaaaggctggaaaaatgctttattcttttccttcatggattttcagaaaaaccactggatgccccgcaacttccatggtgactcttagatgtttgtatcttcgtgttttgatctgcagattatgtatttttttgatactcagagtgtccatttatcttggactggcacttgacaaattggcaaactcttgcagtttcttaactgtaataaaactagaacacatgggtttgaaccacagctctgtggtgaaaccttgagagarttaggtaatctcgtctgtctcaatttcctcatcttaaaatggagataatacttactgcctgcatcactgggcttaaattacttatgtaaaatgcttcatttcgtggctggatgacagtaggcactcaaaagcccaaattgtttgaggtttcacttcatcatttctctggcagaatt

SEQ ID NO: 96888 - DNA, 540 bp, Homo sapiens
ttatgtgggatttgggcggggagctgcagaggtgaggagggaaccctgtctgttcttgcacagcagcatctcttgcaatggcccttcctttccatgcctgcagccacagctcacctgagatcrcttctcatggaaagcagcccaaaatgcacttcatcagtctccccgtcccaccctccagccacaagccaccactctgtcctggattttgctgccgattcctcttctgaaagcacagcctgaagtaagccatttcctccagcagaccttctagtgggttcccgctgctggagtctcctgggctagggggatgactaggactaggactgccctccagagcccctcagtgtggctgctcctcagtgtggcttccccagggcatggctggcgcagggtggtgggattctcaagtgggggctcggggctctgtgcgagtattcccactctcaaggcagaagctgcaactcctttattgccccagcattgcaagtcccgcagtgtcacttccactggactccagtggcaacatacaagtcacca

SEQ ID NO: 96889 - DNA, 540 bp, Homo sapiens
ttatgtgggatttgggcggggagctgcagaggtgaggagggaaccctgtctgttcttgcacagcagcatctcttgcaatggcccttcctttccatgcctgcagccacagctcacctgagatcgcttctcatggaaagcagcccaaaatgcacttcatcagtctcccsgtcccaccctccagccacaagccaccactctgtcctggattttgctgccgattcctcttctgaaagcacagcctgaagtaagccatttcctccagcagaccttctagtgggttcccgctgctggagtctcctgggctagggggatgactaggactaggactgccctccagagcccctcagtgtggctgctcctcagtgtggcttccccagggcatggctggcgcagggtggtgggattctcaagtgggggctcggggctctgtgcgagtattcccactctcaaggcagaagctgcaactcctttattgccccagcattgcaagtcccgcagtgtcacttccactggactccagtggcaacatacaagtcacca

SEQ ID NO: 96890 - DNA, 634 bp, Homo sapiens
aaagttttttacttgccttgacagatttccaattgctatatgttttcacacacaaaaaattttaaatacatggaaattcagttggtactttttttctcagatccagtagtttgattacaaaggcatttaacagaatagttttcatcttttcatgactctccttgttcctcttcatgatcaattccatggccataagaattctttgacgccaacaacagatgggatataaacagtgcattgttacttttgctaatatcaaacagaagggggatctaaatgaaaatgaaaacatttctgcaaacatgagtgtcctcagctgtcacaggaaataatgaaaaaaaaatcagagtaaatttctttttaactacttccttatagtgtctacaatgcaagtgattttttacaatgctaatttggtatagttttgcacctctgcatctaatagttggagtgaatagtctgcragggatttttagatctgcttaattcttctggtcagcatgcagtggcatatttaaggaggcaatgttataaccctttaaaatgtaatcatatgcaaaattctatgtatgatttgggagacccctttaaaattctctctatgtatgtaatcacagaagccccaatttgaaaa

SEQ ID NO: 96891 - DNA, 460 bp, Homo sapiens
gatccgacatttctttctgactcccttcctgctggcccagggaaaaagaaggcagtttggcaaggaaaagtggctccgaggagctggccgcatgggktgctcaggacagggcctgcctcccaaggctgccccaccagaacccctgatagagaagtggactctcctccctcccgccctctgtccacaggctcctgcctcagagccaggggccccttcccccgtcctcatcgcttctcattccctctgtgcgtatcccctcactccagggagcagagaggctgtgggtggatgagaggaggggggtcacactgtcgatgttcagaggatgggaggctccaggcccctcttacctggcagaaatgttgctgtagtgcatgtaagccgcgatgacaactcctatcctgcctcggtttccctgaaagagccccaaacacaaaatcatttatttctaaggccagcc

SEQ ID NO: 96892 - DNA, 553 bp, Homo sapiens
gggcagtgattctaaaacctttttgtatctcaccactttcagaactatttygtacacaaaacaagtctttcagctggtgtcttggacaggcactatcagtatcaatcaatggaattcaagctgttgaactaggacatcttaatattttaacccgtgtctaagtagctggggaatgtggtactcaggaagctgaatgacctcaacatatatccataattcctcactgtcacttggaaattgctagcagaattccatagagctaatgtctatgacaccctcagtggtcctgccctccaatctgcagtatgccatattaatgattttctcccaaagcgatggagggaactgtgccccagtccaaacatttaggacagattttcgataggttaattactgaagagggaaccaaaaagatggtaaaccacaattaaattgttcagctatgcttcagaatcaggaaacactacttatccatcattctccaaaacagcaaagacggaacatatgtatattgttaagtcttttctatccttccctgtctatcactttatta

SEQ ID NO: 96893 - DNA, 563 bp, Homo sapiens
aacttcttgccacacaatctaataaaaagttatttggggccacaaagtgctctataattttaatatcaattgagactatggccaggagaaaagactgtttccccgctggagggcctgagcttaaagcacctttccaattcagctatgtaggagacaagggtgtaarccctggacactgggaaaagctatttgcatccccaaaagttaattttttttttacctgcaatacacccttttaaatagtaaaggagaaaaaattatcatcccatactcccggtaaaaatatatctcctttcttgcatggtcacccaggaaaaggacctgttttacctactatgtgctttctcacactttatttaggcatgagattgtaacgatgtaaaaattaacatatatgtgtgtgtgtgtgtgtgtgtctataacatactttatatgtatatattcttttacatgtataaaattctacattttgaaagatagtactagaaaaataacttgaggatgattctggaatccatcccaagctaatggtggctgtacacaatttgctcttctcactggga

SEQ ID NO: 96894 - DNA, 516 bp, Homo sapiens
ctgctggttccctttcttgtctctttttcattttaaggactttcctcagaagtgagagagttcttggctgtctcttcatatttaagagaggaacattaaaaatcaatatgtagctctaagtaggtgggaggaaytgtccactgaacacttcacattagaggatttatctggagagtttgatggcatcaaattttattatctgtatgtctttcttgttgggtttattagatgccctgagaaggctctttcaaactcctgcctggaggattggatggtctgaggcccagttatcagggttccagcagtcaaatagggaagaggcctcaagggagggaatgagtcagcactgcagatttagtttcataggtttgtgtgatgtgtgtatatactctgcatagtcatagagatggtagagagagaataagtcacataattacctcatgcactttctgattttcaaacgatgacacgtaaaagagatgggtaataggaactggtatgatcagtggttgacta

SEQ ID NO: 96895 - DNA, 525 bp, Homo sapiens
gagggaatgagtcagcactgcagatttagtttcataggtttgtgtgatgtgtgtatatactctgcatagtcatagagatggtagagagagaataagtcacataattacctcatgcactttctgattttcaaacgatgacacgtaaaagagatgggtaataggaactggtatgatcagtggttgactatccctacaagatgtctaagatcatgaaacagggacaagcaacctcataaccctctccacaattattattgcctagcatgaaacctcagagtttaaaaatggtgaaatatttggaggagaatggggggagactaaaattgtatgaaattatttgtctccaaygaagataattcaagtacagtcatgcactgcataacaacatttctgtaaacgatgaaccgcatatatgacagtggtcccataagattatactatatttttactgtaccttttctacatttagtatgtttagatacacaaatacttcccattgtgttacaattgcctaaattattcagt

SEQ ID NO: 96896 - DNA, 419 bp, Homo sapiens
gcaatgctgtccaatagaacttcctgcagtgctggtaatgtcctgtgtctgcactctctaatagggtagccactagccatatgaaactattgagcatttgaggtktgtctagtacaatgaaggaatttaatttctaattttattttattttaattaagttaaataaccatgggagttcattagacagtgtagctttagaaggtgtgtgtgtgtgcatttttaaaattttaaaaatatcttcactgaggtagagttggcataaattgcccacacttaaaacacatattttgatgttttgatgtatgtatataccatgaagtgatgaccacagtcaagatagtgagtatatccatcactccaaaaggtgtatataaaattaatgcacctgaaaagcagatactggataaatatggaaggac

SEQ ID NO: 96897 - DNA, 455 bp, Homo sapiens
ctataatatataattacataccatacaattcacccattcaaagtgtccaattcagtgactgttgttagcatattcacagagttgtgcaaccatcaccaccatcagtttcagaacaatttcatcaattgagaaaaaaaactctgtatcctttagctatctctgcctctaacaacycccccactttcttgtctcacttccccccgcctctccaaccctgggcaaccaggagtctactttgtctctatagatttgcctattctggatattttctgtaaatggagttttagaatatgtgggcttttatgattagcttctttcacttagcataatgttcccaaggttcatccatgtgaaatcaaagctttttaaaagaaatttgatacttgggcaattatattactgtatgacaaaaataaatcagtggctctttaaaaatgtatatggtaatttagggg

SEQ ID NO: 96898 - DNA, 455 bp, Homo sapiens
ctataatatataattacataccatacaattcacccattcaaagtgtccaattcagtgactgttgttagcatattcacagagttgtgcaaccatcaccaccatcagtttcagaacaatttcatcaattgagaaaaaaaactctgtatcctttagctatctctgcctctaacaactcccccactttcttgtctcacttccccccgcctctccaaccctgggcaaccaggagtctactttgtctctatagatttgcctattctggatattttctgtaaatggagttttagaatatgtgggcttttatgattagcttctttcacttagcataatgttcccaaggttcatccatgtgaaatcaaagctttttaaaagaaatttgatacttgggcaattatattastgtatgacaaaaataaatcagtggctctttaaaaatgtatatggtaatttagggg

SEQ ID NO: 96899 - DNA, 626 bp, Homo sapiens
gccctctgctgtctcttcagagcacttgcatcccgaaaacaactattcagtatagtgtgtgatataacctttccctttccaacccaaggattggcttttataatctcagcagtaaaaggagaaaacaatgaaaattagagccattaagaaacttaaaagacaaaatcttattggcctgtgagggcatacagagaaagtgttatttgggggctgagtcatgagttttacaacttcaggacttcatgtagattaccattgtccactacaaagataatgtgagccatgtaatgtagttttaaattttctagtacctgtaagaaaaataaaaaggtttaattttaattatatatttaatgcaacatatcaaaaatgtgtcattctataatcmttatagaagaacagtaaggtattttacattcttttgaattaagtctttaacatttggtgtacattatatttaagcacatctcaatggcctaaatgtttactggaaattcttgctgtttagattccataaaatgtatagctgagaaagtaaatttacattttgaaattgttctaaacatgctcagaattttctaatagaactaaatatccatttttaagtttaaaaaaaaattgagtca

SEQ ID NO: 96900 - DNA, 436 bp, Homo sapiens
attattgcatagttatctagtcaatactgaagtcaccaaaaattatgaaaggagtggtgttagaattacagtgaagaaaatgttaaattcctcaaggaatcaggggcatgttccagggattctgtaaatgactgcaacaatatttagataaatataaagcattcactacttakcagatgggtgctcctgtctgttccccttgccctcactggaaagctggggaaacatcctggtccaagttgatccagtgagactattctttatctggagcttaagggacatcgaaaccgagagggtataaaaaatggtatttgaatgggatcagctgagtcaataaactagaaaattgagtacaattggatcgtgacaatgaggcagtgctgggcaatatgtgaggcatatagctgagggatcagagggccagggatagagcaaa

SEQ ID NO: 96901 - DNA, 605 bp, Homo sapiens
tgtctatttatgctctttcagacttttcaatgtaggcatttaatcttatgaactgtcctcttagcactgcttttgctatatcccagtggttttgataggtgttgtcactatgattgttcaaagaattttttaaatttttaacctcatttcattgttgacccaaaaatcattcaggagcaagttatttattttccatgtatttgcatggttttgagagttccttttggagttgatttccaattttattccactgtagactgactgagagaatccttgatataattttgatttccttaaatttattgagatttggtttttggcctatcatatagtctgtcttggaraatattccatgtgctgatgaatagaatatatctcctgcagttgttgggtagaatgttctataaatatcggttaagcccatttactcttgggtatagttcaagttcattgattctttgttggctttctggcttgatgacctgtgtagtgctgtcagtgaagtattgaagtcccccactattattgtgtttctgtctatctcatttcttagggctagtagtaattgttttataaatttgggagctccagtgttacatgcatat

SEQ ID NO: 96902 - DNA, 640 bp, Homo sapiens
ctctaaagtattgacattgccatcatttaatatgctttatcacacccttactggttgaatgcgtttttaacatgctattgtgaaaaagactttatcatttaagtagattacaagttcaacatagttgtgtcatcattactcaaaatgctaatgcaaatctaggttacactcataaaagtattgtcttgatcaaacatagtaaagttacctctgttctctgtgctgattgtactacacctggagtattgagtttacttgtagacactgtctttaagagtgtgccttggacctatttcagttggcttacaaaagatcaaatttatacacatatttatataaaaagacttattgtttgcttaactttaaggatgttgtagrgtttactaaaagggatcaaaagatacctagagaagaaggttttctgatgcagtaagagtgaggttgaaatgaggttgagttggccttagaaggaggtgagaataagttggaatgagcttggggtgtgctgcaggtgatcttgagatgagataggctgagcttggagcaagtttaggatgttattgggatgggaagaagctataaattagtctggagaggaccaagaaacactctgaagattgcatagatttgtatattttag

SEQ ID NO: 96903 - DNA, 640 bp, Homo sapiens
ctctaaagtattgacattgccatcatttaatatgctttatcacacccttactggttgaatgcgtttttaacatgctattgtgaaaaagactttatcatttaagtagattacaagttcaacatagttgtgtcatcattactcaaaatgctaatgcaaatctaggttacactcataaaagtattgtcttgatcaaacatagtaaagttacctctgttctctgtgctgattgtactacacctggagtattgagtttacttgtagacactgtctttaagagtgtgccttggacctatttcagttggcttacaaaagatcaaatttatacacatatttatataaaaagacttattgtttgcttaactttaaggatgttgtagagtttactaaaagggatcaaaagatacctagagaagaaggttttctgatgcagtaagagtgaggttgaaatgaggttgagttggccttagaaggaggtgagaataagttggartgagcttggggtgtgctgcaggtgatcttgagatgagataggctgagcttggagcaagtttaggatgttattgggatgggaagaagctataaattagtctggagaggaccaagaaacactctgaagattgcatagatttgtatattttag

SEQ ID NO: 96904 - DNA, 652 bp, Homo sapiens
atgctgcagtaacaaataagctgaaatttgctgttttaacttttatttttcatttacactatatattcaacgtgggtctagtcatcatactcattcagggaccccagctgtccaaattccatcttaacacaagtttccaaggttactgtggccagtataaggccrtagcaaatggaactttagttcttaagtttccactcatgttttattagcgaaagcaagtcatgagtctttagtactgcacactgcaatgctatcatatgcccgaaacaagaagaaccaacgtatttgtgaacagtcttaatttaatgaccatcatagtcacatagttctttagtgactgaggtaatattaaaattcctttctctaactctgttttcttatcacgttaattatctgtattaaagactataatgaaacaaatccaaaaatgtaatacaaaaagtagcagaaatcctaaaataatttctgtttagcattatatgaatgttttgctgtagttacttccctaataggggcttaaagagagatgctgcaaaattcatcattttcaaccctgaataaagtatgcaaatgaaatcgtcaaaacctttcagtctgaaagtgactttcttctgttttctgctacttcctttatcaaaacagatggcta

SEQ ID NO: 96905 - DNA, 652 bp, Homo sapiens
atgctgcagtaacaaataagctgaaatttgctgttttaacttttatttttcatttacactatatattcaacgtgggtctagtcatcatactcattcagggaccccagctgtccaaattccatcttaacacaagtttccaaggttactgtggccagtataaggccatagcaaatggaactttagttcttaagtttccactcatgttttattagcraaagcaagtcatgagtctttagtactgcacactgcaatgctatcatatgcccgaaacaagaagaaccaacgtatttgtgaacagtcttaatttaatgaccatcatagtcacatagttctttagtgactgaggtaatattaaaattcctttctctaactctgttttcttatcacgttaattatctgtattaaagactataatgaaacaaatccaaaaatgtaatacaaaaagtagcagaaatcctaaaataatttctgtttagcattatatgaatgttttgctgtagttacttccctaataggggcttaaagagagatgctgcaaaattcatcattttcaaccctgaataaagtatgcaaatgaaatcgtcaaaacctttcagtctgaaagtgactttcttctgttttctgctacttcctttatcaaaacagatggcta

SEQ ID NO: 96906 - DNA, 626 bp, Homo sapiens
gtcctaaatattgcatggcacatagtttcactaaaagttattttttctatactcagatttaactaggtatcctgtaattcatctggccaccccatccccagagccaagtcatcaatggcactaacgtaaattaatttcatataaatatttataccaagtgcaccaaatttaaacaaaaatatttggtcaatgtaacttgtcaagagccatagaaaaacatctatttcaaatatcttttgacaggatggatggactgagtatttcaaaatgtaatttagggattgaattattctcaccatatcaatgcactgacaaaacttatccgcygggtaagtacttttggaactgacctgggagtgagggcaggcatgttaatcatgatgtccttgatagggaattctagtcacagtaaagttcaaaagggtttgctacctcttaatggaaatgacaagcaaattgttaaaaaaaaaaaaaaaagaagatctgggtagctacactagttgaagacctatcagcaagagaatcagcttaaaaagtagttgaagaacaaaaacaaagttgccagatacaagatcagcaaggaaaaatccatggttttccaaaaaccatgaattagaaaatgtaat

SEQ ID NO: 96907 - DNA, 566 bp, Homo sapiens
agatattaagtggggaaaagccaaaaaccaattttggaagtagcaagaggtaaactgaaattgtaggaagtcaagcggccctatacagagtaggtcaaaaggaaasttttggggaagctttttaaacagtttgaaaagttttttttttgtttaattcaaacttgatttctagttcttaatactgctaataacagtagtagtaatgtgaggtgaagtatagtactaaggatgtctatgaactcatataatctcacagtattcctgtgaggtacaaaatatgaagtgttaacaacatctctttacagacgagaccctgatgatcagataggggaagtaaattcaagggacaaatgcagatctccttacctctaaagtgagtgctcttagctactctgctataatatctcctgttcaaaggggatctggcagtatatgacaaaaatagagtagaaacagcaagtcttacaaggaaaaaaatattgccaacagaagtttttgggccttttattcaagctcacagtacatgcctggaaagggagttggtgataagcatccattttgagggt

SEQ ID NO: 96908 - DNA, 497 bp, Homo sapiens
ctccagtgttctacattgttttttaatgaatacacatcaagaaaacattatatgtatctagctgattccataaagtaaattccatttatgtgtctaaatacttgctggcgcttatctaaaattaatctctaatagaatttagagcctttaaattatttttgttctcagaaacctrtaaagtactcatcaatcatgttcccagaaattgaccaaagaagagtgaagggaactaaggctgcaatttcgagaagtaacacacacaccaggcagaatcacaccattttttcttgcctgatgttaatttttggatagcatacatccaaccagggaaggtagaaaaattagttggctcttgatgcctataagatcctacatatttaaactcacttttatgccatgtaacaatggcattcttttgatatatggatagcctaaattttatgcccaagccaacctgactaagtgaaaaatgaacgaagatcaaaagacctgggttt

SEQ ID NO: 96909 - DNA, 497 bp, Homo sapiens
ctccagtgttctacattgttttttaatgaatacacatcaagaaaacattatatgtatctagctgattccataaagtaaattccatttatgtgtctaaatacttgctggcgcttatctaaaattaatctctaatagaatttagagcctttaaattatttttgttctcagaaacctgtaaagtactcatcaatcatgttcccagaaattgaccaaagaagagtgaagggaactmaggctgcaatttcgagaagtaacacacacaccaggcagaatcacaccattttttcttgcctgatgttaatttttggatagcatacatccaaccagggaaggtagaaaaattagttggctcttgatgcctataagatcctacatatttaaactcacttttatgccatgtaacaatggcattcttttgatatatggatagcctaaattttatgcccaagccaacctgactaagtgaaaaatgaacgaagatcaaaagacctgggttt

SEQ ID NO: 96910 - DNA, 497 bp, Homo sapiens
cttgggtgaagagaatgggaatgctaagctgtaaggcacatgtacaattagtcatactaccatgctctattacactgcagtactatactcaatatatgtgagaagtgctaaggcaaaagagaggaaagcaatattaattccacatgacatttgagccaggtttagaagggttactacaaaatcatccggaggcagggcaagaaccttctaaagagaaggaacgtaagtttgggatgaaagaagcccagtgagagggagtattattattaatatttagttcaatttgccarggtagcatatgacatcatgtactagatggcagtaaagaaatgctgctgtctacaatggagacacacccccaagttaaacctgagtaaacctggctccctctgtgaactgtcacccttgaataaacgaatactgcctgggtcctgtggcatcttttctgggcacaaaattttattttaaaggacattgggaagctaatcatgaagcag

SEQ ID NO: 96911 - DNA, 497 bp, Homo sapiens
cttgggtgaagagaatgggaatgctaagctgtaaggcacatgtacaattagtcatactaccatgctctattacactgcagtactatactcaatatatgtgagaagtgctaaggcaaaagagaggaaagcaatattaattccacatgacatttgagccaggtttagaagggttactacaaaatcatccggaggcagggcaagaaccttctaaagagaaggaacgtaagtttgggatgaaagaagcccagtgagagggagtattattattaatatttagttcaatttgccaaggtagcatatgacatcatgtactagatggcagtaaagaaatgctgctgtctacaatggagacacacccccaagttaaacctgagtaaacytggctccctctgtgaactgtcacccttgaataaacgaatactgcctgggtcctgtggcatcttttctgggcacaaaattttattttaaaggacattgggaagctaatcatgaagcag

SEQ ID NO: 96912 - DNA, 653 bp, Homo sapiens
ctggtcacagttatagcaggggggtcatccagtagccaatgtcagcagcaaacaatgccaatgccaatgctagagaaatgagaggtacaaaccattcatctagcatttgctggcatcagaaaaaatatcctcactagtcaagttctgcagcataattttagcttcaaagctatgcactttgttttatcctgcctgcccattttttaagccttttctctagtgttccaaatgactctgtgaactactcaatatcctttcaacaaacttcttttccacttgaatcatccagagttaatttctattgctggcaatactaactctgatggaaaaataaaataataaatgcactctaacacagaataacagaaataatgctccacctagttaacaaggattttacaaacaagtagaagttatttggtcttctttttaaaaatacgttcttaaaaataacatttttgasaccatgaattccacctgtgttttcaaactatttttcactattaacattatgttttaaaggagatacgttttcaaaagatccactggaaaaaattagacttctcctataataatttacacagtgagtggctgagattctaaaggaatatcataaaattatgataatattaaataaaagcaaatactctcat

SEQ ID NO: 96913 - DNA, 630 bp, Homo sapiens
taaagtattcaattaatgcagggaatgaattaagataaatgacctataaattcatggttgacagcagcacgaaggggtagagcataatatatccacatgacacggcttcaaataagctggggcatttttgaagaaggacacacctatcccaaatcctagccttgaagtgcaagaggaatgatagaaaacaaaaacaaaaaacaataaccctcactagaattggaagatttatccttaattaatgtccagttcagttaaggcaagacaatacgtagaattttcagagacaaaattgctgatataatagagttttctaatcaaagaagtttgcagagtagaargttatcagaaggtgggggatttatcaacttagagatatacaaaggatgtaggatctgccagggaagaataatgatgataatggttgatagagaggcattgacttctggtcgtactagaagtaattatggatgtcaagcatggtcaaagtcatcatggtagtctcgaagaaccctgggcattggttcactgggtagcctttctattcaaagcgcggtaccagggccagccgctttggtatcacctgaaagtttgtcagaaatacaaaattacaagctctaccccaggctt

SEQ ID NO: 96914 - DNA, 593 bp, Homo sapiens
tccaggaactccaaatcagatctctgagaactattctgaaagagacactgtcaaaaatggtaccctttcgctggtgccttacacyatgaccccggagcaattcgttgactatgcccgacaagcagaagaggcctatggtgcctcccactacccagctgccaacccctctgtaatcgtttgctgctcctcttccgaaaatgatagcggtgtgccctgcaatagtttatatcctgaacacaggtccaatcaccctcaagtggaatttcactcatacttgaaaggcccctcccaagaagggtttgtctctgcattgaatggtgacagtcacatttcagagcatcctgctgaaaattctttgagccttgcagaaaagagcatattgcatgaagagtgcatcaaatcacccgtggttgagacagtccctgtttagtagcttaaattattctaggaccaactcttctcttatttaaggcactgtatttaattggatttcctgggctcatcattgtttaaactgaagaccaagaaaacttggacggtggttaatcttccagactgtattttgttttttcctttctagccacatgactgtg

SEQ ID NO: 96915 - DNA, 506 bp, Homo sapiens
gactatgaagtcaatgtcagatcatcaagttccttgtatctcatgcttaggactttggctattatgcagtgaagtagtgcctggcttggcacttcaaaaggtgaatctgacagcaaggaagataatggattagggagaggcatgagatagaaagcaggtaaaccaattaagggtagctatgatcaatagaattcatgtctgtctttctgctcattgtatttgcagtacctggcattgaaccttcatataaaagaccctcaataaatatcaaatagatgaatgttcraggaaagtaccaacggttgtctgaactaagccaatggctatgggaatacagaggggttaacattcaaaagatctgtagaaggtggaatggaaattaaaggagaggaagaagtcaaggataatagatttgttgatttgttcctagtggcatacctgctgtggacctgaaatactgaaggaaaagtggtcggtgggcaggtgaagggaaggaaaaaaagatt

SEQ ID NO: 96916 - DNA, 583 bp, Homo sapiens
acaatttgagtttctcctagctgttaaatatgaggtaggaaattggtcaaatgcaagtatttggtttttaaaccctgctctttctactatatcactcttctttctgggcatttcaactcattctgggttatacagctccaaaagacctatgtccctaaataagggttaagaaataaagacagaaataagaatatgatttttagagtagttcttatttatgccttaggaatcttgctgcaagaaagtagaattattcaaatggatcctatgtcagttgccatgatccaaagagcagtgggtaaggagttttcaagaaggccccaggaaatctatgagataaaacagaaggcatcaggtcctataggctgagaaacaggcctggtgttgactgtgaagggagacctatttctctaagtcttcagcaactttcatgagccgaaaagactgtctaatgccaaaatattaaaaatggcaaaattctccttacatttttaytttttctcttacaaagtagtcacataagtcagcaataagttaacacaaagtgttgtaccaggtcactccactccttgataaaaattgc

SEQ ID NO: 96917 - DNA, 559 bp, Homo sapiens
cacagggctagaaatactctgatctctcaaggaggaacctatgctgtacatggagagaaatgtaataatagccctgttggtctgagcactgtccttatcatacccttaaacaaaccactgttcaygtaactacacgataatcagacgttgcctactatctctgccctataattacaagttaaagattggctagttagagaattgtgaagctaactgcaaaatttgcatgagtcagtgtctatgtttgtgcactgaaactacaattgggcaaatcgtatgtgtctgtaacccatctggaaatcaaattaataaccttgagtgagaaaatcacaaagcaaacttacttagtcaactctgtatctcaaaggaatgaataaggaacttaaaggggaaaaaataaaattttgtcctatgtttcctcagcctggaaaagctttgcatttcttaattaaagagattggtttccaagatgagtatgagtaaaatgaacttcctaatactagctatgaattacaaaggcatccaaagaacagatgcgtttgtaattgggtgacagggc

SEQ ID NO: 96918 - DNA, 559 bp, Homo sapiens
cacagggctagaaatactctgatctctcaaggaggaacctatgctgtacatggagagaaatgtaataatagccctgttggtctgagcactgtccttatcatacccttaaacaaaccactgttcatgtaactacacgataatcagacgttgcctactatctctgccctataattacaagttaaagattggctagttagagaattgtgaagctaactgcaaaatttgcatgagtcagtgtctatgtttgtgcactgaaactacaattgggcaaatcgtatgtgtctgtaacccatctggaaatcaaattaataaccttsagtgagaaaatcacaaagcaaacttacttagtcaactctgtatctcaaaggaatgaataaggaacttaaaggggaaaaaataaaattttgtcctatgtttcctcagcctggaaaagctttgcatttcttaattaaagagattggtttccaagatgagtatgagtaaaatgaacttcctaatactagctatgaattacaaaggcatccaaagaacagatgcgtttgtaattgggtgacagggc

SEQ ID NO: 96919 - DNA, 559 bp, Homo sapiens
cacagggctagaaatactctgatctctcaaggaggaacctatgctgtacatggagagaaatgtaataatagccctgttggtctgagcactgtccttatcatacccttaaacaaaccactgttcatgtaactacacgataatcagacgttgcctactatctctgccctataattacaagttaaagattggctagttagagaattgtgaagctaactgcaaaatttgcatgagtcagtgtctatgtttgtgcactgaaactacaattgggcaaatcgtatgtgtctgtaacccatctggaaatcaaattaataaccttgagtgagaaaatcacaaagcaaacttacttagtcaactctgtatctcaaaggaatgaataaggaacttaaaggggaaaaaataaaattttgtcctatgtttcctcagcctggaaaagctttgcatttcttaattaaakagattggtttccaagatgagtatgagtaaaatgaacttcctaatactagctatgaattacaaaggcatccaaagaacagatgcgtttgtaattgggtgacagggc

SEQ ID NO: 96920 - DNA, 544 bp, Homo sapiens
ttttctttttttaaacaaaggaaggggcagcaatacgcctcttctcccttctttcaggaatatattaactttccagactattgttttaatctagggtataaggatcttaataatctggccattccactgaccatgacagcagtccattaaatgttgattgccttggtgagcagaaagtaacaaatactctagatcagtattaggcaaagcgtaatctccatactggtggggatttaaaggttatttgtcaytaatctgcaatgaattaagtactgaaattcagattaagcatttagaaattttacagcaatttgacagcataactttatgtctgttaaaattttgtttatatatatatatatatatatatatataattttttttttttttgagacagagtctcgctctgtcgcccaggctggagtgcagtggtgcaatctcagctcactgcaagctctgcctcctgggttcacaccattctcctgcctcagcctcccgagcagttgggaccacaggcgcccaccaccacgcccggctaattttt

SEQ ID NO: 96921 - DNA, 544 bp, Homo sapiens
ttttctttttttaaacaaaggaaggggcagcaatacgcctcttctcccttctttcaggaatatattaactttccagactattgttttaatctagggtataaggatcttaataatctggccattccactgaccatgacagcagtccattaaatgttgattgccttggtgagcagaaagtaacaaatactctagatcagtattaggcaaagcgtaatctccatactggtggggatttaaaggttatttgtcattaatctgcaatgaattaagtactgaaattcagaytaagcatttagaaattttacagcaatttgacagcataactttatgtctgttaaaattttgtttatatatatatatatatatatatatataattttttttttttttgagacagagtctcgctctgtcgcccaggctggagtgcagtggtgcaatctcagctcactgcaagctctgcctcctgggttcacaccattctcctgcctcagcctcccgagcagttgggaccacaggcgcccaccaccacgcccggctaattttt

SEQ ID NO: 96922 - DNA, 618 bp, Homo sapiens
ctttagtcttttacagtttacaaactgctttcatctttttaaaaataatattcaggctttataaaaaccttctaatatttttcaggattattctatcagtaacataacctgagatgcaacaaagaggtgaggcatcgtggatgttaatccatatcttttaattcctcatccaaggctctttctatactggtttcatgaaaaaaatgttatcagcaaaaccctttcttcaaatgaaaactgaagcaacagcctaggatatttgaaacccaactctgggccccattgctacatttagtcaaaccaggcttcaacctcaccctctaacttatttgtcctgcatattcattattttaaaaaatataagacattccaaaatttagtaaatattataacttttccaagcatttcatgggaaaaggaaagtgagggtacagactgtatactatgactgagtaaaaatttcattagacaatttctccaagtgttttgatggccactcagccaatcagtggtcytttctcttacccatctaccattcccactcactctccattagcttcctccgtgaagatgcagcactatgcataccacctgctctaaaatttacactgcccacag

SEQ ID NO: 96923 - DNA, 618 bp, Homo sapiens
ctttagtcttttacagtttacaaactgctttcatctttttaaaaataatattcaggctttataaaaaccttctaatatttttcaggattattctatcagtaacataacctgagatgcaacaaagaggtgaggcatcgtggatgttaatccatatcttttaattcctcatccaaggctctttctatactggtttcatgaaaaaaatgttatcagcaaaaccctttcttcaaatgaaaactgaagcaacagcctaggatatttgaaacccaactctgggccccattgctacatttagtcaaaccaggcttcaacctcaccctctaacttatttgtcctgcatattcattattttaaaaaatataagacattccaaaatttagtaaatattataacttttccaagcatttcatgggaaaaggaaagtgagggtacagactgtatactatgactgagtaaaaatttcattagacaatttctccaagtgttttgatggccactcagccaatcagtggtcttttctcttacccrtctaccattcccactcactctccattagcttcctccgtgaagatgcagcactatgcataccacctgctctaaaatttacactgcccacag

SEQ ID NO: 96924 - DNA, 608 bp, Homo sapiens
tagggaaacatggttttaggcatgccctatttgggtcgtcatattttagcaaccctcaagtgtatttctaggagctcaatggagacaagtatacggggctgtttagggggttagyggctcagctctggtaggcactcacatcttctctaccgtgggagttgcagaaactcgaattcattgagctaatgcaggcaaaggtgtcttaagttcaaacactgtggcaatttgcatggtaatttacacagcaaccctttgtccccctgtcatcccaaagaagccctcccaaaagttgagggaaagcagctcaaatgtctagaccctgcttgacatatgtgatttccccctgcctcttgccagacagaaggggaggggacctggggtgtgggttttactgtggcggctggcgttctttgacattgttcagtggagaggctgtttagaggaagacggggaaagtcatcatttggctgcattttaagaaaacctaatattggaaactgtttgtgattagctaggagttaacctttcaaatagtactaaaaatgattactccgttggtataatgctcttcacttttcaaaatatatttccatttatcgtctccaatg

SEQ ID NO: 96925 - DNA, 608 bp, Homo sapiens
tagggaaacatggttttaggcatgccctatttgggtcgtcatattttagcaaccctcaagtgtatttctaggagctcaatggagacaagtatacggggctgtttagggggttagcggctcagctctggtaggcactcacatcytctctaccgtgggagttgcagaaactcgaattcattgagctaatgcaggcaaaggtgtcttaagttcaaacactgtggcaatttgcatggtaatttacacagcaaccctttgtccccctgtcatcccaaagaagccctcccaaaagttgagggaaagcagctcaaatgtctagaccctgcttgacatatgtgatttccccctgcctcttgccagacagaaggggaggggacctggggtgtgggttttactgtggcggctggcgttctttgacattgttcagtggagaggctgtttagaggaagacggggaaagtcatcatttggctgcattttaagaaaacctaatattggaaactgtttgtgattagctaggagttaacctttcaaatagtactaaaaatgattactccgttggtataatgctcttcacttttcaaaatatatttccatttatcgtctccaatg

SEQ ID NO: 96926 - DNA, 630 bp, Homo sapiens
tctcctcttgcaaactcctgcaagaaactcatttgcaggtgatgctgtggacctacagggatgggctcagaggaagtccatcatgccatgctcagccaagaacaaagccccagagagaggccatcaggcatccctcctggtctgacactggatttaccatccaagccttcctgggcctccccataccttgagcatctctagggctccaagatacctgtgacaacttcaatacaaggcaggggatggaggaagtggagacatgcccagcaggagctggagtagcaagtagaagtgytcctgataccccaaaataagacaagcctggcaggagtgatggttcccagcaaaagcagagcaccttactggggtcaccattccaccacagctcatcagtcttgtaaacaaagctgcctttgtcaacttctccaaaactttcataaatacctgcaagggactggagtcttatataacatgtaatggcaacaataagaaaacatggctgataactgaatgtgatgcctttgtacctccaggattatgtaggaaaactcctgggagaacaccagtttacatggagtacagttatcagacatcttcatgctgtgtcctatgaccccacaaaattaagca

SEQ ID NO: 96927 - DNA, 630 bp, Homo sapiens
tctcctcttgcaaactcctgcaagaaactcatttgcaggtgatgctgtggacctacagggatgggctcagaggaagtccatcatgccatgctcagccaagaacaaagccccagagagaggccatcaggcatccctcctggtctgacactggatttaccatccaagccttcctgggcctccccataccttgagcatctctagggctccaagatacctgtgacaacttcaatacaaggcaggggatggaggaagtggagacatgcccagcaggagctggagtagcaagtagaagtgttcctgataccccaaaataagacaagcctggcaggagtgatggttcccagcaaaagcagagcaccttactggggtcaccattccaccacagctcatcagtcttgtaaacaaagctgcctttgtcaacttctccaaaactttcataaatacctgcaagggactggagtcttatataacatgtaatggcaacaataagaaaacatggctgataactgaatgtgatgcctttgtacctccaggattatgtaggaaaactcctgggagaacaccagtttacatggagtacagttatcagacatcttcatgctgtgtcctrtgaccccacaaaattaagca

SEQ ID NO: 96928 - DNA, 442 bp, Homo sapiens
tactgtaactttttctggatttatcaaatagatttcttaaattgttcattccaactaacattgtatcagggctccaatttatctacatcctctcaaacacttgttatttcctgcttttgaaaattttttgcccttccagtgtgtgtgtgtgaagtgtggawgctccttttttatttgaaatgcatttcctgaatcactgattatgagtatctgtttcatgtgctttttgggcatttgggcattttgggcatttgggctctgtgggcattttatttagatgtttggcaatttaattgtgtttaagttgtaatgtagttatgttttggatactagaaggtgacaatttaaaattccttgcttcaactcgtgcacgcagaaatcatccaagttcccgagaaaccagggattatgctccaccacatagagactatgcataccgtga

SEQ ID NO: 96929 - DNA, 567 bp, Homo sapiens
tctatatttagtaaagtatactaagatcacttatcatrattgtagtaataccatgcactaaaaaaatacccacgtgaaagacttcctgtttcatgcgggaaaggttatactagagaagggaaataatttaagaatacatttcacaattttactatattttgcctttatagcaagaatttagaactcagtgatatttttaaaaaagtaatctttttcattaaaaagttctgtaatgctatatatataattttaatactgtttttcttccatcttttacaaaacacagatagtaattccatgtaaaaatcttacagaattattctgttatttaacagtttcagtaattcaaacatttcatgaacatacctattaaacatcaggtgctatgcttaagtaactggcctacaaggatgagtaagacaatctctgacctcaaggaactcatgttttgagcataatttaaacagtgcaagactatttttataccataatgtataaaacaagtttgttaatatttcagtattacaaattggtactgtcatatacaggactcagtaatacaaccca

SEQ ID NO: 96930 - DNA, 251 bp, Homo sapiens
gaattctctttcccattttctaatgaacsatggctcattattgaaggctaacctcaaatgtccccacctcattaaagctgcctgttctgacctctccagaagtcagatgtactctatcctgctgttccacaatactttttataaacctatattagcacttcatacacagcatggtaattctttcttgactttatattccaccaaacagtaatttcttttaagggcaggagccatgttagttactctatttt

SEQ ID NO: 96931 - DNA, 572 bp, Homo sapiens
aggggtgttccaagatggccaaataggatcagctctggtctgcagctcccaacgtgattgatgcagaagacaggtgatttctgcatttccaactgaggtacctggttcatctcattgggactggttggacagtgggtgcagcccatggagggtgagctgaagcagggcggtgtgtcacctcacccagaaagtgcaaggagttggggaatttccctttcgtagccaagggaagctgtgacagactacctggaaaaatgggacactccctgcccaaatactgtgcttttcccaaggtcttagcaaccagcagacaaggtgattctctcttatgcctggctcagtcagtcctgtgcccacagagccttgctcactgctagcacagcagtctgagactgatctgcgaggcggcagcctggctcggggaggggcgtctgccattrctgaggcttgaataggtaaacaaaccagctgagaagcttgaactggacagaacccaccgcagctcaacaaggcctactgcctctagactccacctctgtgggaagggcatagctgaacaaaaggcagcagac

SEQ ID NO: 96932 - DNA, 607 bp, Homo sapiens
ttcctcttttagatctggtacatatattgtgtgatttatacagaaatatttaattttggggggccacttcaaatggtattgtgtttttagatttaaaatccattttttcattgttggcatataggaacatatgacttttgtatattgacctttgtatcctgcaactttgctgtaatcacttcttagtcccagaagtttttgttgattctttcggatttcttacatagatgatcaygtcatctgtgaacaaagccttatttctttctttccaatctgtatacctcttctttttttttcttctcttctctcttctcccctcccctccccctcttctcttttcttctcttgttttcattatctagcacttccagtatgatattaaaaaggagcagtgagaagggacattcttgccctgttcctattgtgtgggaaaacttctcatttctcacccatatgctgctttttgtagtgaaacttaatgacagctaaacaaataaagccttctttccgcaaacctagctaagatttctactctttggtcaaattagccttccctctttataggtgatcctttaggtaaagggaaatctttgtggaaaaagatgga

SEQ ID NO: 96933 - DNA, 594 bp, Homo sapiens
tgctgctgtaaatgctgtaaaactttataatatctggaggtatgttgagggagctgatgaattagattgtgacatggagtcaaaacattggtgttttctgtgtctagggtaaaagtgaagtaccatgcccacaaagaaaaagaaatccttcctcatgtggtgtgcttttaagattagcaagcccgcatcaactcagaattaattgccccctcctggcctgattagcagagtttctccacttccagctaggataaaagagcttattttgatggaaacttcagttgaatttctagcattctagatttcaagctttccagaccaaaagagaataaccaataatggaaattctgatttatttagagaatcatcactctattgtctcatagcagagatgaagggagagattctgaggtgtactcaagagaagaataggcaagatgtgaataattgctcttacctagcrtgcctgaaatctttgactgccttccctttatattaagtttaaatctctctggccatctaaggtactttttttagcaatatttgggttcggttttcattaatcaaatgaggaaacttgactagaggtggaaa

SEQ ID NO: 96934 - DNA, 631 bp, Homo sapiens
aacctctgacctctagctacaacatgaaaacaaaaaatgcaaagtgcacaaaagctctttagagcaagcaaaatctgcatatagaaaaaacaaaaattgtcgtaaaatccatttatattggtatgtagaaatggaatctggttcacaatatatatcttctgccactgctgagcttmagaatccacccagagattttttcaattaaaattctgtgtaccaacaataaactctgctatagagcttttaattaaaaaagcaaacgaaatgatataaacccacattgtctctaggcgctgcttgtattaaaggattagactgatgagatgtttggattttattgttctaaacatgtgtttcagttggtgctctcggacctaccatgcgaagaagatgaaatgtaagtaaacagcgaaaaactccatgtttttatttcgcatttaaaaaattcaaagtataaaaaaggctcaagccattagaaaaagcccagttgagtttcaaatgatcattataatcagaagaaaagtaaatggtttgtaaatgcagatggctccatttttttttctgaaaacaggaaagataattttcattacgatcagctttgttaaataaataagaggcctagttgatttct

SEQ ID NO: 96935 - DNA, 611 bp, Homo sapiens
ttcatgttctaagtgtaaatattctgtgacttattttcagtaataaaaaaggaagtatttcattcacagattttcatggaaagacatgataatagtaatgactcattcattgagcatttcccaggagccatgctctgtgctaacacttgacatccttaatctcatttattcttccttaccactctatgaaggttmactatcattctgaccactctaccaatgagggaacaaaggcacttagagattaagcaacatagtaagtagatggcagaactgtgactcaaattcagtccttctggccactcccatagaagagaaaggaatgaggtaaaggaaagagaagaaacaggtagaaagaacatgtagaaagaggtgaagtctatttgagtgattcttaaaaacataggaaatctcaactctggctataaaaactaagcagtaagtgtattggttttacaaaattaaacagtaaactctgatatcttagagagcagttctgtaaaaactataggatttttgctggcatttttaattcagttctctcagcttcttaatttgtcaaaagataaaaatgcctgtcctccccagcatccaatcacttgatattatat

SEQ ID NO: 96936 - DNA, 634 bp, Homo sapiens
ctggtagtgggaacatggcaaagatatcccctgatcctatgatacattgaatcaattagtggcagctgaccctatagagcataggaaagccccttttaatgtatagctgtagtaccatcttgaagatgatgcctgtagatggagacactatacttcagaaagatgtacattcatcctaaaccaacagccattacatggtgccagggtgcccagtaggtagagtacatgagttcagtaaccaaaagacggaggaaatagtagccctacttcaccgccactccaagaattgactaggagatgttgtattgcctgtctactcaattttagagcctgtggatccagaggtcccagagaagatatgctttcactcagggacacaagagtctcatagaacttaaagatacagctgatacatgatcacttctagttcttcaagtggaccaacaagcaagaaaaggaattattatactgccaagattgtgtacactaggatatttgaatgtgtagtggsgtattttagcctgattacctaaggaaaagggctgctgttacttaataggggcatggagaaatacttttcatacctacgtgaactgcaggttatctcttggtaccctcatgcccaagtttaatt

SEQ ID NO: 96937 - DNA, 533 bp, Homo sapiens
ccaacctatttatccacatttcctcaaggtctgatgtaatacttggcacatagtaattatttgaatgatgaagataaattatgggccatttgttagttaggattctttgagttccaggtaatagaaaaccagcttgagtccgtctaaacatgaaaagatttattggaatgatcagggtggtttagaaagtcaacaccaccatcagaatagaaaaacagcacctaaaagcagaacctggggaaggctgtgcccagggctcttctgagaacttctcatgccgaaacctcgggcacccgcagggtcactcaacctccrctgctcttgtttgtgttgtgttcattctctcctcctgcaggtaaactggggatatgcagtgggcacaggtgagagagaggagtttggcggcactggtttcccaagacacaggacacaagacccctccaataaaacaggatgcagtagagaagctgagcaaaacctaccaaaaccaagaaggcaacagaagtggcctctggttacccttgctgctcatt

SEQ ID NO: 96938 - DNA, 577 bp, Homo sapiens
caaagatgccaagccaaattattaccacaagtaaaaaattaaacatacagttatatagcaaagagctatataactctgttatayagtagtgcaaaaaggcaaagttgaaaatgttaataattacccacaaatattactaatagcaagcactctaccaaagttactttggaaaaaggtaatagcaaagtttctttggaaaagaaacattggatgaagctccgtgaacacagtgggtcaatattttcagttatttggtcccagagcagcaagtattacaaaacatgtaagctacaatgtaagatataaacacaggatgcataggtgaatggatatttatttaggtagaagccactatttcttgagtacttactatgtgtcagccattgtatctggtgctatgcgtaatctactcattacaatagaactattttcctcatttttaaaatgtttaaatagtgaggtttattattgttccaaggtcaaatgtgggcagcaagcatttcaacccaggcttgtctgtctctaaatcatgtgctgttaaaaaattattacatcatgctctgtcttataatattaa

SEQ ID NO: 96939 - DNA, 636 bp, Homo sapiens
tgcctagtatcacaacctggaaggggctctggagtgacaggcagactcttattgataataacaatggtctgtggtctgagaaagtaatacacctttatcattttagatgctctcttagagaatctagatttatttattctcatagaatacatgcaacagggatttaaagtgatgtgtagggtatgtgtatgagtgtatgattgatatgtagttttttatgtattagcatggaaagttatttcaaatatatagattagaatgtcagcagtgataatttggggatacttttcttcatcattttcatatttgttatagagtattttccaaattttgtaatgtttgtcatagcatatgtattttttaatctttaaacaagaaaaatgaatattttatgaggaaaataaattctcgcctatatttttatttttactgtttttgttattttctagttttcttttctcttattttgatggcttactttctttggcttttgggcatccagtcaccaagatccaacargttacctgcctaagaaagatgattacatgcccttcttgttgcccactccctcagctgagaaacttctagactgtagggactggaaattgtagatgtcatactagggagaactaagtc

SEQ ID NO: 96940 - DNA, 556 bp, Homo sapiens
cagaaaagagaagttttctgagtcctagaaataggaccctgtctcgcattttccagccaagcacctgacccatctctttgtgttactctctgctcttgccccacrtagttggcaggaagactccgtcaaagggtcagtctgtggtagaatctataaaccatagcctgacggatctgagtgactgggctttacactggaattttctgtggcagcccctttgcccctatcaccacagccttcctgcctggcagctgcagacagaatattctattcgcaatagtcaaagcccaataagactccgttctctgaggctctgggcctgccctgtccgattgctttagggccaaccaggaagggtttacttggctggctagggaggaacttttacaattaaaaaaaaaaaaaagttgtcagtgacaaagcctttagaattctggaggattcctaagggtagctaattggaaaaaccatttgccccctttaatgactcccccgcccttcccggcccccagccttatccgagagcagccaccctatctgtaaatggcgaccatgg

SEQ ID NO: 96941 - DNA, 556 bp, Homo sapiens
cagaaaagagaagttttctgagtcctagaaataggaccctgtctcgcattttccagccaagcacctgacccatctctttgtgttactctctgctcttgccccacgtagttggcaggaagactccgtcaaagggtcagtctgtggtagaatctataaaccatagcctgacggatctgagtgactgggctttacactggaattttctgtggcagcccctttgcccctatcaccacagccttcctgcctggcagctgcagacagaatattctattygcaatagtcaaagcccaataagactccgttctctgaggctctgggcctgccctgtccgattgctttagggccaaccaggaagggtttacttggctggctagggaggaacttttacaattaaaaaaaaaaaaaagttgtcagtgacaaagcctttagaattctggaggattcctaagggtagctaattggaaaaaccatttgccccctttaatgactcccccgcccttcccggcccccagccttatccgagagcagccaccctatctgtaaatggcgaccatgg

SEQ ID NO: 96942 - DNA, 556 bp, Homo sapiens
ttttctcctaattttcttaggctctatgtgcatccagattctccttttaccggtgagcaactactcaaacagatggtgtcttttgaaaaggtgaaactcaccaacaatgaactggatcaacatggccatgtaagtaccatgccttggactgtgcaggttccctgaggtagaatggacaggtcgcacaaaactgtctctctctgagtcccttcctgccttccctatccccttcccaccttctatctctgagtcattttatgggaacatttatgtgttcttcaggggaccttgactgattttgtaataggtcatttacgggaatgctgtgtgccatttctatgcaagaaggtcagggatcttctgttccatggaattcctaaggcttctgaaattgctgtaccacccgagccaactaaactaagggaatatacatttttggaggctgctacagcctgttgttgggttaagcatctaatttctgtcagcagcatagcagataataaaacttagagagaatagggctaggacytctgatgggggtttcccaaagtgtagt

SEQ ID NO: 96943 - DNA, 595 bp, Homo sapiens
ccagctgctgatcgcttaagagattcaacatcacacattaaagtatttttgtctgagtcacgtatctgttatatataacaattatgttacaaatattgctctcttgaggatcrgtttaaataaactttgggtaaaccccaatattttaaccatattaaaacagaaagcacagtcttctgacattgaacaagtgagactcataagggacaagataaaacttttgtcttttctcctaacggctgttcaaaccagttctatggggttaagaggacatttaggttcctttacttttccaataactctcaggaaacagaagtttacttattataaccaaaaattgacttctaaagaaattctatttctaatctatttctaaactcttttataggccaggcatgggtgaccagctaaggtcacacagacagatcttggtctcttcctccagagccacacttaagagtggggttagagtagggagaagccactctggcaccttgttttggaggatggaaatacagccccaaaggctccattttagcatccaactctgtctaaatagaatctagagaatctacaaagggctgagagaaaataa

SEQ ID NO: 96944 - DNA, 565 bp, Homo sapiens
aatccaataatagtttccatttgacttaactctagtggctataatcaaggcattatttaccatttaagataatattcaatgtagagaacatatatataaattaaaatatcattacatatttatcaattatcccttgtattgatgcacatacaaacagatgtaccattgttctccattctaatataggaaaagtgagtctcaaaaaaaatacctttgaaaagtttaagcaaatagttgatgaagtatttattgttacttctttttatcaagttgagggaaatgagttagtagttttacatggtaaatgccaaaacttctagaaacccttctcacacactagcaacaagaggcaactcaaaataaactgtctaaacagtatattacttaattaggtagcagaytgatcaatgttctcagtggaattctttcccataacttatcagacaagtgggagttacccaataggtatgattttagtacattctgcatcagctgaatctaccttaatgaacttggtctgaattccctatctccttcaagggggggcaaattcctgccacagatg

SEQ ID NO: 96945 - DNA, 548 bp, Homo sapiens
ggaaattcttcccagtgagcagaactttgagcagtgcacctggtcgcgcactttgcgtggaaggagaaatggcaagatgtgtgattatatactgtagccactggtttcgctggatggtcagggacttggaagaagcatgatagcaaaattggtcacaaagaaatttagggaagaggtatgtggatggacctctctgagtggtcaaaaactgaagatatttgtatcgcatgtgagtgctcaccaatgagtgacctcagcagagaaggattttaataatcaagtggataggatcacctgttctctggacaccactcagcctctttccccagccacctctgtcattgcccaatgggcccatgaacaaagtggccctggtagcagggatggaggttacgcatgggctcagcaacatggacttccactcaccaaggctgacctggcgacaaccactgcygagtgcccagtttgccagcagcagagaccaactctgagccctcgatatggcaccattccttgtgggtgatcagccagctacgtggtggcagatt

SEQ ID NO: 96946 - DNA, 548 bp, Homo sapiens
ggaaattcttcccagtgagcagaactttgagcagtgcacctggtcgcgcactttgcgtggaaggagaaatggcaagatgtgtgattatatactgtagccactggtttcgctggatggtcagggacttggaagaagcatgatagcaaaattggtcacaaagaaatttagggaagaggtatgtggatggacctctctgagtggtcaaaaactgaagatatttgtatcgcatgtgagtgctcaccaatgagtgacctcagcagagaaggattttaataatcaagtggataggatcacctgttctctggacaccactcagcctctttccccagccacctctgtcattgcccaatgggcccatgaacaaagtggccctggtagcagggatggaggttacgcatgggctcagcaacatggacttccactcaccaaggctgacctggcgacaaccactgccgagtgcccagtttgccagcagcagagaccaactctgagccctcgatatggcaccattccttgygggtgatcagccagctacgtggtggcagatt

SEQ ID NO: 96947 - DNA, 584 bp, Homo sapiens
gtttgataaaaattaacagtcctttcttttagcatctgccgttaactttgcaccatgataaatgttggaaaggcaacagaagggagaatgaagtttcatatttgtctttatgtagtttataatttaggcgatgagagaaaggaactgatatatattgggtaatatgcagtagactgaagttgtctatattctcattcctaaaacctgtaaatatgttatgttgcatggtaaaagagactttgcagatgtgattaaactaagggtcttcatttgggaagtttatcctggaatattgagagctcaaataagatcatagggtccttatcaatgaaagagggagacaggaaattcagaggagatatgactatggaagcaaggtttgcagtaatgtgggactgtgagccaagtamtgtgggcagccttaggatgatggaaaaggaagggtaatggattcttccctagagcttccagaataagcacaggcctgcctgcccatttaaacttcttacctcctaagatagtacgtttgtgttattttgagctactacatgtgaggttaagcactcttaattgttatagcacca

SEQ ID NO: 96948 - DNA, 603 bp, Homo sapiens
tcctgattgctgcttaagagaacctaagtaagaaccaccaggatgagccaatcaacctccagaacgatgagggataaaaataaaatgattgtcattgttttaagccaagaagtttggaggtggtttgttatgcagcgatggataaccagaacgcaaatttttcaaacactggaggaagtggtgcagtcacataatgaggcagaactaagatgggagagctttgtggcagccaaaggaagaaattcaagaaaaataaagtattcatcattataaaaggcttcagagaggaaaaaagagaatgagaactagagaaaggtcaccgaaaattaaatgcattttccatttcttgtctggaatgtaaaactgatttgtcttctaaacataaaaacagtatcaaatatagaaaagcaccagcatatgttccctctaccaggctccttcttgtcccactcttcaaattctttttctccaacctcatccaaaaacctgaataaaaaggaaagcagctctcattatttatcaactatgagcaaggcaagcaaaatgtaggtgatttacatacattattccctttartaataacaatcagtccattaagcaagc

SEQ ID NO: 96949 - DNA, 597 bp, Homo sapiens
tcaatagctccattcttagagtttatgtttatttgacctaatttaaagctcactctgtgcaaacagtcctattcctaggtcatttgtcaaaagcaatcagggcaattatttaatatcacagcagtttcaagtattaatatctgtagagacttacaagaggctccacagaagacttaaagggaaaaactgaggaatgagatggccatagggggtttataagcttgtgagaatctgtaaggccacatacatgtgcagattgtgcttatgcccaggaaaaaccgaagaaggctctaatcttttccctctggttaacctccaggctctgttcaaacagggagtataagctaaggctgagcggtaaactgcctaactcagcattgaaggtatgcctcaacaaacacacagaaaccctacamagattaggaggctaatttgttcaaagaatttaagaaagtctcagtccaataattatctggccactaagataactgagcaaagactacattacagtgccagactattcacacagtggcaaaactatatacgacaaataatacagaaccttacaaaattagtccaggaaagtcactaaacaaa

SEQ ID NO: 96950 - DNA, 596 bp, Homo sapiens
gttaatattacataatataaatgtattttaaatatcagaaatgtgatctatacagtgtaatatcacatttctaaattacatttctagttagatgtagaaaatactaatttttattatatactgacaaattatagttgcatatatttatggaatataaagtaatgttaagattttttaatacaatgattaaatcaagctaattaacctgtccattacctagaatatttaacatttttgtaataagaacatttgaaatttattctcttaacgttactgaaatgtacagtactcaaatattagctatattcaccattctgtggaattaatctcaaaaaaagtcaaactcattcctcctatctgagcctttgtaccytttgactgacatatttcaagtgtatttgacatccactgaagaacttatgagttaatcacacagaacattctaggatccattagaaaatctaaataaatatatggcctttggtctctttcagaaaatgtaaataaatatatggccttccattttcactttccagtgtgtaaaaaaattgtaagtcatttccttcttcatatagtaataatgagcaactcagtta

SEQ ID NO: 96951 - DNA, 570 bp, Homo sapiens
cagaggaagaggcaaggcagcagtgtaggttcagtatcactaatccgggggtgaggcaaacctagattcaaaagtgagaaggaatcaaaactaaggggtcaaccgcttctaggtattcaccctagaaaaactttttaaatacctgtatgtgaatatttataacagttctatttataatcrccccaaactaggaacaatccagatgtcttttaatcagtgaatgaagaaaccaagtgtggtatatccatacaatggaatactactcaggggtaaaaaagaagaaattatgaatacatacagtaacagggatgaatctcaaaggcattatgttgagtggtggaagccattcttaaaaagaaagttagataaatatgagtccatttagatgacattctcaacagatcagcaattgccagagattggggctgaagagaaggtataactataaagaaatagcatgaaagaattctttggagttatggaaatgttctgtattttattactgttgatgattacatcaatctatacatgtgttaaatttatagaaacagtacaccaaaaattaatgtc

SEQ ID NO: 96952 - DNA, 545 bp, Homo sapiens
taataaatttctaaaaattttccaaactccatagagttgaatgtcatgcctgctctactccttggctaggaaaattataaaactggtttcttttttaaaaaattaagtttaaaatgtagttattcttcataattaaatcattcaagcatgccctaaaaatttgcaatacttgaggaagcgaaaggtttgggaaaattacagaaaaacaccattacctgaaaaaggtaacttcttatgtaaaattttaaacctgcttccatcttgttaggctaatatcttcaaatcatccacacgcgtctggaaaataagacatttacaatattttaaaatgggttaagaatttttacttgtttttcagttgtttttttttttttttttttttgccacccaactcttttgtaaagttgaaagtaacaytagaacaagagtaaaaagaaaaacaaaaactgaaataaaactatttctagaaaaacatcgggaaccattatgtttacttcatttccagaactacgcataataaataggttctgcaaataagtaatttc

SEQ ID NO: 96953 - DNA, 520 bp, Homo sapiens
gataagtatgtgaggtgatggatatgttagtctgatttaatcattctacaatgcatacatgtatcataacattacattgtgcctcacaaatatatacaattatttgtcaaataaaaataaaataacattaagaaaaaaaaaagaagttataaaatgtatggatggctgttgggactttaacacttcttctgtagggaatattcactaaaacttagaggtagaagcctttacctgtggctraaactaaaatctttgaggagaaatagatttgtcaagggaagatgggctttttgggtgaggaactcagtagagacttactaaatatttatcgtgtgtaaatcactattcaggatacaacagtgaagatgtgcaatggatgtaatcatattcctgttcacgatctcattacaggtcctgttctcctgagctctcacctctgatacaagcctgatagaagagtaaatgagacctaataacagtattacagaatttgtcctcctgggcttttcacaggatcctg

SEQ ID NO: 96954 - DNA, 595 bp, Homo sapiens
gctctctaaatcaatacagataacaacccttcttgtgataggagagccagatttaatccaatattgtgactcatgggacaaaacaaacaaagaaaagccttctttaaaaacataattgatccattttatcaactcaccttgaatattttcataatattgaaaaatgaaattatgttagcctatcaatattcttatatttcacaaaagtttgaattcagtgttctatcatttgaaccaaaaacatgytaacagaaacagtgcatttttaaatgtatttatggaatggttttaacttatatgtacttttatttatttatctttatatttcaaacagcaccatagtattttagtcgttatacaattgtaatctgtcttattcagaatgattcactagtctttcaaaattttaattacaaatcttatatctttgggcttccagttcaacttttaggattaaaggaatatccagaatagtttccttttatgtggaaagaaatacaacatatgtttgccattttgcccaaatatatatacttagtataatgccataatttggtgaaatgaaacttagatgtgaacataatcaaaataaatt

SEQ ID NO: 96955 - DNA, 595 bp, Homo sapiens
gctctctaaatcaatacagataacaacccttcttgtgataggagagccagatttaatccaatattgtgactcatgggacaaaacaaacaaagaaaagccttctttaaaaacataattgatccattttatcaactcaccttgaatattttcataatattgaaaaatgaaattatgttagcctatcaatattcttatatttcacaaaagtttgaattcagtgttctatcatttgaaccaaaaacatgctaacagaaacagtgcatttttaaatgtatttatggaatggttttaacttatatgtacttttatttakttatctttatatttcaaacagcaccatagtattttagtcgttatacaattgtaatctgtcttattcagaatgattcactagtctttcaaaattttaattacaaatcttatatctttgggcttccagttcaacttttaggattaaaggaatatccagaatagtttccttttatgtggaaagaaatacaacatatgtttgccattttgcccaaatatatatacttagtataatgccataatttggtgaaatgaaacttagatgtgaacataatcaaaataaatt

SEQ ID NO: 96956 - DNA, 594 bp, Homo sapiens
tgtacctagaaaagccacagtcatccaggagcaacacccaacctaagagcaactttgggggctgaaccttcaaagccacatgggtggagctacccattgccttggaagcctacacattgcacgaatatgccctggttgtgaggcatggagtcaaaagaaattattttggagctttaagatttaatgactgccttgttagattgcagacttacatggggcctgtaacccctttcttttggctgatttctccactttggaatgaaagtatttacccaattcctgtaacttctttgtatcctgtaagttactagcttgcttttgattttacagacttaggtggaagggactagccttgtctcagagaagcctgggctgtggacttttcagttaatgctggaatgggttagcactttggggaactgattgtattttgaaatgtgagaaaatgtgagagaaaggtgagaagagcatgaggttttggaggggycagtgccagaatgatattcttttgatctgtgtccccacttaaatctcatgttgaaatgtaatatcaaaggttggaggtagggtctggtgggaggtaactggaatatg

SEQ ID NO: 96957 - DNA, 561 bp, Homo sapiens
ctttcaatcttggtaggggttgcttgactattatattattttttgcagttttatatgtttagaatatttcttcattcttattttttttaataaatgatagatgaggaggtagaggaaatgagtctagaggatttgatcagataatttgtctcctggttgatctcatcaagacctctaactttaagcagcgccaatatgtgcactctctctcccctgagaggtaggctgatatgtacatacatctactccacatctccatctggatatccaagggaccttccaaacttaacttagcctaacaagcttttggttccccacttttacgcccaacaaaatttgctcctctttgtttccttacctctgtaaccaatctcactctccacccaatttccctggcyccaactttagtttgcattcataattcatctctctctctctttctctcttatctctgccaccagcaagtcattttgatgttagctcaaaatataaatcttatggccaggtgcactggctcatgcctgtaatcccagcacttcaagaggccaaggtgggaggatt

SEQ ID NO: 96958 - DNA, 604 bp, Homo sapiens
aagtgatctaaccctttgccaggttgacatacacgcaaccaggtatctagtcaaggatcagcgtttaccctggaaggatatgggatgcaatctgtctagccttgaccttcaaagaacagsatggttttgcaaaatttgctttttttcattttttcaccttgagcggaaattatcatggcatttctcgtgactatattattcattataaggatttaatacaagtattgggctgataataatattctttgattcttttcagtaatctattatagcatggctctgagatacaataaaaggctgatattgattggacctctacaataaaaaaaaaaagcaagcctagatggaaaattaagataaagctcgaggtgaattctgatgacagcaaaacagaattatctctggatggacacacttctggatcattttcccaatttagctttaaattgtatagtcatttctttttatattctggaattaccatagccattttttttcttttttttttttaactgtagttttaaggatttgttcgtgaaggaattgttggaaagcaattctctgggctaagcacaaagtatcccactagtaagaaaaccactgg

SEQ ID NO: 96959 - DNA, 434 bp, Homo sapiens
tgcctttactccttaagtgtccaatttttcttatatttgcatctcagagtcagggatttatgaccccagaagtcatagatttagtacttatgtcaccctttcctcaacttccaaagcagagtgattggttccatgcatcaaaggacaggactctgcctacttcgttaggcccccgaggctgttgaaatcaccagccagacatttttagggctgyaacacagagatcttgcccacatcctcagcttctcataggcttatccacgacttctgacattatggaaaatgcaaatagactcctcatgagcatgaaactccagtgaaagaataaagtataaaacaaaatatttctctgtaacctccacattgccacacacaaggtttcctctagagcagcagttcccaacctttttggcaccagggactggttttgtgga

SEQ ID NO: 96960 - DNA, 623 bp, Homo sapiens
gggaattgaaggtccacttctacctgctcacagtgcggaaggcaaaaccaagattagagaaggaagaacagtggggtttaggagaaagagcactgtgagagttgtgtagccttggttcaaattctactccccctatttgggattttggacaaatgacaacctatgtgaacttgtttcttatctaaaatgtggtggagatcctcaacatttactcataaggccactgtgaggctcctatgaagggctttataaactgcaaaggaccctacaggtggagaggtggtggttatagctgttgcagctccaaagtgaggccagtacttctgaacttgggagtcaggggtctggcctagcataaccaaccactacccaagcctagcaacaagacagatggcagaaggaatggatatgagctactccctctttgctggcccaggatatctccagggtgggtgaagcactggggtcttccacccgtgctgtgagttcctggtgctytctccctcctgggtcttgcctgcagtctgctcacacaagtgtagcttcaggtgggaatgcctagtgcctgcagttgtcagttctaggcatgaggagcttgtgtctgggtttccccaaaggacaac

SEQ ID NO: 96961 - DNA, 552 bp, Homo sapiens
cactgctctagaaaagaaatragaacactggtaaaaatgatcaaactcaaaattttcaggactctgaaaatttaaaattgcaacattccaaggaatatttattcaataaaatcaactgaatcatgttaaaaatggtaaactttgtggtgtttgaagttgctgtagtaccatctcctttttcctagatctgcagtagatgtgaaaatcaacaccttcactattatagtagctatgataactgtaaattagcagctactagaggaggtggaatgggtttacaactcctgaaaagtcccattttcagaaatttgacactttttaacctgtctggtagcttattaaaaaaatcctctattcccaggatttgtctttatttaacctggcttagagcttactctgtgtatttgtcaaaaataattagtggcaatagtataacactgcccaaagttgcatttccagttgggattagaagaggtagaccacaaaatttaaaaggaaagattttggaatgagatgtcctcattcattgggttttgaaaagcttcaacatat

SEQ ID NO: 96962 - DNA, 563 bp, Homo sapiens
tatatctattaggcatttcagcaaatcatctaaatttgctgaatctaatggtggttggagtgaagcacctgtgactgaagatgagtcacttagattgttgaagagtaattatttatttggtccttgtgtraaagaggacagaagcgacaggaagaggagagagcccttactctctctcctttttctgttctttcttgtcacctctcctttgtccctcccttcctcaatctgtttcctctctcttcccataaacccaaatactatctaataaactcaacatgttaaagagtacaagtgtcagtttattttgtaattttgtaaaaaagggggcacaatatacactctttggctcaggagtgtagtgttcttagttatgcactttttcagcaaggtgtattttttttctcttaaatttagagtactgaacagtcttctgctactaaacccaaatgtacacatggtcatgcttgttacatatttactttacaaaaatattgaaaagtaccttagggagcgaactcacgcttataacttctaactgtaaaagtagacataacatgtac

SEQ ID NO: 96963 - DNA, 714 bp, Homo sapiens
ggtatgcatttcccaatttcccacaaagagtttttaaaagaaaagcaactgaatatattctcaaagctcctatgtagaaaccagtctattgatcacagtttatttatctrcttgatttcaattcaacatttattgagtacttctgtgctgagcaatatggatagaatccacatgcttaatgagcctaataatgaatgttctactcaacttggccaaaatagtcacattggctgatatagaaacacctatacaagtatttttaaattattttagggttaagatttccattttgaaatccttcttctatagattatgatgtttgtttagcctctaactaagaattaatgacaaagagttcacaactgatccaacacatgtccaaactgagagtctttaatcagggaaagacctttattgtattaaatttaaaatttctctctataaattccacatattggttctgctgttacctagggaagaatctatttcctcttcaaatatgttatctgttcttcaagacaaacagccccaattccttccacattcctaataaaacattatttccaaaatctttccacgatctggaatgcctgtaaattatttgtggtccttttcctacatcctggtgaatctctactcatccttcatggttcaacgcaaatgtcacctttcttgacacttacccactatataatctgtccagaattaattgct

SEQ ID NO: 96964 - DNA, 605 bp, Homo sapiens
cactaactgaaacagctatgaagggttctttgttcagctgaagctttttctgtttaaccaaggtgctttctttcaaacctagagtcatctgtactttatctagtcgataagttagtcttttctactccatggaaaagatactcctcagttcccagttttgcaaaaagtgataagagtatctggagtatggaaaaggctaaatgacatcattctcactgggattactggtaaagaaagaagatgtaggttatgaccatataaaattaacagatctagccaaaacttaaattgtaattcartcttgtgagttagtcctctataaatgagctcctccaaaataaatcagtgcatttcctggttttgagcaacaaaacttaccacttcttcctctagtttattccattaaaaagtttggtcttaactaccaactactggaatgggaaaagtcactcaccatcactgggctttaatttcttcactgtaaagtaaggaatttggagttattgttagatcaactccaaagatttataaagttgaaatttttgtttgtttgtttgtttgtttttgaggtgcagtctcactctgtcacccaggctggagtgcag

SEQ ID NO: 96965 - DNA, 573 bp, Homo sapiens
cttggttacacatctcacatctaatctctctagcctaatatctgtttttttyctcatgtttttaaaagtaatttatggtgttacaagtgtgagggttttgaggacttgggagtgaggggcagactagatttacctttcctcaggagactggaaactcaccatgtgcttgatgagattgtgaaaatttttttcccatatggcaaattccaaaagacatgtggtaatgagccatgactgaacacagacaacacagtctataattaacctcatatagacagcatgcagtaggaacttatatacctttggctccaatatctcaccatcccctaattgtttagttctataagtgtatcagtttaaaaggaagaagcctcctacatgtagacaaggttttatctttccaggaaagtaactgggacaatgatcttcattatcattctctctgggttagatatataaaaaaggagggtcacagatacgttttcatgaaagtatacatgttacccacatacaactttggaattgtcaagcaaaaattgtagcattagtctgcataatgagaatcttttttga

SEQ ID NO: 96966 - DNA, 573 bp, Homo sapiens
cttggttacacatctcacatctaatctctctagcctaatatctgtttttttcctcatgtttttaaargtaatttatggtgttacaagtgtgagggttttgaggacttgggagtgaggggcagactagatttacctttcctcaggagactggaaactcaccatgtgcttgatgagattgtgaaaatttttttcccatatggcaaattccaaaagacatgtggtaatgagccatgactgaacacagacaacacagtctataattaacctcatatagacagcatgcagtaggaacttatatacctttggctccaatatctcaccatcccctaattgtttagttctataagtgtatcagtttaaaaggaagaagcctcctacatgtagacaaggttttatctttccaggaaagtaactgggacaatgatcttcattatcattctctctgggttagatatataaaaaaggagggtcacagatacgttttcatgaaagtatacatgttacccacatacaactttggaattgtcaagcaaaaattgtagcattagtctgcataatgagaatcttttttga

SEQ ID NO: 96967 - DNA, 633 bp, Homo sapiens
tgacatagaataatttatctgagcaagcaaattagggctattgtttcccgatctcaaatctgcaaggcttttgagaggtgccttcacacttagacggtagtgaatagaaacttatatagccattgagaaaagtgacaaaatgcccaacccagagaagttgttgggaggtatatatatatatatacacatatatgtacacacacacacacatgcatatatatgtatgtgtgtgtgtgcatgtgtgtgtgtrtgtgtgtgtgtgtgtgtatatatatataaatattattgctggtggagccaatggcagacatagttgctcctctaaagaggtctcttgaacaatggacgaagcttaggtgaaagtaaacaccaccctgaggaacccatgcacatcacccacatggagcccctaatattagcaaaattctcaacatcagatgaaaccacatgactagaatgaggatggaaatacctcccaactaccatcaaaaggaaagtcacgtaaaaagataatgccttctcttttccttatccttgtcccacaccagaggacctaaaaccttctctccaaccccgtctactttatgcagccagggcttctggtttagtccgtgcaggatgggatatgagttt

SEQ ID NO: 96968 - DNA, 558 bp, Homo sapiens
tatgtctatcttgcaagttggactttmcagaccaccctttaaagagaaataaacaaacactattgggatttaatttggagatttagcttaattgatcacacatgtaggaaaactactaattggagacattaataacttgctggttcactagtggttgtcaggctattactaagccgattgagcttttttggttcgttacttaataccaactactgaacctgtggttttaataaagttcaatttatttttaaaagacaatccaatccatctccatgtgtgcttctcttaaagattaatttaggtgactcataatacatttttttgaagatgagaggaatgaaaaaacaagccccaattgaatttctgttttggagctgggtgaaaatggagcaaattgtgacttccttgacattactgcagctttttttctgccataatattccaaccaaaacattggtaggggaaaaaacacatgtacaacaatttttcaagaaataagctcattctgtttgtgctcctctgtagaatgtgtatgccagctatgaacatcatatcaat

SEQ ID NO: 96969 - DNA, 559 bp, Homo sapiens
tttgttgttcacctagtagctattctgcctaattttattactggaagatacctgatttttgtttggatttccactcctgtctcatgtgattcaggggtaaatcytaatttctctgtcattcctagcaataccatttgccttactagtgagagatttagaagatgtgtttccaattctgaacaatgaaatttgaagggaggtccactggagacttctgggaaatgtttccttgctcttcaagggaaaaaaaagtggcagagttaagcttttcttctgcaagttcattgttttcaaaatgtgttgtctgaaactgtcatgaccattcagagaccatgaagtaggcaccaagccgaggatggcaaaaccagaaagatggaaagatgctgccttcttggatagtagtgttgtgctgatgaattaataaaacaggaagccatctatgtcttgttatgtcacttttcaatatgttagataataaatccctttatttgttaagctaattaaatgaaagttttcggttacctgcatctgaaatatgctaatggatgtaccatggtgt

SEQ ID NO: 96970 - DNA, 559 bp, Homo sapiens
tttgttgttcacctagtagctattctgcctaattttattactggaagatacctgatttttgtttggatttccactcctgtctcatgtgattcaggggtaaatcttaatttctctgtcattcctagcaataccatttgccttactastgagagatttagaagatgtgtttccaattctgaacaatgaaatttgaagggaggtccactggagacttctgggaaatgtttccttgctcttcaagggaaaaaaaagtggcagagttaagcttttcttctgcaagttcattgttttcaaaatgtgttgtctgaaactgtcatgaccattcagagaccatgaagtaggcaccaagccgaggatggcaaaaccagaaagatggaaagatgctgccttcttggatagtagtgttgtgctgatgaattaataaaacaggaagccatctatgtcttgttatgtcacttttcaatatgttagataataaatccctttatttgttaagctaattaaatgaaagttttcggttacctgcatctgaaatatgctaatggatgtaccatggtgt

SEQ ID NO: 96971 - DNA, 559 bp, Homo sapiens
tttgttgttcacctagtagctattctgcctaattttattactggaagatacctgatttttgtttggatttccactcctgtctcatgtgattcaggggtaaatcttaatttctctgtcattcctagcaataccatttgccttactagtgagagatttagaagatgtgtttccaattctgaayaatgaaatttgaagggaggtccactggagacttctgggaaatgtttccttgctcttcaagggaaaaaaaagtggcagagttaagcttttcttctgcaagttcattgttttcaaaatgtgttgtctgaaactgtcatgaccattcagagaccatgaagtaggcaccaagccgaggatggcaaaaccagaaagatggaaagatgctgccttcttggatagtagtgttgtgctgatgaattaataaaacaggaagccatctatgtcttgttatgtcacttttcaatatgttagataataaatccctttatttgttaagctaattaaatgaaagttttcggttacctgcatctgaaatatgctaatggatgtaccatggtgt

SEQ ID NO: 96972 - DNA, 458 bp, Homo sapiens
atcaatcaaatttgcttcagtctcaaatagcatgtttatgtaaaattaaatgagcaatggcagtgagctgcatttttttttttwaaaaaaacaggggcagctgaggtccaggcagagggtgagggaaatgttgagaaagggggaggacgatgtggaaggagagtgacactgcatgagtaatgcacatatacctttattaccagcaaccactcattcgcctggaaataaaaccttaatgcttttggtctgtataaaactttgtactttatagcaaggtccttattgctgaccccatttatttccagttaaaagactccttggcccagcagccataattccattgtctttggctgatgctgcctgctgcatcattgtcatactaacagccctttatccacatgcccagggtagagtgagtggcaatcaagacactggtttggctgcttatttcagttcta

SEQ ID NO: 96973 - DNA, 456 bp, Homo sapiens
tggcttcccagcaatattgtaataattataataaatgtaataagagattttgaaataaccttaaaaatgaggcctgtaaattttaatggtctgtttcttttagtccttagttccagattacaaaatatatgaaaatttctccattatttatttaggattaacttttattggctcattatagccatgattgtatatatttaaaaaatctgttaaggaatactgagatgttttagaaattttcatatttaattaaatgttggtttttttactcaaattacactgctgaatcttaacattttttataaattaatacaggtatattttytttcatgaattagttgatgctatgtaagtccccatacaggtttcataaatattcatcagtggctctgctatattttaatctgcattgtcttcctttgaggtaactattgtttttgtctgagtctttaatca

SEQ ID NO: 96974 - DNA, 652 bp, Homo sapiens
tgtgagtctatgcactgtgtcatccacagagaaatgctggctggccaaaaaaaaatgtcatctcaacttaacaatgttttkcagggtgtgattaaaattatcaaccacattaaagtacatgcccttaaatcatgtctgttcatgcagctctgtgaggagatggatacagagcactcatgtcttctcttgtacacagaagtgaggtggctttctaaagatagaccactggccagagtttttgagtcatgaagcctgctccagggattccttttcaaaacagtcatcactggcagcacatttcagtgacacagaatgggtcgcaaaacttgcttacttgtgtaatgtattcaacctgctcaacaaactcaatctgtcaatttgggggagactgataactgtgttccagtcagcagatgaagtgcctgctttcaaaaccaaattggaattatggggccaacaagtgaacattggggtttttgacatgtttcaaacattagcagatattttgaaagagacagagccagggcctcctttctcccagcaggtgcatgattgccattcttaggtttcaaaagagtctgagctttgccttctgtgatggttaacactgagtgtaaactcgattggactgaagaatgcaaagtattgatcc

SEQ ID NO: 96975 - DNA, 539 bp, Homo sapiens
tgtccatttaacatattggtatactgtaataatacaagaaagtaattcaagtttaatttttataaagaagttaaacactatttttataaagaagttaaacacaagyagttaagcattgcttcatagtcataaatcatctttatttacagaagtgctaattgtcttataaataatattctaacttttaacataaagtaggagaatagctgttcccatatgttaaatttacaactttcactgatactacaaaaaaaacataaaattcagccagtgcttaataatactatttgattttattcagtaaaatatgtgtattaaaaaaatctatgatattaaacattgaatccttaattctcaatgatttttcttttaataagtatttaggggattttttgaaggattcacatggaaaaaaatcagtccagttactttctctactatgtttaataagaaaaattgtaatagaaagaagatgctttatgattgtggagacagctgggttcaagtcccagttattagttgtactattttggagaagt

SEQ ID NO: 96976 - DNA, 586 bp, Homo sapiens
tgaacaggtgtgtacatatggattagctgcatttaatgtttgccaagtatcagctgtgtttgctccaaacctatttaaatcaattgtacatgttaatataattacacaatcttgaatawactgatgaaataggactaaggtagttatttctaagattaatgctttggaaagacaagaaaatgaaatgaaacatgctctcaagaaaaatatggtctcaaattaggataatacagctataaaaaattggcagacttgtaaaaatgtaggagtctgtgttcagatttttttacatatgtctaagtttttattccacattaaggaaattgaaattagaaatggaaaattaaattttatatgtatggctgcaacaaagaagttggaaagctcctataaacccatgcttttaaatattttaaaagaaaaaaatactttaaaagaccttggttctacatgaaaagattataaatggatgcattattttatgtttgaattcaaataagatcgttttattttattttataataaaacatttctttttaacagtttacctctttagccaaatttttaattaaccaactccttgtcc

SEQ ID NO: 96977 - DNA, 612 bp, Homo sapiens
actttagcttgctatttatggtaatttgtagcaaaaatttagtaagtgttacagtgtctctagttagttattagtttatcaattactaattcttctttttcagattttttgaaatttaatttttggtatcttccttcacaaatttactttcgcattgatagttgagatattatcaaagttgaggtactaatcatactgaccattatgagcagtcatttctggatttctccactgtccctttgctatttggaatgattttgggcttcactttctttattaggttgactgagctgctcttggttaaaaaacaaaatttaaactttaaagaaaatatcatatcagcatttaattaagtttattgcaaattgttgcaataaacctagaatgctttcaacagttttgcaggattttgttggggctgaaatgttagtttcatttggtttacttttagctttaattttarttttaccataatatttcaccagatatttcataatcccattttagatgaatgtcaatttcatgaaaggataacatttcagatcctgagtccttttcaatttttgaatcatatattcatttgaaaaagccattaacatattttaaaaataa

SEQ ID NO: 96978 - DNA, 608 bp, Homo sapiens
ggcaactgacccaggactgaccaatcaacagagtccccgcccctgccasagtgattggttccacgaataagcatgtgacaccagttcttccaaggagactcaacccagattttgttgaaacctctgggaaaaagaaagcctttctctggggattgcagttgactgtaatgtaaacctgagggcctatggagagaggaacccactgtattaagaaacagagacaatgagtgaaggaaaaaaaatgggtaaacattgactgcgtggttggagctttcttattcacttcttcctagagccagattagttcttaggttttcataatatgagccaattaatattctttttaacctaagcagggtaagttgagtttttgtcacccatcacccaaaatgacctcactgataaaacagattgggaaaaatatgtatgttctcaggaagcttacatgtggtatattcttgattatagagacagggttaactcccatataaaggaagtgccagggtcatgaaccctgaaattaggcacaccttcatatatttgttggatgaatgcatttcgtttatcactcctctaattctgaatgcaaatgaaagaatatcatagaa

SEQ ID NO: 96979 - DNA, 608 bp, Homo sapiens
ggcaactgacccaggactgaccaatcaacagagtccccgcccctgccacagtgattggttccacgaataagcaygtgacaccagttcttccaaggagactcaacccagattttgttgaaacctctgggaaaaagaaagcctttctctggggattgcagttgactgtaatgtaaacctgagggcctatggagagaggaacccactgtattaagaaacagagacaatgagtgaaggaaaaaaaatgggtaaacattgactgcgtggttggagctttcttattcacttcttcctagagccagattagttcttaggttttcataatatgagccaattaatattctttttaacctaagcagggtaagttgagtttttgtcacccatcacccaaaatgacctcactgataaaacagattgggaaaaatatgtatgttctcaggaagcttacatgtggtatattcttgattatagagacagggttaactcccatataaaggaagtgccagggtcatgaaccctgaaattaggcacaccttcatatatttgttggatgaatgcatttcgtttatcactcctctaattctgaatgcaaatgaaagaatatcatagaa

SEQ ID NO: 96980 - DNA, 470 bp, Homo sapiens
agaaattccaaagcttgtcttctcccactggccaactaaacagaaaacaaacacttaaggtacccttctcagaagcttaggagaaactgagttctccaaagactatgtccatgggctcctctgaagcttaacagtcaaatttcccttcatgggaatttctgsctcaagtcacccaaaacatttattttttttaaaagaaacaatacctgtgctttccagataacaaggtggactaaaatactatctggtgtcacaactattcaggctcattttgcagtatgtgcacctctgtcttgtgtacctgtgagctgacactctggtctgataatatattctgcagctgtacatattaatttgtaagttgaacaatctctccgtgagggcagttaggaaaccaagattgaaattgctaatgtcgggtgacttcagctgtcgatgattatgtagtcaagtcttgactaaggtttcca

SEQ ID NO: 96981 - DNA, 603 bp, Homo sapiens
agacaaacagaattgaggaaatttgtcaccagtacatctactttgtgaaaaatgctaaaagaagttattcaagagaaggaaaagatatgggtcagaaactcaaatctacataaatgaagagtgttagagaagaaataaataaaggtaaagtaaaaccttttattttttcttaatttatctaacagataactgtttgtacaaaaataataacaacaatgtatttggcgattataacatatataaggaaaataaatgacaatgatgttataaggaacaggagtgtaaaattggaaatactctgccataaactacttgcactactcatgaagtgatatagtgttaattgaaagtgggtttaggttagttttaaatgyatactgcaaactctagagcaaccactaaaaagataattaatatggtaagagaagagagaacgtggaattttataaaatgctcaattgaaactagagaaggcagaaaaagaagggaagaaaagacaaatgtaatacatagaaaatggttacaaatatgatagatattaatctgactatattaataattactataaatgtaaatggcctaaatacaccaactaaaaaacag

SEQ ID NO: 96982 - DNA, 601 bp, Homo sapiens
gaatggctaaaacccaaaaaactgacaatttcaaatgctaggagaatgcagagcagcagaaactgattcattgctggttggagtgccactttgtaagacagtctggcagtttcttataaaactaaacatagtcttatcttatgatccagaaaatgggctcctaggcatttactcaaacaaattcaaaatgtatgtccacaccaaaacctgcacacaaatgtctatgacagctttattcatcataattgctaaaaatgtgaagcaagcaagatgtccttcaatgggtacatgcagtacctccagacaatggagcattattcagtgctaaaaagaaataagccatcggggctgggtgtggtacccagtactttgggaggccaaagtgggcatgtcgtctgaggttaggagtttgagactagcctggcccacatggtaaaacctcatctctactaaaaaatacaaaagttagctgggcgtggtggtgcacacctgcaatcccagctacttgggaggctgaagcaggagaatcacttgaacctggaaggcagaggttgcrgtgagccgagatcgcgccatcgtgctctagcagggatgacagagt

SEQ ID NO: 96983 - DNA, 441 bp, Homo sapiens
gataccttggccaggaggattcaggactggctgagtcgttacgccctacaggatactgtcagagtcagtagcacaagcacagtgaccttcccagccttcctcccccactccccgccctgggagcttctgtttggagaaacatgtgcccatttccctttcagggaggtgtgggaggatgtgtccygctgggggactctcctacactcctggtgaggtggccttcatcctccttgttacttccctctccgtcttcctttcctgcctggagctcagactcaatccagtgccacaggaggagcctattttcaagcaggagaatgaaaaccattttccagacagggtgaggtgcagagctgtggagcctggccctggaggtgttacagagcccctgtctgtgtcctggactgctcaccgccaggcttccaggcactgagaaaagca

SEQ ID NO: 96984 - DNA, 581 bp, Homo sapiens
gcaaaaggccaacaagtgatcagaataaattattttaagagaaaactaattataattgatatttggaattggaagcacaatttcctttagaacaattccacgaatggttgttttgattctcaaggcagcccacaaaagacagtttgaaacacaatttatgcagtgtcaatagtactgacctgactttggatcttggaggcaggggcttcaggtgatacccgagtggagtttttactccatttccattccgtaaggctataggcatttgaaagaggaaacttttctttggcaaccttccaccttcctttctacagaatatttcagtatttctagctcataggttttctaaaatattctctgtaatttattttgaaatggagtttttttatcgtttacagatatgagtaaaattagcctaatcagaatgttagttcctgaaaacattgacacgtaccttatccacatggcaattgagatccttaaacatggtcctgacagcggacttcaaccttcaygtgatgtcaacaaaaggagatgttttcccggttctgaagagatctgttcaagttctaagagaagca

SEQ ID NO: 96985 - DNA, 633 bp, Homo sapiens
attcttcctaattagttattacattgttggctacaaagtgatgatttctaatttaattatgattcctttttatatattagcagatattcttcagtataagtcagctatattccccttttaaaatatctggacttccggcctcatgaactcatggattctcttttagatacagtattataatccattaacactgatattctttttgaagctcaaattgtccaaactttggccaataacagctcctttrgtgccacgttggtggtataatggtgagcgtagctgccttccaataaaagctccttcgagctgactgctgtgtccttttgaaacgtcctcattagtctttcaacaattctttgctttttagcagaataagatattccaggctctgcttctacttttactaccctagatctgaaatgagcaatttctccaaggaaaacctggttcctttttgtgggaaatcatatttattaatagtaaccaaggtctgggtggcagttatgctcattgctactgggtactattgcttctaggccttgtctggaaagagctaatgtgtatacatgtgcgtgagtatgtgtgtgtgtgtatgtgtgtgtttagctatttataaaataatgacttcacact

SEQ ID NO: 96986 - DNA, 485 bp, Homo sapiens
taggttttattatgtccaaaaattattcctttagacagtataatattattatatattattatatttagacaatagtactaggttgagtgtcccttatctgaaatacttgggaccagaagtgttttggattttggacttttttgtattttggaatatttgcattatacataatgagctatcytggggataagacctaaaacattaaactcatttatgtttcatacataccttatatgtatagcttaaaggtaattttatataatatttagaataattttgtgcataaagcaaagttttgactgcagtttgactctgaccagtcacatgatatcaggtatgtcagcactcaaaaagtttcagattttcaaacatttttggatttcagatttgcgagttagggatgcttaacctgtgttttgtctaatgaagcaggataaaaacaatatatagtataatttcaattctgtaaaagatctatgttcatg

SEQ ID NO: 96987 - DNA, 521 bp, Homo sapiens
aatattttagcacttcaaaatttatttttaaatgtatcaaactatttttgtgtattcataaacatttatttttagaaatgagctaaagaccttctatacactcctaattggtttgaccaccacaataaaagagccttcaagtcattatttccatttgaatgtaataaaattgatattccataatatacttcaaagcattatattagacatcatatagtacataataaaaacatgcaatgttatcttttaatttcaaaacttgtatcaaaaattgtagacaatatatttatttcaatatgtttctaccaggctcttttatttacaaaatccttttaattacagcatctcatcccatcctcagaacaatctgggaactgtgtaggctgggtcttatcttcattttacagatgaatatactgarggttgtaaaggtaaaagtgaattgtccaaaatcataccacaaaaacaaaaattgagtaccagagctaaaattgattcttaggttagtgttttttatattg

SEQ ID NO: 96988 - DNA, 642 bp, Homo sapiens
tctcacttggatatgaaattactttgatggatcgaaggtgattattaccattaaatgtgacaagcacaawataaaaattctagttttaaattcacctgcagtaaaggtgcaataaaattctatatgaagacttctaataaagaaatgaaacatcatgtgagcagacgaccatcaaatatcatcaaatgaaatatttttgaataattgagaagtgaagaacactttaaatattggatgttaaactcaaacaaacacattgtacttatttgcatgtaacttatgaatgtattcatgggtgtgtgtgtatgctcagatttggtgagtgtttactgggacatcggcactgggttcatgacactgaaggtttccttaggccctgccaatggagttatcctgctcttcattttaaattcagcttttgccatatgcaaatttttttaaccactttgtatctatgtttacattatctgctttcatttaaaatcaaattctgaagaatttacacatttttcaggtagcagaatatactagtaaaaacagtagataagtgtctaaagctgaactcattatctcccccaccctgtcttatccattccctccaaatctattacttttcttaaatatttatgttatttgtaaata

SEQ ID NO: 96989 - DNA, 592 bp, Homo sapiens
aatataaaaattctagttttaaattcacctgcagtaaaggtgcaataaaattctatatgaagacttctaataaagaaatgaaacatcatgtgagcagacgaccatcaaatatcatcaaatgaaatatttttgaataattgagaagtgaagaacactttaaatattggwtgttaaactcaaacaaacacattgtacttatttgcatgtaacttatgaatgtattcatgggtgtgtgtgtatgctcagatttggtgagtgtttactgggacatcggcactgggttcatgacactgaaggtttccttaggccctgccaatggagttatcctgctcttcattttaaattcagcttttgccatatgcaaatttttttaaccactttgtatctatgtttacattatctgctttcatttaaaatcaaattctgaagaatttacacatttttcaggtagcagaatatactagtaaaaacagtagataagtgtctaaagctgaactcattatctcccccaccctgtcttatccattccctccaaatctattacttttcttaaatatttatgttatttgtaaatattacatatttagattat

SEQ ID NO: 96990 - DNA, 592 bp, Homo sapiens
aatataaaaattctagttttaaattcacctgcagtaaaggtgcaataaaattctatatgaagacttctaataaagaaatgaaacatcatgtgagcagacgaccatcaaatatcatcaaatgaaatatttttgaataattgagaagtgaagaacactttaaatattggatgttaaactcaaacaaacacattgtacttatttgcatgtaacttatgaatgtattcatgggtgtgtgtgtatgctcagatttggtgagtgtttactgggacatcggcactgggttcatgacactgaaggtttccttaggccctgccaatggagttatcctgctcttcattttaaattcagcttttgccatatgcaaatttttttaaccactttgtatctatgtttacattatctgctttcatttaaaatcaaattctgaagaatttacacatttttcaggtagcagaatatactagtaaaaacagtagataagtgtctaaagctgaactcattatctcccycaccctgtcttatccattccctccaaatctattacttttcttaaatatttatgttatttgtaaatattacatatttagattat

SEQ ID NO: 96991 - DNA, 422 bp, Homo sapiens
tgactgaattaattgattggtcaattcagccaagtagccaattttcttttcttttcttttctttttttttttcctcatttgtttccttagagttgagttgatttttgtcattagactgaagaactaggcttcaaatagaccaggaaaagaatttacactttgccaaacagaagcaaattactgaaagcctttgaaacacttgatcaaaactgttttcataaaggcatatttttaagrgtgcgaaaactcttataaaaactgtccttaatttagtatctccaaaagtgagcttctagtttttaccttctcatctgtttcttccacaattttctaccatccatgattcccatgttgtaactgacttctggtgacattactcctctactcaaaaatactcattgactttccactgctcgtgaatc

SEQ ID NO: 96992 - DNA, 236 bp, Homo sapiens
cattggccaggtggctgacctctctaggctctatttcctcatgaatgaagtaagggtttagactagatgtgtacaacagcccacccagctctctgcatgagaattctaagaasccagataggtatgaatgtcgtggcttcagtaatggagggcgagaaagatcatgactgtcacaggtggggtggggtggtgccagtgatgacttcctttggagttgtgctgaaggtgtgatgaga

SEQ ID NO: 96993 - DNA, 512 bp, Homo sapiens
gaattcatcctttttatctggaacccactccctcaataactaacccactcctgagataaaggccttaatctattattaagggcagagccctcacaatctgatcacctcttaaagktcccacttcttaataccatcacaatggcaactaaattttaacataaattttggctgggacattcaaatcatagcaatgattttgcctctattaatgtgaactttctcaactttctgtttcccacctacaaatctatacctgtgtgcccttcttttgcctctcccttccatttcagagcatcaaatgtttgtctttgtctgaagtcaacaactcctatgcttttgatcctatcattgagttcctctcaatcttgctacattagttattctccttgttctgatttcttcacatatttctctccatgtgctttccaattgtcccataaaattgacttcaatccataaaaaccttctcttgactgccaaggtcctccgtatgactttttctctgttctctt

SEQ ID NO: 96994 - DNA, 633 bp, Homo sapiens
gatagctattggttggactttgtttttatttgcaaatacttggggcagggcgggagagagaaagagcgacaccaaaatctgttcagtgctttaaagttctcgtggtgttaactggccctgcccgttgccacccacaggaatttctcaaacagaatttgaagatgaagagctgagagtgaatctcaggcgaggccttccacccagaacctggaagattccttaaggatgttataggaaaaatgtatttctgatgtggtaccagcagcctcacccagagctgttgtgataggcatagctagagctcctttcttgcaaaaccaagaagcttgtggtttcctaaatcctgttctccccttcttcctccttgcagccatttcgttgcttgcttgctgcagacagttcgttggctgcccaacaaccagccrtcccacttcttccctgctaacagaacgtccatcagtagaaatccattcgcctcagggagggaggcatccactcctgtagcaggagtgtttgctctaaatcttcatgttgttccatctcttttgacagtgctgtgttagagatcagcacgtgagcctgttctggctaaagagatataggaagaagttggctggggaaatccccttctca

SEQ ID NO: 96995 - DNA, 604 bp, Homo sapiens
taactagacaactttcaccttttcacccaaaggaaatactttatggcttctcattggaatattcaaattgccagtatcactactcttgtgctttggggccatgattaaataaaataagwgttacttgaacgcaagcactgcaatacttcacagttcatctgataactgagaagactactaagtgacaaagggaggattcatgtcccaagcaggaaagagtgggccagggtaagattttgacatgctacgcagaatgccatgcagtttatgacttataaattgtttatgtctgggattttcctttaatattttagatggcagctgaccacagataaatgaaactacagaaagggaaaccccaaataagggaggactatggtatacctctaccgtcttccagtacttttccattagctcatcccagagtttaaaactcccatttgtttttttttagagttgtgttcaccctttctctttcccattgcaataatcttgacctctactgaaatagtccagaataaaacctttcttgcctgtctaacttgtctgaggcaatttcttttacactggcccaaagtcactgaattagacaaggtaaagctaa

SEQ ID NO: 96996 - DNA, 604 bp, Homo sapiens
taactagacaactttcaccttttcacccaaaggaaatactttatggcttctcattggaatattcaaattgccagtatcactactcttgtgctttggggccatgattaaataaaataagagttacttgaacgcaagcactgcaatacttcacagttcatctgataactgagaagactactaagtgacaaagggaggattcatgtcccaagcaggaaagagtgggccagggtaagattttgacatgctaygcagaatgccatgcagtttatgacttataaattgtttatgtctgggattttcctttaatattttagatggcagctgaccacagataaatgaaactacagaaagggaaaccccaaataagggaggactatggtatacctctaccgtcttccagtacttttccattagctcatcccagagtttaaaactcccatttgtttttttttagagttgtgttcaccctttctctttcccattgcaataatcttgacctctactgaaatagtccagaataaaacctttcttgcctgtctaacttgtctgaggcaatttcttttacactggcccaaagtcactgaattagacaaggtaaagctaa

SEQ ID NO: 96997 - DNA, 560 bp, Homo sapiens
tgttgggaagtgtaaatgaattattgtatgaaaagctctgggaatattacctagcacattacaaatgctatattagagttggctattattatttattcatatataaaaacaacactaaattataataatagctcatgtttattgagtgcttactgtgagtcatatattttcccaagcattttatatgcaagtcagtcatcagatcttcatggcaaactattagatagagttattattatccccattttacrgataaggaaattggcagcaaaactcaggcctggagctctttattactatcccttcatctctttaatatgaatttccttttccagtcttttcacatagtttccttcttcgtgtagagaaattaacaaaatgaatgtactttgaaggaggctaatccaagtaaagaagacttaagacaagctatgcctgtttaattcagctcaacaattcacaccttcataagccatgacaccattctcactgtatttcattttaatgctattattttgcttggtgactggtacatataaatattttatacagactcttct

SEQ ID NO: 96998 - DNA, 560 bp, Homo sapiens
tgttgggaagtgtaaatgaattattgtatgaaaagctctgggaatattacctagcacattacaaatgctatattagagttggctattattatttattcatatataaaaacaacactaaattataataatagctcatgtttattgagtgcttactgtgagtcatatattttcccaagcattttatatgcaagtcagtcatcagatcttcatggcaaactattagatagagttattattatccccattttacggataaggaaattggcagcaaaactcaggcctggagctctttattactatcccttcatctctttaatatgaatttccttttccagtcttttcacatagtttccttcttcgtgtagagaaattaacaaaatgaatgtactttgaaggaggctaatccaagtaaagaagamttaagacaagctatgcctgtttaattcagctcaacaattcacaccttcataagccatgacaccattctcactgtatttcattttaatgctattattttgcttggtgactggtacatataaatattttatacagactcttct

SEQ ID NO: 96999 - DNA, 635 bp, Homo sapiens
ccatttagatgaaccttaaaacaattacagtaagtgaaagaagtgagctataaaagataacatatcgtacaatttcatttttattacgtgtctagagtaagtacatccataaagacagaaagtagattagtggtttccagaggccaggggaaggggaaaatgaggatttactgctaatagatataaagtttttttctgtgattaccaaartctcctaaaattatattttagtgatgtccatacaactctgaatatactaaaaatcacttagttttattttaaaatggtgaatttgatggtatgtgtattatatattaataattctgttaaaaacaagttttatatactttaaatttaaaaaataaagaatgctaagtacattttgttgtttctttttggcatagctgacataatctgataatctacacaaaattagaaaagaaaacaacaggcaaaataagccaagagtcttactaaatcatgtaatgagcaaaaggttcaattaagaaaaatatgaacttcttgaaaagattctatttagaaagtaaagcattcaatactattttattaatacctaaccagagcccaagattttgatgctattctccttattacttgttaattaactccagaag

SEQ ID NO: 97000 - DNA, 605 bp, Homo sapiens
gcctcccaaagtgctgggattacagatgtgagcctctgtgctggctagcatgtataacttataaggaactcaagaaactcaacagcaaaagaaaataatgtaatctgataaaaaaaaaattggcaaaagacctaaaaaatgacatttcttcaaagaaggcttacaaattgctaacagggatataaaaaattctcaatattactagccataaggaaaatacaaatcaaaaccaaaatgagatatcacctcaccccagttaaaatggctactgtgaaaaagacaaaaygaaacaaaacagaaaacaaaaaaatactggtgaggctgtgagaaaggagaacttgtatacactgtggactgtgcatccattacaaataacagtacagtagttcctcacaaattttaaaattgatctaccatatgactcagcaaacccacttctgaatatatattcaaagaaaatgaaaacagtatgtcaaaaagacatctctgcacttccatgtttattgcagcattatttacaacaatcaagatatgaattcaacccaagtgtcaaatagtgaatgaatggataaagcaaatgtgggatatatacacaatagaatacc

SEQ ID NO: 97001 - DNA, 643 bp, Homo sapiens
tccaagtttccctgtacaatcactgtaatatattttcttttcagattgttagcagactgctcagtttgtgcttggcatttcaattatagtgaaaaaggtgaaacccagaagactcaaggaattctcattaggagtctgaaatttgatagacttttaaaattaacctctgcttcttgttctatctttagtaggcacattattcattaaatcaaatgtattgattatctgctttatgaacagttttgaattggttactgtgatggattagaaaagaagaaaatatggcttttgtcctcagaagtctctcttactaaaaaaaaaaaatcagattgaaatacagagaaaaatttcaatttaaagatggcaaccacttttaaggaaggactagattgtttccctaacatgagtgcttgtgcaaagtgagaygttttgttttgtgaatgactttttagatattaaacagtaggaaagagaggcaaaggaatcagggaagagtgaaaactttggaaaaagacttagatgcttttcctagaatgctgggacatctaaaccatgtttgcacagaggtaattaatgtaaccttaatgttaattatacttaatgttatatatgttaatatatatagctaacatatactaagcat

SEQ ID NO: 97002 - DNA, 519 bp, Homo sapiens
  misc_feature (1)...(519): n = A,T,C or G
gagactcctattcttttcccttactttatccaaaacaaatgaagtctctccctctatactgagatgcctagagctggggatggttggattcaagcacccctgtggccaccacgaatggagtatgcagggagagacctgaaagcaacagagcagtgtgttttacccaagattcattgtaaccactatagagcgaccacctatgttcacacaagacacttggtgtccacaatcagcaagtgtggaagccagactggcttgtatccttcacccttcacttcagggcagtgagttccctcatgagctggggtgagttccctcagtgctgggtgggtccagagatgccgtctgcaagccaagggttggagtcaaaaagcttagatntctacctagtgtaccattctactgcmtttgtctgagctggcaccaaaccataagacagtgcctttcttgttcctccctttcccttccacaggaagaggagcttctcccagtggctcccaccaccacttgcccacaggg

SEQ ID NO: 97003 - DNA, 501 bp, Homo sapiens
acgcccctggtagttcatagcctccttgcttctccctaaactcaaatataggattcatatcttggatccttaatgacaaccgaggcaaaatcaaagttggactctgatattcatttgtgaaattccctctttagggggctagggcagcctctcactcactctccctgccagggatgacatgatcataataaatagcgtaacatgaggaagaattatgtaaaaaaaaaagtgaacatcattttaatatttgaaaacttagcgttaccatcaagttttactgaaatcactgraaaaagacactagccccttaacatttttaaacccagggatcagtctgattttaagatgagtcaaatgaattgaatgtgtagacagaaaattccaagctctttatgagtaaaaaaaaatgtttacagaatgctgtaatgtgatgaggattccgattatgagtcctataactcgtgaagtcgaaaacaaaagggcactttctagccagacaga

SEQ ID NO: 97004 - DNA, 529 bp, Homo sapiens
tcatttagccttcacaacaaacctatgaggtaggttctattttgacaattttcatgaagaggaaactgaggcccagagatattaagtgaattggtgacagctagtaagtaagtggccagaccaagatttgggtccagatctgtctgactccaaagtcatgcagttttctcaaacctacattatctcacagtagggtcatctttatttatcatgggttaatataaaatagtaaaggtcgtgtagatggtataaaacaaaaacgaaaagctgcatttaagtcttcagtggtttctgggcatttggttttatgayattagcagggcatttgcagaaatttatgcacagttagacgttagaatctttctctgtgacattttcctttgctgctgtttccgctatttcatctttctctgatgcttttaattccatttctgctgcatagtacaatatcaataatgataaataataaatcagtccatttctacaaggcattagtctccctctcctcttgtgatgggggaccaattta

SEQ ID NO: 97005 - DNA, 585 bp, Homo sapiens
atccatatcatttttcatttcaactggccaagtttttgcctttacattaattcatgtgtactgcttccttctgaaagtttgaagaccaggtctcctggccagacacatcatgccaagtgcttttcagaatgtatggggcagatgtgccatatcttgattccrccattcccaccctccatgggccaagagttggttccctctagtctgagatggaagaagggccaagtgggtaacgatctgcaggcagtgctagaggacttgtgtagtgactcagtaaggggaataaggaaatgaatggcgaggtcaacaatctccttgaaaaatcacaggaaggtttcagaccccacccccgcgagatgtggagtggcactcagtgtttttaagaagggataataaagtcatcttttctgtgtctttctctcacttctctcttgagtctccaaacatacagggctgtctgtttcgctgtgttttcctttggttctaaggaacttttttcccctgtggaagcaaacccaacaatctgcatcctgagcttgagaagttaaaggcaaagtgtgtttttggcatgatcaggcttacaga

SEQ ID NO: 97006 - DNA, 485 bp, Homo sapiens
agatgtgccatatcttgattccaccattcccaccctccatgggccaagagttggttccctctagtctgagatggaagaagggccaagtgggtaacgatctgcaggcagtgctagaggacttgtgtagtgactcagtaaggggaataaggaaatgaatggcgaggtcaacaatctccttgaaaaatcacaggaaggtttcagaccccacccccgcgagatgtggagtggcactcagtgtttttaagaagggataataaagtcatcttttctgtgtctttctctcrcttctctcttgagtctccaaacatacagggctgtctgtttcgctgtgttttcctttggttctaaggaacttttttcccctgtggaagcaaacccaacaatctgcatcctgagcttgagaagttaaaggcaaagtgtgtttttggcatgatcaggcttacagataaagactggtgagtaacgtgtgggcattcatacaaatg

SEQ ID NO: 97007 - DNA, 407 bp, Homo sapiens
ataaggaatctgacagatgacgtatcttctcttgaaaaccaaatggtcattcttttgcaaggataatgatcctttacaaatgtttatttgtttttgttctcaaaagcaagctcatgccttaaatgtttttcaactgctggcaaaattttatcacatcttccaatatatttcactaaggtcacttatggtcgtatgtgtgacagtaatcaaagatgtccaataaatggamaaattctgagaccacctggtacaccaaaaagagaacttactatttgacctgagtcagacatttagtcctctggggcacaattttctcatgacaaaaattagaagtatattttggtaaaaatcaaatgacctttaatgttctcttccatttaaagtactagtattctagatctatgcac

SEQ ID NO: 97008 - DNA, 582 bp, Homo sapiens
gggaatgcttggttactactgacaggcggttaccttaacctcagtctatcagccacattagaccttcgggctaccacccagagcctcctcccttctccccaaaggcctggctcctctgtgaggctattgctcctatctgctctgggccatgttcttcctcttctggcattagggggcctcacttgaggacctcagcctgtggtgagtaaaggtaacctccactcctgttcctcctttctgcttctatgatcattgtccctgcctctcattattgctcactgttcaagyaattctgttcttgttgccataaaaatgggaaagagattcttttttttttttgagggagggtcttgctgtcttgcccagcctggagtgcagtggcacaatcatggctcactgcagccttgacctcccatactcaaccaatcctcccacctcaccctcccaagtagctaggactacagacacatgccaccatgcctggttaattttttaaaattttgtagagatggagtctcactatgttgccccaggctgatctcgatctcttagattcaagtgatcctcccacgtcggcctccc

SEQ ID NO: 97009 - DNA, 621 bp, Homo sapiens
ctggtgccaaaaaggttgggaactgctgctttaaatcatctctagattacttatagcacctaatataatgtaaatgctacctaaatagttattgtactgtagattttattggtactattttctactgttggattgagatttttttktcctgaatatttttgatatgcagttggatggagggacacctatatagcaatgtacgagggcagatgactaatagtgtaatgaatctgttgaagttgttgaaccccctcatttacttaactaatttgatctatagttcttttgctaatctgatctatgtttcctgaaaagctaaaacaaaacaagcatctgatggctaaaattaattctgccaaatgcctccgcttgtagtgatgcaacaacaagggaggggaaggacctatacttcaccagcctgtgctggctgcttttcatgtatttattaacttaaaaaaccacgagtttaagctgatctctttattacatttgaactgtacacaaatattgggtttgaaaaagacttttgttaaaaacccaaaggcaaaggtgtggccaattcaggacttccatacaatggcaattttgtatcctgctaactctgtctccagaaagtgggtt

SEQ ID NO: 97010 - DNA, 442 bp, Homo sapiens
aagaaacatcatcttttgatgtttcttcaattgatcttatttatacttcattaacttttcatttsataacagcaataaggacaatgaaaaggaacatctgtggaatacttactatgtgacaggcacttgtctaaacacctttagaaagtagaattattatttttcatattttatagataaggcaatgaagatctgaaatatttgaacagcttgtttcagcaaattgatgtttgagtagagatctgagctctagtcatcctgatgccaaaggtcttttttcttcagttttgccctttagtttgtccatgtcacacttctgaaaaaatatgtctgatcaatgcacactggaaacagaacataaggatggatttctaagggaaaattagatgcaatgaatgaaaatattttcactttttgtaaatgttcattcaaagtctatttt

SEQ ID NO: 97011 - DNA, 442 bp, Homo sapiens
aagaaacatcatcttttgatgtttcttcaattgatcttatttatacttcattaacttttcatttcataacagcaataaggacaatgaaaaggaacatctgtggaatacttactatgtgacaggcacttgtctaaacacctttagaaagtagaattattatttttcatattttatagataaggcaatgaagrtctgaaatatttgaacagcttgtttcagcaaattgatgtttgagtagagatctgagctctagtcatcctgatgccaaaggtcttttttcttcagttttgccctttagtttgtccatgtcacacttctgaaaaaatatgtctgatcaatgcacactggaaacagaacataaggatggatttctaagggaaaattagatgcaatgaatgaaaatattttcactttttgtaaatgttcattcaaagtctatttt

SEQ ID NO: 97012 - DNA, 442 bp, Homo sapiens
aagaaacatcatcttttgatgtttcttcaattgatcttatttatacttcattaacttttcatttcataacagcaataaggacaatgaaaaggaacatctgtggaatacttactatgtgacaggcacttgtctaaacacctttagaaagtagaattattatttttcatattttatagataaggcaatgaagatctgaaatatttgaacagcttgtttcagcaaattgatgtttgagtagagatctgagcyctagtcatcctgatgccaaaggtcttttttcttcagttttgccctttagtttgtccatgtcacacttctgaaaaaatatgtctgatcaatgcacactggaaacagaacataaggatggatttctaagggaaaattagatgcaatgaatgaaaatattttcactttttgtaaatgttcattcaaagtctatttt

SEQ ID NO: 97013 - DNA, 547 bp, Homo sapiens
tttgaaagcagtttgaagcaaaatgttatgggataaaattctgagaggccttgttttgaatctttctatatygtaagatccattggtcaagtcaccttttttgctgagtctgaatgttattgtgtatggagtgcagattataatacttatactatttctcctgcaaattcaatgttatacttagtatattgcctgacataaaataggtggtcaataaatataactttcctctcatccacttattaaaataaaatataaatttctcatcagtgtgccagttttaatgttctatattaaaatacctctgagtttagcagttatatataaaaaatttaatatatgtgttttcagatttcaggatttaactgtataattaaaaataatatttaagtataaaaaagataaaatatctaaagtcatgagcttcattttttactctttcatgtataaaattttaataattaaccaagtcttattgtattaaaaatattgtttaaagtatttttcactgattttatgttaaactaatatttagtgagaactttat

SEQ ID NO: 97014 - DNA, 547 bp, Homo sapiens
tttgaaagcagtttgaagcaaaatgttatgggataaaattctgagaggccttgttttgaatctttctatattgtaagatccattggtcaagtcaccttttttgctgagtctgaatgttattgtgtatggagtgcagattataatacttatactatttctcctgcaaattcaatgttatacttagtatattgcctgacataaaataggtggtcaataaatataactttcctctcatccacttattaaaataaaatataaatttctcatcagtgtgccagttttaatgttctatattaaaatacctctgagtttagcagttatwtataaaaaatttaatatatgtgttttcagatttcaggatttaactgtataattaaaaataatatttaagtataaaaaagataaaatatctaaagtcatgagcttcattttttactctttcatgtataaaattttaataattaaccaagtcttattgtattaaaaatattgtttaaagtatttttcactgattttatgttaaactaatatttagtgagaactttat

SEQ ID NO: 97015 - DNA, 540 bp, Homo sapiens
agagggagaacagagacagggagagggggagtcaaaaaatggagctgttgcaggataaaggcggtgaggcgtgatgagggtttgtattagggcaggagctacagaaatggagarggagagacaaatacaagacagatcaaaaaatcaaagtcaatgagacttcctgatagattacatatggggcatgtagggaaaacagtatgtaaagcaagtgatctattgcaatggattaaatgtttgtgtccccgcaaagtcatatttgactaacccccaatgggatggtattaaaaggtggaatctttgggaggtaatcaggtcatgagggtggaggattgtgaatgaataggattgtgcccatacaaaagggtccacagagagttatctcaccatcttttccataaagtgaggacatcacagagatgacagtctgcaattcagaagacagccttcaccagaaccagaccatactggtaccctgatggtggacttccaacatccaacggtgagaagtaagtttctgttgtttaaaagctcgccagc

SEQ ID NO: 97016 - DNA, 588 bp, Homo sapiens
ctattaaagacttaatttcaataatgtcaaggatctggctaaaatattaggactaagatattttctaattattttatgatatttttgctctacccattagtctgttaaactttgagagtttattaccctaatatgtttttattacccagtgttttctataattgtccaaggaacacaaaattgctttgacagaactatgactgaaaactctattatagatataaacattgatctaaaaacggttttaattttaatttagctaattaagctactattgattaaatttatggtgtaaaaagttaacgcaaatttttgcatatttcaaaaatataagcctatatatgtatacaaatgttttataaagtaaaaattaaggggtcaataatagtcaaagaatcagtattattacaaatggaaagtttcaaaatctgtacagataaaataagtggttgctagcaagttaatacaaaaagtatacattatttattaaattgtcagggtgcagatgtatattttaagcataaaatataattgytatgtagggtaatttcaattagactgtaatccaagaatgatttggcttatttt

SEQ ID NO: 97017 - DNA, 585 bp, Homo sapiens
aaaatgtggccaaatgtttactagttacaaagtaactagcaactcaatcctgcaccagtatttaaaactgtttataaaatgtttaaaatttacaaatgtttaaatagaatcatccagggactagaagagggaggaggaatgtgaggggtttttttggtgaaaaagacatattcttgttagttcttcagtctatgaataaactacattattttcaagtatttcatttttagcatctgaaatatcctttcamccatgtcaccaaatcttctggtattttgaaccaaacactttgagtaacctgaagaaaagtgatgtagaaacataaacttagctccttttccaactcttaatatttttatcttggttcctggttagattcttgcccaaagtgcctaaaatccaaggaaataccaccggccccctcccccaacattctgcttaaatgtgtttgccattgaccaatttgtgtatggttgagcccactcagggcagttgctcccctttcttccccttgtttatatgtgtgctgctgagtagtagaaataaatgatgtaattaaaatgaggaccatattattttaaatgc

SEQ ID NO: 97018 - DNA, 635 bp, Homo sapiens
gcctgtgctttataagtggaactacaaagcctagatgacaactcatctgtttatagtatggttattgaacattttaagtccactgttgagacctactgctcagagaaagagattcctttcaaaatattactgtgcattgacaatgcacctgttcacccaagagctctgatggaggtgcacaaggagattaatgttgttttcatggctaataacacaatatccattctgcagcccatggatcaaggrgtaattttgattttcaagtcttattatttgaaaaacacattttgtaagactatagttgccatagatatagagaacaattcctttaatggaaattaaaaacctcctggaaaggattcatcattctaaatgacattaagaatattcataactcatgggaggaggtcaaaatagcaaccttaacaggagtgtggaagaaatggattccaaccccttactttgaagggttcaatgtaaagtcactagctgcattattttctagcaacttgagttaaggaagtaactgcagatgtgatagaaatagcaagagaactagaattaaaagtgggttctgaagacgtgattgaattgctgcaatctcatggtaaaacttgaactgatgaacagttgtt

SEQ ID NO: 97019 - DNA, 575 bp, Homo sapiens
cttaataatttagatcaggggagtcttcacraggtagcctccaaagagctgagaatcgctatgaaagagaacagagaggaagaagtggctgagtctttttctttaaactggagaaaataacatcttggtgatttgatggtaactctctctctcatttatctacctaaagacccactacaaggatctttcactgccttggtcaggatctatcaaagatccaccttttcttcacattcagataaaagcatatcacacctgaaaaatttggcccagacatggtttggccatcatctcttcaagaaaacatttgtcaaactttctaaccaggccctcctttgggcaccctagtccctgatacatacctctgacttagataatatagtgatattgaaatgatccgatatgtttactatctctgtattcccagtctgtattagtttgttctcatgctgctataaggacatacccaagactgggtaatttataaaggaaagagctttaattgactcacagttctacagggctagggaggcctcaggcaacttataaccatggtggaaggggaagcaaacgtg

SEQ ID NO: 97020 - DNA, 611 bp, Homo sapiens
tgttacatggattttagatggagcaactcatcagtagatcagatgaagagatcacagaaggtcagaagtaaacctctcttttcggagtgcagcagctgcttctaagagctgactgggacctccatgaaacccaaacgggtggagaatcaaactgaaactgaatagcccaagctcaagagtcatgcctggagctcaggaatcacatggctggaccctgtttcctgttccatacactaagcctaacgtggctaatgtcatcagacttttgctctatttcaaaaggaccccacaaatggtttttccagggagatttgagcacacccctaaattcaggacttcattaacacgtgacactgaaggtgaaaacaaaaactctaggtctctgatatcaaaagcctgaaacccagataarttttttggcttaaatttatctggatatttgcctaggtttgctacttcacttacaagcatgaactaggcaaaactaaatgcagcaatcttcttgaactctgtggtgttagtacttgtccttcactcagagtaattcagctgtcacttttcaaaaatccaaaaggccttgcataaggtcaaatacatttacatgtctgcat

SEQ ID NO: 97021 - DNA, 486 bp, Homo sapiens
gctttactgttttttggggtataggagtgctagtgatttttacattgattttatatcctgagactttggagaagttgcgtattaggttaaggatcttttgagccaagactatgggattttctagatataggatcatgtcaactacaaagaggaatagtttgacctcctctcttcctgtttggatgcccattattttttttctcttgccttatggctctctctaggttctaatactatgttaatagtagtggtgagagagggcattcttgtcttgtgccagtttccaaggggaatgcttccaggttttgcccattcagtatgatatcagctgtgggttttccwtgtatggctcttattattttgaggcatgttccttcaatacctagttcgtcatgagttttaaagagtttttaacatgaagaagtgttcaatttaatgtaaagtcttttctgcaactattaagataattatgtgcttattgtcttt

SEQ ID NO: 97022 - DNA, 486 bp, Homo sapiens
gctttactgttttttggggtataggagtgctagtgatttttacattgattttatatcctgagactttggagaagttgcgtattaggttaaggatcttttgagccaagactatgggattttctagatataggatcatgtcaactacaaagaggaatagtttgacctcctctcttcctgtttggatgcccattattttttttctcttgccttatggctctctctaggttctaatactatgttaatagtagtggtgagagagggcattcttgtcttgtgccagtttccaaggggaatgcttccaggttttgcccattcagtatgatatcagctgtgggttttccttgtatggctcttattattttgaggcatgttccttcaatayctagttcgtcatgagttttaaagagtttttaacatgaagaagtgttcaatttaatgtaaagtcttttctgcaactattaagataattatgtgcttattgtcttt

SEQ ID NO: 97023 - DNA, 559 bp, Homo sapiens
ctgctgggaagccccacccagtgaagaaggatgggtcagggtcaggcctgtagaggcagtctggccgcagtctgccacagccagtgttttggactgcgggggacacctcttgggaccaagccatccagcttccctggctccagcaggggaaatgcatggcctggagctatagagatgaatgctacccttccccattccagggagcttagcatgttaggcatttatgagccccagtgctggctgctgcccctcccccaggagctcaaagggcttagcaggcagctgcaactgtggtgctggtctcctctcctctcaggagctcaggaggcttaggcaggttccagctragaggcttttgaggatctgcagggctccaagattgggatcctaggacctgctgacatgggtttgtgagtgggttgtaaagttctgtggaaaaagcatggtttccctggctggttagcacactacctcactgcctcccttggctgggggccgtggggtgggatctcccctgccctgtgtggctctcagatgggccactgtaccacactgccct

SEQ ID NO: 97024 - DNA, 559 bp, Homo sapiens
ctgctgggaagccccacccagtgaagaaggatgggtcagggtcaggcctgtagaggcagtctggccgcagtctgccacagccagtgttttggactgcgggggacacctcttgggaccaagccatccagcttccctggctccagcaggggaaatgcatggcctggagctatagagatgaatgctacccttccccattccagggagcttagcatgttaggcatttatgagccccagtgctggctgctgcccctcccccaggagctcaaagggcttagcaggcagctgcaactgtggtgctggtctcctctcctctcaggagctcaggaggcttaggcaggttccagctgagaggcttttgaggatctgcagggctccaagwttgggatcctaggacctgctgacatgggtttgtgagtgggttgtaaagttctgtggaaaaagcatggtttccctggctggttagcacactacctcactgcctcccttggctgggggccgtggggtgggatctcccctgccctgtgtggctctcagatgggccactgtaccacactgccct

SEQ ID NO: 97025 - DNA, 564 bp, Homo sapiens
ccaggaaacctcaaggaggcttgccactgtctcccacccaacttctgtaggtcatcctaaatgcagcaaggtgagcccctctgaaaatctatactccttcactcttagcctttactgttctgataakcttcaccttccctatccccaagaagttgtcaccctctgcctcttgcctgaagaatctatcttctatcctggtccttgcagggcggtgagtctcccatcaggttacttaactgtttatgtctgctgctggaattctgaaggccccatgatgagccaatgccatggtgcccagcagaggagcagatagatgcctttgagaacccccaaattctggatcataactgggaacataccaaggaaaacagtctcattgtatacacacagtagggaaagaggtagaaaactagcttaagaaaagtttagagaaggaaggtagggtgcatctctggagttgccctgctgccacccaggaatgcctgtgtgaaagtcccaaaaaactattctactcatcaagctggatttttccaagtcattcttcagtctctcagctccttcaca

SEQ ID NO: 97026 - DNA, 444 bp, Homo sapiens
tgcctgtgggccactaaaaacaaagaaagttggttgcactggcaaaagtttgagaaaccttcagaatgtctagccagggtgactggtgaagtctttaccaatataagcacaatctgtaaagcataggagagatgatattttgtctaatgcacaaacagcaacacagaaagttcaaaaaaatgaaaaaaaaggaaaatattttccaaataaagaaacaagataaatatctaaaaactgacctgaatgaaatggagataaataatgtacctgacaaagaattcaaactaaccatcaaaagatgctcattgagttcagtagatcaatgartaaacaaagtgaggattttaaaaaagagatggaaaattttttgaaagtgctaaacaaagagaacatggagctgaagaatacaataactgaaaatttaactagaaggattctacaaca

SEQ ID NO: 97027 - DNA, 546 bp, Homo sapiens
ggtgatgggtatgttaattaccctattgttctaattatttaacattgtatatgtatatcaaaactccgcattgtacatcttctatatatatatrtatgtatatatatatgacttttattttccaattatactttaatagagctggaaaaaaatctatatcactttcccattgtcagatgaatatctattacttcatctttttctatttaaacattctattttcaaagataaaatcaaaagcagagctgcgtggaagcactctctgtgccaagttgctttggggttatagctggacatcttcctagctaatggccatctagaaagccctaaggaaagtttcagaaatacataaggaaatgtattgtggtggagaggactaaaaagaatagagagagatgatataaaatatttcctagcaatttattacttgaagttatatttaatcagtgacattatgttatacatacactaaaggtatttgttaaaacattaaatgcacatatgtattctcaaatttctacttaaatgtggagatataaaaataat

SEQ ID NO: 97028 - DNA, 546 bp, Homo sapiens
ggtgatgggtatgttaattaccctattgttctaattatttaacattgtatatgtatatcaaaactccgcattgtacatcttctatatatatatgtatgtatatatatatgacttttattttccaattatactttaatagagctggaaaaaaatctatatcactttcccattgtcagatgaatatctattacttcatctttttctatttaaacattctattttcaaagataaaatcaaaagcagagctgcgtggaagcactctctgtgccaagttgctttggggttatagctggacatyttcctagctaatggccatctagaaagccctaaggaaagtttcagaaatacataaggaaatgtattgtggtggagaggactaaaaagaatagagagagatgatataaaatatttcctagcaatttattacttgaagttatatttaatcagtgacattatgttatacatacactaaaggtatttgttaaaacattaaatgcacatatgtattctcaaatttctacttaaatgtggagatataaaaataat

SEQ ID NO: 97029 - DNA, 509 bp, Homo sapiens
gaattcacgtgctagtgttctgatccatataagaaccaaccctagactaatatattctctactgattttgatttttatatcattttaaaccctaagacaatgtattattattattaattattttatttatttatttattttgagatggagtctgtctgtcactcaggctggagtgcagtggtgtaatctcagctcattgtagcctcagcctcctgagtagctgggattacaggcacccaccaccatgcctggctaatttttgtatttttagtagagatggggtttcaccatcttggccaggctggtcttgaatcctgaccttttgatccaccctcctcggcctcccaaagtgctgggattacaggcgtgagccactgtgactggccgacaatgtattctttttaacgttattgtktaaaattatcagatggtattctatcctcaaaattcctaccaaggaaactctccaaacactagcaaaaattccagtgcagaggtatgaagcaaac

SEQ ID NO: 97030 - DNA, 634 bp, Homo sapiens
attgtctcccagcagctggtttgtcttctcattctctaatgcaaacaccttttagttgccatgttaattggttgctgcctaagtccaattgaacatgatgcaaagaaagactacgactaaagagacatgttctaacagcacatctcactttaggtgatactgcaggaaaatatccactggaaaatagccattccctgggaattggaaatggtggattttgcttaaacttgcctcagaaagtctcaagctatctcttttaattttttctcaggaacagtcatttctccccacccaactacccctctacacaaacaaatttccagtagtatcattgtccattgatgaatatcttccacttagttcacaaaacaaaagtaatttctgaaaacaaaccaggcacttaacacataggccatttttctttattcacaaaacttggcacaagtttaaggtctaaattgagttgtttgaacttatttcaaccagcttctaactaaccagmtctgcctttggccattataagggtatttctcctttcagcatattttgcccttatttccatcaactccactttttatactttgggatccttttataccctagaaatacatccttttttatctaaatcctagat

SEQ ID NO: 97031 - DNA, 394 bp, Homo sapiens
agtggagaagtgaatttctattgaaagaatgccacatatggcattatagaaacacagaaaacccttacctcctctatttcttttacgtttgactggcccagttataaggaaatggttggttttagctggcaattgccttgtggaaaagtgacgacccataggrcatttttggcctaaattttgctttgaaattttttgccttatttctgatttctgcatgtcttttttttttttttgttacttttccattttcattaaaatatgctataccctgccacaaaaagtgtagctgtcaatctataaaatagtacaatttcagtaatcgtgtctggtattttaaattgagaaccataaaaaaatattattattatggctctgaagaatatataactcc

SEQ ID NO: 97032 - DNA, 605 bp, Homo sapiens
taagttaattttagtctataggttcaacataatacctactaaaatcccagttggtattaggaaaatacaaaggtccaagaataaccaaaaaatttctggaaaagaaaaagtaaagactcatacttcctaaaatcaaaatacactacaaactttcattaattaatgattaatgatactgatataagtaaagatatacagatcaatgaaacagaattatgtatctataaataatgccctgcatttatagttaattgacttttgacagtgattccagagcaawtcaacatgggaaagaatagtctttcaacaaattgtattgggaaaactaaacacacacacacacacacacacacacacatacacacacgaagttgaaacccattcttgcaccacacataaaaattaactcaaaatgaaacaaggatctaaatgtaagagcaaaaattataacactcttagaaaaatagtaggagtaaattgttgtgaccttgagttaaataaaagtttcttagatatggcactagaagtgcaagcaagtaaagaaaaaaatagatgaatcagatttcatcaaaattaaaaacttttgtgctacaaacaatactacc

SEQ ID NO: 97033 - DNA, 611 bp, Homo sapiens
gtcttgaatatgaaggctggacactcaggcagaatttctatgttgcattctggaggcagaattccttccttttcaggggaccttagtctttgtttttaaggccttcaactgattggatgaggcccacttacattatggagggtaatctgttttactcaacatctactgatttaactgttaatcacatctaaagatgctttcactgcaacatctagacttgtgttgaaccaagcaactggcaccatggttagcaaagtggacacataaaattaaccatcacagctttaaaaagagggagtgtgcattatattttaccatcttttttccattttgttctccattcacaaataccaactgtcaccttttatgtcacacasacataatggcaagagtttggcattgatagtcattgtttatgttgatttgagtacataggaaaatttttaaaacaaggcatcaattttaggactgaaataggatggaaaagcctttttggggaagcctgattttctttcctatttgtttcttttacacattaggatgtgtttccttacttctatgttaataatgtacagctgtccaagagcaaaggcgaatccattctataagca

SEQ ID NO: 97034 - DNA, 600 bp, Homo sapiens
atagccagtaagcacctaaagaggtgttcaacgtcattagtcattaggaaaatgcaagtcaaaaccacattaagatatcactttacmcaaaatattatttttaaaaagatagaaaataagaagtgtgggtgaggcaacttgaagcctcatatattgctggtgggaatgtaaaatgttgtagttgcttcggaaagcaattttatagttcctccaaaagttaaaacatagacttactatatgactcagcaattccacttgtaagcatataaccaagagaattaaaaagatgtttatgcaaaaactagtatatgaatgttcattgcaacattttttttacccaaaaagtagacacaatctgaatgtctatcagctattggataaacaaaatgttgtgtatctataccatagaacattattcagccataaaaagcgatgggtattgatatgtgccacaatatgaatagaccttgaaaacatttttgtaggtgaaagaagccagacacaaaaggccacaaactgtgtaattccatccattaatatacgaaatattcacaataagtaaattcgtagagccaaaaagtagactattggttgccagga

SEQ ID NO: 97035 - DNA, 433 bp, Homo sapiens
ccctacctgattactctaaagtaaaactaatcatctgataagccacacacatacacacaaattttagtgtctcactgttaaatatgaatatgtatccaagaaaccccagtgacctgaagaaagtctccaatagaaaaacaaagacttcaagaaataaacaaataaaggaatgtaatggaaatagggatgatactgggagaaawacagaacttctacactttcactgttccaattttcaaaaagaaagtgaagctatattcagaaaatcatgagtgtgaaaaaaacaaaagaacactcagaaaacaagaaaaacaagaaagagcttttggaaatgtgaggactgagatgaacaatcaatagaaggattgttagatgcaagaatattccaggaagtacaactagatgtcaaaggtaattaaagtatcacttcagg

SEQ ID NO: 97036 - DNA, 551 bp, Homo sapiens
aatggatttattccagaataaattgttttcttctgatgtttgattatttttgtactttaatagtgtaatatgtactgattttaatgaagatattgtggcataaataaatattaaaaatggcaaggatttttatctatctctacagacattgacaatgatagcaggcagccaaatgcctaggcagatagggacaggtacctgtgaaaccccaccttcaagccaaaaacagcctgaaggctgaaaaacccgactgctggtcccagtgaaacctgtgacccagagtaagaacttctgttcctgtttcccctcctttatctgactgattctttctgaataatgccttttaaccaatcaattgttgccttttccaatactacctatggcctgcccctcccckattctgagcccataaaagccccagactcaaccatattagagggacttttctgcctttgggtagggggaccacccccatgtcccctctctgctgaaagctattttatcactcaataaaactccctgccttattcattcttcaattgtcagcacct

SEQ ID NO: 97037 - DNA, 599 bp, Homo sapiens
cctgtgggaatgagtaagtctaaagtgactaatccactacagcatctcaatctccctaagcctttggatcccttcctctccattaaactgagaaagaccaggcatttctagcttactcacagcgggccatctttcaatccatatttcagccaaccaagcaaataaactgttagaaacttttttttaactccccaagctgcagcattaaatgcagagtccctacttagtgggctcaaatcaataaattcagcctgatccaacactatgtttcttccaccattatcccacacccttaaaatccattcccatacctgttctccatatttctgtatatataaattacaaaactcaarcagtacttttcaagtgtagcacatgtcctcatgggtcacactcaacctcacctctaggttcctgctgggactttagttataagtttagaagcaaataggggtgttgggggttgttcttgcagagaatcaacattatcttgcctggcaaatgcctcaggggaggtcatcactgttgcttcaggtagcacagagtttatctcctcagacaaaggtggaaatgctgatggcagcatgtgttggggaggg

SEQ ID NO: 97038 - DNA, 665 bp, Homo sapiens
tcctcctggcaagggctgggaggtgtggttcgcaaattaaacagccaagcacaagtgatccttgagtgttccttccccactaagtgtctcttcagaccagtcacgtcaccattgcattgaggaaactgaggcagcttggcaggctcatctccctgtgatgtcagaactggaggtggcagactccttaggagaccactttttagaataaaggatgtcttctgtgtctagaaatggctcccactccttccctgccctctgtgaggcctcacttccttcctcaaagccacactgtgatggtggaggggtctatcctcaccttactgtgaggttttggcagtargagaaaaacttctaggtttggtatagagtgaaaaattttatagtggaaaattctattccatggcaccgtcttacctaatacattaaacaccctggctttaacagctggggcatgtgctctttagctacttcatgcccaccttccgtccttccacccactcacccttagaaaaaagatcttgcctattgttttctcagagaagctagttcaccatacccaaaatgctacagtcttagtatcccaataaagatctttaaatgtattttggtagctgttatttaaacaatatgttcagtggataaagacttccttattttgcgtgcat

SEQ ID NO: 97039 - DNA, 553 bp, Homo sapiens
ggctgctagcaaaattgtgaagtaggtgagatttggttttggggtatcctctcgccatctcaccagaattcagctttcagtgcctccctttgccagattttttacctctagtatctctcttctgtcattttctgcacacatctactttctagcttaatatttggaatctaaacaactcagaatccttaatagaatcctttctaggaaatgaatgtctcatttctgctgggcttgcagacttctgaggtagcaccagtgtccaagtwgaaggcagtctatattcttaagggaattttcttttttaaaaggaaacctcatttctactggtaggccagagatagtagtataccctggaatggacaagaaaattggaaactggacttatcccaggcacataggcagaaactgatgtcgtcagatccttgtgctgcttattcctttttgttctcattccataactctttctctgttcctatattaatctcgggtcagaaataggcctacttaaattttagtaccttgagagcctgttcttcctaacagaaatttgcat

SEQ ID NO: 97040 - DNA, 276 bp, Homo sapiens
gagaggttgatatacaaatttaggatattcagagaatcccaaaaatattctatacaagatgaccatcctcgcaacataatcatcaggctctccaaggtcaatgtgaaagaaataagtataaaaggtgactagagataagggcaatgtcacatacaaaaggaacctcatcaaactaacagtagatttttcagcagaaaccttacatgccagaagagartaagggtctacattcagcatccttaaagaaaaaaattttccaactgcaaattttatatc

SEQ ID NO: 97041 - DNA, 627 bp, Homo sapiens
tggggtatagttttctttccttgtaatatacttaaaaaaacttattcttactttggtatcagaataatgctggcctcactgaatgtaaggaagaatttgctctttgytcttcctttatttcaacttaggttttttgggttttttgttttgttttgttttgttttttgagacaggctcttgctctgtcacccaggctgtagtacagtggtgtgatcacagctcactgcagccttgacctcccagactcaagtgattctcctacctcagcctctcaagtagctgggaccataggtgtgcactaccatgcccagctcttttattttttattttttttctagagatggggtcttactttgttgcccaggcttgtctcatcctcaagcaattctcctacgtcggcatcccaaagtgctgggattacaggcgtgagccagtgcacccagcctcctttactttatgaaaaatctttcagggctggtataacttcttccttaaactttaaaaattaatttttaatgtttatgggtacattaaaagtatatgtatttatagggcatttgagatattttgatacatgtatacaatgtgtaatgctcactgtaaataaggtaaatcagggtaaatggg

SEQ ID NO: 97042 - DNA, 627 bp, Homo sapiens
tggggtatagttttctttccttgtaatatacttaaaaaaacttattcttactttggtatcagaataatgctggcctcactgaatgtaaggaagaatttgctctttgctcttcctttatttcaacttaggttttttgggttttttgttttgttttgttttgttttttgagacaggctcttgctctgtcacccaggctgtagtacagtggtgtgatcacagctcactgcagccttgacctcccagactcaagtgattctcctacctcagcctctcaagtagctgggaccataggtgtgcactaccatgcccagctcttttattttttattttttttctagagatggggtcttactttgttgcccaggcttgtctcatcctcaagcaattctcctacgtcggcatcccaaagtgctgggattacaggcgtgagccagtgcacccagcctcctttactttatgaaaaatctttcagggctggtataacttcttccttaaactttaaaaattaatttttaatgtttatggrtacattaaaagtatatgtatttatagggcatttgagatattttgatacatgtatacaatgtgtaatgctcactgtaaataaggtaaatcagggtaaatggg

SEQ ID NO: 97043 - DNA, 627 bp, Homo sapiens
tggggtatagttttctttccttgtaatatacttaaaaaaacttattcttactttggtatcagaataatgctggcctcactgaatgtaaggaagaatttgctctttgctcttcctttatttcaacttaggttttttgggttttttgttttgttttgttttgttttttgagacaggctcttgctctgtcacccaggctgtagtacagtggtgtgatcacagctcactgcagccttgacctcccagactcaagtgattctcctacctcagcctctcaagtagctgggaccataggtgtgcactaccatgcccagctcttttattttttattttttttctagagatggggtcttactttgttgcccaggcttgtctcatcctcaagcaattctcctacgtcggcatcccaaagtgctgggattacaggcgtgagccagtgcacccagcctcctttactttatgaaaaatctttcagggctggtataacttcttccttaaactttaaaaattaatttttaatgtttatgggtacattaaaagtatatrtatttatagggcatttgagatattttgatacatgtatacaatgtgtaatgctcactgtaaataaggtaaatcagggtaaatggg

SEQ ID NO: 97044 - DNA, 627 bp, Homo sapiens
tggggtatagttttctttccttgtaatatacttaaaaaaacttattcttactttggtatcagaataatgctggcctcactgaatgtaaggaagaatttgctctttgctcttcctttatttcaacttaggttttttgggttttttgttttgttttgttttgttttttgagacaggctcttgctctgtcacccaggctgtagtacagtggtgtgatcacagctcactgcagccttgacctcccagactcaagtgattctcctacctcagcctctcaagtagctgggaccataggtgtgcactaccatgcccagctcttttattttttattttttttctagagatggggtcttactttgttgcccaggcttgtctcatcctcaagcaattctcctacgtcggcatcccaaagtgctgggattacaggcgtgagccagtgcacccagcctcctttactttatgaaaaatctttcagggctggtataacttcttccttaaactttaaaaattaatttttaatgtttatgggtacattaaaagtatatgtatttatagggyatttgagatattttgatacatgtatacaatgtgtaatgctcactgtaaataaggtaaatcagggtaaatggg

SEQ ID NO: 97045 - DNA, 522 bp, Homo sapiens
aaactcaattcagaaaaatacaaaacaagattaaaagaaaaaacccacaaacctccacaaactccaatcccatcaataaagaatcaaacaacttttagaaaaaactaggtgctcaatttattaagtcacacatgctgtaamcaaatatgaccaatattctccatgcactcttttctagtccttggtttagaatagtaaattggcttagtgcccattgttgcctagtataatcttaactgaaagaccttaactgagatccttgtttgaaagttctgggaactgataggcttaaatagagccatgggttggagatgtgtgagaatcaaaatatttaacctccatatgatacagagactgaccaatcagaaaagatgctgcttgtgaacaacacatattgtagaactaatgcctaccagctggatgtcagctctcattgtttttgtgaggattttgctgaggtggcatttactctggtgaattcgattaaattaatgggaggcaaatcaaacctcccttttaaac

SEQ ID NO: 97046 - DNA, 522 bp, Homo sapiens
aaactcaattcagaaaaatacaaaacaagattaaaagaaaaaacccacaaacctccacaaactccaatcccatcaataaagaatcaaacaacttttagaaaaaactaggtgctcaatttattaagtcacacatgctgtaaacaaatatgaccaatattctccatgcactcttttytagtccttggtttagaatagtaaattggcttagtgcccattgttgcctagtataatcttaactgaaagaccttaactgagatccttgtttgaaagttctgggaactgataggcttaaatagagccatgggttggagatgtgtgagaatcaaaatatttaacctccatatgatacagagactgaccaatcagaaaagatgctgcttgtgaacaacacatattgtagaactaatgcctaccagctggatgtcagctctcattgtttttgtgaggattttgctgaggtggcatttactctggtgaattcgattaaattaatgggaggcaaatcaaacctcccttttaaac

SEQ ID NO: 97047 - DNA, 522 bp, Homo sapiens
aaactcaattcagaaaaatacaaaacaagattaaaagaaaaaacccacaaacctccacaaactccaatcccatcaataaagaatcaaacaacttttagaaaaaactaggtgctcaatttattaagtcacacatgctgtaaacaaatatgaccaatattctccatgcactcttttctagtccttggtttagaatagtaaattggcttagtgcccattgttgcctagtataatcttaactgaaagaccttaactgagatccttgtttgaaagttctgggaactgataggcttaaatagagccatgggttggagatgtgtgagaatcaaaatatttaacctccatatgatacagagactgaccaatcagaaaagatgctgcttgtgaacaacacatattgtagaactaaygcctaccagctggatgtcagctctcattgtttttgtgaggattttgctgaggtggcatttactctggtgaattcgattaaattaatgggaggcaaatcaaacctcccttttaaac

SEQ ID NO: 97048 - DNA, 481 bp, Homo sapiens
gagaagacagcttcactgcattccaaaacgtctttcttactctcttgaggatgccagatactatgcagatatagtctttaactcaaacctaagtaaagatgcagacaacttgaatgggtaccacactaagatgtgaatagttgtgaatragatcacaagcccaccagacatttgcagctggagaaatgaaattgttattagagcaggagaagactgtgtagaagaagaaacaatggtctacatcacaattttgtcttaagttgatcacatattttttgtctaaatgtggcaggtttccctatgagttagcttagctgtgtgtatgcatttgtggtttctatgtcattttttaaagttgtgtgatataatctagtacaaatcattagaaaatgtatctaaattttaactctagtctattaacaccaatttatctgtttcttgcatgctttctattaagaagttctactaaagatagttaagt

SEQ ID NO: 97049 - DNA, 596 bp, Homo sapiens
tatcagtcaccctaaaggttcaacacattaaagagacacactgattgggaataatattatgggtagcagtgaacagtgaagctgagaaggatataggcagattagtaaagtacttcatggaaatatcaaaacgtttcctacccaagagactgaagactgtgcattcagaaagtttcctaaattacaagagcaaaaatggtggaaatcaattgaagagaaaaaaaagtgttcagcctaatggaagcgattagcattgatatgtggtgtcttgctctctgatgccacatcaaattggtgagaggttttagaaaaagggtcaaataggatataatgcataagctttcacctaagtrtggcaaagcatttagtaggtacactacttgaaattcaattctagctctgccactaaccagttaggagaactgttgaatcttcacatacctcaccagggaaccgtggggataatagctaccacctttccatcaacacactttgtgcttctacaccagataaaacacacaaagatctggtttttctgctagccagagtgttaggaaatgtttctaatagttcttcattctgtcttttcgcttttc

SEQ ID NO: 97050 - DNA, 618 bp, Homo sapiens
tacgtgcacatctttatgggtcaataggattataatagtaatgtacacaaattattgtttaaatattctcatgagcttttttttcctataatttttgttaatctaagggatgagataactagttcttccatttcctcaaaaaactactcagtaaaactacaggattcaggcaataaaaatatatggatacattatcaaataaaaatttatttcaggccaggygcagtggcccacacttttaatcccagcactttgggaggctgaggcagacggatcacttgaggtcaggagttcaagactagcctgtccaacatgatgaaaccctatgtctactaaaaagacaaaaaattagctgggtgtggtggcacaaacctgtaatcccagatagtggagaggctgaggcataagaatcacttgaacctgggaggtggaggttgcagtgagccaagatcgtgccactgcactccagcctgggcaacagagtgaaactatctgaaaaaaaaattatttcaactctcattctttgagtactaatccatcatttgatacaacattgtgtttatgctccactaataaaaacatcttattagatggcaaatctttaaacttattgtattt

SEQ ID NO: 97051 - DNA, 618 bp, Homo sapiens
tacgtgcacatctttatgggtcaataggattataatagtaatgtacacaaattattgtttaaatattctcatgagcttttttttcctataatttttgttaatctaagggatgagataactagttcttccatttcctcaaaaaactactcagtaaaactacaggattcaggcaataaaaatatatggatacattatcaaataaaaatttatttcaggccaggtgcagtggcccacacttttaatcccagcactttgggaggctgaggcagacggatcacttgaggtcaggagttcaagactagcctgtccaacatgatgaaaccctatgtctactaaaaagacaaaaaattagctggrtgtggtggcacaaacctgtaatcccagatagtggagaggctgaggcataagaatcacttgaacctgggaggtggaggttgcagtgagccaagatcgtgccactgcactccagcctgggcaacagagtgaaactatctgaaaaaaaaattatttcaactctcattctttgagtactaatccatcatttgatacaacattgtgtttatgctccactaataaaaacatcttattagatggcaaatctttaaacttattgtattt

SEQ ID NO: 97052 - DNA, 525 bp, Homo sapiens
gcataataataaatgaataatcaaatctcatgcttcaagaaatagagtaattactgccggatttaggaaccagagcctacctcctccataaatagcattgtccaaatcactggaggctttgtgtataaatgtgtgtgtgtgtttaagtatgtgtgtttatgtgtatttgtgtgcaagggagacaaatcaggtatattaataaaaatcttggagtgagacacaatatgcctcttcctcctaaacttctggtattagtcagtagaaaaaaatcagagcctaagatgcatagagttatagtctacttgggaataataaatcccagattttcattgtctatcctgcttccttgctcactagagaataatctcccctgagactgtgcccaggtcaaaagtgccaaatagcattcattaaagagattgcttctagaattcctcttgmaaaacacttatttctcccttttgtggttttggtacatttgacaggttggtagcaaatctaacatttttcactgtaccaccactt

SEQ ID NO: 97053 - DNA, 591 bp, Homo sapiens
tagatgatctggttaaggtgacaaatcttaaaacaaaccattactgaacatttataaaatattcttttaaaagttgacagagctagaggagggataagtgagttaaaatcttccttgaggagatgctgctttggttgagtcttaaagtcaagatgttactgggtttgtacaaaagtaattgcggttttggccattaacagtaatggcaattacttttgcaccaaactaatagtttgacaaggttggataaaggacccaaatcaaactaacacacatgaaataataatcacagcatgaaataatgtctcattcatgttgtaggaagctcagtactgaaataaagcatttaaagaagttgcaagactgagaataaagatttagrtagtggtttgcgtggtaaactaagctgaactgaatttttaggtttactatgaagggacagagaattaatgggattatttcaataattttgaaaggtcacttaaggagcagtcaagtggatgaattaaagggaggctaagctggagaacagggagaattctaattacgtaaatcaagaaaaaaatgatgacacctgaattgaacagcagt

SEQ ID NO: 97054 - DNA, 521 bp, Homo sapiens
ttttatgtgctttagagatgcctatttaattggtgaacttaataaaaatagtcaatgataataaagtcacttcttcacttgcccccaayagattttatatcagaaaatgatgaatgaaaccagttaaaaaaatgttcattattgtcagagatatgtgtttgttttcacgtttcaatttttgataaatcttataatacatagtttttaatgcatttaaatgaagtctaattttattttactactttgccatgtttaaatgcttacttgtgacttttggctatgttgtagcaagtatgcctttctttgtgcatcattagtactgtgctactctttttctaatctattcatattcaaaaatcatgttaatgctcatctttattgatgctgatttaggttagtaaaatttaggcttttacttcttttcagaaaagtgaatcaaaatgttcattttttagtctgtgaggctggatatcacatctaatcaattaacttttttaaaaaacaagttttatctgctttga

SEQ ID NO: 97055 - DNA, 537 bp, Homo sapiens
ggcactgaatgcctgccacacagcccctctgctccccacttcactttaattaatattcgcccacccccaaatcctcaagccgaacaaggcatccctctcccaccctcagagctctcctctgtcatcagaataaaatttatcgagcgcctactctgtgcccagcgtgtgctaggcactgcagggagcaggcctgaaaaggccaagacagtatccaatagaatattgtttcatttcagtaacaatggcctgaggtggggaacaattatccggataattgaagcaaatgcttcacctccctccctccctctccagttctcctggcacttactattttttactaccctattcagagawgtggtttttgtattggagggcgggcgggggaggcaggagtgtgtaagaggagggttgaattattcacatgcataccaattccccacttcccttggcctaaattttctgaaagcttggagccaaaatagctgcttagttatgggagcaaagacttaaaaaaaaaaaagtcactaaaataagagc

SEQ ID NO: 97056 - DNA, 564 bp, Homo sapiens
aatgagtaatatatgcttattgtcacaagccattgaaattttggagttgttatgcaacattattgcagcaatagctgactgataaactggcttaaaaatcatactctcagttaattggtctgtttcactttaaaacttgtcctctttattacttactacactactataacacaattcagtctacagttatgaaaaatattagtgttaattgaaatcttttcagtgtcttgattaacttatttttgcttcctacgttacgtatttatatataaatatatatttatacatgtatatatttttatgtgtatatatgtatatatgtgtttataaatatgtataaaatatatacatatgtattttaaaccatcatcttttaatagtgtccttgggcatttatcataaaatctaatgaacttggcatatccatactggtaactttaggactgagctatcttggtataggatatagtkcttacactttttaaatgagaaagagatagtattagcactccaggagaattatttaggatattgccaaagagttacactccaaataattaaatc

SEQ ID NO: 97057 - DNA, 621 bp, Homo sapiens
acaggtgtttgccaccactcctaattacttaatttattttatttgtagagaaagggtctcactatgctgcccaggctagtctcaaaatcttgggctcaagcaatactcyggccccagcctcccagtgtgctgggattacagatgtaagccaccatgcctaaactattttttttttttaatgtaagaaggtatccaaaaaggtaaaagcacctgaggctcatgaaaatcatagtacgggcctagtggaagaaacaagccctgaccagccagacaaaagccacagcccctcaaactcagccttgttcccaatctcagcaacctttctttttcacttaactacaacccctggattgacagctacagtttcagtcctattcttatcttaaagactaatccctcttccaaccccaggctggtccctgaggaaaaccgctctgaggaggaacctaaggatactagaaactcagcgttcaacaacccagtaaagtacaggttgagtattcctaatccaaaaagccgatatctgaaatgctctaagatctgaaacttcttgagtaccagcatgatgctcaaaggaaatgcccattggtacatttcagaatttgaattttcagattttgg

SEQ ID NO: 97058 - DNA, 621 bp, Homo sapiens
acaggtgtttgccaccactcctaattacttaatttattttatttgtagagaaagggtctcactatgctgcccaggctagtctcaaaatcttgggctcaagcaatactctggccccagcctcccartgtgctgggattacagatgtaagccaccatgcctaaactattttttttttttaatgtaagaaggtatccaaaaaggtaaaagcacctgaggctcatgaaaatcatagtacgggcctagtggaagaaacaagccctgaccagccagacaaaagccacagcccctcaaactcagccttgttcccaatctcagcaacctttctttttcacttaactacaacccctggattgacagctacagtttcagtcctattcttatcttaaagactaatccctcttccaaccccaggctggtccctgaggaaaaccgctctgaggaggaacctaaggatactagaaactcagcgttcaacaacccagtaaagtacaggttgagtattcctaatccaaaaagccgatatctgaaatgctctaagatctgaaacttcttgagtaccagcatgatgctcaaaggaaatgcccattggtacatttcagaatttgaattttcagattttgg

SEQ ID NO: 97059 - DNA, 621 bp, Homo sapiens
acaggtgtttgccaccactcctaattacttaatttattttatttgtagagaaagggtctcactatgctgcccaggctagtctcaaaatcttgggctcaagcaatactctggccccagcctcccagtgtgctgggattacagatgtaagccaccatgcctaaactattttttttttttaatgtaagaaggtatccaaaaaggtaaaagcacctgaggctcatgaaaatcatagtacgggcctagtggaagaaacaagccctgaccagccagacaaaagccacagcccctcaaactcagccttgttcccaatctcagcaacctttctttttcacttaactacaacccctggattgacagctacagtttcagtcctattcttatcttaaagactaatccctcttccaaccccaggctggtccctgaggaaaaccgctctgaggaggaacctaaggatactagaaactcagygttcaacaacccagtaaagtacaggttgagtattcctaatccaaaaagccgatatctgaaatgctctaagatctgaaacttcttgagtaccagcatgatgctcaaaggaaatgcccattggtacatttcagaatttgaattttcagattttgg

SEQ ID NO: 97060 - DNA, 572 bp, Homo sapiens
gatgagggcctccagtgcctgtttttgcttagactagtgattctcagccctggtagggcatccttatctcctggggagcttttcaaagataaatgatgctggrcccttgccaaaatctgaatctccaaggatggagcctaaatatatctatgtgtatgtcatctgcatactgctggagttgtgagccactgacttagatggtgaagctgaaatggtctcccacaaaattgcatacacttgagtgcacacacacacacacacacacacacctgggatagccaatcaagcttgcccattttttcttataaacagaagtgtttgttcacagatattctgggaatattgggttctcagaatctttacattcttcaaccattttaagatcagtctctaggattttcttaaacctgagtactattgcaacataggattcccaaacaccatgaccttcttacagagttttcctgagagtagatgaaccctccctcactgtcctgtgggataactggaaggacaacccttcatttgcattctatcctccgccctgcaatattctctggaatccacattcc

SEQ ID NO: 97061 - DNA, 329 bp, Homo sapiens
ctgactgttaaaagagaaacaaacaaacaggaagcaacagcaacaacaacaaaaaagaccccacaaaaacccccattcaaaggccagcaacctcaaagattgaagataaacccacaaagatgagaaagaatcaatgcaaaaacactgaaaactcaaaatgccagagtgcctcttctcctccaagtgactacaccacctttccaacaagggcacagaactgggctgaggctragatggctagattgacagaagtgggcttcataaggcaagtaataatgtgttgtgggaagtcagggactccgaacagagggaccagctggagctgcagc

SEQ ID NO: 97062 - DNA, 565 bp, Homo sapiens
ggtctatcaattttgttgatatttttaaaaaggcaacttttgttccattgatatctattaattttctyttttaaactttattgattttttctcagctttattatttcctttcttctgcttactgtgggtttattttgaacttcttaggtggaagctgagattatttatgtaagacttatttcctaatataagaatttaaaaatataaatttccctctaagctaactaatgtagctacaccatgcaaagttttatctgtggcattttcatcttcattcagttcaaaatattttaaaattccctttcatatttcttctctgatcattgggtgacttagatggatgttgttcaatttacaaaaaagttgggaatttttccagattatctgttattgatttccagtttaattctactgcaatctgaggacatactttatatgatgaatattcttttaaatttgctgaggtttgtcttatgaccctaagtatggtctacattggtgaatattccacacacatttgaaaagaaattgtattctgcttttgttgggtggaatgttttataaa

SEQ ID NO: 97063 - DNA, 400 bp, Homo sapiens
tgaaaaaacatcacaattcaaagtaccaacaaaccagcatcatgtttttttgttctggcagcccctggcctcaactcaaatctcagaagcctggctcaaggagcaggaaaggtaatatctaaaattcaggggtggaagaatatcccgtttcttctttcctttttcttcattctcatgttcccagcctccagataatattgtggcagcaatatagcctggcaatgaaagtatgcaggagccaaaactctgagagaagggaacattcttctctattggaygcagatatagctccaagagggcagggccaaatcccattgcttttaaccctttctttgtccttctgctggacatagtataattatggaaggggcagttttgggctggaagactgaaaatatgt

SEQ ID NO: 97064 - DNA, 634 bp, Homo sapiens
ttatagaaaagcaagaggagtttaccttaattcttgtggcaatgatttagagttgaatacattagtttgaaatcatgctcacgttaatatggatacagatttttcatgtattaaatatttatagacatgtgtacatatacaggttagtaaacacacatatctccttgttctgtcagctgagagggcctagaaacaacaaattcccaggagcaaagagcacttctagcagtcagatttaggtttctaaaaccattttccagtaaattaaccaagtgtctttggagaaatgattctaggactgaggcaaggagtatacaaaatgagccaaagcatcttttagtgccagaaagttataaagtaatttaaaaaccctacattgatggaggtgtgtcaaagggaccaaggagccagcagaaagaactcccaatggccaaagctgaatcaatttgaacagcaraataaagtagtattggattataacctcaagtataaaataaatttccatgagttcttatcgatataaataaatgatttaataaataaatggggtaaagagacaattaccccttgtagaagaattataaggaagggaatataaattcccatttcttaagtgtggagtagaggaatagaa

SEQ ID NO: 97065 - DNA, 569 bp, Homo sapiens
actgtactgagccaagaattttcttaagtgttatactggattcaattatattgtgagacaaataatgtacatgttgggagtaatggtctgtctctgttgtcatgcagtacaaaacctcacacaccaaaagaaacggtgtatattcaaattctgattcttcttctcattagctgtgtaaccttgagaacgtctcttctctgccctgagccttagtttcctcatctgtccaatatacataatatcttccttaaaaggcaagcacctggttcacactaagtccacaaatrgtagcagttatttttaatcaataatcataaccaggtgggattcttattttcctcatcaaaattaaaatcaagttatgccatgtattaaaacaattctgtcatttctgctcctctcaagagcagatgcttcttcaaattgatttatactagtgaaaatgagattaatttcactgatacattcttccatcaggtcccattatttactcgtattgatcatctatgataatcaagttcacactactggataggcctccaggaaaaagagatggagcactaacattt

SEQ ID NO: 97066 - DNA, 494 bp, Homo sapiens
tgttcccctcacttccccagccagcaatgtcacctatgcctagataggccaccctcaaagagatgggggaagttgttgtgttatagaagtaatgaagctcttaaatctaaaaacgtgtgttcaggtggtactgccctctacaatctatatgtacatgggcaagtcattgagtttctctgaacctccgattgctcatctgtggcatgtggatagggccattgaccctagagtttgtgtggtggatactgtggtttgcttcatccagtacccattctaatctccttctaacttgccttctgttctaacagcaaaactacatttcctgaactttcttccagaaagggtacagtcatgtgacataattctctccatttatacacagccattcaagayttctaaacagaaactatcatgaggcagtggccacccagggagagcaaatattctggcaggatcactagtaagacttctggttcttctagagcagtgggggt

SEQ ID NO: 97067 - DNA, 578 bp, Homo sapiens
accacgatgtctggctatttttttttcttcattttctgtagtcatggagtgacactgtgttgtccaggctagtatcaaactcctgggctcaagcgatcctcccgcctcagcctcccaaaatgctcagactacaggcatgaaccaccatgcccagctagctaatgagctctttaacagaactcataaacatgtctagaatgtgtatttttatctttactatgatcacaagcacctgccaaggktctatttgcatatgcattatccatgttagcatatgtcccttttgtgggagggggactgctcctaggcatggcttggacttttggcctggctccagtccctccttgcttttgctaaccccttcctctcttggggagtagagtcctacccaaagtctgcatcggggggtctacaccctccagcatggtttgcctggaactccaaatcctgttgcatgcagatttctgtggccatgttctttcctggttaaaggcctagtcatcacatcacatatcctctgcttggctgattagactttcctccactggttgctcctggggtcctggctctttttaccc

SEQ ID NO: 97068 - DNA, 590 bp, Homo sapiens
gtcacagttgcttttatgagtttttaaaagggagatttaaaataacagagactagaaaaacaataaatgaacccaaggaaactagaagaaaggaataaatgtgtttcaaacaattaacaaactgtaacacagaaatatggtagaattgatttaaaaccatacatggttctttgaaagggggagaaatgtaaactttgaaaaagaattgaattaagaaaacatttaacatcaggcctgagctaaaacctayagacacaaatgaagaaacttttaaattattggggaaagatgaggcagatgttcagagagatatgaaggaaaagtgagggaatgggaggaggaggaggaggaagccaggcttgtccctcctgctgcctgtctggtcaattcttccttgaattccatctgatgctttaatttcattttttgctttagccatcttgaagttgatttctactaggtacttgtaattaaatgaccattactaatacagttgtgaaaatagcaagttacaaagtagttactttaatatgaccctatttttgtgaaagaaaattgtgtgtaaatgtctataaaacaaagcctggaag

SEQ ID NO: 97069 - DNA, 557 bp, Homo sapiens
ctctcattccctgttaaaggtatcaaagactattttgtatcaggattctgccttctggtcacatgaagaaaagctaaacctcaaactggcacagttgaaaataagtacctgattttgtatttcagtgtagactggggtatatttgactcttttccagactaatgttattgattttgatcatgtgtttggtgtgtgtttgtgttgtcatagactccttttagaaattatgcagtcatttttattttccacattactcatctccattctcgaggtcagggtttctcagcctcagcatggttgacattttgagccagataattcttcgtgggggcaagctggtatattgcaggacatttcacagcatcactagcctctacccactagatgccagtagcacctttcccctatactgtgacaatcaaaaatattcagaaaggaagggggttgggaaggtgrcaaaattgcctcaagtgaaaaccactgctctaggtggccagtgcaacgtgatggctatgtttttataactccttccacagctttataactatatattaaaa

SEQ ID NO: 97070 - DNA, 578 bp, Homo sapiens
caaagctaactgtgacaactcctaacatagcttttctttcaaaatttctgacattcctatgcatgatagcacatgaaaaaacaggatgcgtttcaagaagaaaacatgaaaacaatcatagtacaaaaaaaaatcaaaactctgaattccagtcgtaacctcagcagaaatacattctagctctaacagtaagactcgccttctcataatgcttaggtttttttttgttttgttttgtttttagatatttcagatgcatagatgtctttcggggtgcacttaaaatttgtagttcaactggactgttgaataatgacaaagattacacaaaaataatgtactcattttagggaacttccatagtagrtatcattttattcattactcctaaattcattggcaggtattaagcatattctgtactccttctggtcactgtactgagctctgagatacaaagataacaaagacgtgagccatgccaccgaggaactcgaacaccctaacagcgacatagcaaatgcatcactatgccactgtaagatgcggtacagggaagcattatggtgatccctaca

SEQ ID NO: 97071 - DNA, 556 bp, Homo sapiens
gtgatcctcagcatccccaggagctgggactataagtatgtgccaccatgcttagacaaatttttatttttagtagagatggattttgccacattggccaggctggtctggaactcctgacctcaagtgatccacccaccttggccttccaaagtgctgggaggtgtgagccactgcacccggccaatgatagcttttttgatcacacagaagaatttggccttctcctcaacccaaataagagaataactaaaaatccaatgcatccaaytaaaacatagttaagatggaattaaagtcatgttagacaaacccttgtaattttcaatgcattttcttctaacagccaagatgctttggtcacagcatttggctgagatgaggcacaggcattgtcatccctatttgacatttacaaagaggtaaggagcccagactgggatctgagtacatgcattcactgacagttactgagcaccaatcagatgccagccgcttggccaggcacggggcatactggtgtgaacagaaacagacatgctctcatgaaacttac

SEQ ID NO: 97072 - DNA, 626 bp, Homo sapiens
atgttggttctattattatccttgtattcaagatgaggaaattaaagttcagagaggttaagtaacttatcttatatcctgcagatagtcagcatcagggctagaattataacccgtcaattttattacagaacctgagctcttaacactgggctctgctgcctgagggtgactgtccttcatctcttggaggacaagtggctgccccaagtgcctgtcaccccagcaggcacatgctggcctcrtttgtcctgccctgttttgttctgttatgcacaactaaactatgacatagatatggcacagatgacctagagttacgtaagtctccatatgcaacctcaggtttcttggttagttaccttcatgagcacttgtttggcacatagtaggcactcaataagtatttaaatagataaatggatgaactgaattgtagcatggaagtcctttacttcactgcattgcttttcaaggaatatatgtgcactctcatattgcccttaatattacactacagtgaaaatttcccagggctaaggttcagtatttccttgggcctaaaatgagtctgtttgtgaaatggattctgttttataaacaccagataactcaggttatttcat

SEQ ID NO: 97073 - DNA, 590 bp, Homo sapiens
acgaaggatgagaaaaagtgagccatcagatacctgaaaaaaaaatcattctagacagacagcaagtgcaaaggccctgaggtgggtgcatctctggtatagttgaggatcaccaaagaggccaggaaggctgaggctgagagacaacagggcatccagactatgtacaaccttaagtcatgacaaagatttttgcctttttttctgggtgagaargaaagacattggaggattctgctgaaggaacaccttgacccaatctacttgttcaaagcctccctctggctactgtgctaagaagagactgtaggaggacaaagatggaagcagggagatgtcttaggatgctgtgtagatcactacaaaatatacagttagcttagattggggggttagtggtaaaagtagtgagacatggaaagattctgggcatagtttgaggaagagacaagacttcctcacccgctacatgtggtgtgtgaaaaaagaggggagtcaatggtttttgttctgagcaactggaaaataagtggccatttcctgaaaggggaagactgtgtgaggaacaggctggggtgtggggcagattt

SEQ ID NO: 97074 - DNA, 528 bp, Homo sapiens
tgctagctacactgtgaggtattactattactatacttactcagttgataaatatttattatcttcaatatattgggcatgtgctaggtattggagatactccaatgaataagccagataaatagctctgtactaatgagcctcccatcatattagattttacggatgggatcactgacactagaaatattaggagacttcctaaagatctcactgatagtaagtgstagggctgggatttgtaggcaggtgacctcagaatccaccctcctagcctccacacctccctgcctctcttctgcagtcccacagtgtcctggcataaggtcactcttcagtcctgacttcacgggactctccttggaactggacactattggccactcctttccttttctatatgttctgctgcaggacccatgacatcattctctccctgttttcttctatctctctggttgttccttctcattatccttttctgctgcctgacttctgataatggctctccagaagttctgcctcagc

SEQ ID NO: 97075 - DNA, 649 bp, Homo sapiens
ttctagaaaaagagcagggagttgctgatctcttacctcactcargtgtttgtctctggcagtggctgagttccaccaggacagaaactctcttcctccacagctctggctctcactggccctagaaacactcctttcttctcttgctccttcatccctagggtttgtgatggcttattaacatttttagtctctggaagtatcaacaaccttggtttgtgcttttgtaagtagtttctttatttgaaccatatggggtgttttctccaagctccttcctgatataaaacattgtaggagcttaagagaaggttgttaactccatctggggaagttagagaaggagtatatttttgcattgatacttaaaagataaataattactttccagacatgctggcaggaggagacaattacagatagaagagacagtttctacaaaggagaaaagtatgagacaacatgctatgatcacggcattatttataaataactaactatttctgagtatgaagtataaggcacaggtcatcaagagtcaaatgcttgaagttaatttagctgatgttctctaaattgactattttagacaatttatcaaatcttgtaaaagtttcttatttttaaaaattatgataacaaaaactac

SEQ ID NO: 97076 - DNA, 625 bp, Homo sapiens
accctagttttttaccccacttattaaataaatgaatggatataaaaggcatttttaacatatgttcagcataatatctaccatgaccaaccctagataaatatagttgtaccttggtatccatggggattggttccaggaccccccataaagagcaaaatccatggatgttcaaattctttctataaaatggtgtagtatttgcttataacctacacacatcctcttgtatactttgaatcatctctagattacttataatacataatactatgtagatgtcaygcaaatagctgttatactgtattttttaatttttgctatgttttgctgtagtgtttttctttattaggttttaattttcaatgttttccattcatggttggttgaagctacagatgcagaactcatgggcctactgtattagtctccttggcattcctttccctctttaaaccatgtaattcagctttaaaaaaattgtaactacttattgccagctaaaatgaactcagaatcagttacactgaaaacataagtttccaagtaatatgagtgtttgcaaaaagaaaactaatttatggggttctacttgtataattattcttcttctgtattggcccat

SEQ ID NO: 97077 - DNA, 625 bp, Homo sapiens
accctagttttttaccccacttattaaataaatgaatggatataaaaggcatttttaacatatgttcagcataatatctaccatgaccaaccctagataaatatagttgtaccttggtatccatggggattggttccaggaccccccataaagagcaaaatccatggatgttcaaattctttctataaaatggtgtagtatttgcttataacctacacacatcctcttgtatactttgaatcatctctagattacttataatacataatactatgtagatgtcacgcaaatagctgttatactgtattttttaatttttgctatgttttgctgtagtgtttttctttattaggttttaattttcaatgttttccattcatggttggttgaagctacagatgcagaactcatgggcctactgtattagtctccttggcattcctttccctctttaaaccatgtaattcagctttaaaaaaattgtaactacttattgccagctaaaatgaactcagaatcagttacactgaaaacataagtttccaagtaatatgagtgtttgcaaaaagaaaactaatttatggggttctacttstataattattcttcttctgtattggcccat

SEQ ID NO: 97078 - DNA, 600 bp, Homo sapiens
acaggtggctctagggagggctgcaacaagtacccaggccaggccatcagaatgtagcaagaagtctttcattagtatggtccagagtacacaaaaacagggcacaaaatcagtacttgaaggctgggaagccttcctggaagaagtgacatttcagcttagaaataataagaactctctctcttgtacaagatgtttcagatgaactattaaaagaatgggaagaaggagaggcaagctatggcaaatgatgctgatcatcccagtcatccccragacttttacatactttctcaaatgagtgttccagtgttgtgtgagaaatctgttttagtactttaccagatcttgggtatgtatactaggacgtgtagcaagatagaactgtgctaagcaccaccctccttttctctcccaactggccacccttccattatgttcccttcagggggcacgctttgtgatttattttttctttcaaggttgaccttattcattttaaccagatgttgactatttttgaaacatggccaagagaatgagaaggcaagccacaaactgggggaaaatatttgcaaaagacacacctaaaaaagaagg

SEQ ID NO: 97079 - DNA, 571 bp, Homo sapiens
aatatacacactaaaaaatagcacatttaaaaaaatagcacgagccatgtaatcttgattttttaatatttcaatgtggaaaattatttttcacatttctttttctgcagagattttcaaatattatgcatcattttagacttagttattgtatatggattaagatcttttgttttcttcttgagaccgggttccactgtagcactcaggctggaatgcagtggcaagatcttggctcactgcaatctctgcctcctgggctcaaatgatcctcccacctcagcctctgagtagctgggactacaggcgtgagtcaccacacccagctattttttgtagagagagggtcttactatgttacccaggcttgtcttaaactcctgagctcaagtcagcaacccaccttggcctcccaaaatgctgggattacaggtgtgaaccaccatgcctggccaagatcttaacttatggataaattcttaactttatctgacaaaattggtttgccagaatgctcattggtgatatttaatgmgggtttactgtgtatgcatatgcttactatgcatat

SEQ ID NO: 97080 - DNA, 372 bp, Homo sapiens
tgatgagggcagagcttaaggagggcaagcagaaatgaacaagtgtttttcaagcttctgttggaggttaaagcaagttacatgactaaaccaagaatcagtgtgggagggtactaccaaatgggtggcctcaggggagaatgaaaaactggggctgttaatgcaatcaacttacctcaccatgaaagggaatgttaacttcattagtgcgaaacatttgaagtagacccagtccctctcttatgatggggaaagtttgaasccagtgacaatcatgcttcagatgaatgtctcaagatcaatagcaatgtcacaagacctatcgcaagccctcagttgaatctctctggtagggagccatcttcggccttg

SEQ ID NO: 97081 - DNA, 608 bp, Homo sapiens
accacagtacccacccctgtgtgttgccatggtgatcaggaaatcctctggcctcacgatctttgttttctgctttttcggatcttattgatttagcagattgactagcacaaacccaggatgtggtaaatgaaatgaaaaaagcatcttggggcccaaatagggtttttcctcttgcaagtagaaaataaggttgggccacttggttttgtcattgtatttttttttctgggtagttacartgactgatacatcacctaatcaatatacagtttctgctaatgtctatagctggcattttgtggaactgcttagctttagtttgagggaagactttcgtaacagttgaggtaggatgagaaactgttactcataggtaatatctatatttcagggctgattcatgggttgctgacatgctgagataagccgggggcccccatctgggagtgggatgcactagttctagcctaaactctgttaattataagctaattatgtgaccttgaataactccctgtagctcccccaggcacaccttgccttcctgccacccaagatgaaataaaaagttatgaaattttggagcttgggggataaaagtgaga

SEQ ID NO: 97082 - DNA, 608 bp, Homo sapiens
accacagtacccacccctgtgtgttgccatggtgatcaggaaatcctctggcctcacgatctttgttttctgctttttcggatcttattgatttagcagattgactagcacaaacccaggatgtggtaaatgaaatgaaaaaagcatcttggggcccaaatagggtttttcctcttgcaagtagaaaataaggttgggccacttggttttgtcattgtatttttttttctgggtagttacagtgactgatacatcacctaatcaatatacagtttctgctaatgtctatagctggcattttgtggaactgcttagctttagtttgagggaagactttcgtaacagttgaggtaggatgagaaactgttactcataggtaatatctatatttcagggctgattcatgggttgctgacatgctgagataagccgggggcccccatctgggagtgggatgcactrgttctagcctaaactctgttaattataagctaattatgtgaccttgaataactccctgtagctcccccaggcacaccttgccttcctgccacccaagatgaaataaaaagttatgaaattttggagcttgggggataaaagtgaga

SEQ ID NO: 97083 - DNA, 485 bp, Homo sapiens
aggccatctgggacatgcattttgagagaggcaatgtccatgtctggcttcaaagcttcaaagcttcaaaggacaaggtgactctcttgttaggtgctaaatgcagctggtgacattaaattgaagccagtactcatttgccactccaaaaaagcccatagcccttatgaattacactaaatgtactctgtttgtgccctayatatggaaaagcaaagcctgaatgacagcacctcttttctagtatgatttactgaatactttaggcccactgtggagacctactgctcaaaaatatatattattttcaaaatattactgttcattaacaatgcaactgggtaccaaagaactctgatagaaatgttcaaggatattaatgttgtttttatgcctgctaacccaacatccattctgcagcccacgtatcaaggagtcattttgactttcaattcttattataatacattccataacgctacaac

SEQ ID NO: 97084 - DNA, 485 bp, Homo sapiens
aggccatctgggacatgcattttgagagaggcaatgtccatgtctggcttcaaagcttcaaagcttcaaaggacaaggtgactctcttgttaggtgctaaatgcagctggtgacattaaattgaagccagtactcatttgccactccaaaaaagcccatagcccttatgaattacactaaatgtactctgtttgtgccctatatatggaaaagcaaagcctgaatgacagcacctcttttctagtatgatttactgaatactttaggcccactgtggagacctactgctcaaaaatatatattattttcaaaatattactgttcattaacaatgcaactgggtaccaaagaactctgatagaaatgttcaaggatattaatgttgtttttatgmctgctaacccaacatccattctgcagcccacgtatcaaggagtcattttgactttcaattcttattataatacattccataacgctacaac

SEQ ID NO: 97085 - DNA, 619 bp, Homo sapiens
gccttgggtgttttcagtttactgagtgtgagggaatctcagatcccagtatttctgaccacactcaacttcctgataagtaccctactttctccactgccggccatggttaagcagtacaggacagcacagcaagtgctctctataccctgacagctccagatatgtcaagaaaacaacacaccaacatggaaaagacatctgcactsacatgcatattgcagcactgtatcacaatacctaaaatatggaataaaactaaatgcccattaagagatgaatgaataaagaaaatgtggtatatatgcacaaaggaatattattaaacctaaaaaagaatgaaatttggtcatttgcagcaacatggatggaaatggaagtaattatcagacattacatttatactaatctgattaacaaacatctattgagcacttgctctgaatcaagtcctatactaatcttttggagtaggtaaatgaataagacatatttctactttcatggagcaatctgagtttggataaattaacatgtaaataaaccataacaaagtgatcaaagtaaaacaagaaacaagaacatatgtcttaggaaggatggagtaattatttgaacc

SEQ ID NO: 97086 - DNA, 408 bp, Homo sapiens
agagttaattgaggccagaataaccacagtgctaaggcttagaaaacttacagtctaattatgaagtttacaatgaatgttaatgattgatatatagttgaggtcatacaagttagaagactgaaaaaaaaaaagaaaagaaaacagaaaaggcttatgtgtaaaagctacaattgccaaaatattggttacatttttattgtccaaaataatgagaggtatccgatatraatatacaaattaaatgtagctcctaccttcaatataatataatagattaagttgataagcagccataactgatatcatggcactaataatcaaataacactgggtttttgacagataatgacacacattctcatgtaattgttacagttactctgtagaataagtatcattatggcc

SEQ ID NO: 97087 - DNA, 588 bp, Homo sapiens
atcacttgggattttatttggaaaatcctcttttgttcaacgttatatgatgcttaatttttaacttagggcatcgctttgaaagtgtgaacaacattttctatgcagctacattaactgcatagaagctgcatgttcactgaattcattaaattcaaactgagggtcaaattgtattcctgttctatccagggctaatccttcttgttttatatcttggaaatattatcaaaatgtactttttttctttctttattcatgatttatttttgtatgtgtttgttattaaaatgtatatatttcaaaatctcctagtatttcacaggatagtagcaatagtatgtaattttagtctttttaataataatgaatcatttaaaatagaactaagagagattattttattacattgtaaggtttcttttatgtatacgtttctaagtcaggaaaaaggctgatgtgrtggttcatgcatttatctttttgattttgttccattttatatcccaaacttttcatgatttcctattttttttctaattttctgcttgatacctgttctccaaaaatatttccaagaagttttaa

SEQ ID NO: 97088 - DNA, 519 bp, Homo sapiens
attcaccttccaatcagttattaattttaaaagaaataaatctacgcttcacaggggatacagcaacacatcctgagtttcattggtaactgagatgtttttatgtaataatcattttgaatatgttaactgggttagtgatgaggatgagtaccaggatttgaggaaagacatctcagcttaggcggaccttacatatgaggaggtgggtaaaccagatgaaccacagttatggttctactgcagcaccagtggccaggcccctggagtttccctaataccacaggacttatactagtagtgtgcagagaggggacagttcttctctggcaggctttgaaggaatggtcagatcagaatarcctgttccttttccctcaggcaagtgaacagcatagctctgggtgactcaaactagatgaaatcagactcattctatcctcttgagggacatgaaagatggaggaaatattcagacaagatgggcagatccaagaaagtttctaggagccattatga

SEQ ID NO: 97089 - DNA, 336 bp, Homo sapiens
tggaaccacatgtgtatgccaccmtgcccagctaattttttgtatttttggtagagacagggttttgtcatgtttcccaggctggtctcaaactcctgagctcaagctgtctgcccgccttggcctctcaaagtgctgggattacaggcatgagccatcatgcttggcttctttttgccgtttgcaaagtctcatatatttattcagcaaatatttcttatgtgcctatgtattagttccttatggctgttgtaataaattaccacaaacttagtagcttaaaacaacacagatttattcctgtataaatctggaggtcaaaagtccagaatcagt

SEQ ID NO: 97090 - DNA, 528 bp, Homo sapiens
ctcattcttcgtgtttgattagactttctcagactaattacaaggtctttttcactctgtttacttcaatttctctgtttacttcaatttctctgtttactattagaggattttggataatttctttttctctctcagtttcattcatcagtgtgcttcattttcagcttaactcatttatttatttatttatttatttattttttgagacggagtctcactctgtcaccacatcagcagacacaactaaagataattccaaaagacacagttcaggtagaagtaaagtacgtcagatgaagagtttgagatataagaaggaaagcacagcaaaagaaaaaaatgataaatacatggataaatataatgacaatcaattagaaatatgtctttgggatttttaaaaatggaatttaaatatattacaatagcatatcaatcaagactgatraataaagctaaaaataaacgaagaggagtgggcaggatttcaggaatggcagaataaagagctctacagaccctctc

SEQ ID NO: 97091 - DNA, 619 bp, Homo sapiens
cagcccctcccatcataggcccagaggcctcagagaaaatggcttcatgggccaggcccagagtccctgtgctgtgtgcagcccagagtcttggtgccctgtgtcccagccactctagctatggctgaaatggcccaatgtagagcttggattgtggcttcacagggtgcaagccccaagcctaggaagcttccacatggtgttgagcctgtgagtgtgcagaagtcaataattggggtttaggaaccttygcctaggtttcagagcatgtatggaaatgcctggaagcccaggcaagtttgctgcaggggtggtgttctcatggaaaacctgtgctagggcagtgtggaagggaaatgtgggattggagcctcctcacagattccctactggggcactgcctaggggagctgtgagaagagggccactgtactccagaccccagaacggtagatccagtgacagcttgcaccatatgcctggaaagccacagacatgcagcaccagcttgtgaaagcagcaaggaggggggttatatcctgcaaagccacaggggcagagctgcccaaggccctgggagcctacctcttatatcagtgtgacctggatgtgagacatg

SEQ ID NO: 97092 - DNA, 636 bp, Homo sapiens
gggaaatacctgctagagctttcaggccagtggtcccacttctgtctaaacttagccagtgtgctcagcctcctgttgtcctgggaaactcccaatggcagagtaggtgactccacctagtcctacttctcatagccatgccagccacatcttctagatcttccagtccagtgttctgacttctgcttgaatttgttgaggagtgcagcctcatattgcctgggaaatacccagatggccgggcaggcaactgcactcacctagtctttcatagccagattagctacacccactagtatgtccagytcagcagtcccacttttgcctgaactctgtgggcagctataacccctcttttccctgaggaagcactcaggcagcagattaggcctgacccgataaggatacacccttggaacggagcaccccaaaaaggaatgcagtcttggagacagtaatcatagggggtttcacaagacccaagagcagacaaaaatcaagccagttgattaaacccaccttatatcacaatcaaaccctcaagggcatcaaagaagataaaagaaaaaaaactactgaagctacagcaacttcaaagattgaagggatatcagcccacacagatgagaaaacaac

SEQ ID NO: 97093 - DNA, 636 bp, Homo sapiens
gggaaatacctgctagagctttcaggccagtggtcccacttctgtctaaacttagccagtgtgctcagcctcctgttgtcctgggaaactcccaatggcagagtaggtgactccacctagtcctacttctcatagccatgccagccacatcttctagatcttccagtccagtgttctgacttctgcttgaatttgttgaggagtgcagcctcatattgcctgggaaatacccagatggccgggcaggcaactgcactcacctagtctttcatagccagattagctacacccactagtatgtccagttcagcagtcccacttttgcctgaactctgtgggcagctataacccctcttttccctgaggaagcactcaggcagcagattaggcctgacccgataaggatacacccttggaacrgagcaccccaaaaaggaatgcagtcttggagacagtaatcatagggggtttcacaagacccaagagcagacaaaaatcaagccagttgattaaacccaccttatatcacaatcaaaccctcaagggcatcaaagaagataaaagaaaaaaaactactgaagctacagcaacttcaaagattgaagggatatcagcccacacagatgagaaaacaac

SEQ ID NO: 97094 - DNA, 522 bp, Homo sapiens
attcaaggacacttagactcccacaaaataatagtgggagacttcaacacccactgacagtattagacagatcatcaagcagaaaactaacaaagatattaaggacttgaacacaacactggaccaaataaatctcatagacatctacagaactcttcaacccccacaacaacagaatatacattcttctcatctgcccatggacatgctttacaaaagaccacataattggccataaaacaatccttagaaaattcaaaaaaagtaaaatcataccaatcacactctcagaccacagcactataaaaatagaaattaatactaagaaaatcactcacaaccatacagttacatggaaattaaacaacctgcacctaaatgactactgagtaaacaatgaaatcaaggcagaaatcaagaaatgatttgaaacaaatgagaacaaagatacamtataccagaatctctgggatacacctaaagcagtgttaagaggaaggtttataatgctaagcactcatt

SEQ ID NO: 97095 - DNA, 562 bp, Homo sapiens
tacttctaaatacaatggtgatacaggcatagaatagacattcctgttccaaaaggaataaataggtaagaaggaagaggtagcaggtcccaactaagtttaaaacctaacagggataacaacattaaatgataaggctagagaatagtctttttgaactccatgtcccaccaagaggacacacatgggtggggatgctcccctcccctacagcttcactgactgcagcccatgccacagctctcagagatagttaggtgtctacagtcctcccaggcaggagttgcatgttggtggctctatagttaacaggccttggggatagttctgaccccacagttcttctggacattgtcctagcatggactgtatttggagcccccacctctgctatatagttctctgcctcaggaaggctgtctgagatattcttaatgaagtgtaagtagaggcagccatacttccacagcttgtgtgctctgcatkccacatagatgatgccaaagtttaaggcatgtgcccttaagtcacatctcaagtcacacctaggcccacctgcacc

SEQ ID NO: 97096 - DNA, 615 bp, Homo sapiens
tttactgtgtgccatcagaatagttatagtggaacatgctggaaaataacaagtgttgaagattatacaacaactagtactcaaatacattgccagtggggtgtaattggtagaatcattttggaaacctggacagtatctacttaggctaaatatgtgcactctcatgacccagaaattttacttctawgtaaacacccaaaaaaaatgcctatggttgtttaccaaaaatatggcccagcatgttcatgacagcaccgtttttaatggttttaaacaagaaactatcgattacttattaacagtaaaatttagaataaattgtagtgcatttatgaaatgagatatagacagcaattataatctttacacacagctatataaataaatatcagaaatataatgttgagtgcagagaagtcaaacaaaaaaatacactatatgatttcatttataaagttctacagcaggcaggactcatagacatcaggatagtggctatcctttctttgacagaggtagtaactgggggaggggcatctgggatactgttcttcatgttctgtttcttgatgtggacatcattacaggatgtgttcatatgctcagtttgtg

SEQ ID NO: 97097 - DNA, 603 bp, Homo sapiens
gaactagtgcatggcttatgaaacaatagaggaacaaactctaccgttgcctctgaaataaaataaataaagctttaccttctttatatccttatttcacaagtgattaataaaggaaaccagccaggctgagctctcattggtggtgaggctgaacttgaattataactcacagaggacattaagtcaaagaaaggcttccgaatcgcaaatctcaaaccaaaggaaacaagccaccatacttgatagcagaaataataaacagcataattttacccccaagagtcttgtttattagaatatacatatataaaatgtaaataataaatagtttaaataattaractgggcattgaaaacatgaataaggaatgatagctttgaaaataactaaaaagattatagaaaagataaattttattattaaaattttataaatcaatagattatttaaatagtagattctatggtaattctgaaacagttggtgaagtataaaatagatctagagaaagtatcacaattttgtacagagatcaagagatatgagataggaaagattaaataaggagacggaggaaatgatgagaagcactatcaaat

SEQ ID NO: 97098 - DNA, 508 bp, Homo sapiens
ctcaagtactcagcagactgaggtaggaggatagtttgaacctgagaggcagaggttccagtgagctgagatcacaccactgcactccagcctgggcaacagagtgagactatctcaaaaacaaaacaaaacaaacaaacaaaaaacctctaaatattagcaagccaaatctagcagcacatcaaagagttaatccaccacaatcaagtaggctttatccctgggatgcaaaggtggttcaacaaatgcaaaccaataaatgcaattcgctgcaaaaacagaattaaaaactaaaaccatatgatcatctcaaaaaacacagaaagcttctaataaaatccaacatccattttcatgataaaaaccatcaacaaactgggtatcaaagaaacatayctcaaaataataagcaccatctacggtaaactcacagccaacatcatactgaatgggtaaaaactgaaagcattaccttcaagaactggaacaagacaaacatgctccctct

SEQ ID NO: 97099 - DNA, 544 bp, Homo sapiens
aaagggcagacagagctggagcagctttgcactcatttacttgtcactcctagcactggcttaatttggcttgagctgcacctccccctcccaggaatgattgtgaggctgggatccaacttccagkggaagggctgggaggacatgggcagtctggcccactctgtccaaattaggcaggcaggcccttgcacgtagaaaggctgacaccctttgacagaaaaggaatggtagcttaacaaaaggctgaagcggtcaattccccaccagaatgaattttgactttgtcccttgatatcaacatcagctaggaatataaaataaaacttggggatagttaaaaatcaaattgttggcatggtaaggacaagaacgcctgggttgcactttttttttcctatttctcatgacacctggcacagcactgggcacatagaggagttcgataattttttttttaatttattgtcatattgtatagaacccattctaatgagactgtgttatgagtggtgttacattttcccaaaatattgttgtataa

SEQ ID NO: 97100 - DNA, 544 bp, Homo sapiens
aaagggcagacagagctggagcagctttgcactcatttacttgtcactcctagcactggcttaatttggcttgagctgcacctccccctcccaggaatgattgtgaggctgggatccaacttccagtggaagggctgggaggacatgggcagtctggcccactctgtccaaattaggcaggcaggcccttgcacgtagaaaggctgacaccctttgacagaaaaggaatggtagcttaacaaaaggctgaagcggtcaattccccaccagaatgaattttgactttgtcccttgrtatcaacatcagctaggaatataaaataaaacttggggatagttaaaaatcaaattgttggcatggtaaggacaagaacgcctgggttgcactttttttttcctatttctcatgacacctggcacagcactgggcacatagaggagttcgataattttttttttaatttattgtcatattgtatagaacccattctaatgagactgtgttatgagtggtgttacattttcccaaaatattgttgtataa

SEQ ID NO: 97101 - DNA, 544 bp, Homo sapiens
aaagggcagacagagctggagcagctttgcactcatttacttgtcactcctagcactggcttaatttggcttgagctgcacctccccctcccaggaatgattgtgaggctgggatccaacttccagtggaagggctgggaggacatgggcagtctggcccactctgtccaaattaggcaggcaggcccttgcacgtagaaaggctgacaccctttgacagaaaaggaatggtagcttaacaaaaggctgaagcggtcaattccccaccagaatgaattttgactttgtcccttgatatcaacatcagctaggaatataaaataaaacttggggatagttaaaaatyaaattgttggcatggtaaggacaagaacgcctgggttgcactttttttttcctatttctcatgacacctggcacagcactgggcacatagaggagttcgataattttttttttaatttattgtcatattgtatagaacccattctaatgagactgtgttatgagtggtgttacattttcccaaaatattgttgtataa

SEQ ID NO: 97102 - DNA, 427 bp, Homo sapiens
tcacagacagcccagtgcccagctgtaagggaagatgtagatgctacttctgcaataggtgggtttacaaattagatattctggaaggacacgctctttcacagccaacattcaatgtgcgtaaccagaaacaaagaaagttgaaattcagctgtttaggggactggttcaggtgggcattgggaactttgtrcatgtgtgcaaacatgggtgtataaacaccttcctaaggatgactgtaaggcacaagcattagacctaaggcagcacagagttgataaatacttcagtgggggaagaagtcccaggattttgtattcttctatcattgaatattctagagctgggtggactcctttacatcaaccattcagtgggacagaatattttggatattgatttaattctggaaatagatgatagcatg

SEQ ID NO: 97103 - DNA, 576 bp, Homo sapiens
tttggccgaacgactggactttctttgatgaaatcacaggcagcccaagttgagaaccacgagccctgctaacacaccatgccctctgggcctgcccagcttcctctcctgcttaacgtggagccaggagtgaggagaagagcactgctgttgctatacaggagaaaaggagggccgtgcacaccctcagcatcctgtaagtaaagacattcgacagcgggcactgaaattttaatttagcatagtgctgcttcgagagaaaggtagtgtagcgctgcttttaaaaagcagtagaaaaggccccacaagtcatcatgaaaacccgcggaaggcttgccaggtggaaagtgctcggctctcttgactgcagcagctcccagggctcggctgcctactggagtgacctgagtcgtgttggaaacaatggatgactgggctcccctccagatgttctgattgaatttatgtyggacatcagtgatattttagctgtttgaacaattctccccaggtgattccaatgtgtggctaaggttgaaaaaatccaaaaggaccttcaaaattataccaatttta

SEQ ID NO: 97104 - DNA, 571 bp, Homo sapiens
  misc_feature (1)...(571): n = A,T,C or G
ccgcaccccacttttaaacacattgtcttataacttaggctcacacctgaccaatcagggtagtaaaagagggctcaccaatttagtctaagagcaggaggtaaagaaatagtgaaatcatctattgcctgagagcacaaggggagggacanatgatcgggatataaacccagggcattcgagccggcagtggcaaccccctttgggtcccctcccattgtatgagagctctgttgtcactccgttacatcttgcaactgcacactcttctgatccatgtttgttccagctcaagctgagcttttgctcaccatcaaccactgctgaatgccactgttgcagacccactgttgactccacccctccagatttggcagggtgtctgctgtgcttctsatccagtgaggcaccattgtgactcctgatcatactagaggcttaccattgttcctgtgcagctaagtgcccgggtcccccctaattgagccaaaacattccacggttctcttccatgacccacagcttctaattgagctataacactcaccgcatgcccaaggttccattcctt

SEQ ID NO: 97105 - DNA, 546 bp, Homo sapiens
tgtaactaggggcaaggaggtacaaagaacgaggaagttaggctttgaaatagagaacaaagaacaaagaagctgaacaagctgactctttgaagaggaacttactgtacctaacatccccctgtgctgttctctatgtttacttcctcacagcaggcaaggacctttggctcaaggaccactgatgccaaactcaaataattcttacacatccaattgctcaaataagtatattttttatgatttagagcctgcttgcttggcatactctacaaaattgcactcaatatctgctcgtcataggtaagacaaactctgtggctataaaagacctgaagcctctgctgtccttctcagctccctgacacagggtccccatcttgctgttgagctacatcacctggtcttgtaagtctcctctccgacactcctctcccactccgtgtggtgtcttacgctatttcctgctggaagggacttcccctctcttgtaaatctgtccatgttgcaccaagraagctttctgtgcaatactgctgtcatgtt

SEQ ID NO: 97106 - DNA, 571 bp, Homo sapiens
tgctattgccagaaaaatgtaattgttttagccactcaaagcttgcgcctcaggtcagtcacattacgttcctcttcaagagacagcacatcattagcatactctgaaaaccttgttaacattttcatagtttctaacagcaatggcaaatggatttttaggtacaaaatgttcctcacagaatatgaaaacttatttttcaacttaaaaaataataatataaagtattctccagctcagaattttatatttttaactaggattatgtaaatatcagctaacactgaccagccaatgtcctttaacaaaaggcaggcaaataaattgttstgctctaaatttaatatttatgtaaccaatattgattgataaggaactttttaaaaactttaatattttctttattacagaagaaaacaatgttgttctgtaataaagaacagtgtctttactcagccattctctttatcctctgtgacaacttatttttactgggtttcttttaacagctcagagttggatttttctttttgctcttctttatcatgtattactatctttacttgcaaat

SEQ ID NO: 97107 - DNA, 571 bp, Homo sapiens
tgctattgccagaaaaatgtaattgttttagccactcaaagcttgcgcctcaggtcagtcacattacgttcctcttcaagagacagcacatcattagcatactctgaaaaccttgttaacattttcatagtttctaacagcaatggcaaatggatttttaggtacaaaatgttcctcacagaatatgaaaacttatttttcaacttaaaaaataataatataaagtattctccagctcagaattttatatttttaactaggattatgtaaatatcagctaacactgaccagccaatgtcctttaacaaaaggcaggcaaataaattgttgtgctctaaatttaatatttatgtaaccaatattgattgataaggaactttttaaaaactttaatattttctttattacagaagaaaacaatgttgttctgtaataaagaacagtgyctttactcagccattctctttatcctctgtgacaacttatttttactgggtttcttttaacagctcagagttggatttttctttttgctcttctttatcatgtattactatctttacttgcaaat

SEQ ID NO: 97108 - DNA, 571 bp, Homo sapiens
tgctattgccagaaaaatgtaattgttttagccactcaaagcttgcgcctcaggtcagtcacattacgttcctcttcaagagacagcacatcattagcatactctgaaaaccttgttaacattttcatagtttctaacagcaatggcaaatggatttttaggtacaaaatgttcctcacagaatatgaaaacttatttttcaacttaaaaaataataatataaagtattctccagctcagaattttatatttttaactaggattatgtaaatatcagctaacactgaccagccaatgtcctttaacaaaaggcaggcaaataaattgttgtgctctaaatttaatatttatgtaaccaatattgattgataaggaactttttaaaaactttaatattttctttattacagaagaaaacaatgttgttctgtaataaagaacagtgtctttactcagccattctctttatcctctgtgacaacttatttttactgggtttcttttaacagctcagagttggatttttctttttgctcttctttatcaygtattactatctttacttgcaaat

SEQ ID NO: 97109 - DNA, 495 bp, Homo sapiens
catagaaaatgcagagaactgtgcttttcaactcactcttaacaatctataagtttttagaaaccattatcctataatttagcccaaatagtgataatcccaacatttaaccagtttttctattttctcaatccattgaagccatgattttattttctctttgaccacaaccttccttacataaaattctgtctcaagtctatttattgatataacagatgagaagttgtattcatacaatcatggaatccaagccaattttcttggagttttgaaaatcctattttgggtgtctgaaactaaaaatgaattatgtctttctttttgcatttttccrgcaataaattctagtttctatccccaatccactaaccatacaaaacaatgggtctcatgctgattaaggaaaaggtcatgtacaaggtaaaacaaaggaataaaaaaacacaggcattacatggtttttccagtcttcttcccattacttcacatggg

SEQ ID NO: 97110 - DNA, 431 bp, Homo sapiens
agaattctttttcatatcagtacatttcatggagcccatcaataaagtaaataatggctgagtgtggtggctcatgcctgtaatctcagcactttgggaggctgaggcgggcggattacctgaggtcatgagttcgagaccagccttgccaatatggtgaaaccctgtctctcctaaaaatacaaaaattatctgggcatggtggcagccacctgtaatcccagctacttcagagacggaggcatgagaattgcttgaacccagaggtgaaggttgcagtgagcygagatcgcaccactgtactctagcatgggagagggagactctgtctcaataaataaataataataataaataaagtaaatcatataattagtatagttttattttataagttaaaatttgaaagtctcttttaatgtcaataaagg

SEQ ID NO: 97111 - DNA, 327 bp, Homo sapiens
tctgaccaggagtcaatcaggatccatgccttcctctgtaatagtactgccaaacactgaccccataatgaaccacactgtggatccacatgtaaagatgtcatgtgacctggttgtgaccctgcttggctataagcctagaggcaatcccatcattctagagaccagacaggagaaggcttttacctgtcaatctgycaatcatcataaagacaggaagaggtgtttgtgcttcaaatacatcaacacaaatataaggctacacagagtacaatcaggcaaacatgataccaccaaaggaaacaaaaacctccaataacaaaccca

SEQ ID NO: 97112 - DNA, 580 bp, Homo sapiens
ctctggttctgtgcaaggaggctcaagttgtacttgactctggtgtggatctagcaggtattaaaaaattcctgcaaggatggttaatatttagggggcttaagggacctcataggcagataaatgagtaaagaattatcctcattataaaactacttacgtggtggaattacatttcctgtcatcttagttggaacaactggaaagcgggaggaaataatggaaagtctgctgaccttctcgtcttacaaccaccatataattcatggatgacagactttgagaaggttcctgccctcaggggcttggtctcctcttctgcaaggatcaatayaaattggcgacattttttccaaactgtaaagtactgcacagatacaaagcgataagcgattgtactagatgcaatatataagacagctttcccatgctcaatttacctggaatggtgttattcaaaaggtcgtggtgaatgactgagattttgggcttgttgattttaaatagacttttgtatcccaaagatattcagcaacaagtttgcttttaatcttttgaaattaatcaaaactggacccca

SEQ ID NO: 97113 - DNA, 469 bp, Homo sapiens
gacataaaataatatatgtaaagctttggagtcagagaaacgtaagttccaatctattcatgtgacacatatcagtcccatgaacttggactaatgtaatttcccaaagcctccatttcctcatctgtaaagtaaatgttataatagyacctaccttgaagggttgttgtgaagattaaacgatacccaagggcagtgctccaggcatgttaacttcaataataaagttagaaatgactattactatcgcttagattccatatatatatatatatatgttcctatgatccaaaatctttgcttcagccagtgtagacaattgaactcactgcaggaaatcaggcatctagtaggatgaccaactgagctagcactgagctgaaaacggtggcattgtggcactgtggcttgaggtctctgcccaaagtcatggcctaaagttccctcctgggtgctcattttatgtacc

SEQ ID NO: 97114 - DNA, 593 bp, Homo sapiens
caagcagcagcacaccactgcaaactccatgagacaggcaaaaaactgtgagtccccaaagtgtgaggggggagccctgcctctgaacacacttcctcactagggaatctgcaaatctagatcagaggagaaggattyaaccttacttaaagcttgaaaagatttagggagccatgcaaaatttaaaagtagaagcagcagcaggaagagctttgtaggcattcccagtctccagctcaagcccagggaagccgtccctgactatatctgactatctcacagaggccctcagggaaggcagctggtagaattagggaggggcccagatgaaagaagcttccaagtgaattttgtgataatttctagtgggcatgaacttccttgagcagaatcttgggggtgaacagggactgctgcagatccaagtgcaggagccacagccattatgagcagatggggtggagtgtgtcacgaaagccgcgcttgctttctcgatggggaagcttatagcctggggcaggtctgatttctgcttgcaggctgcctggattccaactcagcactgttagtggggcactgtgggagtgagactg

SEQ ID NO: 97115 - DNA, 593 bp, Homo sapiens
caagcagcagcacaccactgcaaactccatgagacaggcaaaaaactgtgagtccccaaagtgtgaggggggagccctgcctctgaacacacttcctcactagggaatctgcaaatctagatcagaggagaaggattcaaccttacttaaagcttgaaaagatttagggagccatgcaaaatttaaaagtagaagcagcagcaggaagagctttgtaggcattcccagtctccagctcaagcccagggaagccgtccctgactatatctgactatctcacagaggccctcagggaaggcagcyggtagaattagggaggggcccagatgaaagaagcttccaagtgaattttgtgataatttctagtgggcatgaacttccttgagcagaatcttgggggtgaacagggactgctgcagatccaagtgcaggagccacagccattatgagcagatggggtggagtgtgtcacgaaagccgcgcttgctttctcgatggggaagcttatagcctggggcaggtctgatttctgcttgcaggctgcctggattccaactcagcactgttagtggggcactgtgggagtgagactg

SEQ ID NO: 97116 - DNA, 459 bp, Homo sapiens
ctcacccacacaccaagaatataactactacaaccaacattggggaaaaccagcacacaaagactctctataactaaggaactcatacagagtctttacccctacaagcaccaagaatcaaattagactataataaacattgaagtctgattcttaagaggaaaacacaaaaaagaaaagaaaattaaatctacaaaacacagtccaatcaaaaaagaattcaagaacaatttgaakaaattgtctacacaaatgagaaggaaccagaaaagtagttctggtaacatgaaaaacatagttctataacacccccaaaagatcacactagctctctagcaatggatttaaaccaggaagaaacctctgaattgccatataaagaattcagaaggttaaatattaagctactcaacgagatatcagagaaaggtgaaaaccaacttaaagaaattaaaaaaa

SEQ ID NO: 97117 - DNA, 459 bp, Homo sapiens
ctcacccacacaccaagaatataactactacaaccaacattggggaaaaccagcacacaaagactctctataactaaggaactcatacagagtctttacccctacaagcaccaagaatcaaattagactataataaacattgaagtctgattcttaagaggaaaacacaaaaaagaaaagaaaattaaatctacaaaacacagtccaatcaaaaaagaattcaagaacaatttgaagaaattgtctacasaaatgagaaggaaccagaaaagtagttctggtaacatgaaaaacatagttctataacacccccaaaagatcacactagctctctagcaatggatttaaaccaggaagaaacctctgaattgccatataaagaattcagaaggttaaatattaagctactcaacgagatatcagagaaaggtgaaaaccaacttaaagaaattaaaaaaa

SEQ ID NO: 97118 - DNA, 623 bp, Homo sapiens
aagattagaacccagacctactggcagaagggctggtgcttttagacatcatgctctcctgccttagagaggtgtcctatgtccttgcccagaggagaaagcagatgggatccattacagattcagatactggggcagttggcttggcaatctcaggccatgtaactgggttctgccacagggcctccacccagctgggccttcctctcgactatccacattcaacatctagcaaggggagtgcctggcactcgagtggattccatttccaagtgagatattctttcctaccccagaggggtggcagctgtgttgctctgccttcccagaacctgtgttaaccagtttcactccagacatttgcttctggtgatatcaatgtcttagaagkttcctgttgttggcataaacccagggctgcaaattataggccacttccagtttttttttttcctctatgactttgaaaggccagccatcacctctaatgatgtgcacatctcctgtgaacctggatgccttcctagataaacaacaaagtcttacaaacacaacttactcccaggcccagagagttcctaataagccaatgttggtgtgtgtgggtgtgatgagacccgcga

SEQ ID NO: 97119 - DNA, 561 bp, Homo sapiens
ctgaccctaaacatacacacacacatgcatttatgcatgcacacacatacgccttgagctgatggcttgcatgcatgtgggtgtgtgtgttacatgtgcgatgttacatgtgcacatacccctttgtgttccaaatggctgcacaccagatagtcagatatttgtcatggtttcctgttttgggtttttattgggtgacaggctttgatcagcaaaactgacatctctcgtccccattttcctgtttggtaccttatacatagtaggcactctaagcatttgctgagttatattttataactctggtggttagagaaaattatgcttattaaatactgttagcaactgatggttagcacatagatatcccatttgatcctccttcctgagaactcaacacttagggaggtaaccatcccactaataataggtagacttgtccagagaagaacagtatgtcattgtcattctactagayacaaggtagcaatatttcatgattctcctgagattcaggcatgaatttagctaataaagaacataagttttctgttttgtgtg

SEQ ID NO: 97120 - DNA, 560 bp, Homo sapiens
attgttgttattcacaagcaggattcatgatcattataactaatataacaatataaaaataagtaaggaacaagtcaatgatatcccccaactctgtatgcagtaaatgaatgttaattctctaaaataaatgtttccacttctctccttctttctgtgaggggatgatagaagcatcacaaagcagggaacactaatacacacacacatatgcacacacacgtactccatatacatctacgtgggagttatttttggttgtttttgtaaaactaaaattaatatatacatattctcctgaaaatttcttttctttttatyattattgttattatttttattattattttgtagagatagggtctcactatgttgccgaggctggttttgaactcctggtctcaagcaatcctcccaccttggcttcccaaagtgctggattgatacgcatgagccaccatgcccagactgcagagttcttttcttactttatacaatgtagatttcctcctgggatgatagttgtccacccaaagtcgttaaaaaaaataaagcagtgg

SEQ ID NO: 97121 - DNA, 617 bp, Homo sapiens
atctcctcatggtaataaaawtactaatgcctgcatgggaactgtatatctgttaacttcttcagttctccgaaggcattatctaccccacttcctagggaaggagctcaactacacagctggggagagttctgcagttaggccaaggcttggtgaatggagcacaggcccccatttgctcctgcagctgggcacaaacctgtacaatcacttgggggcgggcatagtctgttctaatcaggggggtccttgaggcactacagcaatgtctttctatttcatgagttaaattacaggaggcagatgttctgccaaatccctgtcaactccagtggggaaggcaccagtttcaagaggccaaagaagagaccctgagccaaatgagacatgggattttactgggggctaaacacagggggcagtgttcggtggctgtgggctgggcaggaaaaccacaacttcttgtaaaaggcatgcagtttgtgtaggaaaaccacaacttcttgtaaaaggcatgcagtttgtgtagcattttcacttaacacccttcaccctaacaacctccacctggcaaccttcatttaacctaaaacaaagggccttgatcccctgtgtgg

SEQ ID NO: 97122 - DNA, 384 bp, Homo sapiens
tatgacacagagaggagtgagatttggttcctgccccagagtacagtctggagggagagacaggtatgtaggtagacatatataacggtgtgagaggggcatccgaggtgctttagtgayatacaagagggaggatctaaaccttgaacaaaagtcatctgttcctcagtactgtaacagggtattgtcaagcactggatccagttcataaatacctgatctgcttgagtcatcggcagatatgtgataactataacctggtttgttcagttacattcctgagctagaggactgacctgttcattgttaagctgcttccatgcttgcgtctcttcctggtgacattagagcctgtaacacagtaacctgcctctgataactaac

SEQ ID NO: 97123 - DNA, 498 bp, Homo sapiens
gtgtgtaaattttaaaattttaaacagytaccttagtgctcgggcaaatggagtcagttttctctatattcacagcaatttgtatctttctaaggcacaaaggtcactgaatcttcattaagaccctataaggtagggagagtggaaatcattttcctgatgtgaaggtaactaatatgcccaggtcaccttgggaggctgaccctcccctcacccaggaatcggactaggctgaacaagattggatgctcttcccagccccttggtggtctggatcatagaggagggtcacgaataccctttgtcccattcctgcagatgctctcctaagtgggcggtgggcttgtcaccctgaagcctttcaggctctcctgtgagtgaagacccctgtgtggatactctgaagaaatctgtcaggagaaggttgctgaaatcccagtgtggatactgggtgtgccagtgatgtgtccaccatttggtcgcttcaagagatgttgg

SEQ ID NO: 97124 - DNA, 498 bp, Homo sapiens
gtgtgtaaattttaaaattttaaacagttaccttagtgctcgggcaaatggagtcagttttctctatattcacagcaatttgtatctttctaaggcacaaaggtcactgaatcttcattaagaccctataaggtagggagagtggaaatcattttcctgatgtgaaggtaactaatatgcccaggtcaccytgggaggctgaccctcccctcacccaggaatcggactaggctgaacaagattggatgctcttcccagccccttggtggtctggatcatagaggagggtcacgaataccctttgtcccattcctgcagatgctctcctaagtgggcggtgggcttgtcaccctgaagcctttcaggctctcctgtgagtgaagacccctgtgtggatactctgaagaaatctgtcaggagaaggttgctgaaatcccagtgtggatactgggtgtgccagtgatgtgtccaccatttggtcgcttcaagagatgttgg

SEQ ID NO: 97125 - DNA, 498 bp, Homo sapiens
gtgtgtaaattttaaaattttaaacagttaccttagtgctcgggcaaatggagtcagttttctctatattcacagcaatttgtatctttctaaggcacaaaggtcactgaatcttcattaagaccctataaggtagggagagtggaaatcattttcctgatgtgaaggtaactaatatgcccaggtcaccttgggaggctgaccctcccctcacccaggaatcggactaggctgaacaagattggatgctcttcccagccccttggtggtctggatcatagaggagggtcacgaataccctttgtcccattcctscagatgctctcctaagtgggcggtgggcttgtcaccctgaagcctttcaggctctcctgtgagtgaagacccctgtgtggatactctgaagaaatctgtcaggagaaggttgctgaaatcccagtgtggatactgggtgtgccagtgatgtgtccaccatttggtcgcttcaagagatgttgg

SEQ ID NO: 97126 - DNA, 557 bp, Homo sapiens
tgtttctgttgcaactttttctttaatgattcaatctagaaagaaagggatggaaaattgttaatcaaaaatgtacaattgtgtaagtacaggtttatcaactggaatagatgcccttggttttcatttatttttatttctatttctatttttcctcatttccagtggggctggatggttttcattgaaacagcctgcatactgattctctgtgtttcgtggaacagtattaacgcgagacgctccaagacaggcggattgtgtgaacaggtgagcttggggcagcagacatgattctggagtcacagctcctcagctttgattaatccaacatttccacactgattttgctgtgtaaccctttaaaacagccrgaagatcttccagagaacatgctttgggaaatgtagatacaactctccaaaaaatgattattcggcttgaatttgcagggcagcctgcatttcaaacatttggctgtgttattcaatacattcatatttgttcaaccaagtgtcaaaagttggtttgaaaaaaggatcattagaagtctcatt

SEQ ID NO: 97127 - DNA, 557 bp, Homo sapiens
tgtttctgttgcaactttttctttaatgattcaatctagaaagaaagggatggaaaattgttaatcaaaaatgtacaattgtgtaagtacaggtttatcaactggaatagatgcccttggttttcatttatttttatttctatttctatttttcctcatttccagtggggctggatggttttcattgaaacagcctgcatactgattctctgtgtttcgtggaacagtattaacgcgagacgctccaagacaggcggattgtgtgaacaggtgagcttggggcagcagacatgattctggagtcacagctcctcagctttgattaatccaacatttccacactgattttgctgtgtaaccctttaaaacagccagaagaycttccagagaacatgctttgggaaatgtagatacaactctccaaaaaatgattattcggcttgaatttgcagggcagcctgcatttcaaacatttggctgtgttattcaatacattcatatttgttcaaccaagtgtcaaaagttggtttgaaaaaaggatcattagaagtctcatt

SEQ ID NO: 97128 - DNA, 563 bp, Homo sapiens
tttaaattatctgagctcaattaacattacttaatattttaatggccatttgtgatttctttttttctatgaacttactgcttataatcttagaccatttttctactttccatctatttattaatttgaaagaactctacacacagtcatcccttsgtattcatggggattagttccaggacctggataccaaaatctaaggattctcaagttctttatatcaatggtgcagtatttgcatacagcctaggtacatcctcccatatactttaaataatccctagataacttatacttaattgaatgtaaatgctatgtaaatagttgttatgcatcagacactattctaggaagtgattgttatcagttatgttgtgttgtttagggaataatgaccaaataaagatctgtacatgttcagtacaaatgtaaccatccattttttttctaacaatttttgatccatggttggctgaatccatggatgtggaacccatggatacagaaagcctactatgttcataaattaggcctttgtctatgtgtggaaaattttgtttctg

SEQ ID NO: 97129 - DNA, 622 bp, Homo sapiens
agttgaatactgtatgtcagacattacattaggtactttattcacattcattatttcatttaatgttacaagaactgtgcagatttttattatacagctgaagaaactgaggttagtaatagcagaagaaagattcttggtctctttgacttcagaactttcattgtgatataaaacactcctctatatttgactcacctgtgagcataatggaagtgttttagtcccagcactgccactgaataactatatgacagcagacaagtcacacatggtatctaggccttggtgttctatcaaaaagagttggaccagttgctatggaaggtccattctcagatcccatattctttcatttcatggtatctgtttctagaatttcatgatagcagaaaacatgtacttgtctaaaatmtcctcaaaaataattggaatgcctaccaaaagagtatagttttggagttattaaataattgaaatctcttgtgtgacattgggaaagttacttagctgcattgaactactgttttctcttctataaatgatgttagtcttatctgctttgcacagttgctgtgaagatgaaatgagaaagcatatgtgatgttcaagcatggtgtct

SEQ ID NO: 97130 - DNA, 606 bp, Homo sapiens
ttgcatgatcttgatggccgccttataactgagccgcatttccaacctgcttctgggtttgtgtttaaaactgacctggtgctaacatgagagcatgtagcttttgctgtgctgggaagcatgctggttgcttttgaagtggcatgaartaacaatagccatgagggtccaccattatcctgatgggaaattctttttgtagttgacgagacaaaagtaaactcctctttgggattaaaattggcagttagaagtaccttcattcttaatgagctagtaagaaaataattcaagttgacctaattcgtaaagaatgccgtcacaccaaatgaaagccaggcaggtgtcatggagcatgaggtttccatagcaggctgaatattccaagttaaagacaaaagtaagcaatggccagaaattttgactcatgctcagattatctatggattatatgaatgaacgataactagcatttattcatttccctcagtgatttgatggtgaaattgttgctggactagacattctttttaatgtctgcaagaattaaaaactaatttcagatgttattttcaaaatagattccaacagtaattgaaattggtt

SEQ ID NO: 97131 - DNA, 542 bp, Homo sapiens
gggatgtgggaagagaaggctggcatgagtaaggttaggggtgggagtgaagatggtagaggcaattatagactgcctctccttctcccttctcccttatggtcttgtaaagccttctgcagaaagagaacctgagttagatttagttctaagcaacaaactagttcaccccaacgctgggtacacctgggtcctggcatcttcctrcatttggcctcacgatgtttctggatggctgcatcctaaatgttacccaagagctctggagtccactgtggaagcagggctcagctgcccttccgtccatctgttctgctaaccgtggaaacttgttcccaccctcgaaggtgtcctgacaaacatctctaaacaggaaataatcactgctgcatctgccctttcttcacgtacatgcccacaattattaaggcctccttctatgatctgatgcctctcaaatactcatactcatgcccagcaatcagaaaacgaccctccttaggaaagggaattgcaacataggtcccatgtttggtgacagt

SEQ ID NO: 97132 - DNA, 542 bp, Homo sapiens
gggatgtgggaagagaaggctggcatgagtaaggttaggggtgggagtgaagatggtagaggcaattatagactgcctctccttctcccttctcccttatggtcttgtaaagccttctgcagaaagagaacctgagttagatttagttctaagcaacaaactagttcaccccaacgctgggtacacctgggtcctggcatcttcctacatttggcctcacgrtgtttctggatggctgcatcctaaatgttacccaagagctctggagtccactgtggaagcagggctcagctgcccttccgtccatctgttctgctaaccgtggaaacttgttcccaccctcgaaggtgtcctgacaaacatctctaaacaggaaataatcactgctgcatctgccctttcttcacgtacatgcccacaattattaaggcctccttctatgatctgatgcctctcaaatactcatactcatgcccagcaatcagaaaacgaccctccttaggaaagggaattgcaacataggtcccatgtttggtgacagt

SEQ ID NO: 97133 - DNA, 560 bp, Homo sapiens
agtcctgatttgcagcattatttttacctcactttggccaaaattgagtcacatggttttaatggggtacaattccacattcaggagtatcaaagccttaacagcaaggaaaaagaaaaaaatggacactggatgggcagccatggttatgtcctgaaaaacgtattgaaagcccatgtgaccatatactaggaattctgaacctagcctgaggacctacaatacataatgtaagctagaaatatttagcaagaatttataatacatatttgtgacataatttttgatattgatagagtacttaggaktaatattaggggataaccataataaactttgaagactaaagtaacaatgcatttgctcatttaagccattacgtgtgtatataaacatttttttcttatacatacattcacatatttacaatttccaatgtttgcattccttcctttttatctgagttacactctggtgtcatttttgtatcttgtagatattcttaaacatttttttgttgtacgatatcaacacttcctttcagatttggactacctaaa

SEQ ID NO: 97134 - DNA, 560 bp, Homo sapiens
agtcctgatttgcagcattatttttacctcactttggccaaaattgagtcacatggttttaatggggtacaattccacattcaggagtatcaaagccttaacagcaaggaaaaagaaaaaaatggacactggatgggcagccatggttatgtcctgaaaaacgtattgaaagcccatgtgaccatatactaggaattctgaacctagcctgaggacctacaatacataatgtaagctagaaatatttagcaagaatttataatacatatttgtgacataatttttgatattgatagagtacttaggagwaatattaggggataaccataataaactttgaagactaaagtaacaatgcatttgctcatttaagccattacgtgtgtatataaacatttttttcttatacatacattcacatatttacaatttccaatgtttgcattccttcctttttatctgagttacactctggtgtcatttttgtatcttgtagatattcttaaacatttttttgttgtacgatatcaacacttcctttcagatttggactacctaaa

SEQ ID NO: 97135 - DNA, 405 bp, Homo sapiens
gtctcactctgccacccaggctggagtgcactggtgtgatctagactcactgcaacctccacctccggggttcaagcaattctcctgcctcagcctcctgagtagctgggactacaggcatgtgctaccatgcgtggctattttcttttttttttttcatttgagatggggtttcactgtgttgccccaggatggtctcaatctcctgaccttgtgatccgcccaccttggcctcccaaagtgctgggattacaggcatgagccaccgcaccctcgtatagatagtawttttacggctgagttttaagtattctttacatggtttagataatagtccttttcttgtgttgtttgcaaatagtcttcccactctgtagtctttacatttccttcacatggcttttg

SEQ ID NO: 97136 - DNA, 588 bp, Homo sapiens
tagtttgcctctgcacttgaaatatgagactagttatatattgataaaatattgtctttttaactctcgtggatacatatattatttcttgaactgatgaaaaatttactgttgctaagcttaaacataaaaattcttatataattatatttgaacaggtatatggtgcataattggaaatggagcatgatggggagaagtatgaaccagagacttttggaagaagtctgaattctgtgtgytttatatacatttctcatgaagtaggtccacagttgtaaagaatttattccattgcatacatttattcaccattaacactacttcaaaacaaccctttatgcataaacacatatatgagaacaagataaacttgtttaaatttctactaaggattgtttagaaaatatccaaatgaaccgagcttaaaccatgctgaatattcatacatctctaatttttttaaatgttgctaaaaattaaaaataaggtttgcgtctagtaaggtgacatatctagagtttacaagatcatgtttaatactgtaaaccatctataattttaatttccttttttcatatgctgtgt

SEQ ID NO: 97137 - DNA, 539 bp, Homo sapiens
cagcaccaattttgtctatttaaattctaggctttggagcaagatatattcgaaacagggatatattttttaaagaaatttaggaaaattatgagacagaaaagaatgtatggagagaagataagtgatttgcctaagtaaaaaatttatgattgatagagctaaactatgacactactcaatatcattcagaccacccacatggagctatctctctgaattctttttaataaattaagaaagaagtcccttgagtatatacagcctactttctcctatatattacgttgaacctgatatattttagcctatgtttaaaataaaagttcaaaattcaggaatagataacccagtggttagatttatataaatatcagaaactcttaaaaaataacgtgttttagcaatatayacttaagcaccaaactaagaaaataaggtagcaaatatcaattaatcaataaagcaatctttatttctgtatacctgtgtcctctattacactaacctttgtttatcattttaaatgtacaactgaa

SEQ ID NO: 97138 - DNA, 641 bp, Homo sapiens
acacacaccatggaatactactcagccataaaaaggaatgaaataatggcattcacagcaacttggatggaattgaagactattattccaagtgaagtaactcaggagtggaaagccaaacattgtatgttctcactcgtatatgggaaccaagctatgaggatgcaaaagcataagaaagatacattggactttggggacttggagaaaagtgtgggggtggtgagggataaaagactacacattgggtacagtgtacactgctygggtgatgggtgcaccaaaatctcagaaatcgccaaaataagtttttcatgtaatcaaacaccatctgttcctgaaaaacatattgaaataaaaaaattgaaaattaaaaaaagaaagttgtaaagaaaaaaaaggaactaatacatcagcttgtgaaagtactaatgagacttgatttttacattttttatacttttgactaatgacaattttataatttaaatttaataacaatttacaagctagtttatagtaaagtaacaaagatctaagctaaaataaacaaggaaaacaatgtacttagagggcattagtagaccataatgtggtatacactctatagaagtatatactttgcacattaggagtgcata

SEQ ID NO: 97139 - DNA, 522 bp, Homo sapiens
aaggcctatgcttcctgcacctttgcttgctgcttttgccaagaccacccatgcagacagcatgtgccaagacttatgagacctctgtgcccttgctaggcccagaacctgccacctggactctgtagaaggacagtggactatggaaacagctgtcagtgatgcagtcattcaccaaggacaaaataccgcatggcctaaggcttaaagcctctttcccaggctgcagaagttaaaaactgtccaagtataaccctctacaaacagctaagatcagtataccctccccatataataaaatcccaaaccaaaagctgtgccctaaacacagaagaatccgccattattattgtacttccctcaacttccagtcctttctttatttctcaaagaatcaagcattagggtgtcagggggtcttataaatatcactgattttccakttcttccagatgaagtcctgaacaaattaaaatatacgagtggcaacacatacagagcccaaaatatcacctgtattat

SEQ ID NO: 97140 - DNA, 603 bp, Homo sapiens
gtgagaaccacatgtggcaagaaaagactggatttgrgtttaaaacttgtagaaatgagaaggtcagccttctctgtaggagtaaaacagacagtagtgttttggaagccaaataatatttatcaagactgagtcattgataaaaatgtggaatattattcaatgtgctcttttgaagttctgataataggttaagtaaaatacataatacattttaacaggatatttattaaaatatattttatcagttatattacttattgtgaaaattcatatatggtgaatactagagtcaatctccaaaaagcactaaagtctaatgaagacattcagtacaaaagcccctgttttcatttgattttcggcttatgttgttattatgttttcttttttagcatgttatgtttcctttaagatgcatgtttttaacatttttgacaactctaaaatcagaaattgtctcacaattgaggtgataagaagcattgtgtattagtttaattgactgtgattttcttttagcaggtaaaaaaataatgatgtatcagaaatcagaggcatcttaaatttcattaactatgttgataactcattaggaatata

SEQ ID NO: 97141 - DNA, 493 bp, Homo sapiens
agacagtttttataatgttcagcacaagtaaaaccaaacaattttgggtaaaggtattatgtatgattaaaacttttgaaaaatgaacaagataataataatcacaacctttagaatcatggtcacctctgtggtgtacaagaggaagatagatgggagatggaaggagcacatgggtagatgtaagttactagtaatatatgatgcttagtttgagctrtaggttcacaagtgtttattacattttttaataaaagagggccaatcctaatagtacataatgaaaataattatgattaatccaattcaatatacccgaggtcaaattttaaaattctaggatatagatgcaattgaagatcggcaatttccaaaacttccatctattaaagttcctgtctgccatccatgtagctgcagattagagacttgtggccatgtggctctgcactccccctttacccctgagcacagatggcagatagatctgcgg

SEQ ID NO: 97142 - DNA, 599 bp, Homo sapiens
tacaaggataccttcttcccagttgctagtgagccccttgaagacagaatacttgtcgatttccattcctctagtagcaggtatcctatttttctttggaaaccaccttcagtccacacaagtgattgcatccccaccccacataacagaacaagcagaccyggacaatgggtctcaattataagactgatgtcaaagctgctgtggagtaaatccctctccttattagacccaaaatcaacaggatgacctcaagttgtcaggggctgtatgggagggtaaggaagaaagcaaacctgagagacagaggctatataacaaccatgttgcccaagcacctggattcagccatgccagaagttcacacttagacttttcattgtgtaaacctacaaattctttctctgtttgtgtgttcgagccagtttgagtcaagttttctatcccttgcatctgaaacaaccttggctaatataaatatcaccatatcccgagggatctaacagagcatggtgcatactgcacattaaataaatatttaattaaattcagcaactcggtagcagcctattgaaactctggcctttaaaagtgcaatt

SEQ ID NO: 97143 - DNA, 599 bp, Homo sapiens
tacaaggataccttcttcccagttgctagtgagccccttgaagacagaatacttgtcgatttccattcctctagtagcaggtatcctatttttctttggaaaccaccttcagtccacacaagtgattgcatccccaccccacataacagaacaagcagacctggacaatgggtctcaattataagactgatgtcaaagctgctgtggagtaaatccctctccttattagacccaaaatcaacaggatgacctcaagttgtcaggggctgtatgggagggtaaggaagaaagcaaacctgagagacagaggctatataacaaccatgytgcccaagcacctggattcagccatgccagaagttcacacttagacttttcattgtgtaaacctacaaattctttctctgtttgtgtgttcgagccagtttgagtcaagttttctatcccttgcatctgaaacaaccttggctaatataaatatcaccatatcccgagggatctaacagagcatggtgcatactgcacattaaataaatatttaattaaattcagcaactcggtagcagcctattgaaactctggcctttaaaagtgcaatt

SEQ ID NO: 97144 - DNA, 599 bp, Homo sapiens
tacaaggataccttcttcccagttgctagtgagccccttgaagacagaatacttgtcgatttccattcctctagtagcaggtatcctatttttctttggaaaccaccttcagtccacacaagtgattgcatccccaccccacataacagaacaagcagacctggacaatgggtctcaattataagactgatgtcaaagctgctgtggagtaaatccctctccttattagacccaaaatcaacaggatgacctcaagttgtcaggggctgtatgggagggtaaggaagaaagcaaacctgagagacagaggctatataacaaccatgttgcccaagcacctggattcagccatgccagaagttcacacttagacttttcattgtgtaaacctacaaattctttctctgtttgtgtgttcgagccagtttgagtcaagttttctatcccttgcatctgaaacaaccttggctaatataaayatcaccatatcccgagggatctaacagagcatggtgcatactgcacattaaataaatatttaattaaattcagcaactcggtagcagcctattgaaactctggcctttaaaagtgcaatt

SEQ ID NO: 97145 - DNA, 513 bp, Homo sapiens
ttttgcgagggaacaaagctcaaaaagctctccaaattctgtttcacaccgctttatttgggttgtctttccttacttatacagaaatggccaactctccagtttttcacttcgtactagactcggtccacccccactcggagacttgcacatcatggctgagtttagatttyagatagaggacaatgtgcagccattggaaggttttaagcaggaatgtgagctaatcttatttgccttaaaaaatgtgttgagtggagaattgcctacggagagtgaattgtggagaccagagcaggagaccatgtaacaggtgacaggagatcctgacaggcagcaatggtgtgcgcttgcttgtggcagtggagatggagagaaatgggcagatctgaaacacattttggagatgaagctgatggcattgttactggattgcaagtaataagtaaagaaaacatttttggctggagcagctgtggtatagatacaaaaaggaacagatttgctgaggat

SEQ ID NO: 97146 - DNA, 513 bp, Homo sapiens
ttttgcgagggaacaaagctcaaaaagctctccaaattctgtttcacaccgctttatttgggttgtctttccttacttatacagaaatggccaactctccagtttttcacttcgtactagactcggtccacccccactcggagacttgcacatcatggctgagtttagatttcagatagaggacaatgtgcagccattggaaggttttaagcaggaatgtgagctaatcttatttgccttaaaaaatstgttgagtggagaattgcctacggagagtgaattgtggagaccagagcaggagaccatgtaacaggtgacaggagatcctgacaggcagcaatggtgtgcgcttgcttgtggcagtggagatggagagaaatgggcagatctgaaacacattttggagatgaagctgatggcattgttactggattgcaagtaataagtaaagaaaacatttttggctggagcagctgtggtatagatacaaaaaggaacagatttgctgaggat

SEQ ID NO: 97147 - DNA, 583 bp, Homo sapiens
gaatcctcagcttgagcactgacaaactatccatcaaatggcaagtatgttttgaatgcctgtgtgggtctaatactacacgtcatctgtgagagatttgaagttatgataggtagtcctgtgtcacaccaagtttacatcatcatgacatcattcatctatcatttattgagtccatagtttgtactaggcattgagagaaaaatcacttgaaccctggaggtggaggttgcagtgagctaagattgcgccactgcactccagcctggagacagagcgagactctgtctcaaaaaacaaaacaaaataaaaaaacaaataaacaaaaactcacagtccaatggaggaaagaaacacataaaggtataattaaggttctattgggcacttagcatagcacctgggaattccagatgcagaatccatgtctgctgaacggaatgaacatagatgttcatgtgaccaccaggaactcaatttgcctggagtcaaggacttsttgtcaggaaatataaaacaccaggctggaaagcactgcaggtagctgtaactggatcattgacgactttctaagctatgttaa

SEQ ID NO: 97148 - DNA, 574 bp, Homo sapiens
aggtgcgatggcagagggtctacattttaacaaactccccaggggggcttgatgcaggccaagcctgagagacccttcctcagtcccttcccytgtgtgtcttctcccttgttggggcctcccaggccccttcctcttcagaccttgacctgtggcccagcaggctgggagcaggcatctctccacagccccagcctccctccccggacagctgcagccttcacctaatggtgccatttcatgctttcctgctcgggtgattctgaccagacagaggagttcactctgtcctgggagccctggcacccagatccatttatcgtccttgagtcttccagctggctgctctcccagggactgcagctcccagccatgcgggaggcgaggcagctgtgagttcccgataatttggctctccctcacaccgttctcaccgccattcctccacagccatgggagccctgcctcctagagtgggggaaatagtcctggaggcggaggaggctgctgggctgtggaaggaagcactggactgggggtccagggatttagattcttcctccaccaaatgcct

SEQ ID NO: 97149 - DNA, 574 bp, Homo sapiens
aggtgcgatggcagagggtctacattttaacaaactccccaggggggcttgatgcaggccaagcctgagagacccttcctcagtcccttcccctgtgtgtcttctcccttgttggggcctcccaggccccttcctcttcagaccttgacctgtggcccagcaggctgggagcaggcatctctccacasccccagcctccctccccggacagctgcagccttcacctaatggtgccatttcatgctttcctgctcgggtgattctgaccagacagaggagttcactctgtcctgggagccctggcacccagatccatttatcgtccttgagtcttccagctggctgctctcccagggactgcagctcccagccatgcgggaggcgaggcagctgtgagttcccgataatttggctctccctcacaccgttctcaccgccattcctccacagccatgggagccctgcctcctagagtgggggaaatagtcctggaggcggaggaggctgctgggctgtggaaggaagcactggactgggggtccagggatttagattcttcctccaccaaatgcct

SEQ ID NO: 97150 - DNA, 593 bp, Homo sapiens
ggaaaagccctcaactgagaaggggtcaggaggaaaggtctgtggtttgacccgaggctgggacattttgagagatttctcacttttatttttctttaaaacaacaggaaagagacaggaggggtgtgagggagccacaggcctgcggagactggaggaggaggcaaagctggtggggaggcgtttcctgcagtttctgtgcagtgcagagggcctggatratcctggggactgatggggcacgggctgccctcgtactgtggggagactctcaccagggggctcagcagtcaggggtagccatggagaaggagaaagctgtcagtgggatttctccagggctggcgctttgccaggtgaataccacaaaaatgccaagggagtgcagggaattgtgaacaagttgtaggcaccacagaccatggtgggaaaagaagactagaggggctgatggtggcccgggaaggtcagggagatttctccaggaacagcattctaggctgagggagagtaagtgccgaggctgtgggctgggggtctgtttggtgggtttgtggctggtagcaagaggccagcatggcaggaactgagtg

SEQ ID NO: 97151 - DNA, 557 bp, Homo sapiens
acaatgcatagagtctttggtgcataataattttaagatttatatatgttcagatactagtaaaagcttgctaaaatctttcctgattaaaaaaaaatggatttggctagattttacctttgccagttgttttaaaaagtttcctttgcagtacgaaaggcaaaacacacatttaattatctttctctagctaatgtttgaactgcctaattatactcaaagtgctaattacagatattacaaattgcaactcacaataaaatatttcttcatgacttaaccagtcccatcaattaaatgaagtcccagacatattcctccacaccctttgtgttactctctctacatttccacaaaccagtaactgatttgtatggatagtatagaaacaggtgcagagaggcattgtgcatatgtgtcyatgtgtgaaaaactaacgcaaacagcagaagaggttgctgaaaacagcaatgagagcacatacacatgaagcttaatggcaatgctaagtccaacacaagggggtggaaatgaagggggcggggctgttgcagggg

SEQ ID NO: 97152 - DNA, 550 bp, Homo sapiens
aatccacatattcagactccacatctctggtgctctttgcagtgtgtttaagagtcccattcatttgttgaagtactagtaaataatttcccagttgcctaaaagagtaaatggagtccctaacaccagctttagtgccgaaaactcactttaagtattaggggacaagagcccagttgattcttgccatttttaaggtgaaatgaaactaaagtatattcattattaatgcaaagctsacacaaaaagcatgttgtgcttcaaagtagtatttggaggaggtgtggttattcttacaagggtacatgctcaaagagtttttttaaactgcccattaatagttgcttttggaaccagatttcaaactacagaataaaatattcgcgtgactttatattgcaccaagatatttctacaaacaaaaaatagtgttacctatcagaccagaccttattctatatatcaaacttcactttagtctctataaaaccaagtttactattcaagaatgaaaactgaacatatttcccacagaggaatgttttaaaat

SEQ ID NO: 97153 - DNA, 594 bp, Homo sapiens
aaccttcactaaaaggaagaaaggaaggaaggaaaaaagagaagaccacaaaatgatcagaaaaaaaataacaaaatgtcaggatttaaatggactaaactctccaatccaaagacataaagtggcagaatgggttttaaaaaaaataaaataaaaaaaccaatgacctgttccctatgagaaacactcttcatctaaaaagacacacatagactgaaactaaaggaatagtaaaagatattccatgccaatggaaacaaacaaacaaaaaaggagttactatacttatatgagaaaaaacagatttcaagacaaaaatctataagaagaaacaaagaaggtcactatataatgataaaggggttaatttagtaagaggatataacaatttgaaatatatatggacccaatcctggagcacccatgtatataaagcaaatattattagagctaaagagagagatagactccaatgcaataacagatggagacttcaacaccccactttcagcatttgatatatcttccagaaagaaaatmaacaaagaaacattggacttattctgcaatatgaacttaatagttatttacagg

SEQ ID NO: 97154 - DNA, 668 bp, Homo sapiens
atacatatgccacaatgtccagctaatttttaaatttttttgtagagacaaggtctccctgtgttgcctagactggtctcgaactcctgggttcatcttcccacattggactcccgaagtgctaggactacaggcgtgagccactgtgcctggcctccctaagatttttacttaaatcattacctcacttcatttggaagacttccctgaccactttattttaaatagttttacccttccctcattgttctgtccctttaccctttttttcttgatagtccttaacactgccagatattacatatgtctatgtgtatatatgtgttcatcttctgtctcttcctctagaatgcaaatgtcatgagaggaggaactttggttaatttgtgtgcccatcatatagaatagtatcctgcatgtagtaagtgcttaataaatgtgttgaataaatgaatgaaacctattaggtatagataatattactcacaatttcagatatggaaatgagtctaccayagctggcaggttttctgattcctagtccattcttttctaccttagccacttgtttctgaaaccatatctgattatttatttatcctcatctgattatttcttatctgaatttctgtggtgcttcgtgttattcccagagcatttactacatt

SEQ ID NO: 97155 - DNA, 615 bp, Homo sapiens
attcttctaggtttttttctttcagccctttaaatatatcatcctactgacttctggcctgtaaagtttctgctgaaaaatctgctgataatcttacagatgctcccttgcatgtgatgagccattttgtcttgttgctgtcaagattttctctttgtctgacactcgactgattaaaatgtgtcttgctgtgggtctctgggtttatcctacttggagttcatggagctttttgtatttgtgtatccatttctttccttaaatttggcaatttttcagctattcttcaaataagttacttgtctccttttctatctaagattacactratatacatattggcccacttgatggtctcccttagctgctgttcacttttcttcattcttttacttttggctcctctgacctgctcatttcaaatgacctgtctgaaagctcactcattctttcttatacctgtacagctctgctgttgaacccttcaagtgaatttttccattcagttactgtatttttcagctttagaatttgtttggttcttttttgtaatttttgttgatagtctcattttattaatatataggtaccctgatttcatttagttgtcaatat

SEQ ID NO: 97156 - DNA, 619 bp, Homo sapiens
ctacaggagcgtgccattatgccctgctcattttttttttcatattgtagagatggggtctcactatcttggccacactggcttcaaactcctgggctcaagtgatcctcctgccttggccttccaaactgctggggttacaggagtgagccactgcacctggccaagaaggaaatgtcttagtcatgatcgcttagaagtagaacttgagacaggattcttgtgcaaatgacttactgaaggggtattctcagaagaaagctaacaggatatgagggaagcaggatagcatagggaaagaagctaagcacaaaaatgagtgtgaaaagttgagatctagccatagcctgatcccacaggaagatcttggcatgactacacctcaaaattgacccaccttgaggcaaggggcttagtaccgccatatcagtcagctattgggtatgagccaccactgcatgtatgtcaggaatggtggattacttctcaggcatttctaggtaaggcagctcctagtggcccaaggcatttttccagaactgggtatarctgtgagctaatattagccacattgacagcagctcagagatagggacatctccctcttctaccactcatt

SEQ ID NO: 97157 - DNA, 617 bp, Homo sapiens
gagtgctgggctaggatcctggtccaagctctgccattatcgtatgtgaaacagtcatctctctgggcttcagtttttccatctgcaaagcaagaattccaacactacattcacaggagtatctgaaggataagatgagataatagatgcagaggtgatgtgaaaagtaggaagtgctttacatgtgccagttttcttcattcattcactctcattcacgcatgtactaatttagcaaaaaatgatgaagcatccattagatgctataattgcaaattgctaagtgttcagggcagagcaagtggacagactttgtaacaaaagcctgcttttgactattttatccctgcccccactgtctgcagaagaaagagaagggtagagctgatgggtcagtgggcatctgtgccctaggctgggggtcatcactagccctcattttgccctgcaatcagtagactctgtgcgtgggattctgtgatgggaggaattttctaccctctttgttctggtagggaagagtttacaatgagtagggtcaagggttgttttctgctttgtagwgttgattccagaggctgcctcatctgttgtctggcagcaacggcacactggcc

SEQ ID NO: 97158 - DNA, 611 bp, Homo sapiens
gaatgttggtagagtgctttacagtctacagaatatgagcacattcatgactttgtgtgaagtcactgatagcccctgggggtagttattcttactatttctgttttacagaggcagaggcacaaactgagactcagaggggttcagtaacttatctaaggtcacacagctagtttaaagaagaaaaaaagaaatggccaggcatggtggctcacacctgtaatcccagcactttgggacgccgaggcaggcwgatcacctgaggtcaggagttcaagaccagcctggccaacatggtgaaaccctgtccctgctaaaaatacaaaaattagctgggcatggtggtgtatgcctgtaatcccagctacttgggaggctgaggcaggagaatcacttgaacccaggaggtggagattgcagtgagccaagattctgccactgcactccagcctgggccacagagcaagattccatctcaaaaaaaaaaaaaaaaaaaaaaaggattgggattaaatttcaggtattcagaccacatgcccttcctactttagcagatgatgtctctcccccctactctggctaatggctgcaatccttatcgcccacagtaa

SEQ ID NO: 97159 - DNA, 437 bp, Homo sapiens
cacagattgtctgaagtgtttgatatctgatgttacctctatacgagaacataggataggtctgggtcggaccacagtgaaccagctggtcagttactttctttaactgtctctagatcttctcaaagagctccttcacttccagaytggctgctgcccgaaaaacttgagagtcactgagagccactgctccagagaaagattactcttcaggagcagggaaacctgggatccgggtgtggctctctactaacccacctttgaccagcagcctcatctcactgggcctcagtttcccagtcatgtttggggtacaaccacgcctgcccccatcctacctgacagggctgatacaggctcaagagtgtgatgggtgtggaagagcttcctgaaatgccagctcgatatgttccgatgggttttgcatgagtgaattc

SEQ ID NO: 97160 - DNA, 588 bp, Homo sapiens
aacatctcaccctgttgtttttcacctattatttaaaataacgatagtcygttagacagaccaccttaatacttatgtacatttgcatgccagactgtaagtaaataattactcccaaacatttctgggtttttcagatataaggagcagagtcaaggttaatgcaggaaatccagctggttcaggatttcctcccagggaactaggctgtcttggtatggggatctggtggaatctgctttgctttgcttgtggcagtgagcagtttcgaaatgtcatttgtcatcagtaattatctgagttgaagaaaagtaaaatcaagcagataaagtaaactactatgattgcttattttttgtctcaacctagaaaaaaaagagttacaaagatagattaagaattttggcctttgttgtagtcagattggttggtgcctcttggaaaagagattaggtagagttcactcagatggagcaggtatgagttaagctatgaaatgtctgcatgcggcctcatgaccaggttcccaagactgagagggcctacgtagatgggctctctggttccatagtgtgtagcaaagttgag

SEQ ID NO: 97161 - DNA, 550 bp, Homo sapiens
gatgttcactacagcacactctttattcagacagggtcttattctatcatctaggctggagggcagtggtgcattctcggctcactgcagctttaacctccctggatgcgagagatccttctgcctcagccacctcagtagctgggactacaggcatgcagcaccacacctggctaatttttgtatttttttgtasagatgaggttttgccatgttgcctaggctggtcattttttatattttttattatagaatatttacccctagagtcctctaaagtgtaatccacaaaagttgttacctcagcccaattataacaagtcaaataactccacacccatcctattctccttatctccatcttccagtgggaggcagggagatagaattacaaggaacactgtgtgatgacaatgaaagcttactgtgggatcaaattatgtaaacacctgctttagcactaaatgcacgaatagttcatatccaaactataattcgtgtcttaaagtctagctattggaaaattataggctcccaagaactgtttata

SEQ ID NO: 97162 - DNA, 479 bp, Homo sapiens
gctttgggttgcaagtaacaaaaaaaaactcgaactgacttaaattataaagggaatctattggatcctataaccagaaaatccagaggctaactcaatrgctcaaccaaaagtcacaagaatctagtgtacttctgtctctccacccagcctccactattattagccttctaaattaccccattcttaaacccaagatggctgccaactcccacagctacctacctacatgttttctcattctcacccaggaggaaagattgagcccttgtgttccagcattctcaaccaagtcccaagatttaccctgattgaaagagcttaggtcacatacccaaccctgaatcagtcactgtggccagggggttagattggcttgatctttgtgctgttttccacccctcgagctagggggcaagtcagcttcctcacaaccacatcagttatgaagaggaaactggggtctgtttggacatgga

SEQ ID NO: 97163 - DNA, 614 bp, Homo sapiens
actcagtgaacagttaaagaaatatttccagaatataattgacaggacttgatggctacgccctgggggtccaggtgtaattgttgggttttctagtctaggtgtatgatcattccaaaagatgcttcaaacccaaattcagaacaaaaagaagaggcaggttgaaggaggtggaggacttctgatttactgccatgaaactcctgttgtcatgtttttccatgttggcatttaaatktcacatgcaaaactgtctctatgatagtctttgaaggcaaagaatgtatccaaacatctttctgtgttttctgtaatattaatttgtgctgggtatccaatatgggattaaaaaatgagtgagtgagtgagtgaaagaatgaaattctggataagggtagggtaaccttgaatatgggaaggagtgtgcgaggttggaaattgatttctaagatttgctaatttcctattcagaaaaactataatccccatggttttctccaaagaaaatcaagtgttggaataaaagaagtagtacattcattctatctagatatttttcacattctttttaaagatacctaattaattttatgggtaggattgatatgacattt

SEQ ID NO: 97164 - DNA, 634 bp, Homo sapiens
aaaggggatggagagatagagaagttgaagagatataaggtttaaagcgcttcctttggctgctatctggagactggattagagcaggcgtttaagagasaggaagggacttcagtgtttttggtgagagtcaacgtggcttgggcctgggtgtgatagtgaaggtagggagaagtagaatgtgataattaattagatttgcttggtgagggagtggtcaagaatgactcccagttttctggctagtgttattataagtaacacataaaaagaatggatgaacttcattaatttattttctatttattgtgatatctagcatacttgcaaaacatattttgtacatattcaatttaaataataataatactacttagttaccccttaggtcacctgagggaaaacatttaccaatacacttaaagcctttgagtcccccattcttctctccaggggtaactgcaatcctaaatttttgttaatcttgcctttcctatttattgtttttattcatatatatatatctatttctaaatgatatagtgatatgttttgtgtgattttgaattttacattcactcaatctggggttcattgaacttttttcaatccaaaggtttatagtcttaataaa

SEQ ID NO: 97165 - DNA, 559 bp, Homo sapiens
ttgctcctcattagttgaggatactatatttacaaattcatctactcactaacatttatttgtatccccaaaatcattactcatagcacttccactgtcattgcagacatgtgcacaatggtgaaaaatgtgagtctactgacgtgcacattctagtttcagcttacatagtgtaaacaagtgtccttttcatggtctatttagtgccatgtttttctcatttttgtgcttgctaytggtgatttcactgttgaaaacagtccctaagcgtagtgctaaagtgctgtctagtgttcaaggagcaaagactacagagaaaatacaagtgtgagataatcttcattgaggcatgatttacagagctgttggccatgatttcaatgttaataaatcaaccaaatatattaaataaggtgtatttaaactgcaacagacataaaacaaggttgtatcttgatcagttgacaaaaatgttgtgaacagcagctttcaggaatctaacaccatagtaggagcagtggttcagtgtttgctaatccagttttcacggtgacttttt

SEQ ID NO: 97166 - DNA, 575 bp, Homo sapiens
agcttgaagctgtttttgtctaacacttatttatttatttatttatttatttatttatttatttatttcactctgtcacccaggtctcactctgtcacccaggctgtcacccaggtctcactatttatttatttatttatttatttatttatttatttatttcactctgtcacccacatctcactgtcacccaggctggagtgcagtgggacaaatcttggcttactgcaacctccacctcctaggttcaaggaatcttcccaccttagcctcccaagtacttagaactgcaggtgcacaccaccacaccaggctaatttttgaatttttttgtagagacagggtttcaccatgttgcccaggctggtctcactgtccagggctcaatgaatcctccggcytcagcctcccaaagtgctgactttgtgggctactgcacccggccttgagtaaaagtcttaacagaatgtatccattaggaagagtaatttcccagtggaactgggggtgctagaatagacacctggaagccaaaaagcaatgaatgtctgccacacctatttagtgtgtaaata

SEQ ID NO: 97167 - DNA, 575 bp, Homo sapiens
agcttgaagctgtttttgtctaacacttatttatttatttatttatttatttatttatttatttatttcactctgtcacccaggtctcactctgtcacccaggctgtcacccaggtctcactatttatttatttatttatttatttatttatttatttatttcactctgtcacccacatctcactgtcacccaggctggagtgcagtgggacaaatcttggcttactgcaacctccacctcctaggttcaaggaatcttcccaccttagcctcccaagtacttagaactgcaggtgcacaccaccacaccaggctaatttttgaatttttttgtagagacagggtttcaccatgttgcccaggctggtctcactgtccagggctcaatgaatcctccggcttcagcctcccaaagtgctgactttgtgggctactgcacccggccttgagtaaaagtcttaacagaatgtatccattaggaagagtaatttcccagtggaactgggggtgctagaatagacrcctggaagccaaaaagcaatgaatgtctgccacacctatttagtgtgtaaata

SEQ ID NO: 97168 - DNA, 589 bp, Homo sapiens
atctgtgcccacttgtgaagggagtaaaggagtatccttggcattactaatgtctcctttctgatccgagagagagtgtgtcatgaagacactcaggcagctccaagtggaggtccacacagtaggaactgaggcctcctgccagcaactaggtgcaggagccgtgttgaaagtggatccgttagtccattcagcctccaaatgacgacagccccaactgtcaacttgaccacagtctcacgagaggccctgagccacaccatccagatgagctgctccaagactcctgacttgttcctgacataataaatatttgttgccttaagccccttaatgatgaggtaatttgttacacagcgatagataactaatgccaatccaaaccctgagatatatgaagcctgagggtttcaacatgaagaagctgacaagaactgggatcccaagagagttcatgaattcccttccaggagacgtaygcaagtgcagatgctgaactgccaggcagaggtattacagaagggatgcacacacaggatggaaacttgcatagatatcccttcaggttacttccaaccacaagacccag

SEQ ID NO: 97169 - DNA, 609 bp, Homo sapiens
ctgttgcattatttgcattatttccagctttctagtattaagaacagtgctgctgataacattgttatgtctttctcctgatgcataattgcaggaatttctctaagttatgtgtctatgagcagagttgctggatcacagggtattcacattttcaactttactggataatgcagttgtttctcaaagtggctgtgtcagtttatactcccaccaaaagtgcagaaaagtttcctttgttccacctccttactgacttccacatccttaacttggtattttgagactttttattattgtttatctagacagtaagaaattatatcacattattattgcaatgtggattccaagatgactatagtagctgaacaacttttgacatgttcattggccattcatgctctcaatggtgaaagttctactcatctcttttgttccactttcttttgggccattggtcttttctgtatttactcayagttttttattagattctggacactgagccagtgtcagttacatgtgttgcaaatctcttctctcagtctgtggcttgtctttctagtctctgatgtcatataatagctagatgttattaattttaat

SEQ ID NO: 97170 - DNA, 582 bp, Homo sapiens
cacaaatgaaaggcatgtataaaatgtgcatgtttcacattagagccatagccatataaatcaaccagtttcattcccttagatgaggaaactgaacccagacagctgacaatatttgtccaagatcacattgtggtgtttgagcctatgtcttcagattgctaatgccagcactctttctgtctaacagatctcaacattttcatcacccaacatggtgtgttcatatagaaccctagttacagaaggtatcatagtgtaatttgaagaaaagttaagtagtcagatatgattgggagacattgatttgaacagagtaaagtacatttgggaagattctttgaatcccttttagtgtggaagaactgtgatatgtgatgctcaaagagaggggtatagaatataggatttcccaratgtatttaactatgagatctgtttcataattgaacatctcaagggatcgatgttcaaaagaaaacaatttgggggatattaagctatatcatactgctcttctaactctctaacttttccaaaatgtttgcggaattcataacaacaagcatttattaagcacaa

SEQ ID NO: 97171 - DNA, 443 bp, Homo sapiens
tacccctataaatcagtaacctggctgtgaaatctgatgatgagaaggaagacatacaggaaatgacagcttgccttgaggtgaggagctgggggatcaccaacaatgctgcccttgttggcatgtaaggatttggaaattggacttttttctatggtttttcagtaacattttaaaattgcttctgtataataaagaatttaactggcctttgctcctggttcctgggaagtaacctawacatcctatacatccttggaatttacccagtgaaagaaatgtgtttgttactcaaggtgggtccctaggatcacacctgagttcttggtaatgagatgtctcaagatggtgactaaccaggccacaaaagatcaaacaaagactaaagggttgggggttttgagcaagccctcctgggagggcaggagagttgctgactgaat

SEQ ID NO: 97172 - DNA, 589 bp, Homo sapiens
tctgcccatggtttctaaaacaccatctcaggaaatactaaaaaaaaaaaggggggggttaaatatgtgattgattgattgaattaatacattaatgtacacactcctgaaacagtttggcttttgctgccagataacacgttttatagattaacaatgttaggcgtatatatctttaagagaggacttacataacaatactgctaaggtaaaagatataaatagaaacagaaatctgctttaatgtggagttttccccataatgggtcattaattaacttgtcacattctagctctattccattccaagaataaaagctttggacaaagtttttaacactctggtgcatttctagatttatgcgtgatgggcatctgccgtgaagagtggcatttggggctggcttctccttcctgcctgggacctttgtcttgtgatgcacgtagttgtctgatttgctctgaatgagggagcttctggtggctttcacagtcactgctttcacagcyatgctggatagggtctttgctccatggctaagaatggaagagtaattcgtatcatcagtgtcactgtatggccaggatt

SEQ ID NO: 97173 - DNA, 589 bp, Homo sapiens
tctgcccatggtttctaaaacaccatctcaggaaatactaaaaaaaaaaaggggggggttaaatatgtgattgattgattgaattaatacattaatgtacacactcctgaaacagtttggcttttgctgccagataacacgttttatagattaacaatgttaggcgtatatatctttaagagaggacttacataacaatactgctaaggtaaaagatataaatagaaacagaaatctgctttaatgtggagttttccccataatgggtcattaattaacttgtcacattctagctctattccattccaagaataaaagctttggacaaagtttttaacactctggtgcatttctagatttatgcgtgatgggcatctgccgtgaagagtggcatttggggctggcttctccttcctgcctgggacctttgtcttgtgatgcacgtagttgtctgatttgctctgaatgagggagcttctggtggctttcacagtcactgctttcacagccrtgctggatagggtctttgctccatggctaagaatggaagagtaattcgtatcatcagtgtcactgtatggccaggatt

SEQ ID NO: 97174 - DNA, 592 bp, Homo sapiens
ctggttgccgctagcatggaagaagactttcctttcttacagcagcagccagcagcatcaaccacctgtcttggtattgtaatgaagtagcgaacgtaatgaaataaactaatgatttcacaatgcgatcttaacacttgtcaatttgygaaaagtaaaacaagtaaggggagagagagggactgcatggagaggaaaagctgctttggaaacaggaagagctctttgaggagaaggcattttagtatcgatctgagtactgagaagaagagagcttggtgcagatcacgagcagagcaggctgagcagctgagatgcaagggcaaggaccctgggtgggcacagacgtcatgcactggtgagacagcaggttggagcacagggcctaagtgggaggccagggaggtgggcagagggaagactggggaggatgtgaaggagaaggagaatgctcacatcagtggacttttctttctttttttttttttgttatacagacagcatctcattatgttgcccaggctggtcttgaactcctggcctcaggcaattctctcacctcagccttccaaaatgctgggattacagacat

SEQ ID NO: 97175 - DNA, 584 bp, Homo sapiens
agttccctctagcaacatggttctcactttcttcagatgcacgttctctaccttggacttaccaacctccatcactgtaagaaagaaatttcatttcttataaattacccagtttcatgtattctgttacaagcaacagaaaatgaactaatgaaggttgtctcrcccatttatctgtgatatataccatatacagtcttttaaatatagtaacagattatatatgtcttctttttttgtgtgttttgtcctaacatgaatcaagtagatttctctctttttttatgttctgcagtggattatattatatgggaaatttctatacctgaaagggttgatattcctttaagtatttaaaggtttacccataaatgtataatttatatgaaatatttttggggggaatgttttataaatgcatgctactttgtaaaagatcttgaataacattttccaccctgacacacagggcttcagtttctgcaatacttaatgggtctctaggttttctgcttgcattagccaggacaattcatgtttttcaggaagatgtcatttttatttggcctttctaatcattagca

SEQ ID NO: 97176 - DNA, 561 bp, Homo sapiens
tgggtaaaagagtggaacagccactttgcctaagaaaatattcagcaactaatcacatgaacaggtgttcaacatcacttgtccttagggacatacaaatcaggagcactgcaaatctactcgagtggctaattttaaagagattgaccataccaagtgttgacagaaataaggagaacctgaaacactcacccactgctgatgagaacataaaatgatactatcacwgtggaaaacttgtgggttatttcagaaaacattaaatgaacacttaccatatgatccagccaatacacccctgagtatttacccaagagaaatgaaagcatatgtctacacaaagacttgtacatgaatgttcatagcagcctttttaatttaatagtcaaacctggagacagcctgtcttaatccatttaggcagttacaacgaaatagctgtaacaaaataccataaataccatctctcaaatagatgtgaggaatacatttctgttgtttacagccttttggaggctggaaagtccaaaatcaagtctccagcaaatttggtgtctggtt

SEQ ID NO: 97177 - DNA, 560 bp, Homo sapiens
ttcaacatcacttgtccttagggacatacaaatcaggagcactgcaaatctactcgagtggctaattttaaagagattgaccataccaagtgttgacagaaataaggagaacctgaaacactcacccactgctgatgagaacataaaatgatactatcacagtggaaaacttgtgggttatttcagaaaacattaaatgaacacttaccatatgatccagccaatacacccctgagtatttacccaagagaaatgaaagcatatgtctacacaaagacttgtacatgaatgttcatagcagcctttttaatttaatagtcaaacctggagacagcctgtcttaatccattyaggcagttacaacgaaatagctgtaacaaaataccataaataccatctctcaaatagatgtgaggaatacatttctgttgtttacagccttttggaggctggaaagtccaaaatcaagtctccagcaaatttggtgtctggttaagggccctcttcctggttcataaatggcctttttgctttaatctcacatggtggaagaagcaaga

SEQ ID NO: 97178 - DNA, 574 bp, Homo sapiens
tgatacctgctcttctatttctgtaatctaagaatggactgaacattaggacaaccaactcttacactatatgaccaagccccatcctccccttctactgagtaccctattagatcattccattatcccttggatttactgatatgtgggaaaaattcttggctaagacttaggcacctgtgagccataattgaaacatcaccaaatggtatggctttcctttctatggaagctattatttcttccattctcaccaattcagttcagaatgctgtaaactcctkgctcccttttgctacttctagactttcttcctctactatcactaatatttttgttttgaagcctatatcatcatcttaagtccttttggagcctggcttaatgtcagagtgtcctagaagcttttacaaacttcccaggcctgaattacatacctttccttagactcttgaaagacttcatagtctcattatctttgcactaaaaaggtggtttaacaattacctatccacttgtacgactccccatcagtgacttgagggtaaggactgtgtcttcttatcccttgtat

SEQ ID NO: 97179 - DNA, 574 bp, Homo sapiens
tgatacctgctcttctatttctgtaatctaagaatggactgaacattaggacaaccaactcttacactatatgaccaagccccatcctccccttctactgagtaccctattagatcattccattatcccttggatttactgatatgtgggaaaaattcttggctaagacttaggcacctgtgagccataattgaaacatcaccaaatggtatggctttcctttctatggaagctattatttcttccattctcaccaattcagttcagaatgctgtaaactccttgctcccttttgctacttctagactttcttcctctactatcactaatatttttgttttgaagcctatatcatcatcttaagtccttttggagcctggcttaatgtcagagtgtcctagaagcttttacaaacttcccaggcctgaattacatacctttccttagactcttgaaagayttcatagtctcattatctttgcactaaaaaggtggtttaacaattacctatccacttgtacgactccccatcagtgacttgagggtaaggactgtgtcttcttatcccttgtat

SEQ ID NO: 97180 - DNA, 500 bp, Homo sapiens
aactcctaatttttactatattaaaaatcaaacccctatatacatataccccaatgtgcctcttaatgtatcacagagtgaaatttctgaagactacatatttgctagggtcaacccaggatttgccctgctcttgatttaaataaatgagaaggaaagccgatgtcacaacaggcaggaggagactttttgctcctgtggagtttagagtatccagttccaatctattttttcattcattattaatttcccttgcttattatttggtttcccgatgggattcataggtttgttgtagctcatttcctgagggtttacattctctctttcggttgagagtattcttatttctttaggagcatctcttttgttttatataacctcraatgatatttccaactctcttctaatcggttgcatgtttaaaggaaagaaatactgtactaaagctaaagagactttgaagcaacagggcatttataatttatgctgaggagggg

SEQ ID NO: 97181 - DNA, 501 bp, Homo sapiens
gaattcttctccatcgctatttacacatgcatgtgaatctgtaagagcagctcctgtcacttttatcataaagatagaagagttaaatgrtaatcatttctttgcaaccttcaggatctgctggtaagttcctgcccttgggtaactgatcttttacagaaatttttttttctgagaagcctataccagaatagtaatgtgttgactgaagtgaataccctatgatgattttgtgattgctaggaaatctaaagtaacccaaatctttagcaacaaaattaaagttggtaagaagaaggtgcaaaggtagaggaacaacccgaactgcatcttcacacctgaagcattaccgaagcagcaacgtaaacattcaactacattctataggatttcagaaggaacatgtaaaacaatccccttcataaccactgtatttcaacaacgtgtgttctttccaaatagatcatcccacagcaggaaatggtagataggaaaagcgga

SEQ ID NO: 97182 - DNA, 501 bp, Homo sapiens
gaattcttctccatcgctatttacacatgcatgtgaatctgtaagagcagctcctgtcacttttatcataaagatagaagagttaaatgataatcatttctttgcaaccttcaggatctgctggtaagttcctgcccttgggtaactgatcttttacagaaatttktttttctgagaagcctataccagaatagtaatgtgttgactgaagtgaataccctatgatgattttgtgattgctaggaaatctaaagtaacccaaatctttagcaacaaaattaaagttggtaagaagaaggtgcaaaggtagaggaacaacccgaactgcatcttcacacctgaagcattaccgaagcagcaacgtaaacattcaactacattctataggatttcagaaggaacatgtaaaacaatccccttcataaccactgtatttcaacaacgtgtgttctttccaaatagatcatcccacagcaggaaatggtagataggaaaagcgga

SEQ ID NO: 97183 - DNA, 484 bp, Homo sapiens
gcataaaaacaaaccttatagaccaaaggaatacaatagaaagcacaaaaataaaccacctcatatatggtaaagtgattttggtaagggtcacaaggtcattcaatggggaaaaggcaatattttcaacaaatggtactggaaaaactggacatccaagtgcaaaagaatgatgttgaacccatacctaataccatatataaaaattrcgtcaaaatggatcaaaagcctaagtgttaagacctaaaattataaaactcttagtagaaagcacaaggcaaaagctgcatgacattggatttggcaatgatttcttgatatgacaccaaaggcacaggagacaagaaaagaaatagacaaataagactgcataaaaatgtaaaaattgtgtgcatcaagaaacactatcaacagagtaaaaatgcactctacagaatgggagaaaatatttacaaatcatatacttgagaaggtgttagtatgt

SEQ ID NO: 97184 - DNA, 484 bp, Homo sapiens
gcataaaaacaaaccttatagaccaaaggaatacaatagaaagcacaaaaataaaccacctcatatatggtaaagtgattttggtaagggtcacaaggtcattcaatggggaaaaggcaatattttcaacaaatggtactggaaaaactggacatccaagtgcaaaagaatgatgttgaacccatacctaataccatatataaaaattacgtcaaaatggatcaaaagcctaagtgttaagacctaaaattataaaactcttagtagaaagcayaaggcaaaagctgcatgacattggatttggcaatgatttcttgatatgacaccaaaggcacaggagacaagaaaagaaatagacaaataagactgcataaaaatgtaaaaattgtgtgcatcaagaaacactatcaacagagtaaaaatgcactctacagaatgggagaaaatatttacaaatcatatacttgagaaggtgttagtatgt

SEQ ID NO: 97185 - DNA, 483 bp, Homo sapiens
agaccccaagaatcactgacagaagttaaataacctgcccaagttcaaattaagaggcagagctgggattaaacctcaaagcccttgcattctcttattcaaaatgctccaaggacagttttatgctgagtaattaaatatctgtttagttgaattagaaccttagacccatgatgggaggcagagctgcggggctgctggcaggtgaattagtgtccagaaacacattggcawagtcttccacatggacatggatgaggaaaatgtaatttagggggaaggacatcagcttgggagtttgactcctgttctgcaacttgggcaacttacttatcttctttgtgcttcagtatcctcttctgtaaaataggcatgttatctacactgtgagaatgaatgcaataaaatgtagagcgctaaacatgccacaggctctcagtgaatgggggttatttcccatgattactttgtagaaggagtatg

SEQ ID NO: 97186 - DNA, 483 bp, Homo sapiens
agaccccaagaatcactgacagaagttaaataacctgcccaagttcaaattaagaggcagagctgggattaaacctcaaagcccttgcattctcttattcaaaatgctccaaggacagttttatgctgagtaattaaatatctgtttagttgaattagaaccttagacccatgatgggaggcagagctgcggggctgctggcaggtgaattagtgtccagaaacacattggcatagtcttccacrtggacatggatgaggaaaatgtaatttagggggaaggacatcagcttgggagtttgactcctgttctgcaacttgggcaacttacttatcttctttgtgcttcagtatcctcttctgtaaaataggcatgttatctacactgtgagaatgaatgcaataaaatgtagagcgctaaacatgccacaggctctcagtgaatgggggttatttcccatgattactttgtagaaggagtatg

SEQ ID NO: 97187 - DNA, 644 bp, Homo sapiens
aggtattactgatctcttgcataggtctgcatgggccagatacttaataaatattggctgaataaaataactgtgagtggtagctcatttggaataggaacctaggataactttagactggtgagaacaaaatggcagccctgttcacatatacagaggctggcacttaggagtccctcctgtgtgaagcagagaattgttgctgtagcaaacctgttttcaaaaacctcttcattcatgaaaagagagtaataacaacagggaaaattatgtgaatttggaacaagagcaaaataagacaatgtagcaatagtagacagtgtaattacttgatatgaatgttaggcagtgtattaatgtatttcttttgcaccgtaaggtccaaaatagtagcattgaatgccacagcctatgaggtattcatcaagatttgtcaatttagtatcrgtttcctacagcttagaaaaactgtttgtctgagtacccataaggagcctaaattcctggtgggaggggatcttatcttttttacttggtggtgccagtgtttttcatatattagtcaagagaagaaagatttttattgcctctctccaactcatttttccattcctgtccccattgttggaaacacatgctcagtg

SEQ ID NO: 97188 - DNA, 617 bp, Homo sapiens
aagtgaaacattagcaaatacttcgagtgctgtattttaaacctagatatattaactgtggtatttccagttgggaaacatgagaccgtaatatagaaattcgaatcttaagtgcccaagagtgctgtcccagggggcttttaatcactggaagtagcaggatttcttgggaacatgcccagagatctgaaaatgggcaaaggttktccaagtttaagaaataagaaaatattaggttagcgatagtctggaagcatttttctttccttcattttctcatggtgttggggatttgtccctttttctctcacagcgtgcgtctgacatgctccaggttggtcctggaagccagtgcctgggtgtactctgtgtgcctgaagccggctcccagagtgagaccccaggcacatggggagacctgctttctggcccccgctctaccagtgcctcccttacgggtctcgggcaagtcctaatttgtgaggttgacctccaggccccagcctgccactctgcatgtgagtagcagacttgatgctgggaaggtcactgggcaaatccatctccaggggagggaggattttggtggctggctgcggtctgagtggacagcaggc

SEQ ID NO: 97189 - DNA, 617 bp, Homo sapiens
aagtgaaacattagcaaatacttcgagtgctgtattttaaacctagatatattaactgtggtatttccagttgggaaacatgagaccgtaatatagaaattcgaatcttaagtgcccaagagtgctgtcccagggggcttttaatcactggaagtagcaggatttcttgggaacatgcccagagatctgaaaatgggcaaaggttgtccaagtttaagaaataagaaaatattaggttagcgatagtctggaagcatttttctttccttcattttctcatggtgttggggatttgtccctttttctctcacagcgtgcgtctgacatgctccaggttggtcctggaagccagtgcctgggtgtactctgtgtgcctgaagccggctcccagagtgagaccccaggcacatggggagacctgctttctggcccccgctctaccagtgcctcccttacgggtctcgggcaagtcctartttgtgaggttgacctccaggccccagcctgccactctgcatgtgagtagcagacttgatgctgggaaggtcactgggcaaatccatctccaggggagggaggattttggtggctggctgcggtctgagtggacagcaggc

SEQ ID NO: 97190 - DNA, 582 bp, Homo sapiens
cctagaataaaaggaagaaaatgctttagcaaaacctattttcaagagctcacatttttcagacttgttttgagaatggagctccttggaacctcttaccatataaacattccacatatatatcatttttcctagaccatgagtcaaagcagccttccaaagatgatagagacatggattcaaaaaagcttacaacacatgtttgactaatgagaaatcacagacctactagcctattttaagtagtcaggtgattctataggttttgaaatttgctttgaacaaaaatagaaacatcaatgttgggcattaacggtctacatttctaggacttttcaagtacctttcaattataacacaacaccgtctactatagacatcatcttctcttggcacatacttttaatattttaagtgtgtgattattgttctcacagcctataattatgttaaccaataaatattaacacatctaattcagttccaccagagggaagataattcaaaaggatgagatatatctcccaattaactcttgcttygttaaatcatagtaatagaaaaaaattagaatggatcatc

SEQ ID NO: 97191 - DNA, 584 bp, Homo sapiens
ccaaggtgatatttggggaaagacttaaatctagtaagggagtaagtattggcatatccgggggaagaacataaaaaattgtttttcatatcttttttgtttgtttgtttgtttttgagacagagttttgctctgtcgcccaggctggactgcagtggcgcaatctcggctcactgcaagctccgcctcccgggttcaggccattctcctgcctcagcctcccgagtagctgggactacaggcgcccgccaccacgcccggctaatttttttggatttttagcagagaaggggtttcactgttttagccaggatggtctccatctcctcacctcgtgatccgcccgcctcggcctcccaaagtgctgggattataggcgtgagccaccacgcccggcctgcttttcatatcttatcaggtaagaaacaagggaggttattgaatagtgcttataatatggtcccaattttatataggcckgtatgttaacaggggttgtctacagctcatgagatgctaagcattgttttcaattttttatccttttggcttaattattatacaataagtgaattataggcatg

SEQ ID NO: 97192 - DNA, 528 bp, Homo sapiens
cccatgatagacctattgaatcaaaatctcaggcctaaggcacaagaatttacattgttagtaaggttttcaagtgatttttaggcttctaaattgtattaacctttaccattctaattctttaaacttgaattaytgtatttataattccatcttcatcaaagtaaacttttggttagcaaaaaccgtagaaatccccttattcaatcagattgggaccagtaataaacagattaatcacaaatttaagttagatggaggaatcataagaagtattcgatgtaagtccttaaaacttaactttaatttaaaagacttgtgcaaataaatttgccagaattttgatgacaaggtcaaagccttgcacggattcagagtgaagtttcttgtggaaactatgccaatgatatgttgtcatggatttcttgtttactttctgtgaagacaactggggtaaagcaatctgaaatcctagattacacaatttttcccatttgtttctagttgtcttgccaacagttaaggtga

SEQ ID NO: 97193 - DNA, 528 bp, Homo sapiens
cccatgatagacctattgaatcaaaatctcaggcctaaggcacaagaatttacattgttagtaaggttttcaagtgatttttaggcttctaaattgtattaacctttaccattctaattctttaaacttgaattattgtatttataattccatcttcatcaaagtaaacttttggttagcaaaaaccgtagaaatccccttattcaatcagattgggaccagtaataaacagattaatcacaaatttaagttagatggaggaatcataagaagtattcgatgtaagtccttaaaacttaactttaatttaaaagacttgtgcaaataaatttgccagaattttgatgacaaggtcaaagccttgcacggattcagagtgaagtttcttgtggaaactatgccaatgatatgttgtcatggatttcttgtttactttctgtgaagrcaactggggtaaagcaatctgaaatcctagattacacaatttttcccatttgtttctagttgtcttgccaacagttaaggtga

SEQ ID NO: 97194 - DNA, 502 bp, Homo sapiens
atgattgtcctcacataggattccagaacactgctactgggttctgagtgtttctcaatcacataggattccagaacaatgctatgagttcctgaatgtttgtacctcacataggattccacaacactcctcttccagtctcaatatttctccatcagatagggttccagaacactactgctgggttctgagtggatttccgtcacgtamgattccaggacactgttacgtgggtctaagtgtttgtccatcacaaaggattccagaacactcctacgaatgtctgaaagtttatccatcacattggattccagaacactgctgctgggttctcagtgtttgtccctcacacaagattccggaacactgatatgagggtctgaatgtttgttcctcacataggactccagaacactcctgctgtggtctgaatgtttgtcccttacccaggattccagaacactgttgctgtggtctgaatgtttgtctctcacattggatt

SEQ ID NO: 97195 - DNA, 502 bp, Homo sapiens
atgattgtcctcacataggattccagaacactgctactgggttctgagtgtttctcaatcacataggattccagaacaatgctatgagttcctgaatgtttgtacctcacataggattccacaacactcctcttccagtctcaatatttctccatcagatagggttccagaacactactgctgggttctgagtggatttccgtcacgtaagattccaggacactgttacgtgggtctaagtgtttgtccwtcacaaaggattccagaacactcctacgaatgtctgaaagtttatccatcacattggattccagaacactgctgctgggttctcagtgtttgtccctcacacaagattccggaacactgatatgagggtctgaatgtttgttcctcacataggactccagaacactcctgctgtggtctgaatgtttgtcccttacccaggattccagaacactgttgctgtggtctgaatgtttgtctctcacattggatt

SEQ ID NO: 97196 - DNA, 502 bp, Homo sapiens
atgattgtcctcacataggattccagaacactgctactgggttctgagtgtttctcaatcacataggattccagaacaatgctatgagttcctgaatgtttgtacctcacataggattccacaacactcctcttccagtctcaatatttctccatcagatagggttccagaacactactgctgggttctgagtggatttccgtcacgtaagattccaggacactgttacgtgggtctaagtgtttgtccatcacaaaggattccagaacactcctacgaatgtctgaaagtttrtccatcacattggattccagaacactgctgctgggttctcagtgtttgtccctcacacaagattccggaacactgatatgagggtctgaatgtttgttcctcacataggactccagaacactcctgctgtggtctgaatgtttgtcccttacccaggattccagaacactgttgctgtggtctgaatgtttgtctctcacattggatt

SEQ ID NO: 97197 - DNA, 502 bp, Homo sapiens
atgattgtcctcacataggattccagaacactgctactgggttctgagtgtttctcaatcacataggattccagaacaatgctatgagttcctgaatgtttgtacctcacataggattccacaacactcctcttccagtctcaatatttctccatcagatagggttccagaacactactgctgggttctgagtggatttccgtcacgtaagattccaggacactgttacgtgggtctaagtgtttgtccatcacaaaggattccagaacactcctacgaatgtctgaaagtttatccatcacattggattccagaacactgctgctgggttctcagtgtttgtccctcacacaagattccggaacactgataygagggtctgaatgtttgttcctcacataggactccagaacactcctgctgtggtctgaatgtttgtcccttacccaggattccagaacactgttgctgtggtctgaatgtttgtctctcacattggatt

SEQ ID NO: 97198 - DNA, 652 bp, Homo sapiens
ttcactgtcaaatccgtaggtctaaaaggaaaagcatacatacacataattgatttcacattgttttacatttcctttgtcttcttctggaatgtcatcttttttcttgstttctctttcagcacaggatctaatctagatattggaaaagagaatccaatgggttatatgtttatcttccactttccccactttacgtatcacataagaacattcgagatgatttcttatgcagaagaaaaaattaactgagcaactatattcagaaaaagacaggttctggctatgtgtttttacttcatatatataatctatatgagtaagtgctatcacatgcttcctccgcagcccttgtgtcagaaacactacagacaaaattatttcagaaacattttacacatcagatcctgctaggcaataaagcaatcattaatttagttttgtcctccaagtgaatacactaggatcaaattatccctagtagacaagtgttcatttgatcagattgaaagcttaatagctattttacgttgcacagactattaccaaagtattaagatttttaacattacacaacttgtttttaattaattggaacccacctcttttacaagcttcttatatcctcctaagtttggatagctgtttacta

SEQ ID NO: 97199 - DNA, 652 bp, Homo sapiens
ttcactgtcaaatccgtaggtctaaaaggaaaagcatacatacacataattgatttcacattgttttacatttcctttgtcttcttctggaatgtcatcttttttcttggtttctctttcagcacaggatctaatctagatattggaaaagagaatccaatgggttatatgtttatcttccactttccccactttacgtatcacataagaacattcgagatgatttcttatgcagaagaaaaaattaactgagcractatattcagaaaaagacaggttctggctatgtgtttttacttcatatatataatctatatgagtaagtgctatcacatgcttcctccgcagcccttgtgtcagaaacactacagacaaaattatttcagaaacattttacacatcagatcctgctaggcaataaagcaatcattaatttagttttgtcctccaagtgaatacactaggatcaaattatccctagtagacaagtgttcatttgatcagattgaaagcttaatagctattttacgttgcacagactattaccaaagtattaagatttttaacattacacaacttgtttttaattaattggaacccacctcttttacaagcttcttatatcctcctaagtttggatagctgtttacta

SEQ ID NO: 97200 - DNA, 652 bp, Homo sapiens
ttcactgtcaaatccgtaggtctaaaaggaaaagcatacatacacataattgatttcacattgttttacatttcctttgtcttcttctggaatgtcatcttttttcttggtttctctttcagcacaggatctaatctagatattggaaaagagaatccaatgggttatatgtttatcttccactttccccactttacgtatcacataagaacattcgagatgatttcttatgcagaagaaaaaattaactgagcaactatattcagaaaaagacaggttctggctatgtgtttttacttcatatatataatctatatgagtaagtgctatcacatgcttcctccrcagcccttgtgtcagaaacactacagacaaaattatttcagaaacattttacacatcagatcctgctaggcaataaagcaatcattaatttagttttgtcctccaagtgaatacactaggatcaaattatccctagtagacaagtgttcatttgatcagattgaaagcttaatagctattttacgttgcacagactattaccaaagtattaagatttttaacattacacaacttgtttttaattaattggaacccacctcttttacaagcttcttatatcctcctaagtttggatagctgtttacta

SEQ ID NO: 97201 - DNA, 652 bp, Homo sapiens
ttcactgtcaaatccgtaggtctaaaaggaaaagcatacatacacataattgatttcacattgttttacatttcctttgtcttcttctggaatgtcatcttttttcttggtttctctttcagcacaggatctaatctagatattggaaaagagaatccaatgggttatatgtttatcttccactttccccactttacgtatcacataagaacattcgagatgatttcttatgcagaagaaaaaattaactgagcaactatattcagaaaaagacaggttctggctatgtgtttttacttcatatatataatctatatgagtaagtgctatcacatgcttcctccgcagcccttgtgtcagaaacactacagacaaaattatttyagaaacattttacacatcagatcctgctaggcaataaagcaatcattaatttagttttgtcctccaagtgaatacactaggatcaaattatccctagtagacaagtgttcatttgatcagattgaaagcttaatagctattttacgttgcacagactattaccaaagtattaagatttttaacattacacaacttgtttttaattaattggaacccacctcttttacaagcttcttatatcctcctaagtttggatagctgtttacta

SEQ ID NO: 97202 - DNA, 374 bp, Homo sapiens
caacgagggtctgaatgtttgcatgaaacatatgattccaggacactagtgctgttgtttcaatgtttgtcccacacatatgattcgaaaacactactgctggggtctgagtatttgtccctcacatagggttccagaacactgctacgagggtctgaatgattgtccctcacgtaggattccrgaacactaccgctggggtaaaaatgtttttctgtcacaaaggattccagaacactgctacgagggtctgcatgttcgtttctcacgaggtattccagaacactcctgctgtcgtctgaatgtttgtccctcacacaggattccagaatactactacgagtgtctgaatatttgtccctcaaagagaattc

SEQ ID NO: 97203 - DNA, 491 bp, Homo sapiens
tctgtcagcatttaaatataaatttttcatttaaaaaatcttctatcttggaggaaccttaactttgatgctgtgtgtctttctagctatccaagccatctcctcctttcttagaaaatttttctcaaggattttccacatttactatctccttttgctcattttcytttcactctttattcagatcagtttggctttcactttcaccaagcctatgaaacttcttgtgctaaggtcaccatataagagtgctaggggcttccatcacaagctgccacagattgagtggtttatcttctcacagctctgaagactggaaatccaggatggaatgtcagcaggtttgtcttcttctgagaactgctgccttgcagatgcctcccttcctgctgtgtcctcaggctgtgttgactgtgtctcaatctatttttagatggacacctgccatattggtgtagggtccacccatgtggcttcatttgacctcactt

SEQ ID NO: 97204 - DNA, 491 bp, Homo sapiens
tctgtcagcatttaaatataaatttttcatttaaaaaatcttctatcttggaggaaccttaactttgatgctgtgtgtctttctagctatccaagccatctcctcctttcttagaaaatttttctcaaggattttccacatttactatctccttttgctcattttcttttcactctttattcagatcagtttggctttcactttcaccaagcctatgaaacttcttgtgctaaggtcaccatataagagtgctaggggcttccatcacaagctgccacagattgagtggtttatcttctcacagctctgaagactggaaatccaggatggaatgtcagcaggtttgycttcttctgagaactgctgccttgcagatgcctcccttcctgctgtgtcctcaggctgtgttgactgtgtctcaatctatttttagatggacacctgccatattggtgtagggtccacccatgtggcttcatttgacctcactt

SEQ ID NO: 97205 - DNA, 568 bp, Homo sapiens
tactggttttctcaattatttctcagcctccccacaccaggctccttgccccgtatttataagctgctattggcttgarggtgactgtgtctttctaataaaactattttatagactgatagttacaagggtatagtagaacagaaatgaatctacctttgagtgtatttcaacatatctagtgatccatgaatatttcttattattatcattattgttatttttaaatagacaatcaggaaggcagagtttaggccaccaatgtaaacttaggctttcatcttcatgaagatatttgggatcactgcaagtattctgaattttaaatggcattcaatcatttgataaaatagaaattttgttactctgaactgggtagtgtttcagcaactggctactgtgtcattatttctataaattcaaaatgtagaaggaacatttaccttttaacaagggagtatcccaggtctcagttctcaaccgtttttctaggtgcactcatgcctctatgatctcatgaagcccaatagcattaaattctatgtatatgtgcatggtccatgaacac

SEQ ID NO: 97206 - DNA, 568 bp, Homo sapiens
tactggttttctcaattatttctcagcctccccacaccaggctccttgccccgtatttataagctgctattggcttgagggtgactgtgtctttctaataaaactattttatagactgatagttacaagggtatagtagaacagaaatgaatctacctttgagtgtatttcaacatatctagtgatccatgaatatttcttattattatcattattgttatttttaaatagacaatcaggaaggcagagtttaggccaccaatgtaaacttaggctttcatcttcatgaagatatttgggatcrctgcaagtattctgaattttaaatggcattcaatcatttgataaaatagaaattttgttactctgaactgggtagtgtttcagcaactggctactgtgtcattatttctataaattcaaaatgtagaaggaacatttaccttttaacaagggagtatcccaggtctcagttctcaaccgtttttctaggtgcactcatgcctctatgatctcatgaagcccaatagcattaaattctatgtatatgtgcatggtccatgaacac

SEQ ID NO: 97207 - DNA, 398 bp, Homo sapiens
ggaattctatgtgagggagaaacattcacaacccagcagcagtgatctggaatcctgtgtgacggccatacatgtagaccccagcagcagtgttctggaatcctatgtgagggacaaacattcagaccctagcagcagtgttttggaatcctatgtgtgtgacaaatattcagacccttgtagcagtgttccggaatcctatgtgagggacagacactgagaatctagcagcagtgttctgcaaccctatgtgaggtacagacattcagactacagcaggagtgttctggaatcctatgtgagkgacaaacactcagaccccagtagcagtgttctggaatcctgtgtgaggaacaaacattcaaacaacagcgagagtgttctggaatgctacgtta

SEQ ID NO: 97208 - DNA, 383 bp, Homo sapiens
ctggcgcttagagttcaataattgttagttcacttgctccccaggctgtgcattaattacaatatgtgtgtgtgttatgggggaaacagaaaaaaagtttaaatcattaggtcatttaaataatatctacatccttttaaaatcaaatggaaataaacmttcccagtgtatatcctatctgcacacttgttgtttgttatgatggaattatcaagactcaacaatcaacagtaggtcttcagaaattaaagaaaaatacctggaagcccacagttatactatgtacagagttgaatacatgacgtgtaaggcaacagcaaccacaaaacatgctttatcctttccgaaagactcttttcatgaagcttgagctgtttatgtga

SEQ ID NO: 97209 - DNA, 394 bp, Homo sapiens
agaattcagggaaataatacatgaagtgcctggcgcttagagttcaataattgttagttcacttgctccccaggctgtgcattaattacaatatgtgtgtgtgttatgggggaaacagaaaaaaagtttaaatcattaggtcatttaaataatatctacatccttttaaaatcaaatggaaataaacattcccagtgtatatcctatctgcacacttgttgtttgttatgatggaattatcaagactcaacaatcaacagtaggtcttcagaaattaaagaaaaatacctgkaagcccacagttatactatgtacagagttgaatacatgacgtgtaaggcaacagcaaccacaaaacatgctttatcctttccgaaagactcttttcatgaag

SEQ ID NO: 97210 - DNA, 587 bp, Homo sapiens
tatgcatgtttgatcataagaaaggctgttttggaaactgttgatgactcaatttgtctctataatcactatgagaaaaatcaaaggcaccacctgtgcaatatggaatttggaggactgttgtcatgtccaacaaacaacatgttcaacctggtgaaagctgactcctttcctggcttaaaattagtctggtgtgctcgtctasttggcactacttactgtttcctgagatgggtgatgataagcctatttgtaatcatgtgaattctttcctgcattttgacaggcatactttgagttatttgaggcgatgagggtaatgatttaccagtgacattttactgtctgttaaaggaaaaaatggcaccacacttacatgatccagacatgaaaaaggttcagcctgttgaagactgtgacaaaaaaagtctcataataaattaaaaagtaagctgtgatgcattatattttgactgtacattacaagtactagtactgttattactatgtgggattttttgtctttctgtaattctgagacacttcaacctgcaatgtcatgtttttcttgttatgatagttattag

SEQ ID NO: 97211 - DNA, 657 bp, Homo sapiens
tattgaagagagatctgcactcctatgtttgttgtagcactgttcacaacaaacaagatttacaagcaacctaagcatccatcaacagatgaatggataaagaaaatgtgagccaggcatggtggctcacgcctgtaatcccagcactttgggaggccaaggcatgcggatcacttgaggtcaggagttcaagaccagcctcgccaatatggcaaaaccccatgtctactaaaaatacaaaaaattagcgaggcatggtggcacatgcctgtaatcccagctactcaggatgctgaggcatgataattgctcgaacccaggaggcagaggttacagtgagccaagattgcaccactgcactccagcctgggtgacagactgagactctgtctcagaaaaaagaaagaaagaaagaaagaaaatgtagcatttatacacaatggagtactactcagccactaaaagaatgagattctgtcatctgcaacaacatggatgcaactgggggtaagacaggcacggaaagacaaacattgtatgttctcactcatttgtgggatgtaaaaatttgtgggawgtaaaaatttgtgggagatagagagtagaaggagggttatcaaaggctgataagggtagtgaggggttagcggagatgag

SEQ ID NO: 97212 - DNA, 568 bp, Homo sapiens
tcaaaattaaaacaaaagattattttattatattcccttaaaagattactaagagaatttttaaatagctttataattaaatcataagctatataatatttgtgttctcattattctatttcataagcttagtaagaccaamtttcactgagattaatccttttgggctatgaaaaatcaaagaaatgtatttagtacctgttgggaacaaaagccttctacataaggcaactaagcatgatgatcaaatttgaaaaaaaaatacattccagagtctttttatttagaatataggcaagttttatacatgacaagtctcttgcttgaataaaaatgtagaaaaactaatgaaagaaatccagggatgtcttccttgagctaaaatctatctttacaaatcctcagacttaaggaaaatacaagataagtggggagtattgcctctggctccatccttcttccataaaccatccctatcaggctaaccctcaacatataaagagacagagttgatacacaaagctgcacagagacagaacccaagagaactccaggggtttcttcaagt

SEQ ID NO: 97213 - DNA, 598 bp, Homo sapiens
aactatacttgtatcagacaaaatagatttcaagacaaaaattataaaaagaaacaaagaaggtcattatgtaatgataaaggaatcaattcagcaaaagtatataacaattataaatctatatccacaaaatactgaagcacccagatattgaaagtaaatattattagagctaaagagagagatagacctaaatacaatgatagctggagacttcaaaaccccactttcagcattggacagatcatccagacagaaaataaacaaagaaacatcagacttaatctgcactacagaccaaatggaattaataggtatttacagaacatctcatccaatgactgaagaatacacattcttcccctcagcacatggatcattctcaagggcagaccataagttaggccacaaaacaagtctttaaaaattaaaaaaataaaataaaattatatcaagtatcttctctgaccacaatgaaataaaactagaaatcaataatrtgagaaattttggaaactatgcaaacacatggaagttaaacaatatgctcctgaatgaccagtgggtcaaagaagaaattaaaatgcaagttaaaaaa

SEQ ID NO: 97214 - DNA, 612 bp, Homo sapiens
caaacttgggttcacagcctagtctgcccaccttcaaagtgtgtggtgttttcccttcttctttctccccctccctcagtcattcgttcagtcrgccatttgttctccaaatacaaattttacattgagaaaacaggatttagggagactagtctttgcccccatggggcgtacacatcattgagagggtcatacctttccacaggcatatttcaggcctcgcctggacccctcagatgggtttcaaggtgcatcttgggagaccctgtctgcagtttgcatgaagtcggccagaggcagtgcatgacttactccatctgggagacccagtaccctttaaacccagaacaatcgcagtggctgcatcacctagaataccacccagaaagggcagaggcctcttggacccaaggcaagccccaacaggcaaaggggttaacccagcaagaaaagagactttcaaagacccattaagaggaaacaagggagaaagagacacaaacctgttagcctgctaaggaatgaagaggaacagaaattaatgatgactccaaaatagccaagagactaaactcattttctaaatctgtctttaacaagaaaaatggagaa

SEQ ID NO: 97215 - DNA, 629 bp, Homo sapiens
agagaggtgacagctcatcctgggacagaactaacccaggcacactctgtccagaaaagtgacagccaccttccccagacatctcctccccagcaccaccacacccgtagctctgccatctgccaccaactcgagtcagagccagcaaggcagcaggactatgactgccagggcctctggaagcatttcagagccacacggtgacaaggtatgctgagaacctgttttgtaccacattctcccaaagtccctgctgagcagccagagacactggcatctgctggggacatggaccaggtggccaggttggtgttggattccaatgccaaagttctccctggaagccttacagccccagggcagtttgggtggtctggtctcaccatggcagagaacctggcaacatttcagatgaaaagaaagcgccagaggagtagaactatctgtgccaccaggtcccccagtgtattccccgggttttgtaaattaccaagtagatcaccatgattgtacagaatacttctcattcacaggactccagcttcctacaaggatctgctcccaacaagcaacttttatccaattgtttaaatcastgaaatcatttttcacagcccacattagaattc

SEQ ID NO: 97216 - DNA, 475 bp, Homo sapiens
ccagactctctgaacagatagatgatcagaatcttttctgattttcgttaaggaaatatttcaagagggactgtggcaccaagacagtgaatgcctgcccctgagccccgatgagaaggaattaagggccctgtgactctgtatgtgaccagaagccacatcaggctccgccaggcctggcaactgtccctggtgttctgttcttcacctcctgcggctcctgactcttcagttctcagttggaattgaggtcagctctctcgtttccttgtctggcccccttcacyacccacaatgcaaacccacactgagtgactaaccagcaagaggcccacagcaggtcccatagcaaccagagggggccaagcttgctaccacagcccacaacatgccaacaccccatttagacttttacatgagaaataaacatccactttgttcaactgctgttgttttgtctctgtgactaaatcaa

SEQ ID NO: 97217 - DNA, 533 bp, Homo sapiens
gatgcaatggaatgttattcaacaataaaaaataaggagttatcaaaccatgtaagcacatggctaagtcttaaagtatatattgtcaagtgaaataaaccaggctgggccgggtgctcatgcctgtratcccagcactttgggaggccaagtcgggtggatcatgaggtcaggagttcgagatcagcctggccaacatggtgaaaccccatctctactaaagatacaaaaaattagctgggtgtggtggcatgtgcctgtaatcccagctactctggaggctgaggcagaagaatcgcttgaacctgggaagtggaggttgcagtgagccaagatagcaccattgcactccaacttgggcaacagggcgagactccatctcaaaaaaaaaaattaaattaataaataaataaacataaataaaccaggctgaaaaggctatggcttcatactgcatcacttagtttatatgacagtttgaaaaaggcaaaattatagaggtagttaacagatcagtggtgtccagagtttca

SEQ ID NO: 97218 - DNA, 533 bp, Homo sapiens
gatgcaatggaatgttattcaacaataaaaaataaggagttatcaaaccatgtaagcacatggctaagtcttaaagtatatattgtcaagtgaaataaaccaggctgggccgggtgctcatgcctgtaatcccagcactttgggaggccaagtcgggtggatcatgaggtcaggagttcgagatcagcctggccaacatggtgaaaccccatctctactaaagatacaaaaaattagctgggtgtggtggcatgtgcctgtaatcccagctactctggaggctgaggcagaagaatcscttgaacctgggaagtggaggttgcagtgagccaagatagcaccattgcactccaacttgggcaacagggcgagactccatctcaaaaaaaaaaattaaattaataaataaataaacataaataaaccaggctgaaaaggctatggcttcatactgcatcacttagtttatatgacagtttgaaaaaggcaaaattatagaggtagttaacagatcagtggtgtccagagtttca

SEQ ID NO: 97219 - DNA, 533 bp, Homo sapiens
gatgcaatggaatgttattcaacaataaaaaataaggagttatcaaaccatgtaagcacatggctaagtcttaaagtatatattgtcaagtgaaataaaccaggctgggccgggtgctcatgcctgtaatcccagcactttgggaggccaagtcgggtggatcatgaggtcaggagttcgagatcagcctggccaacatggtgaaaccccatctctactaaagatacaaaaaattagctgggtgtggtggcatgtgcctgtaatcccagctactctggaggctgaggcagaagaatcgcttgaacctgggaagtggaggttgcagtgagccaagatagcaccattgcactccaacttgggcaacagggcgagactccatctcaaaaaaaaaaattaaattaataaataaataaacataaataaaccaggctgaaaaggctatggcttcatactgcatcayttagtttatatgacagtttgaaaaaggcaaaattatagaggtagttaacagatcagtggtgtccagagtttca

SEQ ID NO: 97220 - DNA, 408 bp, Homo sapiens
tgggattttatttagtgtctagggaatggtattaatgattactacaaacatgtttatttcgtgattttttgatggttcaawttttatggtattttaaaaatcccttgggagaaaaataaggcaaaatgagggtctaggacttgagtgaccttagttttaccttattgatgtggccccgttcattcctgagatgatagctcctcaagtttcctgctgctggctgctgcaacaggccaccaaagccgacagaagctatcctgggacttcatgtgaatctgtaacttatgtaacaaacaggaatagagaagattatgatttttctgtatttttgaaggaattaaagtcaaacttcttagatttccttctagctggtaaaaacaagggaaccattttttgttaagatttata

SEQ ID NO: 97221 - DNA, 515 bp, Homo sapiens
catgcctctgccatgccttctgtccacactgcccttcttgtcccctctgcctatcctacttgcaaaccaaggcccccttctcgaggaagccctccccaagccacacctcccttgcccattctctggctcctccgggagcctgctactcactcagcccagtgggacagccatgctgtccgagcagttggatattccatcgttacagatgttgcctgcccatccaggttggtagctgtttccaggtgggcaaagaaccaccccttggatctctctagaacttgccagtgttaaacatacagtgagtactcagtgaatatctgtcttttgatttattatgaagcaataaataaggcaaatcrgtaagtggcaagcaggtgttggaagggattctagaaggggtgaaggggtgttgagcctctcccttgtgacagaaactggactcagcgcttcatgtgttatctcctcattcttaccagtgtgggaggtagtattaactccattttacagatggggag

SEQ ID NO: 97222 - DNA, 548 bp, Homo sapiens
cccgctgtcagggtccgcgccagttttcccttcactctatcttccactgaaactcttaggccccagggtgactgttggggtgaggsgtgagataggggaattgaggttgtgtgggaaggatggaccatggatggtgggctaggacacccagctgcacgtgcatgagtgcatctatctggtataggacatagaagacagggttacagagcctggggacctccgtgcatgctctcgccctggctgactcgccatcagcactcctgtcccacctcctggaacccccaaaccccaggagatgcacatctccatattgcctcttgatcagccgtggagagagaggccctagggaaggggaaggtgagaggcaattcttctccaagtcccactggcaggcctcctgtgacagtcccagcttttaagactctttctggagcaagcattgaaggggtgagtttggcttgcagttggagaggtggggtacaggctctcttttgccttcttttaccagcacgctcggagttgtggccctacggggacccggtgaattc

SEQ ID NO: 97223 - DNA, 394 bp, Homo sapiens
gaagaaacctggtaaaggttttcaaatggcccagctgcccagacaatgcatgaaatctgaactctgactctatctctcttagcctttgaactgcctcctcraagagaagtgaaacttaactttataaaccagacactaagatgcatcttttaaacaagaacatagagtagctcttcccctatatcaagcatcaactatccaggtaactatgttacctcattgtatcctcacaaaaaccccaccctatccgaattcccaagggttccattttacagaggaggaaatagagagtcaacaagctaaggtaatgagtctgaggccatataactagtaagcggtagatctgggattccagcctagagctagctggtctttggcaccattcccctttgca

SEQ ID NO: 97224 - DNA, 394 bp, Homo sapiens
gaagaaacctggtaaaggttttcaaatggcccagctgcccagacaatgcatgaaatctgaactctgactctatctctcttagcctttgaactgcctcctcgaagagaagtgaaacttaactttataaaccagacactaagatgcatcttttaaacaagaacatagagtagctcttcccctatatcaagcatcaactatccaggtaactatgttacctcattgtatcctcacaaaaaccccaccctatcygaattcccaagggttccattttacagaggaggaaatagagagtcaacaagctaaggtaatgagtctgaggccatataactagtaagcggtagatctgggattccagcctagagctagctggtctttggcaccattcccctttgca

SEQ ID NO: 97225 - DNA, 648 bp, Homo sapiens
ccctacccaatgaattaagagctaaggtacaccagtcatggcactgagcttgtcttagtcccattaagtggttgtccctggatgggcatatgcggagcacgctgacggatcttcagggttcacaaaatgggctctgaaacatttcattttaacttgatcatcctctactttttttattttttgaaattcccattatattaaaaatttttaattgctataataattgcacatactaatgggagacatagtgatgttgcaatacatgaaatgtatagtggtcagaaaaagtaattagcatatccatagtctcaaacatttatcttccttaggatacattcagttatcctccttctagctattttacattattgttaactatagtwatcctacagtgtttaattcctatttttgaccttagtttatcttctattctcttttctgcataaccaaaacagcttgataggctaattttctgcatttccagatcttgacctttggtttgttttagttggaatacaagtctgctataacaaaagccaaaacaccagtggcttcaacaagatagggctgcatttctactttatataacagtgtgagtgtgaacagcccagagctgatactgtgcctctgtggcattgaggacctaaa

SEQ ID NO: 97226 - DNA, 543 bp, Homo sapiens
tatctccccttgatcatagtccaacagggccagcttcccttgggggccctttaaggaatggggtgaatgaaattgtgtcatttctatacaaacactgctctcttgatgctgaaatgccaaaccgaaggatttctgaggacctaaatcacggagcatcaatcttacaaagtgttggtccagagtcccatctcttccccaaccctggataccagtagcttcccacccagtccaaacctgcaccatccatcattatgtagatgaaaaagccataggtcatagcctctttgctattctattggagtagcctccctaggcagtccctctgaagccttggagtgcaggtaaatgctcattcccaagtagcaaagagaccatggagaaggtgcgtgtaaagagatatatttttgtaagaggaatatgattaatacattccgycccttggaacctggccatgcaaagcaagggcacagggattagacctgtggcacacttccccaattccctcatctgtaggatttgggctgccccaggcccacccagggg

SEQ ID NO: 97227 - DNA, 576 bp, Homo sapiens
cacgcccaggctgtcagcatcagaacctgtgccctttatttgtttatggatgtgtagtctgcacaagaacagctcatccctgttccactgggcattggctggcaacgagaatcttctgactgctcatctctcatatgtcaaggggttggaacacctgggcatctctctctatccccatgtggtctctccagcatggcggcttcatggaagcatttyttattggtggtcagggatcccaaggcatgtgtcctgagagagggggcaggcaagtgtattgattttatagatctagcctcagaagccacagagcataatttcctcatagtcacaagcccacccagattcgaagggaggggacatagactctatctttgatggggaaggcaacattccactgtaaaaacagtacatgggatgtgagatcatggtgtagcatctttgaatagtattagctgtcatgttgggtgaggaaaagtagagaaactttggggagaactgactcaccgcaactggggcacagttctgggatcgcccttggtttgactcactatttgcttcaaggtacctcaaaagggt

SEQ ID NO: 97228 - DNA, 566 bp, Homo sapiens
caatgagtataaagttacagttatacaagatgagtaaattccacagtcctgctgtacaacatagtgcctctaattaacaagaaggtattctttacttaaggttttggtragaggatagatctcatgttaagtgttttttactacacacaaaaacgaacaaagaaaacagactaaaggaaacttccagaagtgatggaaatgtttattacctggattatggtgatggtaacatgagtgtatccatataaccaaagtcactaaattgtagatattatgtgcagtattttgtatattaattagatcttaataaagctggggttgggagaagtttttccataaagtggtagagctgggatttgaactcagggaatcttgctccagagcccacgctcttcagcactgcgctgtgataatggattagatgaaccattggtggctatgaatcacccagtccagagcccccgacacatagcaggcgctctgcaaatgtgagttgtccccagctcatccagcctccaggaaccaggctgctccagtactccagcccctccccagagaggaacaga

SEQ ID NO: 97229 - DNA, 534 bp, Homo sapiens
cccagttctttccatcaacaagaagatggaggggaggctggccagcctgtgccccgccaggcacacctgtatgacagttccggtggaaccagaactcattaccaatgttccatggctttattgcccagtttgcaracagcaatcaatgatcaggaatcctgagttaaacgagggctttggtttttaatttttcttcttcttctttccaatgaagtaatttgagagtttcaagagaggaagcattgccataggagggggccaggtggacaaacatctgctgctgaaacagcttggatatctattgtgcttttggagggatgtttggactaaaatgatggagcatgtggagagtcaggagatacaggaggacaaatagcatcgtggacaatcataacactaaccagtatttattgagcaccttgcttgtcccaggagccgtaccaggatctttgcaaatcttatttcgctcgatttgcacagcatctgtaggaggtaggtcttatccagatcaccactttgcagatgggtgcactg

SEQ ID NO: 97230 - DNA, 523 bp, Homo sapiens
aactctcatggtaggatttgtcatttgactgtctaccagtctgaaagcaacagggatcacactgctgatggtaaacagagtagtgaaaacatctgtcacagtgatgtacatttactaaagatgtcctactgttaattgggatgaggtaaaggtggaaggagatggaagaatgaatgcttgatcagcctgggaatatggtaatattatggattgtggtgtgggtggctgattttgatggcatttggagcattgcaaaaagaaaataagctcatgccattcaactcccttaacttaaaacatgatgctaaaggcagtcctccacagtagcttcaaaagagactaatttcctgaagccagaggacagactgatgaaaaatcaggcccagaatatgatattaagggcaacagaaatatayggaagactgaatgtgcagcctccataggtcatctatgtcaaaacaaattccatagtagagaaaatatgagagtttaagagctggaaatgagacatttgggtatatga

SEQ ID NO: 97231 - DNA, 553 bp, Homo sapiens
atgactaaaacatctaattttcaaacattaggtgttagacacttggctaagcattttatacgcactttttcatttaatctccaaaatcagtacacatcagggaataggtgctattattattatttctatttamcacatgagagaagtgttgaaatttatagaaaccaagtaacttgtccaaggctgcagaattgtactcagaattctcaggaattagagcctgctaacaacaatgtcaagaacaacagctcttgattatttatactgctacagactttatgttataaaattaaagctacatcttgatagtcatttggtcagtaatagctctcctaaagctattacagaataaactgaatgatagaaaaaaaaatctattggtcaaatttcacagagaactaatttcggtcaattatagagttagttccaacagtaaactctatttgtattgtatttcttaatattatgataaaaattattttttctccttgtagagatgttctcatgtagcctaataaaaaagagaaaaatacgtggtaagatggtctaaaac

SEQ ID NO: 97232 - DNA, 553 bp, Homo sapiens
atgactaaaacatctaattttcaaacattaggtgttagacacttggctaagcattttatacgcactttttcatttaatctccaaaatcagtacacatcagggaataggtgctattattattatttctatttaccacatgagagaagtgttgaaatttatagaaaccaagtaacttgtccaaggctgcagaattgtactcagaattctcaggaattagagcctgctaacaacaatgtcaasaacaacagctcttgattatttatactgctacagactttatgttataaaattaaagctacatcttgatagtcatttggtcagtaatagctctcctaaagctattacagaataaactgaatgatagaaaaaaaaatctattggtcaaatttcacagagaactaatttcggtcaattatagagttagttccaacagtaaactctatttgtattgtatttcttaatattatgataaaaattattttttctccttgtagagatgttctcatgtagcctaataaaaaagagaaaaatacgtggtaagatggtctaaaac

SEQ ID NO: 97233 - DNA, 553 bp, Homo sapiens
atgactaaaacatctaattttcaaacattaggtgttagacacttggctaagcattttatacgcactttttcatttaatctccaaaatcagtacacatcagggaataggtgctattattattatttctatttaccacatgagagaagtgttgaaatttatagaaaccaagtaacttgtccaaggctgcagaattgtactcagaattctcaggaattagagcctgctaacaacaatgtcaagaacaacagctcttsattatttatactgctacagactttatgttataaaattaaagctacatcttgatagtcatttggtcagtaatagctctcctaaagctattacagaataaactgaatgatagaaaaaaaaatctattggtcaaatttcacagagaactaatttcggtcaattatagagttagttccaacagtaaactctatttgtattgtatttcttaatattatgataaaaattattttttctccttgtagagatgttctcatgtagcctaataaaaaagagaaaaatacgtggtaagatggtctaaaac

SEQ ID NO: 97234 - DNA, 553 bp, Homo sapiens
atgactaaaacatctaattttcaaacattaggtgttagacacttggctaagcattttatacgcactttttcatttaatctccaaaatcagtacacatcagggaataggtgctattattattatttctatttaccacatgagagaagtgttgaaatttatagaaaccaagtaacttgtccaaggctgcagaattgtactcagaattctcaggaattagagcctgctaacaacaatgtcaagaacaacagctcttgattatttatactgctacagactttatgttataaaattaaagctacatcttgatagtcatttggtcagtaatagctctcctaaagctattacagaataaactgartgatagaaaaaaaaatctattggtcaaatttcacagagaactaatttcggtcaattatagagttagttccaacagtaaactctatttgtattgtatttcttaatattatgataaaaattattttttctccttgtagagatgttctcatgtagcctaataaaaaagagaaaaatacgtggtaagatggtctaaaac

SEQ ID NO: 97235 - DNA, 547 bp, Homo sapiens
ggttggcactcacagattcgggcttcagacttatccccacgggctcagggttcaggtccatcccagctcctggtcggccgtggcagactcaggttcaaagcctgccccagcatcacatcagctcctgtggacctaagcttcaaattggctcctgtggatacaggtgttaggcccacccttatggacccaggcttcaggccaatgacccaggctccaggcccacccccaagcagacccaaactctagggctgccctggtggatctaagttccaggctcgtcgccatggattcaggcaccagacctgcccatctgctcrctcaggcatcagaccagcctgcctaagcctctagcagcaagctcacctacaaatcgtgtcagatggcttgcctagaatctctggatgagctgacttgtgaaggtcttttcctgatgacatcagtttctaaagactggaataagtgcctacattctcaaatgtgcaaacaccactgcatagccacaaatatcatgaacaattgggtaaacatgacaccaccaaagaaacaa

SEQ ID NO: 97236 - DNA, 582 bp, Homo sapiens
atgtggaacattggcttctccacggagttcccatctccctgcaggagcccccagacttccctccccactcttttctgagctgtcatctctgtgaaggcagcctttacagagtaagcaccatgcaggctaggagtgctcccagatccacttggacattttgtcttgggttgtgtggagggaagtagcagagagacgttgcagcaacaaagggctgagtgcaagcaacggagaggtggagagtaggcatttgcttcttaacatcatattgtcccttcagagatactaaggcaagtggcttatctggaggcaatgtagccaaggcatctccaacatggaaggtgttgtggagccagaggcccttcacaatcacatggaatagctgyctatcaatcggtcagcacccgtcaggagcccagacctatactaggctgggggtgggaatgggcaaaagagacaccaatgatataaaacaggtaagtcccacccaaggacaatattatccaaaatgaagacatcacagcagacataaggcagcgagtcctgcgatgggcattattccaggaagggagagagcactgtgag

SEQ ID NO: 97237 - DNA, 582 bp, Homo sapiens
atgtggaacattggcttctccacggagttcccatctccctgcaggagcccccagacttccctccccactcttttctgagctgtcatctctgtgaaggcagcctttacagagtaagcaccatgcaggctaggagtgctcccagatccacttggacattttgtcttgggttgtgtggagggaagtagcagagagacgttgcagcaacaaagggctgagtgcaagcaacggagaggtggagagtaggcatttgcttcttaacatcatattgtcccttcagagatactaaggcaagtggcttatctggaggcaatgtagccaaggcatctccaacatggaaggtgttgtggagccagaggcccttcacaatcacatggaatagctgtctatcaatcggtcagcacccgtcaggagcccagacctatactaggctgggggtgrgaatgggcaaaagagacaccaatgatataaaacaggtaagtcccacccaaggacaatattatccaaaatgaagacatcacagcagacataaggcagcgagtcctgcgatgggcattattccaggaagggagagagcactgtgag

SEQ ID NO: 97238 - DNA, 530 bp, Homo sapiens
gagtgcacttatcatcagggcccatctcccaaatgccaatcagagagaacaattccttttatgtaaacttcatgttgtaaattatagtatctgcatgccaagtagaggatggtaatattcactcccatgagtctctgggtattgctaaagcattttatgaattgacarctctcccatattatccatctctctgggttctatattcttggttttggaaactgtcaatggccaaagtctataagctgagttcctgggtccttcccaaaccctccttgatgggtaaacaaggtgatcatcaaaagagtaataagaccaattcttatcagatttctttttcctggtctgagccaagagaaaccacccatttagtccaactggcccagaaattctgtccttttaatattttgagttgtattaaactataaaaaatctcttctttatatcatagcaaatatatgtgatctatctgtgtttccctctactggtctctttaatttatgttagtggtagatgtttaataaatgttagtt

SEQ ID NO: 97239 - DNA, 595 bp, Homo sapiens
tgccacaattcaccaaatcttcacaagggttcaatggatcaacaaacacagactgaaaattcagtaagccaaccatttccataggaagaatgtggaaaataaagtaagtaggattttccttcagttcttggtatacaccattacttgctctttcctcccaaaacacctaccatctcttatgccactcaccatgaaatctctgcagcaggtattccataagagaagtcagtggtaggactaggagagccaaagcaaaggctacattgaaattcagaaatccattaattaaatagaaataccagggttctgtacctgagggagacataaaggtaagaaatcattagtggatgcctttaacacctattacggtgcttgacatataatgttctttgttggaataacactgatgatcctatgcctcatgggaatgagagtscacagcccactcttcccatgctaagctacacaaaagaagcacaagagcgagatggaagagaatgggattggtcatgaggatttagggagaaatcaagtttcaaatagttagctgtattttctatactgaccactatatctagcccaaattgctatgccc

SEQ ID NO: 97240 - DNA, 632 bp, Homo sapiens
ccacttttaaagaaatttccaaaaccgaatctattaggatggaaataaatgttattttcatctatgctctcaaactatactgcatttctctgtaataaattttctaatatgctatattaacaatatcactactatttactgtgaggactgggatggcatcttatcttgtgatgtttccctggcattagcacaatgactagcaaatagtactcaaggaatgttgctgaatgaatgtgtaaatgaatcaagttttcttcccaaagcgagtaagtgagagactggaaaaatactttatatcatgtgaaagaaaatcagccttaaagtggacaacccaactagtatttgataatcttagaatttcaattacctgatgactgctaaagagctctttatcttaaatggtctataaggaaagaaacaaatgagtaaagctctaagacattyacctaaacacaactgagtgactggctgccattaccccagatatataacccttgaaggcaactgagtgcagtgtttcctaagtaacaaccctctaagtgttggtccacatatcctgttttaggcagataaccatctgaatagctcattaacatatgatggccacatagcccagccacaagccacctatc

SEQ ID NO: 97241 - DNA, 595 bp, Homo sapiens
tttgggttaaatgaatgttgccaggtggaggttgctagagggagagtgctatgtgaaagtgctgtataaactgcttgcttttcacaaacagtagtgattctttatcctgtccagcctgccacaactggaccatcctgtatgtaagtccccttaataaatcctgtgtctcattcactggcttcaagtctcttcctgggcctcttgaacgtggtgccacctgtattgaagtcaacagaagttcagcacaacacaggtcaaaatgaagattctgactcagtaggtcaggatgttctaacgagctctagctgacatgatacgtcagggctgcagactagctttgagcaacaaggtgctagagaaatacctatagaacaacagagatgcaagacaaatgarttggaagttaaaagatttaaattcttgtcttagttttctcattaaagaaaagctgtgtgactatgaaaaaaaatggctctctgagacttttgtttgctcatccaagatgaaaatattgaaatgtattatacaataaacatttgcaaacagtgggtatgtaataaattactgactatcactggaaaataccatagaattc

SEQ ID NO: 97242 - DNA, 609 bp, Homo sapiens
aataatttgatttaaaataaatataagtattgttattgaagtacaaggataaatgatgcatattaccacaattctcagtccataaaaatccaaccctttacagtattaaaagcagctatataaaacatttttatgttcttttctctacccttttcctggagagttatgttacctcaagatttgaacagttttcygaagcatttggaaatttcttagttgagataatcccacttggattctgccactttatcattatcttgggtgggaagtaaacataaggcagataatatgtgaggcacttagcatgatacctggcacacggcctccattgagcagttacagaattatttatggtatgttacataatttctaaactcaatattacaaaatcagagacattttcatgcatcataagatgtctttaatcactaacttagaaaaataggtctttaggccaaacttcagaatggttgctaaatatttagatttttttaaaaaaacactaatgaagaagctcagtctttcccccttttagcagacgtgagtaattttcaagacagctctagtggtaagaactggggcctcactccttcaatgcacatgtgctga

SEQ ID NO: 97243 - DNA, 609 bp, Homo sapiens
aataatttgatttaaaataaatataagtattgttattgaagtacaaggataaatgatgcatattaccacaattctcagtccataaaaatccaaccctttacagtattaaaagcagctatataaaacatttttatgttcttttctctacccttttcctggagagttatgttacctcaagatttgaacagttttctgaagcatttggaaatttcttagttgagataatcccacttggattctgccactttatcattatcttgggtgggaagtaaacataaggcagataatatgtgaggcacttagcatgatacctggcacacggcctccattgagcagttacagaattatttatggtatgttacataatttctaaactcaatattacaaaatcagagacaytttcatgcatcataagatgtctttaatcactaacttagaaaaataggtctttaggccaaacttcagaatggttgctaaatatttagatttttttaaaaaaacactaatgaagaagctcagtctttcccccttttagcagacgtgagtaattttcaagacagctctagtggtaagaactggggcctcactccttcaatgcacatgtgctga

SEQ ID NO: 97244 - DNA, 608 bp, Homo sapiens
tgggaacccaccagtcagcaggtgggaggatgcaaaatatgtgaagtgttttactatttttaagagcctttgcctccattatgatcagaatgctaatcattaataagtaatgagatgtgactgccaagtgatcaaaatgttcatattggcacatcaatgaattctctctctactaatcaacagaaagcattgacattgatttggaatgtataattggaaatatatgatgaggggaaaaagagtaagatggttttcaaggttgttttcaccaggattatgggagcccagtgaattatagttttccaatgtatggaaaaacttttaaagcattggcatatgttctttatgagctagatatagaaacttcttcccaagtcatgtttttggaaggactaacaacatctccatccaacttgactctttctaggttccagaagtgyttctcctttttgtttgtgatgacttgcaacatcatctatcatttcaacagactttcatgttatgttataaatttattttacattgattatctctttagttggcataaaggaacttcttaacttcaccaaagcaagtcatattatgtgatggttactgttgggaaggtt

SEQ ID NO: 97245 - DNA, 608 bp, Homo sapiens
tgggaacccaccagtcagcaggtgggaggatgcaaaatatgtgaagtgttttactatttttaagagcctttgcctccattatgatcagaatgctaatcattaataagtaatgagatgtgactgccaagtgatcaaaatgttcatattggcacatcaatgaattctctctctactaatcaacagaaagcattgacattgatttggaatgtataattggaaatatatgatgaggggaaaaagagtaagatggttttcaaggttgttttcaccaggattatgggagcccagtgaattatagttttccaatgtatggaaaaacttttaaagcattggcatatgttctttatgagctagatatagaaacttcttcccaagtcatgtttttggaaggactaacaacatctccatccaacttgactctttctaggttccagaagtgcttctcctttttgtttgtratgacttgcaacatcatctatcatttcaacagactttcatgttatgttataaatttattttacattgattatctctttagttggcataaaggaacttcttaacttcaccaaagcaagtcatattatgtgatggttactgttgggaaggtt

SEQ ID NO: 97246 - DNA, 635 bp, Homo sapiens
ctccgatatactcagggactagaaaaatggtaacaaaatagatccttgggtttattaggcctactgtgatgtggacctgagctaggactccatttatactctgcctctatttgctaattttttaacagatggggcatagtgatattttagcttggttgatgtcaataaccactcagctcctgtatccagcagtcttcaaaaaaaaaaaaaaaaaaaaaggtttttctttcccctgtttggttcatctagttatcaactatataataaactgagagaaactctctaaaagaaaaaggtacttatctgggaataggatattgcaataggaatacatgtgccatagtaaattatgtgtgtgctcagggaagtaaaggatgacaaagatcttaaaagaaaaatgaggaggattatatacytgtcttgaaattattattgttggctacagggatcagggatcaataaaggctgatgccagtctgaggttagacagccagtcgctgggcagatgtccttgcggaagaatttttgtgtgtgaggttgcagtaacctttgtgcaaagctgtgtgttttgcagtcttttgtgttagttttgttaccaggcatacaaacatgtaagcgtgagaaccctctcttta

SEQ ID NO: 97247 - DNA, 635 bp, Homo sapiens
ctccgatatactcagggactagaaaaatggtaacaaaatagatccttgggtttattaggcctactgtgatgtggacctgagctaggactccatttatactctgcctctatttgctaattttttaacagatggggcatagtgatattttagcttggttgatgtcaataaccactcagctcctgtatccagcagtcttcaaaaaaaaaaaaaaaaaaaaaggtttttctttcccctgtttggttcatctagttatcaactatataataaactgagagaaactctctaaaagaaaaaggtacttatctgggaataggatattgcaataggaatacatgtgccatagtaaattatgtgtgtgctcagggaagtaaaggatgacaaagatcttaaaagaaaaatgaggaggattatatacctgtcttgaaattattattgttggctacagggatcagggatcaataaaggctgatgccagtctgaggttagacagscagtcgctgggcagatgtccttgcggaagaatttttgtgtgtgaggttgcagtaacctttgtgcaaagctgtgtgttttgcagtcttttgtgttagttttgttaccaggcatacaaacatgtaagcgtgagaaccctctcttta

SEQ ID NO: 97248 - DNA, 574 bp, Homo sapiens
tgcctaaatgcaaattgtttttaaagagctgataattcacaaaacctaatttcaaatacagcattaagaaagatagcttatataataaaaacattatgttataaaaaaagtacatatcttctgcttttgtaatgcttattatgtatccaccactctggacttagggacagtgtcacagaatcatggatttcccagaaaagattagaaggattcagcccatccaccaaacaactaactgaacatccctgaccctcctgacacatactgtctaatttccatgtaagcttaaagcctgatgaggtcatggaagagtgatactatttattcattccacaaatacttatctaggaacaggtaacttactatgcacagtatctacaactatgataagtaagataccaactccatcttctagmacgcaacttggaaacaaatttagactgattaacaagtaactatagtgcaatgagacaagagcaataatagtgatgcagtcatgcaccacatcataaatttccatcaacaacagattgcatatacaatggtggacctataagattataatattgtattt

SEQ ID NO: 97249 - DNA, 500 bp, Homo sapiens
atacatttgataaattagaattgtatcaatttcaaaacatatttattttgtaaatggaattattttaatgtttaaaatgcccaaagagataaatgaaggaataatattcactaaaactgaacagaagttatctttatccaaccatccattgacccttaggttgattayatgactttgttattgtgagtggtgctgtgataaacatacaagtgcaggtatctttttagcataatgatttcttttcccttatgtaggtagtagtgggattgttgaatcaaatgctagttctatttttagctctttcagaaatctccatattgttattcatagactttgtcctaatttatatcccaaacaacagtgcataagcattccattttctatgcatcctcaccaacgtgtgttgaacttgactttttaataaaagccattctggttggtgtaagatggtatcccatgtggttttaagttgcatttctctaatgactaacgatgctgag

SEQ ID NO: 97250 - DNA, 626 bp, Homo sapiens
ccatcctgtgttcagaatatcggagcctgggtcctcagcctctgcctctgggatttaagtcagatttgccagacactgggggttttgggtggggtggagggcactgggaaattagattccaagcctgtcctacagggactcctgtctaattggacggagagaacaatgaacatatagagatgctgggaggagaagattattcttttccttccaacttgactcacgcctcaataaatttttctgctgagtgtggaaagaaaggtaacaggtttgttttttgaaatcaccctttcaataagctgaataatagctaataataacagcaccagtaatacttaacataaaggcacagaccagtatttatagtacactatcgtgcacataaaaagaggggaaaatagtccatttaagtatttccttgtgtgaacataaaacatttytagaaggataaataagaaactaacataactgattatctcaaggaagatgggaactgggtggttagaggcctaggggccaggattgagagttttgttttttttgtttttgtttttgtttgttttttgtatttgtattctcctttctgccttatgaaccacgtgaatgttttgcccattcaaaaaaag

SEQ ID NO: 97251 - DNA, 683 bp, Homo sapiens
tttctgtgtctggtttatttcacttaacaagatgtcatccaggttcacccatgttgtcacgaatgacaggattttattcttttattcttttttatggccgaatagtattccattgtgtatgtataccatatttcctttatccattcatccattgttggacatttaggttgattccatatcttgggtattgcgtatagtgctgcaataaacatggtgtcctagatcttaaaacttccaaactgctgtctcttctaagaagcttctccaactctgaattttcctacctcccattagaattaatctctcccttttctctacttccaataattaatgtacatcaccattctagtatcaattgtgtgccttttaaattatctatatgcaagtatttttttaactagattctgattttatgtcttaacaacgataaaaactcacatttgcacagggatttatagctacaaagaattttcacaaaatctacattttatttaattctgccagtgacaccatggggtaggtttaattgtcatctcttttgtatgaatcacagaatggttgcctggagagctaatgtcaactgttaacggtcacaaggatacatagagtgcygaactaagcattaggctgtaactttcagcctttaggacctgagcttttttgtgtaattgtttggaaaggct

SEQ ID NO: 97252 - DNA, 520 bp, Homo sapiens
tatttggcaagcagtgattggcccgggatttagcacctctgtgcctccttagcaagctggtcttgggcaggatgcaatctgcaaaactgtacagagcaatgctgcytaacacatagaaaacccagcagatgatatatattgctaaaattagctgacactgtcactgcaaagggcatcagctgttttggccaacctaatatctatttcttttctttctggtcttagcatgctcatttccctttttgaaacttgttcccacccactgttgttacatgcagtctgcgtgggacagtcactcaaaccctgactgcctagagctaagaggctgtcatgtgattcaggttgatcacattacttactgctacttagatcccaagtccaaccagctccctgacccctctgacgtctggttcttctattttgtgagctacttcttccaattcttccaatactagcgttttgggcttatgttagccagaataggtttctgttgcttacaatcaaataacctataaagata

SEQ ID NO: 97253 - DNA, 548 bp, Homo sapiens
gagccatcctgctcctaccctctgccctcgacttatgatttataattagtgatatgctctcagataatgagcttgggcttgggagttggagagccttgagttaaaatcctatcatttactagctgtgtgatcttggacaaatcacttaacctctctgagcttcagtctgtgcttcttcaacrcggaggtgactgttcaaattgcagggttgcagttaggattgcttgagggaatagcaaaatttttacgtgttcatactctgctttaggagccagtactctacttttcagtgaaaagtagaagaaatctggtaaggagggtgttataataatcagcattttgcagaagtaactggaagttcagaaaggttgagtcactcgtttgagatcatcagccaggtattagtggagccaaccctaccctgcctcccaagtatttgcagaatgcccctccccaacacctgggacatagtaagtgctcaataaacacttactcccctctgctcctccttggttccctcacccataactagcaccacatagaggaag

SEQ ID NO: 97254 - DNA, 589 bp, Homo sapiens
ggtttatgtataggttgtataccacactttttttatctgttcattttctgatgaacatttaggttgtccccaccttttggcaattgtggctaacactgccatgaccatatgtgtgcagatatctaagttcctattttcaattcttttgagtatatacctagsagtggaattgctgggttatatggtaatcttatatttagccttttgagaaaattccaagctgttttctatagtggatgcaccattttgaatttctacccacaatttacaagggtttcaatttctccacatccttaccaacacttattttccatctttaaaaataaatatagtaattttagtaggtgtgaagtgatatcccactgtgtttttgtttgaatttccctaataactaatgatattgagcattttattcaatgtgtttctatctttttcttggagaaatatctatttaggttcttatcccattttataattgggttgtttgttctttttttttttttttttttaactaagcattaggagctctttatatagtctaaatatcaaacccttatcagaaatactttgtgcaaatatttttccccat

SEQ ID NO: 97255 - DNA, 589 bp, Homo sapiens
ggtttatgtataggttgtataccacactttttttatctgttcattttctgatgaacatttaggttgtccccaccttttggcaattgtggctaacactgccatgaccatatgtgtgcagatatctaagttcctattttcaattcttttgagtatatacctaggagtggaattgctgggttatatggtaatcttatatttagscttttgagaaaattccaagctgttttctatagtggatgcaccattttgaatttctacccacaatttacaagggtttcaatttctccacatccttaccaacacttattttccatctttaaaaataaatatagtaattttagtaggtgtgaagtgatatcccactgtgtttttgtttgaatttccctaataactaatgatattgagcattttattcaatgtgtttctatctttttcttggagaaatatctatttaggttcttatcccattttataattgggttgtttgttctttttttttttttttttttaactaagcattaggagctctttatatagtctaaatatcaaacccttatcagaaatactttgtgcaaatatttttccccat

SEQ ID NO: 97256 - DNA, 589 bp, Homo sapiens
ggtttatgtataggttgtataccacactttttttatctgttcattttctgatgaacatttaggttgtccccaccttttggcaattgtggctaacactgccatgaccatatgtgtgcagatatctaagttcctattttcaattcttttgagtatatacctaggagtggaattgctgggttatatggtaatcttatatttagccttttgagaaamttccaagctgttttctatagtggatgcaccattttgaatttctacccacaatttacaagggtttcaatttctccacatccttaccaacacttattttccatctttaaaaataaatatagtaattttagtaggtgtgaagtgatatcccactgtgtttttgtttgaatttccctaataactaatgatattgagcattttattcaatgtgtttctatctttttcttggagaaatatctatttaggttcttatcccattttataattgggttgtttgttctttttttttttttttttttaactaagcattaggagctctttatatagtctaaatatcaaacccttatcagaaatactttgtgcaaatatttttccccat

SEQ ID NO: 97257 - DNA, 589 bp, Homo sapiens
ggtttatgtataggttgtataccacactttttttatctgttcattttctgatgaacatttaggttgtccccaccttttggcaattgtggctaacactgccatgaccatatgtgtgcagatatctaagttcctattttcaattcttttgagtatatacctaggagtggaattgctgggttatatggtaatcttatatttagccttttgagaaaattccaagctgttttctatagtggatgcaccattttgaatttctacccrcaatttacaagggtttcaatttctccacatccttaccaacacttattttccatctttaaaaataaatatagtaattttagtaggtgtgaagtgatatcccactgtgtttttgtttgaatttccctaataactaatgatattgagcattttattcaatgtgtttctatctttttcttggagaaatatctatttaggttcttatcccattttataattgggttgtttgttctttttttttttttttttttaactaagcattaggagctctttatatagtctaaatatcaaacccttatcagaaatactttgtgcaaatatttttccccat

SEQ ID NO: 97258 - DNA, 587 bp, Homo sapiens
gtttttggagagttaatggcagggatgtgcttatgatatactattaagttaaaaaaagattaaataattgcttaagtgtgatattatcaccatggatctcgcttgatgttgttctaattaattaattaattaattataattgcctctttcctactaggctgtgagctcttcaggtggagattttgatttgcattttgtgttaatggcaaacattttattgggcacctcactatgtggggtgcaggtactctggtaagtattttacatggtttaatcctcataacagctgtggtagagtgactgcatcaatggcgccattccctgtatccccctactttgcaatgtgactttgtaattcctcccctcaagggttggagttggtttctcttsccctggaggctgagctggccttgtgacttgttttgaccaatagaatgaggcagaaatgatgacatgctagttctgagcccggacctcacaagagaccatctgcacttctgctctctcttggggccctgtctccgaaatgaggacaagcctgggctggcctcctggaaaatgagagaccacgtggagcagaacagtca

SEQ ID NO: 97259 - DNA, 583 bp, Homo sapiens
aggagccttccgcggccgaagagagctgaaggaagggggcttggtgggaactaatgggcctcttccagcttccctgcaggcctccagttttcctctacagaccagagagggagaggagctgatgggcrgagagtccctgtttttgtttttttgtgtgtgttttgttttttggttgttttgttttgttttgttttgttttgttgagacggtctcactctgtcactcaggctagagtgcagtggcacaaacacagctcactgcagcctcaacttcttgggctcaagcgatcctgccacctcagcctccttagtagctgggactacaggtgcacgccaccatacccagctaatttttgtattttttgtagagacagggtttcaccatgttacccaggcttcccaaagtgctaggaatacaggcatgtgccaccacgcccagtccctggttctttttttaacaccgctcagaactcaaccatccaaagcagttgtttcccccttcaaagtgtttatcccaagggtgctgccatgttgcaggacattgggaatgactacttggttgatggcatcatcagagagaagca

SEQ ID NO: 97260 - DNA, 620 bp, Homo sapiens
cgtaatgtgtttacacatttatttataaatgtatttataccttatgaattataaatgataatgtttcacacatttattgtaaattaccaagttccagtgtctttggaaggccaagaacaaggaagtgtgaggtggtctgtgggagaaggagggttgcttgaggaagacttccccagtcagagctgcaagttaactgtgccrggagggtggggaagcgcatcccaggcagaggcctggcatgagcaagggtcctgaggcaggacacagtagagcatctttgaacaacttctccaccagcttcttcagcatcatcagaaagccacaaccatcccttaggacttccggatcctcactttctctccaggcctatcccaaacaggttgcagcctggtccacaagctctgagcatcaggagagcccaggagggctggtttgattagatcactgtcagccagggacggaggttaattgctattctctttctgagtctggcttggcccagcagctttgcccactgccgtgtgtgtgtgcctgtgtgtgtgtgtccgtgtgtctgtgtgtctgtaggtcagtttggcctcgggctgggcggaggccgagggggctggggggagggttgc

SEQ ID NO: 97261 - DNA, 620 bp, Homo sapiens
cgtaatgtgtttacacatttatttataaatgtatttataccttatgaattataaatgataatgtttcacacatttattgtaaattaccaagttccagtgtctttggaaggccaagaacaaggaagtgtgaggtggtctgtgggagaaggagggttgcttgaggaagacttccccagtcagagctgcaagttaactgtgccgggagggtggggaagcgcatcccaggcaraggcctggcatgagcaagggtcctgaggcaggacacagtagagcatctttgaacaacttctccaccagcttcttcagcatcatcagaaagccacaaccatcccttaggacttccggatcctcactttctctccaggcctatcccaaacaggttgcagcctggtccacaagctctgagcatcaggagagcccaggagggctggtttgattagatcactgtcagccagggacggaggttaattgctattctctttctgagtctggcttggcccagcagctttgcccactgccgtgtgtgtgtgcctgtgtgtgtgtgtccgtgtgtctgtgtgtctgtaggtcagtttggcctcgggctgggcggaggccgagggggctggggggagggttgc

SEQ ID NO: 97262 - DNA, 620 bp, Homo sapiens
cgtaatgtgtttacacatttatttataaatgtatttataccttatgaattataaatgataatgtttcacacatttattgtaaattaccaagttccagtgtctttggaaggccaagaacaaggaagtgtgaggtggtctgtgggagaaggagggttgcttgaggaagacttccccagtcagagctgcaagttaactgtgccgggagggtggggaagcgcatcccaggcagaggcctggcatgagcaagggtcctgaggcaggacacwgtagagcatctttgaacaacttctccaccagcttcttcagcatcatcagaaagccacaaccatcccttaggacttccggatcctcactttctctccaggcctatcccaaacaggttgcagcctggtccacaagctctgagcatcaggagagcccaggagggctggtttgattagatcactgtcagccagggacggaggttaattgctattctctttctgagtctggcttggcccagcagctttgcccactgccgtgtgtgtgtgcctgtgtgtgtgtgtccgtgtgtctgtgtgtctgtaggtcagtttggcctcgggctgggcggaggccgagggggctggggggagggttgc

SEQ ID NO: 97263 - DNA, 620 bp, Homo sapiens
cgtaatgtgtttacacatttatttataaatgtatttataccttatgaattataaatgataatgtttcacacatttattgtaaattaccaagttccagtgtctttggaaggccaagaacaaggaagtgtgaggtggtctgtgggagaaggagggttgcttgaggaagacttccccagtcagagctgcaagttaactgtgccgggagggtggggaagcgcatcccaggcagaggcctggcatgagcaagggtcctgaggcaggacacagtagagcatctttgaacaacttctccaccagcttcttcagcatcatcagaaagccacaaccatcccttaggacttccggatcctcactttctctccaggcctatcccaaacaggttgcagcctggtccacaagctctgagcatcaggagagcccaggagggctggtttgattagatcactgtcagccagggacggaggttaattgctattctctttctgagtctggcttggcccagcagctttgcccactgccrtgtgtgtgtgcctgtgtgtgtgtgtccgtgtgtctgtgtgtctgtaggtcagtttggcctcgggctgggcggaggccgagggggctggggggagggttgc

SEQ ID NO: 97264 - DNA, 533 bp, Homo sapiens
acatatttatcctccaaggttcaaattaagtccagcaaaactgggtcaagcagttcactagaatctccactcttctgagctggagaagattacatgccatgttgtccatgaaaccttctgcaatggtggaagtgttctgaacctgtgctatccaatatggtagccaccatggctcttgagcacttggaatgtggctagtatgactgaggaatgaatttttaattttaattaatttaactttarattaaatgctattatctacctaattaggcagcatagttgcaccatctaatttttgcctattacccaggttccctgttgagcttgtaccaactgagcatggtgactggcacagaatgacccttctgtaaatcacagtcttcctacaatattggctgccatttattgagcacttgctatatgccagacactcatagcttgatttaatcctccaatagcctaaggaggtcagtgctattgttatcaaatccattttccagatgaagtggaggcatgggggcattaagtgactt

SEQ ID NO: 97265 - DNA, 533 bp, Homo sapiens
acatatttatcctccaaggttcaaattaagtccagcaaaactgggtcaagcagttcactagaatctccactcttctgagctggagaagattacatgccatgttgtccatgaaaccttctgcaatggtggaagtgttctgaacctgtgctatccaatatggtagccaccatggctcttgagcacttggaatgtggctagtatgactgaggaatgaatttttaattttaattaatttaactttaaattaaatgctattatctacctaattaggcagcatagttgcaccatytaatttttgcctattacccaggttccctgttgagcttgtaccaactgagcatggtgactggcacagaatgacccttctgtaaatcacagtcttcctacaatattggctgccatttattgagcacttgctatatgccagacactcatagcttgatttaatcctccaatagcctaaggaggtcagtgctattgttatcaaatccattttccagatgaagtggaggcatgggggcattaagtgactt

SEQ ID NO: 97266 - DNA, 533 bp, Homo sapiens
acatatttatcctccaaggttcaaattaagtccagcaaaactgggtcaagcagttcactagaatctccactcttctgagctggagaagattacatgccatgttgtccatgaaaccttctgcaatggtggaagtgttctgaacctgtgctatccaatatggtagccaccatggctcttgagcacttggaatgtggctagtatgactgaggaatgaatttttaattttaattaatttaactttaaattaaatgctattatctacctaattaggcagcatagttgcaccatctaatttttgcctattacccaggttccctgttgagcttgtaccaactgagcatggtgactggcacagaatgacccttctgtaaatcacagtcttcctacaatattggctgccatttattgagcacttgctatatgccagacactmatagcttgatttaatcctccaatagcctaaggaggtcagtgctattgttatcaaatccattttccagatgaagtggaggcatgggggcattaagtgactt

SEQ ID NO: 97267 - DNA, 606 bp, Homo sapiens
aaactgccaaatgccaaagctcagtaccccctgtctaccccttgtcctgccccaatcaccccccttttccagtttttcctgggccaagagaagagtctccctgtcccaggagctttggggayggcacgctgaccccttctttaaatccatctccctcagtgttccaggcccatccctattggaaaaaaatgactctcacaaaagacccctcagcagcaattatctaaatgggaggctgcgagggggagaaccatttagaatccacttcattgcaggattagctaattaattaacggtttcactgacaactcgttggagaagtgtatgttaaacaggagcacagtggggcgtgatttatagactctgacaccccccctaatccctggcctctccacccaggctccctctttcccacccccacccttctgctcacccccagagcagggaaatctgtggggaccctcttgcaagctccctctggagttccagggctgggctgctggccgagggggaccctatggagttgacagaagggcaactgaggagggggtgggctggggagacaggggacaatgaggagataacaagagggctgaggccccaggg

SEQ ID NO: 97268 - DNA, 518 bp, Homo sapiens
gtctttatccatgggtgctgtcaactaatttggacccaaggtgctggttgtagtaacttctcaggatcccttgagtcctgaccacagatccaagccctgccccagccaccaccaaccacagaagtgcctaccctgaattcagtcctccttaacaatattcactagacaactgtaaatgtcacaagccccttacacatacagagtatcaaaggctgtgtgttctcctggaatctcagcacagacatgacaccagatccctcctggacaaggcaaaagtctccctgttcaaaccagggtgtagaatgtcaccatcacagatgaagtagacatctgcccctttggtctggctataggggcagtagaaacttagtcttcaggatctagaactacttccctttcagctcaataragcctaatgttcctttaccaggaaaccaagatcaagtttaggaggcaaaagatcaggctggtcttgtgtctagtctaagatgtgaatgactgatagctgtccatttctg

SEQ ID NO: 97269 - DNA, 580 bp, Homo sapiens
atatgtgggagattatgtattcacatgctctggcacaaagagtctgatttaagaacttccttcaactcacctacctctggctctgccaatcaaagtctctctgctgagtgggacagaggatcaaaactcgtcaatccttaggactaagccatgtgtggatttgagatttctggggattttaggcccatgggccgtgaattctgaatattctgcaacctgctcagggctttgggtctgcaagagctggttctcagatccatttgtagcatgagtaatattaagaataaaatttctgcaagccaatggccggtccaaggcatgtaaagaaaaagctggatatactcatgcatcttgaaacyaaattataacgagcaaaaatggaatcaagagagggaatatctgaaagtaataacaggaacccttcagagttcatttcatcaaagcaaccgtcaggtgaataccaatgcaaatactctgtagataaacaatcactccttgccaatttggagggaaggagagagcaaagaggagtttgaatgaatagcacatgaaaactaaatatcctccaatgaaaaaaaaa

SEQ ID NO: 97270 - DNA, 617 bp, Homo sapiens
tttctctgcctattgtagaggctcagcctcagaaagcaaaagcacaaaaaggccaaaccaagaactagaccaaccaaaggaagccaaggggaggtgattacgtaaccccagcagccaggctgtctgcaagccgtatgacttatttagctgtctgtcttttcggatgtcagactccatcctttccagctggctctccgctttggtgattatattaacactcagtaattataggaaatggacacctctccagtcaccagcattcccaagtggcgggatgggggatattcaataccaggaacaccccatcacagggggtcagtcaytgcccaaggtttcagtagtctggcaaaaagagacagaaataatggcacagtagtgagtgctcccatgatgcaaaatgtattaaatttaaaggctggtgcttgatcttgagcggatgccctggggttaaaatgtcctttaaaaaatccaaaatgatgaagatgattatcagtggttgcctctggcattttgacataacacaaatttggcccctaatgttaatctccatgtgggggagaaattcctgactgacgaaattctagagtctgagcatcactgctttatacataagaaaa

SEQ ID NO: 97271 - DNA, 617 bp, Homo sapiens
tttctctgcctattgtagaggctcagcctcagaaagcaaaagcacaaaaaggccaaaccaagaactagaccaaccaaaggaagccaaggggaggtgattacgtaaccccagcagccaggctgtctgcaagccgtatgacttatttagctgtctgtcttttcggatgtcagactccatcctttccagctggctctccgctttggtgattatattaacactcagtaattataggaaatggacacctctccagtcaccagcattcccaagtggcgggatgggggatattcaataccaggaacaccccatcacagggggtcagtcactgcccaaggtttcagtagtctggcaaaaagagacagaaataatggcacagtagtgagtgctsccatgatgcaaaatgtattaaatttaaaggctggtgcttgatcttgagcggatgccctggggttaaaatgtcctttaaaaaatccaaaatgatgaagatgattatcagtggttgcctctggcattttgacataacacaaatttggcccctaatgttaatctccatgtgggggagaaattcctgactgacgaaattctagagtctgagcatcactgctttatacataagaaaa

SEQ ID NO: 97272 - DNA, 538 bp, Homo sapiens
aatccatcagcaaatcctgttgcctctttctccagaataagcgcagagcccaactgcttctcaatacccacagaagtagcacctggtcctgacaacttcatctgctaccttcattgctgactgagattattgacacagtcttgagcggtttccctgctctggtccttgccccaccctcaccagggtctattctcaatgcaacaaccagagtsattctattaaaaaaaaaaaaaaagtcagatcagatccctcctctgctcaaaacactccaatgccccatcccactaggaataaagtacaaagtccttacaatgcctgcaagggacccattcacccctgggactcactttctcttttcctcctggcttactctgcctgacgcatcctagtcactttattattctttgaacttgttctttgaactcctactttaacttgccctggggcagttacacctactcatccctctgcctggagccatctctccagacaccacaggctcactcactcacctccttcagcgtgtacaaatgccacc

SEQ ID NO: 97273 - DNA, 538 bp, Homo sapiens
aatccatcagcaaatcctgttgcctctttctccagaataagcgcagagcccaactgcttctcaatacccacagaagtagcacctggtcctgacaacttcatctgctaccttcattgctgactgagattattgacacagtcttgagcggtttccctgctctggtccttgccccaccctcaccagggtctattctcaatgcaacaaccagagtgattctattaaaaaaaaaaaaaaagtcagatcagrtccctcctctgctcaaaacactccaatgccccatcccactaggaataaagtacaaagtccttacaatgcctgcaagggacccattcacccctgggactcactttctcttttcctcctggcttactctgcctgacgcatcctagtcactttattattctttgaacttgttctttgaactcctactttaacttgccctggggcagttacacctactcatccctctgcctggagccatctctccagacaccacaggctcactcactcacctccttcagcgtgtacaaatgccacc

SEQ ID NO: 97274 - DNA, 452 bp, Homo sapiens
ctctggtcaccacctctttgccccatacagggttgctgtgttgccttctgccaattactcattttctctgtgccttggctccctcctgtgcaaaaatgggaactttagggacagagcgtggsagaagggaggcagctgagaatggacaagactagatggagataagtgaccagagctggcccccactgggggtggatggcactcttacagcacctggggagcgtggccaagttgggagtccatggacaccacagaaagaccctctcactgggtgagtaggagcactcacctgagcagggggtgcatgtgattgggaaaatgcttggacacggttggaacagatggtgcacctcaaaccctgcatagagtagatgctcaataaacatgtttaacaaaactagtgtgaagctactggataggggtgcacacagcacaggggagtgcccaggggg

SEQ ID NO: 97275 - DNA, 452 bp, Homo sapiens
ctctggtcaccacctctttgccccatacagggttgctgtgttgccttctgccaattactcattttctctgtgccttggctccctcctgtgcaaaaatgggaactttagggacagagcgtggcagaagggaggcagctgagaatggacaagactagatggagataagtgaccagagcyggcccccactgggggtggatggcactcttacagcacctggggagcgtggccaagttgggagtccatggacaccacagaaagaccctctcactgggtgagtaggagcactcacctgagcagggggtgcatgtgattgggaaaatgcttggacacggttggaacagatggtgcacctcaaaccctgcatagagtagatgctcaataaacatgtttaacaaaactagtgtgaagctactggataggggtgcacacagcacaggggagtgcccaggggg

SEQ ID NO: 97276 - DNA, 452 bp, Homo sapiens
ctctggtcaccacctctttgccccatacagggttgctgtgttgccttctgccaattactcattttctctgtgccttggctccctcctgtgcaaaaatgggaactttagggacagagcgtggcagaagggaggcagctgagaatggacaagactagatggagataagtgaccagagctggcccccactgggggtggatggcactcttacagcacctggggagcgtrgccaagttgggagtccatggacaccacagaaagaccctctcactgggtgagtaggagcactcacctgagcagggggtgcatgtgattgggaaaatgcttggacacggttggaacagatggtgcacctcaaaccctgcatagagtagatgctcaataaacatgtttaacaaaactagtgtgaagctactggataggggtgcacacagcacaggggagtgcccaggggg

SEQ ID NO: 97277 - DNA, 553 bp, Homo sapiens
gaatttggtcaaagatagcccttctgagggagtgaggctgacattgagagattagtcaaggctaggctggcaaagagagggtcccactctgaaagacgagaatgaacaaaggctcgggaatgagaacgatctgggcccagacacagaacagaacgacctgcgtggctggagaaggtgaatgagaagcagaggcagggagggagaggcagggctggatcacatagtgtctagtgggccatggtaaggagtctgggttctagctacttccttctaaggggcctgggtcagatccccaggaacagttaagagagggtccctgcgaaggaaggagataaaaacacaaaagcactgggctctacttccaggaaaacagtttggcaggctggragagcagggaagcccaaagaagctagctcacggcagggaccccggcctgccacaacacccaggaaggcagggatgcccagagaaagggcatctccttgtcatggtgggcatttgttaagcacttactgtgtgctctgcacagggctggacagcaaccattcactca

SEQ ID NO: 97278 - DNA, 481 bp, Homo sapiens
gaattcagagggaccaaggaaagggttactgtacgacagatcagtgacacaaacataagcggtggagtccacagaggggcaaacacaggagactgagctgctgcttggggcaagaaaggctcgttggaacttggggttctgagcatgaaacctcgcattccccattcaagcaagtcacaacatctctgcttcttcagatgtagagaataacaaaatccttagaggccaagcttggggaaaagaaaagaaatggtggtatscaagtagtactgaagtagtattgcctttggaaagtaataactaagggagaaaagaagcatgattccatagttggtgctggatacaatctgaagcatctaataaatttatgtcactgtagaaatttcgattccactttgatggaaatgaaaagaaactataggtaacataacacatggtatttaatcataaggcttgaaagaggataatctccttaacaaaa

SEQ ID NO: 97279 - DNA, 546 bp, Homo sapiens
tgtgtgtgtgtgtgtgtgtgtgtgtgtaaacctgcactttgtggattgatgtgatgcagctacacttaaaggcagaagttagttaatgaggtataaagacttagagggtccgaaactgagtaaggtttccatgttagcttataccctatgctagttgaacaaaaccagatctcatcccagtgtggaagtgcacatttaggacctcctaaatattgatgtgatatgtgtggtagctcctttttggcactctttgctaattatcagcaaagtttgatgtggggtcaratttgtattttgtgtgagttgattggccatttgtccttttgcgctcctgcaggcactcatcctcgcttttgtccttttgtgggttattttttttttgtctctatcagaaaatgggtacagagaccttcagcagatacagatggagagactcagcctaattcttctcatctcctaatgccttttagattcttaaggaggtataaaaatttttcccaaataaaaattgataagaagtataattttattatcagaagtttactg

SEQ ID NO: 97280 - DNA, 546 bp, Homo sapiens
tgtgtgtgtgtgtgtgtgtgtgtgtgtaaacctgcactttgtggattgatgtgatgcagctacacttaaaggcagaagttagttaatgaggtataaagacttagagggtccgaaactgagtaaggtttccatgttagcttataccctatgctagttgaacaaaaccagatctcatcccagtgtggaagtgcacatttaggacctcctaaatattgatgtgatatgtgtggtagctcctttttggcactctttgctaattatcagcaaagtttgatgtggggtcaaatttgtattttgtgtgagttgattggccatttgtccttttgcgctcctgcaggcactcatcctcgcttttgtccttttgtgggttattttttttttgtctctatcagaaaatgggtacagagaccttcagcaratacagatggagagactcagcctaattcttctcatctcctaatgccttttagattcttaaggaggtataaaaatttttcccaaataaaaattgataagaagtataattttattatcagaagtttactg

SEQ ID NO: 97281 - DNA, 554 bp, Homo sapiens
gggttaaagccagggagccaagtggtcttgctcagcagatcccacccccatacccccatggagcccagcaagctaagatccactggcttgaaattcttgctgccagcacagcagtctgaagttgacctgggatgctcgagcttggtggggggaggggcatccaccattactgaggcttgagtgtggctttcccctcacagtgtaaacaaagccactgggaagtttggactgggcagagcccacctcagtgctgcaaagccactgtagccagactgcctctctagattcctcctctctgggcasggcatctctgaaagaaaggcagcagtcccagtcaggggcttatagataaaactcccatctctgtgggacagagcacctggggaaaggagcaactgtgggcacagcttcagcagacttaaacattcctgcctgccagctatgaagatagcagtggatgtcccagcacagtgttcgagctctgctaagggacagactgcctcctcaagtgggtccctgactcctgtgcctcctgaagtggagacaactcccag

SEQ ID NO: 97282 - DNA, 567 bp, Homo sapiens
cagctatgaagatagcagtggatgtcccagcacagtgttcgagctctgctaagggacagactgcctcctcaagtgggtccctgactcctgtgcctcctgaagtggagacaactcccagcaggaattgacagacacctcatacaggagagctctggctggcatctggtgggtgcccctctgatacgaagcttccagaggaaggagcaggcagcaatctttgctgttatgcagtctccgctggtgatacccaggcaaacagggtctggagtggatcccagcaaactccagcagacctgcagaagaagggcctcactcttagaaggaaaactaacaaacagaaagtaatagcatcaacatsaacaaaaaggatgatcatgcaaaaacttcatctgaagatcaccaacagcaaagactaaaggtatataaatccttgaaggtgaggaaaaaccagaacaaaaaggctgaaaattccaaaaaccagagtgcctcttctccaaaggatcacaactcctcacaagcaagggaacaaaactggatggagaatgagtttgatgaattgacagaagt

SEQ ID NO: 97283 - DNA, 628 bp, Homo sapiens
aatgatcaatgctttattaaaggtaataatgatagtgtctttaccattttccagttgatggagcactttttcatatattactttttgaaagaaatagtttatttataaactaaaaaaaaaaaaaggatggtgttcagcagttgtggtataaattgtctcccccaaaattcagattttgaaatcctatcctctagtacctcagaatgtgacattatttggcaatarggttgttgcagatgtaaataacttgagatgcagtcattagggtgggaccaatgccagtatgactgaagtccttataaaaagaggagatttggacacaggcatgcacacagggagaacggcacatgaacatgaaggcagagatcgggtgatgtgactacaagcagaggaccgccaaagcttgccagccaaccattagaagcaaggagagaggcatgaacagattcttcttcacagccttcagaaggaagcaacctggctgacaacttgatcttggacttctaccctccagagctgtgaatcaatacatttgtgtttgtggtattttgttatgggagcccaagctaactaatacagcagtcatcaacacatccatgttatttgtgattgttctgcagccttgagt

SEQ ID NO: 97284 - DNA, 472 bp, Homo sapiens
aaaaaaagatttcaaacctttgtgtggttcattgtactctattcatgcttgcatggaccttgatgagaacactgctgtaattgttattcttgtttcactatatataatatgtatttttccttcaagattttgtctttgattttctgcagtttgactaagataggcctagatgtgttgtttttatttatyctgcttggtgtttatgttttagggcctatatccttcaatgagtaacagggaatacaggacagagaaatagttaaataagagtatatggaaagatggtgcaaaagacatggaggacaagtcagagaaggactgacaagtagcacaacttttaacctaatccagtactcacttttcaaaacatatatttgttattgttgttctatacagctgtgtgtatctgtattacatatacgtggtagaaataatgtgaaaacctttaaagcaagctgcattgatggaattc

SEQ ID NO: 97285 - DNA, 650 bp, Homo sapiens
ttctactgggctcctggattctcacaaaggcattcccaactatggatagttgctaagttggtgtttctgtcaggggactaggggtggggccttcctattccaccatattgctgatggcactctctctttcacttttgaaaaaaaaaattactttttggatatagaatctagaatatagaattctgggatatagaattttaggctgctgaaaaaaagatttcaaacctttgtgtggttcattgtactctattcatgcttgcatggaccttgatgagaacactgctgtaattgttattcttgtttcactatatataatatgtatttttccttcaagattttgtctttgattttctgcagtttgactaagataggcctagatgtgttgtttttatttatcctgcttggtgtttatgttttrgggcctatatccttcaatgagtaacagggaatacaggacagagaaatagttaaataagagtatatggaaagatggtgcaaaagacatggaggacaagtcagagaaggactgacaagtagcacaacttttaacctaatccagtactcacttttcaaaacatatatttgttattgttgttctatacagctgtgtgtatctgtattacatatacgtggtagaaataatgtgaaaa

SEQ ID NO: 97286 - DNA, 636 bp, Homo sapiens
gtgagctatttatagagagcatatagtcatgttttaatctactctgtccatatctgtcttttgtttatttagacaagtaagtctaaatttaagtctgtcattttatttgttgtattctgttgttcatctgtcttctctttcctgccccatgtggttactccaacatacattaaggattccatctcgatttatctgtagtacgttttagwgcatctccttgtatagcttttttagtagctgctgtaggtattacattatatacaccaaacatcacagtctcctggcataattattttactattctgagaggggtggaaatcttacctcccttttgtatcccttttcttttccccattttaaatataatggtcctaaatacctcctctacatacatttagaattatctcagatattataatttttgctagccttctaaacataatttttaaaactcaagaagtaaagtctattgcattttttcctatttttatctcattttttttccttcctgatgttccaagattcccccttttatttttcctaacaaattctctaagtttgcctttatctgagaatatcttgaatttttcctttattgcttggaaatatttttggtggacacagggttgacaggtc

SEQ ID NO: 97287 - DNA, 537 bp, Homo sapiens
agagggccagccatggtgtgctgtcttggaggcatgacgtggtggtggtaccagggccagaatttattctctagaagcatctctcaagatgaatggctgtacagaaacatgtttaacctctcttcattgtctccatgacaacatactcgactgtttcttccttgtctcctttgagcgcataccagtgtgttgtcctcctctctctctgaccatttatctgtcactcctgaaggctctttctgatctccctggcctttaagtgttagatcttcaaggttcatcattaggctctcttctttcctcattctataatcatccactgtcaatctcttccacccctctctgctttagttccagccatcatcatctctaggcaagactatcccaggaatatccttcctgtcaccccacattaccaacttccacccaacctctaaaatccagtggctacaytgaaaccagaataaccttgcctaatggcaatcagatcatcctctgtgtaaacccctcattggattcccagtaccttgggataaa

SEQ ID NO: 97288 - DNA, 651 bp, Homo sapiens
ttattagggaactacaaagttttagaataaaatatcagggggtgggtattattgtggtaagaacacttaggatgacatctaccctcttaacaaatttatatgtgcacaatacagtattgctaactacaggcacaatgctgtacagcagatctctggaagttattcgtcttgcataactgaaacttatctattgaacagcaactcctttttatcattttttatctctcagattggcaacagttaaaaaaattaagtatgtgtgagaaatgcaagaaacaggcatttttgtacacttttgaaatgagtataaattaatgaaatctttttgaaaggcaatgtcaggaataaaattcaagaatttaacatccagtttggcacgggcattagctcttccgaacagatgtcagataccaccggttgttaaggtcctgccaacacactgtccccagtatgcaccagctgaatatcaactccagcagaatttatccagtcttaaatcatgtgtgctctttgactgggcaattccayttctaggaatctatccaaaagaaattctcttttaagtacataaaagatgcacacacatttatgttaattttgtcattgttttgaaatgctaaaaaagaaaaaaaaatagaaacatcctaatga

SEQ ID NO: 97289 - DNA, 603 bp, Homo sapiens
aaggagctctatagccaaaaagtaagtgatcagagagaaacaaatccaacatgtctttctacagttcctctggttagaaaaatgagagctgaacagagaaagaaagtgttttccttttgcttcgttggagactcatggtattgaatgaaagctcatgaggagtctgcaataacatttagccatatgtaaaaatatagcatgttaagacaaatacatgtagatatgggtatttaacacagacagaaagaatagaggcttcttaaagcaaaattgctataaaggagtgtcactttttagctcttcctttctctgggcaccaaaatctagactgctcaagtatacagkagaaaaaaacaaaaacacagaatggaaatggatcttatagaccttgagaggtttattaatttaagacagatgtatagtaatgactggaactaatcatctgtaggttactctacaattaactttgtcataaatatagacacaaataaagacaaatcttacatcaattctaaggaaaactgtgacaacttttaagcctgtctccagttcagtccatattgcttttcctcctaaacctgatgacattcttgtttaccacac

SEQ ID NO: 97290 - DNA, 609 bp, Homo sapiens
tacagtgaacacttacaccacatacatgctttcagtctggttttctgcctctttcctcacgagggtgtattttcatgcagaaactttgtgtcacttactctatatttatattggcctgttgtgtatgaactttgcaggcaaaagagaaaagtcctggggaaagtcattctgtgtgtattaattgcagatatatccagtgatggagaaaaaaaggcgaacatgcctgggcctcaacatccgcaacaaagaattcaactatcttcataatcgaaatggttctgaacttgaccttttggggatgcgagatctacttgaaaaccttggatactcagtggttataaaagagaatctcacagctcaggtaatggctccagagagaataacaagctgcttcccctccacctccacctttagacacttttcaacctcttacctcttaattggcagctgaaagagcaagatgtatgatattataggaattatattttctccagaataggatcccctggattttagccttctctaatgcacaktcttatagcatatgagtatgcgtatgtgtgtgtgtgtgtgtgtgtgtatttacagaaattctacgtagcagagttt

SEQ ID NO: 97291 - DNA, 566 bp, Homo sapiens
gataaggctgtttctcagatatttgggactgttcacatactctaagattctgagtttgagaatgccatttgagatgggcactcactaaatgacagcttaaaggtgtactacatctatggctcctgtgttcctgttctcataatggctactgggatatttggctaataagttgcatgctagaagaatgtaatgaatttcaaaatttctcatatactggacatttcttgaaataaaggcagccattaagttctgataagacaaataggtcaaatacaaggccaaattagactcaaattcaataccaaaatcctttctcacatactctagttataccttattagaatatattagttttaggaaatttaaatctgatgccttaagcatattctacccaaattttctcagggttgttttatttgtattgcaacttyggcattattcattttaggtatccaaaaggatggatcagagtaattcacagcattagacttgcatgctaaataagtttatgcatttttctcacacaaaaactgtcttggctacaaatctgagctctaaagattctt

SEQ ID NO: 97292 - DNA, 403 bp, Homo sapiens
aagctcctctactgttcagactcttcaaatgtctrcttctgtactttgaagaattatagtgaaaactttcctcaaactctgtcactgggagtatatagagagctaggtgcttttccagtaatgcttatgcacaaacaagatttataatccagagaatttcaccaactttaagacattctcggtagaaaaagcaaatggggaagaagtaaagatagattctttcattattatcaatggtaaccataatactcaagctaaccagtggttagcaaacacaaagcagggggaagaatcccatccttatgttaagattgtagctagagtcttatttaaagacaatttcaatttaatgttcaaggagatatctatgaaaattcaattggatttcaaatttcaggaattc

SEQ ID NO: 97293 - DNA, 633 bp, Homo sapiens
gttcctcatctccatctgagatcacctcagcctggacttcattgtccatattactatgagcattttggtcaaagccattcaacaagtctctcagaagttccaaacttttcctcatcttcctgtcctctgagccctccaaaatattccaacctctgcctgttacccagttccaaagttgcttccacattttcaggtatctttatagcaataacccacttctggtaccaattttctgtatttgtctgttttcacactgttataaataactatctgagactgggtaatttatgaagaaaagaggtttaattgactcgtgattctgcaggctataaaggaagtatggctggcaaacctcaggaaacttacaatcaggcagaaggtgaaggggaagcaagcatgtcttaccatggtggagcaggagtgagagagagagagagagaggagagagagagagaggagagagagagagagagagragagagagagagagagagaacacaagcgaaggggaagtgctacacacttttaaacaaccaatcttgtgagaactcactcactgtcatgagaccagcatggggaaaatctgcccccatgatccaataacctcccactacgtccctcccctaacactga

SEQ ID NO: 97294 - DNA, 536 bp, Homo sapiens
tgtttgtgggaatctgatgcatgtgtgtacatgaagaaggtagattttctgtttctcacccagattatactgatatgtagaacaagtggaagtggaaacagcaaagatgccccacacagtgatatttgattacatagatgttgtttctgtttttgaatgtgcctctgacggtttgaatagtaaactaccaggatttagagactgttaggatgctagcttggaggactccatcagacgcactcagggcgttcataagattagccttcccagccctgatccctctcccaaccatcccactcagatctatctagtcagaatctgtacatgccactcagggaatctgtttctttaataagaattcttgggtgattctaaagttttaaccagttttggagctactaaacttttccagtttctctgtgttatagaagaagaaaygagactcagcatggtataaccctaaactgtcagaaaatgttgcagaggttttcagtgatgtgctaaggtcatgcagctattcagcgacagccctgttc

SEQ ID NO: 97295 - DNA, 563 bp, Homo sapiens
catttatgcaactgcataacaactttaaagaaagaaaatttttcatatattcatctatcatccagctgctttagatgtgatagctcatttaccttgaatgatcatgtatgctttataaatataatatttatatatacttacattgcattaraattttcagttttcccttatgatttcttttaaacaaatctgacttttaccaaatagtctcagtagaggatagtaaaaataggaatgtatcttctatctcattaagttatttaaatactttgttgaagttttaggccttctttctcagtgcagtgttggaatacattctttctatatttcaaaatcgcagtttaaaataaaaggttgattaagttatttcagtggatctgaattgatgctgtcattaattaaaattacatttattaaaattcaggtaaaatgaggaaaatatattgaagtaagcttttcataggaaagtctgaaacattttaagataaatgctcattgtacctgatctaaaataacactattctgaactagcatttatttctacttataattttaattctgtt

SEQ ID NO: 97296 - DNA, 565 bp, Homo sapiens
aacacacccaaagtgggggttatgggctaaattgtgtccctccccattcatatgttggagccctaacccacagtatctcagaatgtgactgtgtttagagatagggtctttaaagaggtaattaaggtaaattgaggtaatgagggtgggccctaatcccataggactggtgtccttataagaagaaaagattaggatgtagacacacaagaaggaagaccatgtgaagacatggggaaaagacaaccgtccacaaatctacaagccacggagagagacctcagagtaaacccaacctgttgacatcttgatcttgcacttccagcctccagamtgtgaaaaaaaataaataaatttttgttatttaagtcacccagcatgtggtatttgttatgacagccccagctgtcatacagtgggttagcgttaggtgtatgccaaggaagtagcttcctggaactcatcatttccattttcttctctgataaggcaggaccacgtgtcctgaagggaggaggttacatccacttgacagcttcatggcccagctgtatgagatgaattc

SEQ ID NO: 97297 - DNA, 624 bp, Homo sapiens
atagttaaaaaccaaaaagatttgtatttttctttttatttgtgtttctttacgagactgatgctgggaacatttaatgtgatacggcagtgcagggcaaagttataggcatgggcttaggagttaatcagacctttgtttgagtgcctgctcgaccacatactaacagtgtgaccaaaatatagttttcttatctgtacaatcagaatatcaattcctacattagaagtttttataaggcttgcataagataccatttaatgtactttgcttagttcctgacccagtaggaataaatagcaacaagtactattactccatctcctacatatgttattgatgcaatccayttaatagttttaaaaacatgctattatacctctaaagcaacatctctgaagagtaatggtagttttaacattttttattaatcatttcttcctgaagatataccagaatattttctacacagattacattagtaaattttgataaactgttaacaaagtaaaaataaattcttctttctatacaaatctctcaattttaaaacaaagaggaaaactcagaggaggtattcatagtcctgtgttttgcaatctgacttgtagttcactgcagagg

SEQ ID NO: 97298 - DNA, 590 bp, Homo sapiens
tttcttccaaacattttcaatccacagatgcagaacctgcaaatatagaagactaatataatatatatttttcacctatgtgtttgttgtagcttttgttagaaccttatgaatatatgacttattcaataaataaataaatgaaagtttccatttatttccaagaaaggggtgaaaaaatacagataattacttttttcctccattttatattttttctctcttgtaattaaataaagacctgtggttattgtaacagtaaaatataatatgcatgtctcttaattataagaaagactttatttttcagagaaggcttcgctttttccagaaatatctattaacataaattatattttggtgaccatttggtctaaccaatcttatctcaarttattttgaaagtgttcaagttctcattcatatggtctactaaagtagaccacaatacccaaccctaaatatttccataaaataatttgtgattcacatttttaccattaacagctacatttttaccgttaacagcttttatacctattgtttgagcaatctgctaaatgagaataaaatatcagatagttataatt

SEQ ID NO: 97299 - DNA, 546 bp, Homo sapiens
acaacagactgaaagctgtctttcacaaggaacaaaaaaagccaaaagatattaatactgaagatatcaaaatactttgatgtctttaaagtgctgacaaaaatgatcaacttataagttcatacacagccaaaaaaactgttaggagaggcggctttaaaaagttaggagaggcagccaggtgcagtggctcacgcctataatcccagcattttgggaggccaaggcagatggatcacaaggtcaggagatygagaccatcctggctaacatggtgaaaccccgtctctatgaaaaatacaaaaaattagccgggtgtggtggtgggcacctgtagtcccagctactcgggaggctgaggcaggagaatggcgtgaaccagggaagcagagcttgccgtgagccgagatcgtgccactgcactccagcctgggtgacagagtgagactcagtctcaaaaaaaaaaaaaaaaagttaagagaggcggggctcagtgactcacgcctgtaatcccagcactttgggaggctgaggcgaatggatcac

SEQ ID NO: 97300 - DNA, 527 bp, Homo sapiens
ttggagcacagccaaaaaagagaacttagaggcggtgttgtgatgggagctgacagcaggatctatagtcccaagtcctacagtttccacccatctttgttttggtctgtttcataggctctgcagagttggaagtctgccaagcaaatggcccctaggcacttattcactgtttagccaaccatgtgatgcggctgtcctccaattgctcgtaggcatggaaggagatggaagcaccattggatggcttcaggcagtcgaaacaatttgagttgaaacattatttgaggtctcatgtaagccatgggagttaaatttaaacacaaaacaggcatacagggcccagggaacaatattcatcactgttctttgtcctttgccrtgccataccctgttatctttttagattgagaatgagaaccatttccttggtttaaaagtctgctcctacttagagaagaagtgccatgcctttgtgcgtgggtgtgcatctgtgtgtgtccacatgccctgagcatttgtaacgg

SEQ ID NO: 97301 - DNA, 549 bp, Homo sapiens
tgagaaactgcagaaagtgtctcaaggcgactttcccactagttgaggttacccccagggagttctctctctccacacttccaggctgtgcagagtgcaggctgagggggcttcagaagccaaagccttgagacagaaaaggggaggtgtgagaagctgccaccctgggctgccacagagggggtaggatgtggggtgcacaagcatctgctgtgcccacccagagaactgggggccagagtctttctcccctttccccaggagagaaatcacaggaaactggtggggagttagtatatttttaggagcaaatccgggaacagaacaygctcttttcctccaaggaagaagcaaccaagaatgagcaggttgcagaatcctgttcctcatatatgacactaggccaatgccatgcaaaaacagcatttcctcagtcccaactctatggcaagcccatgctgctgagatgatcaggatgtcagtcctgtccctagcctggctcaggtctggtctgagaaaatgcaggccatgctggctgggcagctcact

SEQ ID NO: 97302 - DNA, 549 bp, Homo sapiens
tgagaaactgcagaaagtgtctcaaggcgactttcccactagttgaggttacccccagggagttctctctctccacacttccaggctgtgcagagtgcaggctgagggggcttcagaagccaaagccttgagacagaaaaggggaggtgtgagaagctgccaccctgggctgccacagagggggtaggatgtggggtgcacaagcatctgctgtgcccacccagagaactgggggccagagtctttctcccctttccccaggagagaaatcacaggaaactggtggggagttagtatatttttaggagcaaatccgggaacagaacatgctcttttcctccaaggaagaagcaaccaagaatgagcaggttgcagaatcctgttcctcatatatgacactaggccaatgccatgcaaaaacagcatttcctcagtcccaactctatggcaagcccatgctgctgagatgatcrggatgtcagtcctgtccctagcctggctcaggtctggtctgagaaaatgcaggccatgctggctgggcagctcact

SEQ ID NO: 97303 - DNA, 387 bp, Homo sapiens
gtcaatcgcttgctatgtcacagcatcctccagtgtctggtgctggtggtggagggacgtactataatgaatctccctcctcacacccatcagaaagtcttcctgcaccccaacattacctccttcgtcagctcccatgcccacacagtgctttttaaaccctccaaactggcactcagagctgccccctgactgatggcagctgccctcccctggatggcctctggaacacatttgtgcrtcctgcctctgcctcttggctggggccattcctcccattgaaataaccccttctcagtgtccagctccagggccccctccccttggaaggtttctctgaccattctagctaaaagtgcttgctcctggcctgcattcagcactttc

SEQ ID NO: 97304 - DNA, 584 bp, Homo sapiens
aaaattccctctgtgatttccccaccctatcagggctccttgagacccttttacctggccctctgctaaaaagcggaggttctgacttctccatgcttttggagtctgccaaactgggtctaccttgggagtagagaggctagagaatggggagcaagaaaaataatgaggattgttttcttcactctttggaacatagggtcctctggtcagaggaaagggttcttttctcagagttttaggtgactgtatggtgacaatggtgtaagagtgcccctgatcatgactggggtttgcctggagccagacaagagagtttttattgaaaattttaaaaagtttccctgcacacaccctgccatctctgtcccacagaggtccttctttctgacgtatggccaaaacaaggagggtggggttctcttgaattttgtctgctcattactactgtgccgttcagagatttgagctgctcagccagaggatamcagtgaacataaataactgaaacaggaaattcaccactgtataggtaattcttctagtgtttattttggtccccaatttacttgttattatttatt

SEQ ID NO: 97305 - DNA, 474 bp, Homo sapiens
agcagaaacagtatggagctctatgagatggaacagtgattggtaaatgtgggaagttgtaaacgttggggtgaatattttttggggggttgaaccatgtttttatttttctctataagaactgcttcatttttcaattgggttgttayggtttttcttaaaacttaaaaaactttatgaggagaatatgccttttggcatatttattgtagatcattcctcaatttagaatatatttactgacataataaacatgtaatttttccatgcctaaagtttaactttgatgtagtcaattttatcaataattttctggatggttttggtttagagtgattcttagagcatgttctccaattagtaataacagctcatattactgaccttgactataggccaggaggaactgtgcaaagggctttacctatgtgtaggagagcacaggtgaccttgtacatacccacccaggccaca

SEQ ID NO: 97306 - DNA, 645 bp, Homo sapiens
tgctaattattaacattgctcatatattcatgttttcttcattgtcaaagataggataattactgtgccttgttgagtgagtttccggataaactctgtaagaataaattatgttatgacatcatttggattaagaatgggaagaaagtgrtagaatggaactggatactattcagacacaccaaagaggtggaaggtaccttgcagaggagtgacaaaaaaagcaatactggtaagcaaaataagtaacaataatagcagcacacatttgtacttatatacaaatgcacagggaagatctaagcccctggaagtcattgtatttctatggacaaaggtagcaaaagaagtcctgaacttatgaccagctactcttaaaatagaaacactcactttccaatatcacccgcaacttattttgtgatacaaacctgtattttagtaaagcattctgcatggtactgattttgtctgaatacattgtgaccatcttttcacatactataaatcacacaaacgcaccaaaagaatttgcgttagtgtagtagattctgttcatactcatttcccatccagtctcatatgatctctcttttccacactatctacttattttctggcacacccaggtcactgttaaaggct

SEQ ID NO: 97307 - DNA, 645 bp, Homo sapiens
tgctaattattaacattgctcatatattcatgttttcttcattgtcaaagataggataattactgtgccttgttgagtgagtttccggataaactctgtaagaataaattatgttatgacatcatttggattaagaatgggaagaaagtgatagaatggaactggatactattcagacacaccaaagaggtggaaggtacmttgcagaggagtgacaaaaaaagcaatactggtaagcaaaataagtaacaataatagcagcacacatttgtacttatatacaaatgcacagggaagatctaagcccctggaagtcattgtatttctatggacaaaggtagcaaaagaagtcctgaacttatgaccagctactcttaaaatagaaacactcactttccaatatcacccgcaacttattttgtgatacaaacctgtattttagtaaagcattctgcatggtactgattttgtctgaatacattgtgaccatcttttcacatactataaatcacacaaacgcaccaaaagaatttgcgttagtgtagtagattctgttcatactcatttcccatccagtctcatatgatctctcttttccacactatctacttattttctggcacacccaggtcactgttaaaggct

SEQ ID NO: 97308 - DNA, 645 bp, Homo sapiens
tgctaattattaacattgctcatatattcatgttttcttcattgtcaaagataggataattactgtgccttgttgagtgagtttccggataaactctgtaagaataaattatgttatgacatcatttggattaagaatgggaagaaagtgatagaatggaactggatactattcagacacaccaaagaggtggaaggtaccttgcagaggagtgacaaaaaaagcaatactggtaagcaaaataagtaacaataatagcagcacacatttgtacttatatacaaatgcacagggaagatctaagcccctggaagtcattgtatttctatggacaaaggtagcaaaagaagtcctgaacttatgaccagctactcttaaaatagaaacactcactttccaatatcacccgcaacttattttgtgatacaaacctgtattttagtaaagcattctgcatggtactgattttgtctgaatacattgtgaccatcttttcacatactataaatcacacaaacgcaccaaaagaatttgcgttagtgtagtagattctgttcatactcatttcccayccagtctcatatgatctctcttttccacactatctacttattttctggcacacccaggtcactgttaaaggct

SEQ ID NO: 97309 - DNA, 594 bp, Homo sapiens
atggtataaatcattttaaatcattatggtgactggctctgggcacattgaccccctgtgaatttggtagagacatacaaccttctttgactagtgaaatgtgagcagaagtaccatgtttcattttcaggtgaaagttttaagaaccagtgtatgagtcattatttttatttcccttactgaccaaggaagcacgtgtcatactgaaatgaagtttccttcatcttgggaccttgagtaagctgaatttagagcttagctgaccaatgattgatatcaaagtcaatgataaattaaactctgatattttggtggctgtttgttaaggtcgtataacctagttggttataatcactggccttggctgatcatcactatatgacagacaccatgcttagtgtttacgtagattagctcactgaatataatcatccatgwggtcgattttattgcctccatttcacacgtgcagaaagtgaatctcagagagattaagtaacttgactaaggtcacaaagctaagctgtgacaggactggaaaagatatcttcaaacacagaataacataaattgtgaatcatgctgtctacttgc

SEQ ID NO: 97310 - DNA, 523 bp, Homo sapiens
gtattctttcattttctaccaaagttatttatgtaaatgtcttctcctttactagtctcttagtttggtgaagaaaggatgtatgtccgattcctytgcagtttcctgaaattctggatacataatgttacataaattgtgagtaaaataatggctcaatcaatcttataagtcattgctgtcacctttccaatttaaagtctatgtaaagcttaggtagttatatcatgcaagacaaaaactgtgcaaaacaaaaatgtttttgatgataaaaaatggataactcacattggtaagtaatttagaaaattctatttagcttccacaattttaaatataagcaggaaacacattccaaatttctccatctagaaagaaatcaaactaattcggtaaataagtaatattctattttttacaagcctcattttaaaataaattcagtcatacgtttgtaagtaatttttctgtgaattttgctatcatattactttatggataagattctaatataaacatacaa

SEQ ID NO: 97311 - DNA, 566 bp, Homo sapiens
tcgtatgacattaaactacagaaaacaatctattgttattttttctgctgcaaaccacattcactcctctccttgataytgttttgtgctaaaatagcaggtttctaaatagactgaaatgatatgaggcagagaactataaaaaatatatcactaagtaaataatcactccatactgctaaataattgatttttaaagttctgactcaattcttatggctcgcaaacttgaatcacttattgttatctaatttgtgggtaaatcagttatgttttggttttgctaagtttttggacttagcaaagcccttggcttcaagggttgaccatgttttattgtatttctgagttggaggggctgtgaaaagaggcggatgtttatcatggtgctgtctgatagccagctgcacactgacacttataggaaggctttgctgtacttaatgtctggtgtattgtctcattttttaagtgccataaactatttaaggggtgatcttggaaaattcctagaagatccaaatattgcatttcatactaaactaaaagcattctgggaggtcaga

SEQ ID NO: 97312 - DNA, 604 bp, Homo sapiens
tgaacttttaaatgaaagaataacaaagaatctcttatgtagcttatttagaaaaatgtcaatgtgaatcacctaacatctttgacttttttcaaaaagagagcacatgtacaattgccaggcatttaggtcctttttgattaaagacatttttggattctataggaataagcaatgagtacaaatgccaacgttaaggttaaaatgatatgacaattaaaagctattcaaatagaataataggtgtcccagcatggtggctcatgcctgtaatcccagcactttgggaggccaaggtgggcagatcacttgagctcaggagttcgagaccactttggggaacatggggaaacctcatctctacaaaaaaatacaaaaattagccgggcatattgacacacacatgtgttcccagctactcggaaggctgcggtggraggatcacctgagtctggagaggttgagactgcagtttaagcagtgattgtgccactgtactccagtctgagctacagtgagactccatctcaaaaaaaaaaaaaaaaagaataataggtgacaaaacaagtttgctacacttaaccaatgatagaggacaaagaat

SEQ ID NO: 97313 - DNA, 610 bp, Homo sapiens
gttactgaggttttattgtacctcacttcatcaatgggaaatgcagatttcagaaaacaatgtagatgggaggaaagtgctctccacacttacagtatttatcacattgtattttcattgtctatttgtctgtctcccctctagattgaggggtacctgaatttatggatattgtcttaktttacatttcttttttttcccttgaaatcatgattttattgagttgaaggcatttcaaccacaggtgattagtatcatctgaatctacccacagctcaatcaagtctaaggctaaaaacattcaatctcttaaaaaaaaatgagcaagcaatttttcctctgtagttcaagttcattgagttgataactcttgtcccagaaggaaaaaactgctatcttataagccacaaactaaacatatgtagttaattaacaaattaattaacgtgagataccaactcagtcaaaatttcaacaacttacattaaaataagcaaagtctttccagtcatcttcaaattcttcctaaaatttattttaaaaagtgaaactatcaaaatatctatttatttatactttcatcacatttagcagtgaatttgatttataa

SEQ ID NO: 97314 - DNA, 565 bp, Homo sapiens
tcttttctactttccctaagtgtcagctggtctgagaaataaagggaaagagtacagaagacagaaattttaaagctgggtgtccrgaggagacatcacatgtcagcaggttctgtgatgccccccaagcagcaaaaccagcaagtttttgttagtgattttcaaaaggggagggagtgtatgaatagggtgtgggtcacagagatcacatgcttcacaaggtaataaaatatcacaaggtaataaaatatcacaaggcaattggaggcagggtgagatcacaggaccacaggacccaggcaaaattaaaattgctaatgaagtttcgggcatgcattgtcattgataacatcttatccagagacagggtttgagagcagacaaccggtctgaccaaaatttattaggcgggaatttccttgttctaataagcctggaagcactacgggagaccggggcttatttcatcccttattaagccgtaaaagacagccgcccccaaagcagccatttcagaggcctccccttacggacatgttctctttctcaggcatgttccttgctg

SEQ ID NO: 97315 - DNA, 320 bp, Homo sapiens
ttaaactatgacccaacgccttatagtccaatgccayacattgattgatcacagcattcctcctttgaaattctgttcatctattctaagggattgcctctagttgcctggcttggtgtataaaaagaaacccttttgcacatatttcagtgacataatgtaccatagcttcatctactgtggtttcttcctttttaggggttcagcacagatttgattgttgctttgcaggaaaatatgaaactggagtcattcccccaaacacaagaatgtgattcactaatatcaagtttccacaccactgctctgtttggggacct

SEQ ID NO: 97316 - DNA, 618 bp, Homo sapiens
tacttaatattggattttaaagtgctagagacatcttcatgttctacataaaatttttgattatgtaaatgtaattatcagagctggcaaaactgatcttggtgaattatcttcatgttcatatgccttattcatgcgttttcttttattatcagtggtcatcatgtttcctgtgagaatatatggtgaaaatataactcaaattaaaattacatattggtccaaaaactcactacagcactgttttggggaggacaattcttagagactatttgacgtgcagcaacaagagaagagaggatatgcacaaagactgctttatacaccagtgcgggggcagtgtacaggtgatccaggcaatagtcccctgtaaacgatattagttcaaacacctgtccttatttaattgacccrtaatgaaatatgttactttcatttttatctcagacataaagagataatatatccaaaaattctcaaggaaaaggaagagatcaaatgttaagatgagaacttcatgttttagaggtaagttagaagtttggaatggatgtctgtgccttcagacagagttcctggaaattggaaagactgggaagacacacagaaaaaaatctg

SEQ ID NO: 97317 - DNA, 596 bp, Homo sapiens
ggtaatttgcatgtcgaggggattttgcgtatggattattttatcacccaggtaataagcatagtacctgattggtagcttttcaatcctcaccctcttcccaccctgctccaggcccagtatctattgttcccttctgtgtgtctatatgtactcaattgttaacccacacttacatgtgagaacatgaggtatttggtgttstgttcttgcattaatttgcttagggtaataacctccagctccatgttgctgccaaggacatgatctcatgcttttttatggatgtataatattccatggtgtatatgcagcacattttctttattcattctaccattgatgggcatttaggttgattccatgtctttgttattgtgaatagtgctgtgatgaacatacaagtccacgtatcattatggtagaatgatttatattcctttgggtatatatccaataatgatattgctgggtggaatggtagttctaagttatttgagaaatctccaaactacttttcgcagtgattaactaatttacattcccaccagaagtgtacaagcattttcctttctctgcaacctcaccagcatctg

SEQ ID NO: 97318 - DNA, 558 bp, Homo sapiens
ataatttaggaccttataggttgtaatacagaacttgrctttcactttgagtgagatgggaagtcatttcagggtttgaatcactcttgctacttcataggaaataaaccctgggttgcaggaaggagacgacgatggaacaagaaaagggtgaagtctgaacaagattcattgaaatgggtagaaataatagatttacattatcccttatattagtctgttttcatgctgctcataaagacataccccaaaatgggtaattaatttaaaaaaataggtttaatggactcatagttccatgtggctggggaggcctcactatcattgcaaaggtgaaaggcacttcttacagggcagtggcaagagagaatgagagagccaagcaaaagggatttctccttataagaccaccagttctcatgagacttatttactaccatgagaatagtattgatgaaaccacgccaatgattcaattatcttccactgggtccctcccacaacatgtgggaattatgagacctacaattcaagatgaggtttgggtggggacacagc

SEQ ID NO: 97319 - DNA, 571 bp, Homo sapiens
attaatcttattccctatagtgaggcaagatgtgtcaaacactatacaacatcattatattgttatgtgggtctaaaagcactttttttyccccaacagattaaatcactttcacataatattttctgatgttcccctaagatagatagaggctgctcacatcatagatttatcttagactcaccagggccaaaaataaaactgcttacttaggcatccctcttgtaaatattcatcatcatgccacaagttaaatccagggacagaaagtacatggaccgggaccaatccatcacttttactcaaagaagcatatatcctgagtactgcaagtagcagcattttgtttagatatggaggttggcattagtattattgaagctctcaggattactggaagcataatttaacatggtttatgtagatttcttttatagtttttatgcgccaaacttctaaatatcacataaatatatggataatagaaaaacatgcattaagttaatagtgagagtctataattgccagtaaaagcaaatcagttagattaaatggttacaaaacagtcata

SEQ ID NO: 97320 - DNA, 640 bp, Homo sapiens
taactgtgatctaaatatttgtctgtgatatcaaatacttaaaattccctgtggagtatgtggggttgggggagaggagacagatcatacatttgataattaccaagtcaagataaaaacttcctgccacccactgcagaattctgaagacaataggttcagagaacacatctgccatatgtagcaaataaatactttattattgtttgtgctttagctccaaatttcatgtcttggagagttgaggttgaactagtcaaactcctttagcataaccaagtaaaatcagccttccccatctctccctcctcctactcatctcattcctatgcccttggtttgccaacataggacatatcccataatggaaagctcaggtcctttgggttgagctttaaaaagcccaacagagttcttaaaaagaaaatagagaagaagaatccaaaagattaaaaaaaaaaaaaaaggctcaaaacagagattccaaaatagagaacaggccaataaaccagaaatgtgaatgatcaagaaaactgtttggcyatttccatggatctttctcaaatcgacaaataaaatcataatctaaatttgtccaggatatttttattttatatattttttttcacatgcttttttt

SEQ ID NO: 97321 - DNA, 577 bp, Homo sapiens
gtatgcatattaacaattgacaactatacttctcaacaatgcaagtagttttcgactgatatcattctaggtcagtgttcctcaatgtatagctagtgaaatacctgcattagagttacttaggatgcttatcaaaaccacagagtccccagcctgggcaatacagagagaactcatctctacagataatttaaaaattaggtgtggtggcgcacccctgtggtctcagctactctggaggctgaggagggagaatcacttaaattcaggaggtcaagactgcagtgagccctgatagcaccattgcactccagcctgggcaacacagtgagaccccatctcaaaaaaaaaaaaaaaacctgcagattactgagcttttctccagttctgatgaatggagttcctggggatagagcccaraaacccattttaatagacttcccacatgagagttaattacactaaagtttgacaaccactgttttaaacaaacacagtaagagatatagtgaaaataaaagaccaggtacttctggaaagtcagtgtcaacatataaaaatagtagaaaagaggata

SEQ ID NO: 97322 - DNA, 559 bp, Homo sapiens
agcctgatgagactgtcttcacagctcttgaccctaaggagccaacatatgacaagagcatttaagatggggaatcaagtttccaggcaaaatgtagccagtgccagaaaaacagaaaaatgagaattggaaattcaatgcttcctgggttgaaaatgctcatttattgtggagccctgctggtctcattaatccctcccagcctttgaggatccgtacacgccttgcctcctgtaagaaggaagcgtgaactcacagctccagcctgtactgatttctggctcttctcattgcctgcagaacaaatagcggtggctctcagtcactgatgcatactggaataatctagggtgctttaacaaaaaacccagggactccacccaaaattcttacttgcttagtctgggtagaactggatgtcagaatagctttcaatatatatatatatwtttttttttgagactgagtctcattctgttgccctggctggagtgcaatggcacaatctcagctcactgcaacctctgtttcccaggttcaagtaattctcctgcctcag

SEQ ID NO: 97323 - DNA, 563 bp, Homo sapiens
gagttctctaaaattctcaagtaacaggcaactaaatggatgtgcaaaaactataacctcatctttgaggcacgcaaagcctccttttgtggtttttctatgggaagttgaagtcaatgtgtcaacgtgttgaaaggccacactgggaggcagggccgtagaggggagatgcatgtctgagtcagaccagagtccctcagtcactttaagcctgcttcctcatctgtgaaatggctataatgatatatcgactttgcaggtggtggtcaggattagtaaaagtgaaagygtccagtgtgttcctgagggacttggtgctggattaatggcagctgctagcaatgttcatgaggtggtatggcctgatggttagcacatggcttacagagccagccagacttgggtatgagactggctccaccactcaatttcctcttctgaaaaatggagatgataggtcccacctcataaggtcatttaggggatcagacaagaggaccctaactgatgcttcctgaacactcactatagccaggcactattctaagcactctccagtatga

SEQ ID NO: 97324 - DNA, 563 bp, Homo sapiens
gagttctctaaaattctcaagtaacaggcaactaaatggatgtgcaaaaactataacctcatctttgaggcacgcaaagcctccttttgtggtttttctatgggaagttgaagtcaatgtgtcaacgtgttgaaaggccacactgggaggcagggccgtagaggggagatgcatgtctgagtcagaccagagtccctcagtcactttaagcctgcttcctcatctgtgaaatggctataatgatatatcgactttgcaggtggtggtcaggattagtaaaagtgaaagcgtccagtgtgttcctgagggacttggtgctggattaatggcagctgctagcaatgttcatgaggtggtatggcctgatggttagcacatggcttacagagccagccagacttgggtatgagactggctccaccactcaatttcctcttctgaaaaatggagatgataggtcccacctcataaggtcatttaggggatcagacaagaggaccctaactgatgmttcctgaacactcactatagccaggcactattctaagcactctccagtatga

SEQ ID NO: 97325 - DNA, 646 bp, Homo sapiens
ctgccactcctcctttccccatcctttttttcccttagcactattcagtgcaaaaagtgaaaaaggttggtaaaataggtaaaatacctagaaacaatcactacrgaaaacagctgaagacagtggccatgcagtccgagaggagtagtggtctgcctctaattttctaatctaagttcgtttattgagttacagtggtctttagtaaagtaaaacaatttcccaatcccaggccttgtgatttgagatggtaccttagaaaaagttacacgcagttccgtggttgaatatatttgagatggtaccttagaaaaagtttcacgcagatccttggttgaatatagttgagggagcgtagtattgacaattcttcatgtaggaaacctgaaatgaacacagtcacagtttgattaaaacattgtcctgtttgttgcaacagaaaactcggatagttttaacaacaggaaacacttgtaggacttcctttaccaacatactttttaaatgttttgctattggttccatatttatttagatttataagtgtcaataaagcaaacttttgatgcctcaattcattttgcacggggtataataatgttttgttccagatatactctccacctttcactgttctgtgctccaa

SEQ ID NO: 97326 - DNA, 574 bp, Homo sapiens
aatataatattctgagtgatctgttaagagaatgcaaacacgaagaattttaccaaacaatgataaaacttggatgtaagtgaagaaatactgattggtgatatagagctagtcagggaggcaaaaggggtttgaaaaggtctcctctacagtcacgttaaaaactaaggtggtgayaaggcccttagattagaggcatattccccagataccccaggatgaggacggcaatcaaaggagacagatacttaacatgcaatattgcaaccacaaagaggctaatgagattccaggctgcttgtccacagggctagccatcagtgtcaccaggcagggaggctgctgtccctcttataaccactcttccgaaactgcatgtgtgacagggcatctgattctcagtggcttaataatgacactgtctacttagtctagccgggctgcagcagggggacagtgtgctgataaactggctggaggcagacacctgttggaaggctgcagagagtttgtgcatgggacagaaagccatggtcaccagaggcacagtgaggaggaagagctgcccatgcat

SEQ ID NO: 97327 - DNA, 497 bp, Homo sapiens
attctgaatagaaggttcagggcacatgaataatgccacactaggagaggagtgtctgtgttcccaagcttaccaattcccatatgcctccctgtctacctgttgtggcagagctgcagcaagaagccaattatttcagaaggcttttgttttgcagtaaggcaagttcactgactgctgcacattaattcctggctatagatataatggccacctggttagtttcgcctacaaatgtcagyccacaggaaaaactctaatccccaaactctaacactattaagcagaaaagatattaaggcttatgttggacctgattggagagtaattatgattcaatctaacagaagtcttcatagtgagactatctgacttccttccatggtgcagtagcatcttgtattgtgagaactctagcaatgaacagtattcaatggagaagacccgtatgtgatctccatgatggaagagaaagggcctttgctcaaatatcatcc

SEQ ID NO: 97328 - DNA, 430 bp, Homo sapiens
gaattcttgaggaagaagaagcaggtggaggagaagaatggcatttcctgaccttgcccacattttctgtatcagaaactggaactgatggtgaagatgaggagtmcctattttcaaaattctccccagataactgtgatgagcaaccatatttggatatttgattcagcagttctggagtcagagactttgcatttctaatcagtttccaggtaatgctcaagatgctgatggcagaatcacattttgagaaccgctggcctaaaccaatgtttctgaacactggttgcacattcagatcacttaggaatattttaaaaattcaatgtctagactgtgacttcatccacttacgtcaactctggcgtgggactccaggtatctgtggcttctaaagctcctcaaattattctagtgtgcagccagggtt

SEQ ID NO: 97329 - DNA, 412 bp, Homo sapiens
ttatgagaaacagttttgctgcttactcttatagcctccagtggtatactgagttgatcatgaccctcactctttctggcctccaacaaactgacagtctcagactttatttaagaagaaatttctagggaaacccaaaaactacagggaagacaaaaacaaggacaccagaggaaattgaagccccgacacatatagctacattaaacaagataaacttttatcattacataaagtccttctttgtcttttttcttactgttgttgctttaaagtctgttttgtctgacataaaaaaagcyactcctgctcacttttggtttccattatgtggaaaatctttttccacacctttgcattaagtttatgtgagtcctatgtgttaggtgagtctcttgaagacagcaagcag

SEQ ID NO: 97330 - DNA, 522 bp, Homo sapiens
tgctttctccatacagagggtatttcccttggtgctgtgctaggtggctttagggaaacgtaatgtaggcaatgtgaaatgttctttctacccacttcartgcatttttttttccatttctgtgcttcatcacttacctggatctaaacctctcattaaggtattttaatgtatggatggttgttaacatcagtgtttctgtgaggagatgagcaccagaaactctcctcgctggcaccattctctgtctctaagacgttttttaataggtaatgtaattgtctatgtagagaatcccaaagattgaccaaaagaaatgtctggaactaataaacaattatagcaaggtcctaggatatatagcaaggtcataatataaaaaaagtcaattgttgtctcatatactagcagagaataattagaatttgaaattaagaaacaaaaatatttatattagcatcccctaaaataaataggcaaaaatggaaaacaggtataggacctatatgaataaaaactaca

SEQ ID NO: 97331 - DNA, 595 bp, Homo sapiens
aaacactctcaataatcaacactaggtgttctaacagtttgttcaagcctgttcatctgtggtttagaagtttataacatgacaatcttttactccaatagctttctgaaaactgacttcccatattcccaaagccatcgccagctcccagctttgtcattcaggaaaaagagtatgcacctccccttcatcctcctcatctctcaccatcattaagtacaagcccaaggagaagaatcaagggcaatgaatcttcatcaaacaataaaatcctgcctggtaccagacctacctgtgccatccargcactgcctgccctgtccctccattaaacatcttacccttgctgctggtggctcccggggcactgtcctttccgtggctcctcctcccaccggcatggcccagcggctctctcctgctgctctggctccgtccctctccaataacattgctccttctctggcagggtccagccactttgtcacaagctacatctatggcgagcaacgactcccggctgcagggtgagacagataagaggataagagggagcaggagcagacggagaaagaaggtggcaagacagagcagg

SEQ ID NO: 97332 - DNA, 600 bp, Homo sapiens
cttgatgcttccgtctccctcattcagggcaggtcccctagattgccagctcctcagtcagccagggcttctcggggcaagcaccagccaccctttgtaggcccaggaatctgaacttgtccgtatcccaaaatggccagacctcagagtctgactgcaggccaaacagcgtgaatgagaataggacttgactgactgatgccaagggcactggggtgcacattttttcttgctggggcttgtgctcccctactacctctaaggggggcagataattctgcaaaggatatctgggggctctaaagtcagcaccgagtagaggaaggtggtcagtaattaacaaagaggaaatgcatggctcatccagaggtctggccttctatttatmctctcatttaatctttaaatagccctagcatgtagagagcattatcgccaccattgtatagctgaggaaagtggtgcttagagagagtgagtcacttgcccattgcccaagatcacacaggtagaagctgggatttgcacccgggccgtcggtctcctaagcagcatcctttaccaccatactcaactgctgaggcttacaaaaggagaagg

SEQ ID NO: 97333 - DNA, 639 bp, Homo sapiens
tgaataaaataaacataaatgtgtatatatgtggaaagaaagattgctaagtagtattttatggtatgaatgtacaataccacaattgtttatccatcctgttgctaggcatttaccttatttccagtttgggggctattatgaataaagcttctatgaacatctttacacaattctttttggatacatattttcatttctcttaggtaaatactccacaagtgaaattattgggtcatagggtaggtctttgcttaactgcataagaattcatcaaatggttttctgagttggttgtaccattttcacaaccagcaatgtaagagagattcagttgtttgacatactcaccaacatttggggctttcaatgttgccccttgagtaggattaaaaggctatcacattgtgattttaatatgtattttcccgatgactaataatattgagcacattttcatgtgcttatttgctgttcatatgtcttcttccatgaattgtctcctcaaatcttttgcctatctcttaaaamtttggctgtttgtctttttgttattgtgagtttttaatatattctgcatacaagtcatttgtcacttacatgcactgtgaatatttttcctactctgtaacttgccta

SEQ ID NO: 97334 - DNA, 363 bp, Homo sapiens
ctctgccaggtgaggacacagtgagaagaaggccatctgcaagcaggaatgggtcctcactaggaatcaaatctgctggcaccttgatcttkaacttcccagcttccagaactgtgagaaataaatgtctgtttttaagctacccagtctatggtgttttattatagaacaccataattctataataaattatagaatttattatagaattataattattataaatatttaattaataaatataaattattattatagaataaattctacaatttattatagaattatagaatttgccaacatggcaaaaccccatctctactaaaactacataaaattagccaggcatggtgtagccatgca

SEQ ID NO: 97335 - DNA, 468 bp, Homo sapiens
agaggagaggagagaagtggagagcagagagaagttgggctcttgacctctttcctgtgtctgctgaaagggagagttaagagacatgtaatagtggatgacatcatgggcaagtgcctgaggccttcctgtgcagcacaaarcctgtataatcctgtagtttggggagaggaagttgagagacctacttacacattctaaacatcttaaatgaagtcgctcatagctttgttcttctcaaatgtggaacttattttacatctggggtcactgtgagttctaggcaatgtgaagctataactcagagccataaatttattcatataaatgaagaaccaaattcaaggggaaaatatctctcattgtatatattatctgtaacaagcaaaacaaatttatagcattttttctaacctctgggggcagaaaattctcaaaagtttccagcaattaaaagatgaaaaatga

SEQ ID NO: 97336 - DNA, 550 bp, Homo sapiens
cgatcaggaaaaatatgcgaataatttactgaccagataaccaagtaaacacgaggcctatcctggtggctttgtctttgagtctattgtgtctcagagacacttaaagttattaaaattaaagcattaaagcaacaaacctctgaaatgacctaacatgtgagtggcaaactacttacrcaattttttcttcttcaatgcggttgatcttccctcccacatagattcttaatttacagtctttccatttttttctgagagttaagatataggggataagaagtgttaaccctggaataaagaataaattatgacacaatgagtatatctaaatggaaggaaatgaatagctttatatctttattcattaccacattgatagctcttaattaagttatagtctttggagaacacagaaatgttattctttaaccagtattgttcccatataccttctcatgcagtttaagtttatcaaaattgaaattcttgtccctagtgtattttctgaaagtttttacctccatcatcaaacaaccaccaaacatca

SEQ ID NO: 97337 - DNA, 345 bp, Homo sapiens
tgaagtagagataatacctccctctttgtcttgttgtgatgattaagtgaaataatacaaagtgaacactgtgatgcttttggtttacaaaaattttgttacagcaaataaccttgaatattgtgttaatggtgaacaattctgttgttatacacrcacacacacacacacacacacacactatggggaacttacagtctgagaaatggatagactattttggtagccatttattgtgtactagtaatcaacagtccctgtgttttgaaatgaataattactattgtatttgtgtcattagagatttctgctgcacagctctgtgtatcattgtttcaatgtccc

SEQ ID NO: 97338 - DNA, 345 bp, Homo sapiens
tgaagtagagataatacctccctctttgtcttgttgtgatgattaagtgaaataatacaaagtgaacactgtgatgcttttggtttacaaaaattttgttacagcaaataaccttgaatattgtgttaatggtgaacaattctgttgttatacacacrcacacacacacacacacacacactatggggaacttacagtctgagaaatggatagactattttggtagccatttattgtgtactagtaatcaacagtccctgtgttttgaaatgaataattactattgtatttgtgtcattagagatttctgctgcacagctctgtgtatcattgtttcaatgtccc

SEQ ID NO: 97339 - DNA, 418 bp, Homo sapiens
cacgccatgctcccgcctcagcctcccgagtagctgggactacaggcgtccgccaccacgcctggctaattttttgtatttttagtagagatggggtttcaccatgttygccagaatggtctccatctcctgacctcgtgatctgcccgtctcggcctcccaaagtgctgggattataggcatgagccaccacgcccagctaagatctgaaaggatttttttaaaaagtgctacagttaaaagtcagcttaattaaaaatggatgaacaagctatagatatatttaaaaggtctttatgttattctcttcttggaacttgtttttctgggaaaaggttttttcttctcagtcgactgaattattctctatttcttttgtcttgccactcttaatgcacacacgagaggccctaaaata

SEQ ID NO: 97340 - DNA, 677 bp, Homo sapiens
gccacagcaagacaggctaagggagggggagacacaaaacggatgacaagaggtttaactcatagtgggcccatctttgggactgcggaaccatttctgcagggaaatggccttggctgttgctcagacacatccctttgttctcactgacctaatgttgcacacataaggctgagcctcagatctaaaggagaatgtctgagtccttctcaccttcacatcctcccttcccctggcctccctggccagagaactagctataatgacatcaactggctagaattacataaaacttcccttttcaactcccagacccctggattattattatgttttgtttttaatttccacatgatttctctttatgcaattgggcttcctccttgccaactcttatcacctttatccctgtcaatttgattttctatttcttattagcaggttttaggcaacaaggtgaaagaaacatgggttctcaaggagttgtaactataggctggtgcaaaagtacctgcctaggagcagtagaaatgccaatatgattaaaaatatgatacctgccagtgcttctcagtgagagacccagggagagacagrcacacactcatattagaataatttacccgtacatgtaccccctgaatctaaagtaaaagttaaaaagaaaaaaataggat

SEQ ID NO: 97341 - DNA, 601 bp, Homo sapiens
agtctatgaatatctcactcctgagcactgttgctactgttgctgttgcttcttctctgcggtgactgaagctatgctacccctttctctccagatctgcctctgcacagattgctgcatcagaggcttttcaccaccattcttcatgctttctatgattgatcacagagtgaagcacatttatttctcatataacccaacccatggaaacagaatggattagcattcctgacttacaaatgagggaaaaatgtgtgacttatatcagtaactttataacagatgaagggctcagaaagcccaggtctctcctcctgtcttatttcctttgcctgccttctccctgcttttcctctttcttccttcaaacaaattttcagttgacttaactctgagctaggcactgaggataaaatggcaagctacataggcatggactctaccctcaaatgatacattattacaaagagaggtcctttgaagaaaagcaatgtgctttgagaaaggttgacaaggagttctmattttggcaaagaaatctcccgagttgtggcctaaaacagagttccctcaccttagaggtagtgacatttaaggcaaa

SEQ ID NO: 97342 - DNA, 661 bp, Homo sapiens
tgctaacatcattttcataaatacagatcagcccagaccatatactaaataatccagcctttcctcattgatttgaaatgtcaccttatcmcacagtctgtttttaattctttattcctttgatttatttattgtgacatcaataccaaactatttttaattatgacattaaactatattttgattttctggtggtaatctctgatttcaacattacaatttactactcatttattactgatttgagcttaaatcagtcatccgtacattcatgtgataaatatgttatgcactgaacataaaaatattgttgactaggctgggtgtggtggctcacgcctgtaataccagcactttgggaggctgaggcaggcagatcacgaggtcaagagatcgagaccatcctggccaacatggtgaaaccccgtctctactaaaaatacaaaaattagctgggcgtgatggcatgcgcctatagtcccagctactcaggaggctgaggcaggagaatctcttgaacctgggggctgaggttgcagtgagctgagattgtgccactgcactccagcctggtgacaaagtgagactccatctcaaaaaaaaaaaaattattgctgactggactcaactgttcaaatgtaaattcaatggattggggcct

SEQ ID NO: 97343 - DNA, 533 bp, Homo sapiens
ttgataggccaagaacaatgtataatttctattgctttccaaacatccgcaaaatgtttttagttatctcaccaaaatgataggctactaagacaacatgataaaaacagcattaggtttggtgtccacagctttggtcagagatttcattttatgaattacttaacatctttgaacctcggtttccttatccttaaaacgagggtaaggatacctgctttacaagattgttgaaagattaaataggataatttatgcccatttcctgtaacagagaattatacaaatggaatttattgcatgcccttctcttccatatccccaacaccwcctcctcaccaattctgaagtactgtgtcggatataggagtctctacaatggatacttcctaagcaacttactatctgaaagttattaaagtcaacatgttggccaattaccttgccatgggagtattccaagcttaagtatgacatgaccacatctgcagtagcatcacagtagttttgtctgaacctataacccttccatg

SEQ ID NO: 97344 - DNA, 617 bp, Homo sapiens
aagcctatggtctctaactaaaccagcatgaccttttttgactagtatttaccaaactcaatataaaatcctattaacagctcgtggaattagyattttaggaaatacatgtggagaaaatcaaggattagatatagttgctggatcaaaaagtgcctcatgtaaagagttttattttctcatcctgcatgttattggaacagtgtagaattctaaatacagtaaaaacttgaaggtgttactatggtatggtaatataagtatggggttattagggcttaaacagattttttttgattatgtcactgaatccactaggccatttgctcaaggtccatagtttcttcatctctgcacatacacattcctggcccaagcatttgcatgcagtagagtctccataagttgtagagtgactgagtgtagtaggaagcttctgaaatggtgcccctggatccttgccctcctggtatccaggacctttgtgtagtctcccctcgagtatgggatagatctagtgactttcttctaataaacagaatatagcataggatgttgctactgtgactgggttacagaagattgtgactgtcatcttacttttctctctctcgctg

SEQ ID NO: 97345 - DNA, 570 bp, Homo sapiens
ctgcctacatttcttcagcccccacactctatccacactctttcccatatgtcccaaaaggctctccagatcctgaagggcatggcacacagaagccagatggctttgcctctcaccctctgcttgtccactcctctctgaactcatcaatttaacacaaataatcctaattactatgsctattttcagcttgaggacagatattgcttgattgagcagtgcattcttactgaacaaaaaaataaagaaagaaaaaaaagaaaaacacttgtaaaatccccaaactttaagtgcttggcagtgagttcctcaattttatatcagggagcctgggcttggcctgaaggggaaatgcaacagagcatgccatcaaaataactaggtcaatgttcagcttcttcttggaaggctttctgcttcttctcttccctccatgctgggccctcagcctgtctgtgccagccacctttatttcagataagtagctctctcagcctacaaattccaaagtccgaatgcctctggaattggacaaactgtccacacaccttaaatcaaagaatacagtcc

SEQ ID NO: 97346 - DNA, 561 bp, Homo sapiens
agcctccataaacatgtgagccaacacccctaataaatccctatatctatctatctatctatctatctatctatctatctatctattcatccatccatttgtatcctattggttctgcctccctagagaatcctgactaatacacatatcgtacctcaattagtacaagtcaggacatctttatttccaatctcattaagactaaataaaatgggagagagacgattcttcttaataaaagcagagtgctgttagcaaaggcagaaggaataaatactggccagcaaaaacaacagcaataacaatacatgtgcagtatcataaatcataatatatgctctttaaaaaaacaatacaatatcagaagcaaattaaagtgctagataaatgtaagtttcyttttttccatggccagatttctggaactcaaattctatagtcacttcattcacttcctaaacacatactactttttaatttccagcactcagcatcagtacccaaatctttacccaaacctctatccctaagatatctaatcatttattttaaagtcaacgt

SEQ ID NO: 97347 - DNA, 518 bp, Homo sapiens
taaataacaaacatttatttttcatagttcttgaggctaagaatgccaagatcaagggtctggaagatttcatgtctggtgagggaccattcctcaaagagggcactttctcactgcgtcctcacgtggtggaagcgatagggcagatcactgaaaccccttttataaggacactgacaccayctatgaaagctttctctgcatgacctagtcaccccacccgcaagagccccaactcctaataccattgcctttcgtgttaggatcttaacatattaattttggtggaacacaattattcagaccatggtgtctatttgttgttgtttattatttgctcctcagcgcctagcagtgtttgataaatgtatgttgaaggaggggagcaagatggtctgacctgaatagccagttctcaaaagaagacataccaatggcaaacaggcttatgaaaaggtgctcagcatcactgatcatcaaagaaaatgcaagtcaaaaactacaatgagatatcatct

SEQ ID NO: 97348 - DNA, 518 bp, Homo sapiens
taaataacaaacatttatttttcatagttcttgaggctaagaatgccaagatcaagggtctggaagatttcatgtctggtgagggaccattcctcaaagagggcactttctcactgcgtcctcacgtggtggaagcgatagggcagatcactgaaaccccttttataaggacactgacaccatctatgaaagctttctctgcatgacctagtcaccccacccgcaagagccccaactcctaataccattgcctttcrtgttaggatcttaacatattaattttggtggaacacaattattcagaccatggtgtctatttgttgttgtttattatttgctcctcagcgcctagcagtgtttgataaatgtatgttgaaggaggggagcaagatggtctgacctgaatagccagttctcaaaagaagacataccaatggcaaacaggcttatgaaaaggtgctcagcatcactgatcatcaaagaaaatgcaagtcaaaaactacaatgagatatcatct

SEQ ID NO: 97349 - DNA, 578 bp, Homo sapiens
atattaggtatatattcatatattcacgtgttgactactttattcagtcactggttaatagtaagcaaagggtgacataagaaaatacttattacagtgaacattatataaagcttaacatgtgcctagcactcttctaagtgcttccttactgatcaactagtatcaacctcacaacacctcaatgagctaagtattattcaggtctgagctaagtacaaaagtactaagtactattgttccaccactttactgatgaggagaaacaagtaagagagaggtagaataccctatctttgcttactctatgtaacactgatgtgaagtggcactgggttacccaccctggctattgagctcaaaatttgtgcccttaacggctatactctgcagctttatgaacaatcatccagtcartttctgcttttctagatgtatagctattttaaaaattattttggataaatatatacagttatgaataatcactattacttttaacttaaaaatttagatgtttagcctgaatgttctctgtgaactttttctcaggcaatttatatttaccaattgcattt

SEQ ID NO: 97350 - DNA, 590 bp, Homo sapiens
tctttccctactgtagattttattacccagactttttactttttggtgttcaccttgtcatgatagcaaattttcgtgtctgttaccttacccatattttcctctttccaaagctacttccccctataagttatcatcttgcaacaactgggttgtctcacacaatccacttcacgttgaggggccgtagggcattcatggtcaccttctagcactaatgaccacagaaaccaaggctcccagcattactgcatgttcccatcaggccatgcacgagcgaaatggctcatatcctaagctttacatctaaaggaagaggaaatcatgggttgggttttggtttgtggttcttatttctaggcaggggcacggcacaaagggcattaaagcagaaattaaacgaacactacctggatcttggtcttgctttgagactgttggaatccttgggagttgctgaaacaaagatattgcttgggtttcatttctgcagttaaacaagtttatatgcagcacctgggctagtacagaacacatcaamaggtaaatgtgaggtaaaagtgcccatgtggagaactggacggctccca

SEQ ID NO: 97351 - DNA, 549 bp, Homo sapiens
ctgcttgtcactttccatttttgtatcagcctgttgactttacaatctgaaagctcttgatctttaatgatctgtagcacatctgtatgcataatactgtcttccaaactcctcaacaatacaaaaacattaggcacgtatcacagagctcttttaatacattttctaygcaacaatgcttttcccaaatgcaacccatttttgcataaaaaataagattgtactgtgtggagataatcaggtagttatgctgaactaatgagcttttctttttctgacagtactctgatatagtaattggagaatttagttattccttagattcaggaatgatgagttctctacctttggttatcatgaaagatttccttatactagaatatcctggtcaggtaagtgcattaacaaagcaacactccaatccattgataacattatatgaaataataggctgtctattcatttacataaaatcattcattaaaactgagatactttgcatataatataaattaattgtgcccacttgccaatgttacttttattaaa

SEQ ID NO: 97352 - DNA, 439 bp, Homo sapiens
tacaaaaacattaggcacgtatcacagagctcttttaatacattttctacgcaacaatgcttttcccaaatgcaacccrtttttgcataaaaaataagattgtactgtgtggagataatcaggtagttatgctgaactaatgagcttttctttttctgacagtactctgatatagtaattggagaatttagttattccttagattcaggaatgatgagttctctacctttggttatcatgaaagatttccttatactagaatatcctggtcaggtaagtgcattaacaaagcaacactccaatccattgataacattatatgaaataataggctgtctattcatttacataaaatcattcattaaaactgagatactttgcatataatataaattaattgtgcccacttgccaatgttacttttattaaataaatggat

SEQ ID NO: 97353 - DNA, 640 bp, Homo sapiens
aggaccttcactgaaaatttttggaaaggaacgatcatcatgcaatttttacacaaaaacttgttttgttgagaactaatctaaaatctgttaaagatcacatatcacttttaaaaaatttgactatgagcccagaaattcttgggatcataaatttacataaagaacattttaaccatataaagatctgatgttttatattatctaaaaagaaaccattatgcaactaaatttaaatacataccccttgaggctgggcatggtggctcacacctgttatcccagcactttgggaagctgaggtgggtggttcacttgaggccaggagtctcagaccagcctggccaacatggcaaacacctgtctctactaaaaatacaaaaattagccgggcatggtggygtgtgcctgtagtcccagctactcaggaggctgaggcatgagaatcacttgaacctgggaggcggaagttacagtgagctgagatcacatcactgtactccagcctgggtgacagagagagggacgctctgtctccagccagccccccccacccccctcaatgaaaaccaagatctaaaatccataacataaacaaatgtaaacaatgtggttattagtatctccagctgatgatggc

SEQ ID NO: 97354 - DNA, 550 bp, Homo sapiens
aatatatatcacctaagtgatawggtgaataccatttcattgaaaaggttcaaataatacgaacacaatgaagcagggtgtgaaaaaaaccttcctgcaccccaacttctacttttcagagatttcactcattcagttaatgtgtttttccttctagacttttcctagatatgtagcacatatacaggtagacctaagtaattaatataaatgggttcattttctaaatattgttctgtaaccttttcccataacaatatgtcttgaaactctttcaaatgcacatgagttcaaatattctttgagcaactttactgtcctcatttcttatatgcatcacaattgatttactgttgcattttctgaatgcatgacaaacatcaaccagctgctctgaaaacagttctgggtgggagcacttgagtccctgtagagtgagcagggaactgtctaattccacccacaccactgggtgtggtgaggtttctctgagcctcagttttctatcatagtgcaaggaggttaatattggatgatttttaatgacata

SEQ ID NO: 97355 - DNA, 550 bp, Homo sapiens
aatatatatcacctaagtgataaggtgaataccatttcattgaaaaggttcaaataatacgaacacaatgaagcagggtgtgaaaaaaaccttcctgcaccccaacttctacttttcagagatttcactcattcagttaatgtgtttttccttctagacttttcctagatatgtagcacatatacaggtagacctaagtaattaatataaatgggttcattttctaaatattgttctgtaaccttttcccataacaatatgtcttgaaactctttcaaatgcacatgagttcaaatattctttgagcaactttactgtcctcatttcttatatgcatcacaattgatttactgttgcattttctgaatgcatgacaaacatcaaccagctgctctgaaaacagttctgggtgggagcamttgagtccctgtagagtgagcagggaactgtctaattccacccacaccactgggtgtggtgaggtttctctgagcctcagttttctatcatagtgcaaggaggttaatattggatgatttttaatgacata

SEQ ID NO: 97356 - DNA, 540 bp, Homo sapiens
aagtggtgggttcgcatgaccttgggcagctctactcctgtggctttgcatgatacagcctcctttctgactgctttcacaggctggcgttgagtatctgcagcttttccaggtgcacagtgcaagctgttcggggatctaccattctggggtctggaggatagtggccttcttctcacagctccaccgggcagtgcccccrtagggactctgtgtaggggctccaatcccacatttcccttccacactgccctagcagagtttctccatgaaggccttgcccctgcagcaaacttctgccttggcatctaggcgtttccatacatcctctgaaatctaggcaaaggttcccaaacttcaattcttgacttctgtgcatctgcaagctcaacactatgtggaagctgccaaggcttgggacttccaccctctgaagcaacagcctgagctgtaccttggcccattttagtcatggctggagtggcagggacacagggcaccaagtccctagactgcacacagcagagggaccctggacct

SEQ ID NO: 97357 - DNA, 540 bp, Homo sapiens
aagtggtgggttcgcatgaccttgggcagctctactcctgtggctttgcatgatacagcctcctttctgactgctttcacaggctggcgttgagtatctgcagcttttccaggtgcacagtgcaagctgttcggggatctaccattctggggtctggaggatagtggccttcttctcacagctccaccgggcagtgcccccgtagggactctgtgtaggggctccaatcccacatttcccttccacactgccctagcagagtttctccatgarggccttgcccctgcagcaaacttctgccttggcatctaggcgtttccatacatcctctgaaatctaggcaaaggttcccaaacttcaattcttgacttctgtgcatctgcaagctcaacactatgtggaagctgccaaggcttgggacttccaccctctgaagcaacagcctgagctgtaccttggcccattttagtcatggctggagtggcagggacacagggcaccaagtccctagactgcacacagcagagggaccctggacct

SEQ ID NO: 97358 - DNA, 591 bp, Homo sapiens
tcagtatttgttacataacatttctatgcatacatatatttattctctctttaaccagatcatcagttccctaggggaaagggccatgtcttatacacgtatgtattctcaacagtacctagtatagtacaggttttgtaaatatgtgttgatttgatttagagctatttatacaattatttccctactccattatatctatatggaactattcacatattatggcaataagagaagtaaaaatgttaaggtaaaatattactatattgccarataaaaagtcacactgctccctaacctttgtgtcaaaatagatcttgctggtttcctgttgtaatacccacaacaacatatgttccaagcagcagttggaatctatcaagaagactgaaactgacacaaatagctattccataagtataaaatgccatcactgtcattgggctaacaccagggaaggtcgaattgcagagttaaaatgggcctccctttccaagttaagcctcaatgtgaacagccatgggccaaaagagcggcaagagtcgtaaaaactcttacgacatgagtaattatttgcttatggtgaggtgt

SEQ ID NO: 97359 - DNA, 518 bp, Homo sapiens
tcaatatttaaagtaaatagccttaaatcatttggtgtaattaggttttaaggacagtaaaaataattagatttagaatgcttaggtacttggctatttaaaagtctggccctaatacagctaagcattttacttaaaaacccaataattaggaataattttcatcggttgcttctatgtaggctggtacacttccttcaaataatcgatttcagtatatacagaaaataattttctcaagtcattgacaaagttagggctagttgtgggcatttgaatcaagaaaagtttaagaaactatcccaaattgcttcacttttaaaaacaaaagtataaacttaaaattgctaacatgtactccrtgaacattatagtgactatctttgtataatactggatattagtagtcaaatgaataaaatatattttgagtaaatttagttcaaaagttttattgtgtttaccacaagtcataatgcctagtaataactaaatatattcagtgcttataggttttt

SEQ ID NO: 97360 - DNA, 563 bp, Homo sapiens
gtttgtagctccattttattactgcatctatataatgagtcctgaaattaggtaaattaactctgcctactttattcttcatttaaaaattgtttcagttattctcattctttgtcttttcatataaattttaagagaatctgtattagcctattctcatgccgctaataaagacmtacctgagactgggtaatttataaaggaaagaagtttaattggttcacagttccacatggctgggcaggcctcacaatcatggtggaagaggagggaagaggacagggatgtcttacatggtggcaggcaagagagtgagtgtgcagaagagctctcctttataaaaccatcagatctcatgagacttactcattaccatgagaacagtatggggaaaaccacctccatgattcaattatctccacctggcactgcacttgacacatggggattataacaattcaaggtgagatttgggtggggacacagccaaagcatatcagaatcttgtctaaatatataaaacatttttctgttatttttatatgaattaaacttgtatatca

SEQ ID NO: 97361 - DNA, 593 bp, Homo sapiens
gacatacccaagactgggcaatttacaaaagaaagagaggtttaatgaacttacagttccatgtggctggggaggtctcacagtcatggtggaaggcaaggaggagcaatcacatcttacatggatggcagcaggcaaagagaaagagcttttgcagggaaactccccttttaaaccctcagatcttgtgagactcattcactatcacaagaatagtgcataacaattccagccccataattcagtcacctctcactgggttccttccacaatacatggtaattgtgggagttacaattcaagatgagattagggtggggacacagccaaaccatatcagctgtcatgtgtagttatttatttaatttttatctgaatcagttatstttttggctaatagctttattaaagtataagttagaggttgtggccaagatggcctcttagaagcagcttcgatctgcaactcttgcaaagagcaataaaaacagcaagtgaatcctgcaccttcaactgaggtacccaggttctcacactggggctgactaggcagatggctttacccagagagagtgaggaaaaacagggtaggg

SEQ ID NO: 97362 - DNA, 593 bp, Homo sapiens
gacatacccaagactgggcaatttacaaaagaaagagaggtttaatgaacttacagttccatgtggctggggaggtctcacagtcatggtggaaggcaaggaggagcaatcacatcttacatggatggcagcaggcaaagagaaagagcttttgcagggaaactccccttttaaaccctcagatcttgtgagactcattcactatcacaagaatagtgcataacaattccagccccataattcagtcacctctcactgggttccttccacaatacatggtaattgtgggagttacaattcaagatgagattagggtggggacacagccaaaccatatcagctgtcatgtgtagttatttatttaatttttatctgaatcagttatgtttttggctaatagcttyattaaagtataagttagaggttgtggccaagatggcctcttagaagcagcttcgatctgcaactcttgcaaagagcaataaaaacagcaagtgaatcctgcaccttcaactgaggtacccaggttctcacactggggctgactaggcagatggctttacccagagagagtgaggaaaaacagggtaggg

SEQ ID NO: 97363 - DNA, 593 bp, Homo sapiens
gacatacccaagactgggcaatttacaaaagaaagagaggtttaatgaacttacagttccatgtggctggggaggtctcacagtcatggtggaaggcaaggaggagcaatcacatcttacatggatggcagcaggcaaagagaaagagcttttgcagggaaactccccttttaaaccctcagatcttgtgagactcattcactatcacaagaatagtgcataacaattccagccccataattcagtcacctctcactgggttccttccacaatacatggtaattgtgggagttacaattcaagatgagattagggtggggacacagccaaaccatatcagctgtcatgtgtagttatttatttaatttttatctgaatcagttatgtttttggctaatagctttattaaagtataagttagaggttgtggccaagatggcctcttagaagcagcttcgatctgcaactcttgcaaagagcaataaaaacagcaagtgaatcctgcaccttcaactgaggtacccaggttctcacaytggggctgactaggcagatggctttacccagagagagtgaggaaaaacagggtaggg

SEQ ID NO: 97364 - DNA, 562 bp, Homo sapiens
ggtccctgttctggtaaagggccataaaacattggacacagggtatctcatcccatttctcttgcctcttatggaaaatatccagctgaagaatgctatggtaattaagtgacctgtccctctgccattgttcctggctacctaggacacattgtggccaggctgtgttacaaaagaaaatcatcttctttttagttattggagaatacccaaaaatcttctagtgttggataatgcaccctaawaggctttatctgaataccccaaaatcttctagtgtttagaggataaaccctaatgggctttgctctgatacggaggtcaggttccccataccctaaagttcttatttagggttcgattctagcttctcaaagtttacataacaggttaacagttatacagatgtgcaatgactgatttttcctctcaaaatgtaacaggcccctctaacacacataataaaagtaagtcaatgtgtgagggtgacctggcagatcccaagcacagccccgtgtgcttcctgcaaaatcccaccatgctgcccagtgaccctcctggg

SEQ ID NO: 97365 - DNA, 639 bp, Homo sapiens
tatctacattcccctttgcttgcccctcctccagctgtacacacaggtaacccttaaccaggactaccttagtaataaataacaccatcaactttattctacatgtcaacttattaggattggatgacttcctgcagtacatttttttttcttcttactgttccaactaatgcactttcataaacatggagtggattggaaagaggaactggactctggggaatcccacgtgacaaggctgaaagttacctctctcagaatatctaaaacactaaactggtttgccaagccctgctgaaatatgctatcaaccagttcagcctggagtaagttaagatccatgagtttaattgctatggcattagtagaatgaattttattgcttttttctcttctaatttctctctctctctctctctctctctctstgtgtgtgtgtgtgtgtgtgtgtgtgtgtgtgtgtgttttcttagcaggctccccaagggatatcctctgttaccttgtttattcgttggaaaacaaacatatttcagtagctagaattcctttcctttcaagtatagtgccttgcccatggcaggcactcaaatatttgttgattgattgatacctgcaagttgctgcattccattaatt

SEQ ID NO: 97366 - DNA, 546 bp, Homo sapiens
aaagttctcaaagtgtggttaaactttttaaactgtggtggagagataagtggatgtgataatggaggtagaagaacactgataatagtctagttcttgagtttagtggtgggttcaaaatgttcagtatactattttgctttttaatatatattcatgtatattctttggtgtgtattaaatagcatattaaagtaatatatttatttttcagaaatctgcctgaatcttcgmgatcccccaacaaatataattatcattccagaaaagcaggtgaaaccagaatggagactgccaaagctaaatcaccgatttaccacaaggtaaaatagtttcttgtaaaatgtcttaaatattaatcttcagtcttggttactgaaaaacaatgcattataatttgctcaaaatctacccagaattaagctatagcaattatgtagatatacattttcaaaataattgtagaatgctttttcactgtttaaaaataaaatattaatttagtgattttacctttttaggtcagaactggatgatatgccagaa

SEQ ID NO: 97367 - DNA, 387 bp, Homo sapiens
gataatattactgactctcagaacaaggatctctaaggaaaagggttttaaaaaaaaaggagaaaagaaaaagaaaaaaagaaataaaaaatattactgacccactgtaagtagtgcaactactttgagcagtttatccaaaggaactcgtacatttttccttctccagccacactatctgacccaccccttttgtgaacagagaacggcagcacattcttatggcactcgctgcaagagtaatatttcagagtttgagggaaattttatgttcgttgatcacaaatgtttggaagarcttcatcttcatttctggaagtttttgttaaggatgtttaaagtatcactgccatcttttatgaaactgctatcatgactatggaattc

SEQ ID NO: 97368 - DNA, 603 bp, Homo sapiens
gccacgtgtgattatcaaggctacagttactcagtgaagatacacatggggcttaaccaaaccaatgtaatggtgatccaaatcagctttaacaacaaatcctcaagagagtgactgaataatgacttcaggtcatatgtttgtgtgtgcatagattgggctgtgaaattggggatgaagattgctttttggccttttgtcccctgtaattattggaagactcatagcatccctttcatcacactattttgattaagacagttacacaggtccctccagatttgaggatcaatgtcactgtaagtatatgggtcatgggggtctataatcaaaaactaaaaaaaaaatacatgttggcatggatgtggtgaacaaggaacacttctacactgctggtrggaatgtaaactagtacaaccactatggagattccttaaagaactaaaagtggaactaccatttgatccagcaatcccactactgggtatctacccagaggaaaagaagtcattatacaaaaaagatacttgcacatgcatgtttatagcaacgcaattcacaattcacaattgtgttgtgcaaaaatgtggaaccaaccaaatg

SEQ ID NO: 97369 - DNA, 568 bp, Homo sapiens
aagaatgacacaatggactttagggtcttggggaaggagtgggaggagggtgaaggataaaagactacaaattgggtgcagtgtatactgcttgggtgatgggtgcaccaaaatctcacaaatcaccactaaaggacttactcatgcagccaaacaccacttgttccccaacaacatatggaaataaaaaattaaaaagaaaagaagtacatggggtcaggtcatgcctgtaatctcagcagttcgggagactaaggtgggcagattgcttgagcccaggagttcagggcttgcctagayaacatgttgaaacccatctctacaaaaaatacaaaaattaactgggtgtggtggcatgtgtttgtagtcccagctacttgggaggctgaggtgggaggattaattgagcctttgaggttgaggctgcagtgagccatgattgtgccactgcactccagcctgggcaacagagtgagaccctgtctaaaaaaaatgaagtacatgaggaataaaatatatattgatgcagccatctttagaagatataatctgccacatttcattatga

SEQ ID NO: 97370 - DNA, 514 bp, Homo sapiens
ctgttacctgaagggtcttgttagggtagccctgagccttgcacagcaggagggtgtatgtgaccgcatttggcagtggggaatattcagagcttttggcttactcagacctgttcaggctcttcagagtatctatgacaaccaacaggtctccaagaacctgagggagctcagctgagaacacccatctgttctggctcggttgccttttcctgagctaagtaaactcttaagctgagctaaatctgacactggggtctaagtacactgcaagtgcatggtgyttcattattggcatgcagtccactgcatccatgaatgtggtcggtgagactggccaacttttctccatccccacagcacatattccaaatttgcacccgttccttgaggctacttccctgttccacagccaatggcttctagaaagaccattgagacttttagacacgactccctcaacttcctacctctctacccctattaaaaaatacttgcagcaaaaggtcatgaa

SEQ ID NO: 97371 - DNA, 648 bp, Homo sapiens
aaactgtacagagtctagtcttgttaccctacttttaaataacaagtaatatgctgtttcaagatttacagtgctggaagaagacaaaagactcctggatcagagacaaaggtctgtattattcatgttaaaaacaggagccaggacrtcagattgatttgcatcagttttccagaggcaaacaaaaggactcattatggattccagcacttacaatgggttgtgttacaggaaataaaaaagtaaaataactgaaataaataattgactagaagggctcaacagcagatctgagctgacagaagaatcagtgaacttgaagaaaggtcaattgagattatccagtctgaggaatagcaagtaaagaataaggaaaaaagaacagagtcttagacacatgtgagatatcattaagcaaatcagtgtccaaataaattgaagacataaaatgagagaagataaaagatggagcagaaaatatttgaagaaactgtgactgagaacttccccaaattgaaggaaagcattaatcaaacttcaagtaaaataagctcagagagatccataactgaaaatttcatggtcaaactgtcaaaagacaaagagagagagatcttgaaagaaccaagacaaatatgactcatcata

SEQ ID NO: 97372 - DNA, 648 bp, Homo sapiens
aaactgtacagagtctagtcttgttaccctacttttaaataacaagtaatatgctgtttcaagatttacagtgctggaagaagacaaaagactcctggatcagagacaaaggtctgtattattcatgttaaaaacaggagccaggacgtcagattgatttgcatcagttttccagaggcaaacaaaaggactcattatggattccagcacttacaatgggttgtgttacaggaaataaaaaagtaaaataactgaaataaataattgactagaagggctcaacagcagatctgagctgacagaagaatcagtgaacttgaagaaaggtcaattgagattatccagtctgaggaatagcaagtaaagaataaggaaaaaagaacagagtcttagayacatgtgagatatcattaagcaaatcagtgtccaaataaattgaagacataaaatgagagaagataaaagatggagcagaaaatatttgaagaaactgtgactgagaacttccccaaattgaaggaaagcattaatcaaacttcaagtaaaataagctcagagagatccataactgaaaatttcatggtcaaactgtcaaaagacaaagagagagagatcttgaaagaaccaagacaaatatgactcatcata

SEQ ID NO: 97373 - DNA, 596 bp, Homo sapiens
cacaactaccacaatacaaactacyatgactcatcctgtaactattaaaaactttaattaataattttaaaactcccaagaaagaaatctctaggcacagatagtttcactgtagaattctatcaaacattagatgaaacactaatgtcaattccacaaatcttttccagaaaatagaagacaaggaaccactatccaattctttttatgaagttaaaattaccctgataccaaaaccagatgaaagtaggttttggtatcaaaaggaaactataaataaacgtttcacatgaatataaatgcaaaaatccttagtgaaatgctagtgagtagaatttagtaatatctcagaagaattatatgctatgaccaaatatagattattctagagatttgaggctggtttaatatttgaaaatcaatcaatgtaatccatcatatgatcatatcaattatagaaaagatgtttcataaaatttaatactttttatgataaagactctcaagaagtagaatagaggtgaatttcttcaacttgataaaaatcatacaaaaaaattctatagctaacatcctgtttaatggtgaaagactaa

SEQ ID NO: 97374 - DNA, 378 bp, Homo sapiens
gccctaaagtttccaggagcttaaaaacaacctgtgaccagacactggcagaaaaataagctccttagacctggggcagctcatgggaagacaagcttaaaatgaaatstcactcatccctggtcatcagaacaactgtgcacagacctaaggctgtgctctgccgtgtgtcactggagacgtagcctcagaacgtgtctctggatgatcactgaggtaggagaagacaaaaactgtaaatttcccaagcagagaaagcagcctccaagctgcacttattaccaacagcaatgggtgaaaatgtaatggattaaggggagttaagcgcaacttttgaccaaaatgtagtcaatgcacactccaagtatgacccttaga

SEQ ID NO: 97375 - DNA, 574 bp, Homo sapiens
tttaagttgacaaaaaagtcactactgaccttatggaaatataaagaattataagggagtaatatgaatgactgtatgctgcaaagtagataacagagataaaatgaaaaaatcctagaaagatcaaattactgaaactgacttaagaagaaatgtaaaatataaatagaccaatgaacaagcaaakaaatagaatacttttaaaacttctcattaaaaaaagctcagatgcagatgactttggtggtgaatgctacaaagcatttaaagaacaccaaccctttactaacttttccagaaaataaaggaaaggaaacactttcctacttgttctttgagatcagtattatcataatagcaaaaccaaaaatatatatattttaaaaactataaacccacatcttttaggactatagatgcaaaaaatcctcaacaaaatactagcaaaccaaatctggtaacatataaaaagagatatacaacatgacaaagtaggatttaccaaggaacagaagattggtttcacatccaaaatcaatgtactatacgcctcataaaggacaaaaaaacatga

SEQ ID NO: 97376 - DNA, 609 bp, Homo sapiens
attctgatagagtaactgaaaagtcctgatataagcagaacatagctctaaatcaaacttgatttatagttgataatagaaaccaatcatgtactaggaaaggagatgtgctgagaaggcagttccatctccttttttttttttttttttttttgctcaaggtatctcacttgattgtgctattttcagaacgacattctgcttacagccgaggaactcagatgaactaagatacggtgtgcatgatacccttgccttcacttcatcaccttcttgctattgacacccttatcttctccatggaaggtaattccatggagacaatacctagttcctggtctctgtacatatactaatggaagagattatgactgtggtatgctaatgaaaaattgccaagggtttttgggtgttgcaatttaatctcttgatccatttmgttgcagaaaagctaaatgtactattcctgggtgcacattagaatcactaggggatctttgagaaaatatgcagacttctccctacctcggacattctgatacagtgagggcccgggcataagcatttttagagttcccaggggattctgttgcagagtcatggttgaga

SEQ ID NO: 97377 - DNA, 425 bp, Homo sapiens
agcttttggtccatttcaaaaactgaattgaacaaaaattatctggagagtatgagttagctgacatagatcccactgatgtaacactgtcacacttgatagaatgtgtaggggagacgtgaatgcgtaacaccgaggagcacgctttgccaggactctgccaagagcacttcacatcagccctgagacgtatatgctgctgataattttttcaaacatgaggaatggactttgagagattaagcctcttgctgaatatcacatgaggagtggagtgcagggatgtgaagatacggcatcctgtgtgttctgtgtcgcattcagtcgtgtgctgtaaaamtgtaaataagttttaccttatttacagatagttctgatccacacaaacctttgtcaggcaggtagagttattcttcctttcctga

SEQ ID NO: 97378 - DNA, 544 bp, Homo sapiens
gaattcttaataaaataaagtgatttaaactctagctcatataacataggattaaatatttctaaatcagattgctcaaaagatacaaaaagcctcaataattcatggacagtcaggaatgaggttgagctgaatgagcagaaaaatgatgtataagrttagacacagcttggtcttcccaagcaggtggcacagcaacacttcacctctcacagcagcaaaagcaattcaccatcatatgctactatcttttttatttaagaatagcatttaacaagcttattttagaatctgattcattttcatttttaggaaatttaaaggccttaaaccttctccatactgtgtgtgattacacctaattaaagttcacatctttcgcagaaaggtgggatatcagttctaattttacgcactggtgtgatggagggcagaaggcattaggctgcaggccaataaacccaggtttattcctgacttggtcactacttttctggattttcttaaatgcctcagtttttccattcataatatatgagcatta

SEQ ID NO: 97379 - DNA, 571 bp, Homo sapiens
  misc_feature (1)...(571): n = A,T,C or G
tgggattcgaacctatgaaatgaactctaatgggcacgtctgacatgtgcacatagggggaagaaaaaaggagatactgctagagattaattactacaactgctaatgtgaataaggctctccaattctgacatttaccacagaatgractcatggcccggaaaatttttaaatgctgcatttcaattcagttggtacaattatgcaatgggcctaaccactgaaagaactgaaaggctaggtttgtcaaatttctgaatgagccaaataaacagcaggctaaagcatccttgctacataccttagttctattcttaaatgataaactttctcatttttttcatttttctttttaataaagacagaggggtgctgtgttgcccaaactgatcttgaattcctggccccaagtgatcctcctactctggacacccaaagtgctgggattacaggcatgagtcccgtgcctggactttgntattattctttttggttttttgtagtcaaactttcctgtggacaacctgaaagcaggggcagtggttactaattaaactgcttccaataataa

SEQ ID NO: 97380 - DNA, 571 bp, Homo sapiens
  misc_feature (1)...(571): n = A,T,C or G
tgggattcgaacctatgaaatgaactctaatgggcacgtctgacatgtgcacatagggggaagaaaaaaggagatactgctagagattaattactacaactgctaatgtgaataaggctctccaattctgacatttaccacagaatgaactcatggcccggaaaatttttaaatgctgcatttcaattcagttggtacaattatgcaatgggyctaaccactgaaagaactgaaaggctaggtttgtcaaatttctgaatgagccaaataaacagcaggctaaagcatccttgctacataccttagttctattcttaaatgataaactttctcatttttttcatttttctttttaataaagacagaggggtgctgtgttgcccaaactgatcttgaattcctggccccaagtgatcctcctactctggacacccaaagtgctgggattacaggcatgagtcccgtgcctggactttgntattattctttttggttttttgtagtcaaactttcctgtggacaacctgaaagcaggggcagtggttactaattaaactgcttccaataataa

SEQ ID NO: 97381 - DNA, 571 bp, Homo sapiens
  misc_feature (1)...(571): n = A,T,C or G
tgggattcgaacctatgaaatgaactctaatgggcacgtctgacatgtgcacatagggggaagaaaaaaggagatactgctagagattaattactacaactgctaatgtgaataaggctctccaattctgacatttaccacagaatgaactcatggcccggaaaatttttaaatgctgcatttcaattcagttggtacaattatgcaatgggcctaaccaytgaaagaactgaaaggctaggtttgtcaaatttctgaatgagccaaataaacagcaggctaaagcatccttgctacataccttagttctattcttaaatgataaactttctcatttttttcatttttctttttaataaagacagaggggtgctgtgttgcccaaactgatcttgaattcctggccccaagtgatcctcctactctggacacccaaagtgctgggattacaggcatgagtcccgtgcctggactttgntattattctttttggttttttgtagtcaaactttcctgtggacaacctgaaagcaggggcagtggttactaattaaactgcttccaataataa

SEQ ID NO: 97382 - DNA, 618 bp, Homo sapiens
aagagggagaagttgaggctctcaaatgagatctacagctataggggctttggaaaattctcctaaaccacaattttaataaataggtctgccaagttaaagttgcagcttatttctttcttgtcttcaaaaagttctctctttacccactaggcttgtctgaaacctgtgctaacttgcaattygagtcatctagtattgattcaggattgcagcagatgtctagaagtaggaagcaacttttgggttatttggagagaggccaagatggattctgtatgggatgttcttgaaataaatactcttcagtctatgagaaatttctggctatatttttttccagaaaaaaaaagactacaataggatatttacgggttatcatgagaaactgattgtaagtgcattttttaacccaccagtagtatgaatcaagaaaaccagagtatgacctaaaccattttcagcagtgtatttatcaccaactaaaattatgtgccttagctgtgccagacaggcatggctgaatcggggtgtatttttctactaacacatctaacatggatgagtggaaataagctatggaatggccgaaaggcaagcatctgagaacatggagaa

SEQ ID NO: 97383 - DNA, 618 bp, Homo sapiens
aagagggagaagttgaggctctcaaatgagatctacagctataggggctttggaaaattctcctaaaccacaattttaataaataggtctgccaagttaaagttgcagcttatttctttcttgtcttcaaaaagttctctctttacccactaggcttgtctgaaacctgtgctaacttgcaatttgagtcatctagtattgattcaggattgcagcagatgtctagaagtaggaagcaacttttgggttatttggagagaggccaagatggattctgtatgggatgttcttgaaataaatactcttcagtctatgagaaatttctggctakatttttttccagaaaaaaaaagactacaataggatatttacgggttatcatgagaaactgattgtaagtgcattttttaacccaccagtagtatgaatcaagaaaaccagagtatgacctaaaccattttcagcagtgtatttatcaccaactaaaattatgtgccttagctgtgccagacaggcatggctgaatcggggtgtatttttctactaacacatctaacatggatgagtggaaataagctatggaatggccgaaaggcaagcatctgagaacatggagaa

SEQ ID NO: 97384 - DNA, 391 bp, Homo sapiens
gaattctgtctgtggattctctargtgatgtataattggggtaatcatgtgtcccattttgccccccaaattcctggtttatacctgctgttccagcataattattaataataccttcatttttaatttgtaatttaaatttacatggtcaccctgtagatcatgagctcaacttattttactctctacatcataccttagctctaataatggatattttagtattcctgtgcccatatcccatttttataatctgctttggcagatctgtttctttaggataaagaccctgcccttctcttgttagtatatcttcagggcccatttgagaggctgactgggttctgctacctgctgaacaaattacctggtacattcttggtgcccattg

SEQ ID NO: 97385 - DNA, 482 bp, Homo sapiens
gagaatgtttccagcttttttccattcagtatgatattggctgtggatttgtcatagatgtaccttcaatgcctagatattgagggtttttaacatgaaaggatgttgagttttattgaaagccttttctgcatctattgagataatcatgtggattgatttttagttctgtttctgtaatgaatcacatttatttgtttayagatgtttatcaaatttgcaaaccaggggtagacccttcttgataatgatggattacctttttgatgtgctgctggatttggtttgctactattttgttgtggatttttgcatctgtgttcatcaaggatatcagcctgaagcctgcagcctgcagcctgcggttttctttctgcagtgtctcagtcaggttttggtatcagaatgatgctggcctcagaatgaggtggggagaagtccctgatcctcaatttttttttagaatagtttcagcagaatga

SEQ ID NO: 97386 - DNA, 482 bp, Homo sapiens
gagaatgtttccagcttttttccattcagtatgatattggctgtggatttgtcatagatgtaccttcaatgcctagatattgagggtttttaacatgaaaggatgttgagttttattgaaagccttttctgcatctattgagataatcatgtggattgatttttagttctgtttctgtaatgaatcacatttatttgtttacagatgtttatcaaatttgcaaaccaggggtagacccttcttgataatgatggattacctttttgatgtgctgctggatttggtttgctactattytgttgtggatttttgcatctgtgttcatcaaggatatcagcctgaagcctgcagcctgcagcctgcggttttctttctgcagtgtctcagtcaggttttggtatcagaatgatgctggcctcagaatgaggtggggagaagtccctgatcctcaatttttttttagaatagtttcagcagaatga

SEQ ID NO: 97387 - DNA, 482 bp, Homo sapiens
gagaatgtttccagcttttttccattcagtatgatattggctgtggatttgtcatagatgtaccttcaatgcctagatattgagggtttttaacatgaaaggatgttgagttttattgaaagccttttctgcatctattgagataatcatgtggattgatttttagttctgtttctgtaatgaatcacatttatttgtttacagatgtttatcaaatttgcaaaccaggggtagacccttcttgataatgatggattacctttttgatgtgctgctggatttggtttgctactattttgttgtggatttttgcatctgtgttcatcaaggatatcagcctgaagcctgcagcctgcagcctgcrgttttctttctgcagtgtctcagtcaggttttggtatcagaatgatgctggcctcagaatgaggtggggagaagtccctgatcctcaatttttttttagaatagtttcagcagaatga

SEQ ID NO: 97388 - DNA, 616 bp, Homo sapiens
aattctcttaagaattaacattactgattataggacctgcacaacaaaattaatctgtaatggacacctcgcttcccaaaacaattagactctggggaaacaggtcctgactctcagatcctgactcacaggtcctgacaatttgactctggggaaatacaggtcctgactcacagatcayatatcggcagagaacgtgttctctgcattgcaaagagccccaactccaacctcaccgatgctcaaacctaagaggcaaacgcctccggggcagccaaatggcgccagaagcggccgaggttccaccgacagtgggcaaacccgccaagcccattcacctctcggtcaaatctcccgggtctacgcagcgctgggtctagagcgtccggccggttagtggctcccacaaccacgacctcgcggtccccactggcgccgtccaacagcgtcaacacctgggccactacgcggctctcgggtgctcgactgccccgctggggacacaaggcgtccatctcgtccaggaagaggaggctgggtccgcggctggccagttcccgggcgcgctggaagacccgccgcacgttctcctcggtctccccaggccgggaaccct

SEQ ID NO: 97389 - DNA, 616 bp, Homo sapiens
aattctcttaagaattaacattactgattataggacctgcacaacaaaattaatctgtaatggacacctcgcttcccaaaacaattagactctggggaaacaggtcctgactctcagatcctgactcacaggtcctgacaatttgactctggggaaatacaggtcctgactcacagatcacatatcggcagagaacgtgttctctgcattgcaaagagccccaactccaacctcaccgatgctcaaacctaagaggcaaacgcctccggggcagccaaatggcgccagaagcggccgaggttccaccgacagtgggcaaacccgccaagcccattcacctctcggtcaaatctcccgggyctacgcagcgctgggtctagagcgtccggccggttagtggctcccacaaccacgacctcgcggtccccactggcgccgtccaacagcgtcaacacctgggccactacgcggctctcgggtgctcgactgccccgctggggacacaaggcgtccatctcgtccaggaagaggaggctgggtccgcggctggccagttcccgggcgcgctggaagacccgccgcacgttctcctcggtctccccaggccgggaaccct

SEQ ID NO: 97390 - DNA, 616 bp, Homo sapiens
aattctcttaagaattaacattactgattataggacctgcacaacaaaattaatctgtaatggacacctcgcttcccaaaacaattagactctggggaaacaggtcctgactctcagatcctgactcacaggtcctgacaatttgactctggggaaatacaggtcctgactcacagatcacatatcggcagagaacgtgttctctgcattgcaaagagccccaactccaacctcaccgatgctcaaacctaagaggcaaacgcctccggggcagccaaatggcgccagaagcggccgaggttccaccgacagtgggcaaacccgccaagcccattcacctctcggtcaaatctcccgggtctacgcagcgctgggtctagagcgtccggccggttagtggctcccacaaccacgacctcgcggtccccactggcgccgtccarcagcgtcaacacctgggccactacgcggctctcgggtgctcgactgccccgctggggacacaaggcgtccatctcgtccaggaagaggaggctgggtccgcggctggccagttcccgggcgcgctggaagacccgccgcacgttctcctcggtctccccaggccgggaaccct

SEQ ID NO: 97391 - DNA, 588 bp, Homo sapiens
ttaggaaacccacccggcccacaaaaagcggaacaccgagctcgcaggccggaagcagattgcgcgcatgcgctagggmagactgcgttgctagcagctgagtgaaggccgaaagggccaatggaaacgttagacgacgctcgggcctctgggtagagcgttggtgtccgctttcgtgaaatcgagttgcctaacccagagctttcccgagatggtcttcgttacaggtgtctgggaggcggcttaagctcacttcactaggtcattaagcatgtactttggtggttacatatatcttggaagtcaccggctttacattctgttttcctggccttcgaactggagcatcagtactaccgccgttggaatagcaacctagagactttgctattttgtgaagaaactctaactatccgcatgggcacagaattttgggtgctctggtgcaaatgtctcaggtgacttggcgtaactgagaatacagccttgggaccttcggtaatcggggttccaatctgggaggtccaggcacaacccttcctatgggaaagtaccagcatagtgggagggaagcacacggtagcgctt

SEQ ID NO: 97392 - DNA, 550 bp, Homo sapiens
agtagcatgagtcatctgtagattaaataatgttaatctttccrgcatttccatttttgtgttatgttcaaccctaatatatttgaacattagcaatgactatgagttgtaatagatgaatagagatttgtttagccacccttgaaaaagcatgatttgcaaacactttcatctcaacatgctcatgtagatgtagtaagtgacttatttccacggatagctaatatgccgaacctgtgttcataaagtatgtaatgaaaatccccctaaatgggacattgttaaaattgttctttagaatcttccatctttactttttatcttgtatccaggttagaattagtctttagagtaattctagatatagaataagttatagaatcagaagaaggaggatgaaaatatttgctggatttcaaatgacctgcagactacagttcatagaacatcattctgaaagtctgttcttgcacattttcaggaaattgcttgattcatcattttttagaagttaatgttaaggtaatttttccccatgatgttggttcac

SEQ ID NO: 97393 - DNA, 503 bp, Homo sapiens
acagtaagtacacataacaagcccttgagattactataccatttctgcttgagattggaggacatcctcttgccacccattaaaagcactattttaattttgcagatgtaagaattgggagtgtctggtaataatgaagtttacgatgttgttaagttttacataatgaaaaactcatagccaaagagcatacccttatctcctgggatccagcagaaagtgtgtggatagcgccacccaaaccagtcctacygttataaaagcaaatcaaagcactcactcctcctttttgctatgcctctgatttactttcattctttgtcctttttccccttttataccacacttttattcattcactacaattatattttttcattctcttctatgttctgtttttgaaaaaatttggtaacaatttctagagtgacctcatcaatttaaagtacaagctttccatattagattgtttgtctaatactgggccaactctgcaaagtatc

SEQ ID NO: 97394 - DNA, 579 bp, Homo sapiens
acgctatctgggcagaaatagtacacttgtgaggcatgtgggamacaattctggtttagtgcaaacatgcaccagcaccagaaggaacacaatggaatagagacgtggacaatgctttctctgtgaaaggctgcagattttaagtgtcaggaaggcctttcgcctgtgggaaagttgggaaggattttcctggcaactgtaccttctccaacataggccactcacaactggattgaagccacacatcagcaccaaatgtggggaggcctttcacagcagaaaaagtcattacaagtgcagtgaaccaggaaagctttcaggtacaaatacaaacttgttcaacatcagggaattcacaatggagaaaaggccttaggagtgtggcaaatgtgggaaattatttagccaaaactccaatctcatttgtcactggataattcacgctggagaaagacttatgagtgtggtgaatgtggagaatttctttagccaaagctctgtcttcattgaacactagagaattcacactagagctaggcctcatgtgtatggtgaatataggatgtcctttagccagag

SEQ ID NO: 97395 - DNA, 657 bp, Homo sapiens
agccctggagttcctggagagcaaggaacctctgtcccaaacttgactcagagcttccaaagttggtgtatttcaacaagtaagcattccattgagccaacaatttggtagtttaccagcggctctggagcgcctgttgatgatgacagtttttgtgggggcatctcaatatgacacacaattgacactgaccagaaacacagcgccaaggacactctagtcctagccatgaaatgttatgattccaggttttcaggacagagcagagtccacttctcatctccagtatccgtaaaaatttgtccaaaatgtaactaagaaaacacaatgatattagttacttctgctccccgtcaccctcaaccccactgattacgagatgggaactcacacaaaactttgagacaaaagagcaacragtttgctttattgtttgcttgttttgttccggagtcggggccgggagggagtgcaggaggagggatccaagcttccaagcctctgctccgctctccttctatccagttggtctttagggcactgaaggaaactcttcttcagaaataaccttttaacttttcttctgtcagctgcctgccaatcacggagccagaggctgaggggaggctttgagccggtctgcgagtccggaaggca

SEQ ID NO: 97396 - DNA, 657 bp, Homo sapiens
agccctggagttcctggagagcaaggaacctctgtcccaaacttgactcagagcttccaaagttggtgtatttcaacaagtaagcattccattgagccaacaatttggtagtttaccagcggctctggagcgcctgttgatgatgacagtttttgtgggggcatctcaatatgacacacaattgacactgaccagaaacacagcgccaaggacactctagtcctagccatgaaatgttatgattccaggttttcaggacagagcagagtccacttctcatctccagtatccgtaaaaatttgtccaaaatgtaactaagaaaacacaatgatattagttacttctgctccccgtcaccctcaaccccactgattacgagatgggaactcacacaaaactttgagacaaaagagcaacaagtttgctttattgtttgcttgttttgttccggagtcggggccgggagsgagtgcaggaggagggatccaagcttccaagcctctgctccgctctccttctatccagttggtctttagggcactgaaggaaactcttcttcagaaataaccttttaacttttcttctgtcagctgcctgccaatcacggagccagaggctgaggggaggctttgagccggtctgcgagtccggaaggca

SEQ ID NO: 97397 - DNA, 489 bp, Homo sapiens
tactcattatatactctttgctttatttcctcccttggactcatcaattaaatattattatttaactctcttctaaattaccttattagttttacattatttaccttctgtattacattaggctttcttgacctactaatatctaattttaattttaattagtgttttttttttttgacagtctcactttgttgcctaggctaaagtgcagtggtgcaatctccrctcactgcaacgtctgcctcccaggttcaagcaattctactgcctcagccacctcagtagctgggattacaggtgcatgccactgtgtccagctaatttatgtatttttagtagagacgaggtttcaccatgtcgatcaggctggtctcaaacttctgacctcaggtgatccacctaccttggcctcccagagtgctggaattacaggggtgagccactgtggttttttttaaccagatctttgaaaacacaaacaccttagaa

SEQ ID NO: 97398 - DNA, 549 bp, Homo sapiens
ggcatattaccacttcattttaagttattttctgaagaatctattaagttgaacatgttatagggaaatgtgtgtcattaaactattgctacttccaatttttatttaattccatattagatatctagattagatatcttatttatctaatttattcaattagatttctttcaattggatattaactaaattatttgataaatttagctgtaaccttccatcattttggcaggaggaatttatactcattattttcactgagcaaatgatcattttctcatctttatcgtatcagtagatcttagacttaccagatatagatgttattagtgtagaaatatgattggtaacagctagcrtttactgaaaattttattttttaccagttaccattttaagtaccttgtatgtatcattttatttaagtttttcaaagtccctaagtctgttgtattatctctattttatatgtgagaaaattgaagcatctagaggtatgatgggtaagttcatggttagtggtagagccaagatttgatctcaggtctg

SEQ ID NO: 97399 - DNA, 467 bp, Homo sapiens
ttgtttttaaaagcattgtccaaggcagaaccaaaaagcacccacctcccaatatattggttaacattgatttattaaccagcactcccatggccacagttgttgagccatgatagagtcgcctattttcacctaaatttttattatttaaacctaaagaaatttatagagaataatataatgtagcggccacctaggagctttattactacttaacatgttattatactgcctcagatttatttataagaggtaaaacattgcacattcagttgaaatcaccttccctggtccagtcctcttccacttttccccagaggtgaccattattgtataatttcactctcatcctatccatattttttgcagttcatttatwaaaatacttgatgtagctttatcaaaaagggtttatgaaatttgcatttactaatattatcagagagttctttgataagtggggtatt

SEQ ID NO: 97400 - DNA, 470 bp, Homo sapiens
tggtattcccaattatttaggtaacactggagaaatccagagtatttatgtattttttacttgacttatttagctttttgtttgtttttttgttttgagacagggtctcactctgctgcccaggctagattgcagtggcatgatcttggctcatacagcctcaacctcctgggctcaagcaatcctcctacctcagcctcccaagtagctgggactacaggcatgtaccaccatgctcagctaattaaaaaaaaaaaattgtatggtctgggtttcaccatgttgcctaggctagtctggaatgcctgggctcaagtgatctgcccacctcagactcccaaagtgatgggattacaggcgtgagccaacatgcctgrgcttatttagctttcttaatatgtgtctagtagaagaagatctcatttttagctccaaattttcattgcatccttagtatcatatagccttat

SEQ ID NO: 97401 - DNA, 597 bp, Homo sapiens
acaaatacgcatctgggatactctctacacacgcacattatcatcattagcatcgtcrtcaccatcatcatgataggtagttaataaattaagatcatggtagccagtagtttcaaaagtttcacaagctttttatgtaactcatcacttgtttttttccaagccataagcatgcaatactacagaaatgaactatcattctattagaagagaagtgggaaaaatgtttgtacagtgcttggtttgaaaaatctaccagctcaccactggggagttccattctagaattctagaaaatttaataatttcctcgatccataaaaagaagtgatttaaaatatctaattccattaaaatttgatttctttggacatacaaattggctaaaccattcatccattggtggaaaattactgctttaccttagtcgtttgctttaaatctgcagattgtctatttttctatataaagtaaattttcacatatgctgtacatttctttctgctcaccaaaataagacacaatgtctaaattctacttagtcaacatgcagtctctttgacctcatcaattgaggtgtacctcaatcatgtcccc

SEQ ID NO: 97402 - DNA, 597 bp, Homo sapiens
acaaatacgcatctgggatactctctacacacgcacattatcatcattagcatcgtcatcaccatcatcatgataggtagttaataaattaagatcatggtagccartagtttcaaaagtttcacaagctttttatgtaactcatcacttgtttttttccaagccataagcatgcaatactacagaaatgaactatcattctattagaagagaagtgggaaaaatgtttgtacagtgcttggtttgaaaaatctaccagctcaccactggggagttccattctagaattctagaaaatttaataatttcctcgatccataaaaagaagtgatttaaaatatctaattccattaaaatttgatttctttggacatacaaattggctaaaccattcatccattggtggaaaattactgctttaccttagtcgtttgctttaaatctgcagattgtctatttttctatataaagtaaattttcacatatgctgtacatttctttctgctcaccaaaataagacacaatgtctaaattctacttagtcaacatgcagtctctttgacctcatcaattgaggtgtacctcaatcatgtcccc

SEQ ID NO: 97403 - DNA, 597 bp, Homo sapiens
acaaatacgcatctgggatactctctacacacgcacattatcatcattagcatcgtcatcaccatcatcatgataggtagttaataaattaagatcatggtagccagtagtttcaaaagtttcacaagctttttaygtaactcatcacttgtttttttccaagccataagcatgcaatactacagaaatgaactatcattctattagaagagaagtgggaaaaatgtttgtacagtgcttggtttgaaaaatctaccagctcaccactggggagttccattctagaattctagaaaatttaataatttcctcgatccataaaaagaagtgatttaaaatatctaattccattaaaatttgatttctttggacatacaaattggctaaaccattcatccattggtggaaaattactgctttaccttagtcgtttgctttaaatctgcagattgtctatttttctatataaagtaaattttcacatatgctgtacatttctttctgctcaccaaaataagacacaatgtctaaattctacttagtcaacatgcagtctctttgacctcatcaattgaggtgtacctcaatcatgtcccc

SEQ ID NO: 97404 - DNA, 597 bp, Homo sapiens
acaaatacgcatctgggatactctctacacacgcacattatcatcattagcatcgtcatcaccatcatcatgataggtagttaataaattaagatcatggtagccagtagtttcaaaagtttcacaagctttttatgtaactcatcacttgtttttttccaagccataagcatgcaatactacagaaatgaactatcattctattagaagagaagtgggaaaaatgtttgtacagtgcttggtttgaaaaatctaccagctcaccactggggagttccattctagaattctagaaaatttaataatttcctcgatccataaaaagaagtgatttaaaatatctaattccattaaaatttgatttctttggacatacaaattggctaaaccattcatccattggtggaaaattactgctttaccttagtcgtttgctttaaatctgcagattgtctatttttctatataaagtaaattttcacatatgctstacatttctttctgctcaccaaaataagacacaatgtctaaattctacttagtcaacatgcagtctctttgacctcatcaattgaggtgtacctcaatcatgtcccc

SEQ ID NO: 97405 - DNA, 628 bp, Homo sapiens
tcatttacagttcattgatgttttcccccaattatttagaaatatctgtcaacttctttacactgatttacaaagaatactttttcacacacattgtgacctaaaaagtcttctctttctctaagattacaacttaaaggtgcatgcatcactgtaattgaatcaaaatgtgggagaggaacctattatgttatattaatttttttattcaaatacacctcttaacaatcaaaartcatttaatacaatttttcccaaaaggaagacagaataatataccctctaacatgaaatttaaacatttctgcaaaaacactggatatttgaaattttctcttgaattgattgaacacgtaatcttgactaatccaggtcacccttatataggtttactttttctatttattaaatcaagtgtattttatcaaccctgtgattctttcagagaagcttctatcacagacataaatgaatcaattttatatttatttgtttcatactttaattttcctacttctctgatggtcattccttaaagccatcttcctcctcccagaacatcatttccaagttctgacctacaccctctccgatttcactcaattgccatttactcagagagctttga

SEQ ID NO: 97406 - DNA, 568 bp, Homo sapiens
acttgcagaaaaagacaaacattgcttcagtaaacaatatgtcagtggattcttacaaatgccaaactaaaatttctccaaaatattacaaccgaatgactctaaaaaacttccagcaaagcctaattcttcaatgatgacatcctgaaacaccagtgtcttcttggtttttagtgaaaatattagccaatttctaaatagcaaaatctctctcyatatatatatagatatcaaaatatcaaatatctatctacatacatatgtatattgatatatattggtcacccaggctggagtgaagtggcgcgatctcggctcactgcaacctccattccctgggatcaggccattctcctgcttcagtctcccgagtggctaggattataggcacccgccaccaagcccagctaatttttctatttttagtagagatagggtttcaccacattggccaagctggcctcgaactcctgacctcaagtgatactcctgcctcggcctcccaaagtgctaggattgcaggcgtgagccactgcacccggccagtttgctattttttaataatggc

SEQ ID NO: 97407 - DNA, 587 bp, Homo sapiens
atgattacatgaaaatctttaatattaattgaattgagtattgatgtaaacagcatacatggggcattacaatagtattgcttaacttacagtgttttaatatgtaaagatggtagataaaatagatttagtacatatcttattttactgatattcattttaatataacattaagtcaaatgttaagtctttatagggcaatcaatgtaacaaataatctaccaatataactatcatatgaacaacaaaacatgaattcaaaaggatgaacaatggttagcatgacagatgccttacaattaacattaatgccacagaaataacattttttgatatgaccacagcgtgcaatatttctaatacttataatgyttattttaaaactacgggaaggcatcaatgtccctaaaccaagacttttcaaaaatctcaatgaggtttcatgaggtctatatcttcaaaagccattcaaaattctgttgtaaatgtggaatagcaaaaatctagaaattttatttgattttgaatttcaaaaataaaattaatcttattaaatttaactaacaaatgttcactcctttaaaaac

SEQ ID NO: 97408 - DNA, 587 bp, Homo sapiens
atgattacatgaaaatctttaatattaattgaattgagtattgatgtaaacagcatacatggggcattacaatagtattgcttaacttacagtgttttaatatgtaaagatggtagataaaatagatttagtacatatcttattttactgatattcattttaatataacattaagtcaaatgttaagtctttatagggcaatcaatgtaacaaataatctaccaatataactatcatatgaacaacaaaacatgaattcaaaaggatgaacaatggttagcatgacagatgccttacaattaacattaatgccacagaaataacattttttgatatgaccacagcgtgcaatatttctaatacttataatgcttattttaaaactacgggaaggcatcaatgtccctaaaccaagacttttcaaaaatctcartgaggtttcatgaggtctatatcttcaaaagccattcaaaattctgttgtaaatgtggaatagcaaaaatctagaaattttatttgattttgaatttcaaaaataaaattaatcttattaaatttaactaacaaatgttcactcctttaaaaac

SEQ ID NO: 97409 - DNA, 639 bp, Homo sapiens
accagcccttggaaatgcatggctctaagcattttctcagctgcaactctccagcacatgtgtatttgaagggaaacttaatccatctttttctggttcacttatactgaagtcatcaaaaaagctgttgacatgtcctttgcatggccctgttctctgtgagttttcaggaaataccaacataatcttgaggtctttttggtatcccagggttcttgggttttgtcttcactgggaacacagggagagtggagaatgctttgaactaaagtcattccaaatttgcaaagctctgctcttccctccaggagtctcagtggctcccagagtctgaaaatcttggaaaaagaacaaagttagaagcatcttcgagatcttagatctcctgtccttgttcctagcagagactgagggatggcccaggagagggagaaagtgtttcagaggcaatttggccaggagactaagttcaggacaaagagagttttgattccagacagtgtgaccttgagcaaaagcagttcttttttttaattcttcaattcccccaaatgtggtaggagagygatattgcaattcttgatctcctagatatggcttgtgtggttaatgtgtggtttgtgactttaagaaacaaaa

SEQ ID NO: 97410 - DNA, 506 bp, Homo sapiens
atgtaacaatgtaactaatgatatattagcaaaattctactggagaaatacataaagcactccttcctcctttacacacatacttcccaagttccaacgcattttttttcttgcagcaaggaaaagagcattgaaatcaccagttgatacacaataacatccttgagtctgttccagaattggatgcactcttctgaatcattcttctccagctagtgacaaggaaagaggcattttctaggtaggagtgtcttagtctattcacactgctaataacaaaataccataaactgagttacttataaaagttatttacacagttctggagactgagaagtccaatatcaaacagttgcagatttagtgtttggtgatagcctgttttctcctggcttgaatcttctcactctgtccttacatagtggaagtgacraacgagctttcttgggcctcttttataagggcactcatcccatctataagggctctgccttcataatctaatc

SEQ ID NO: 97411 - DNA, 584 bp, Homo sapiens
atgcatgcccctaaagttaacacagaggaaacaatgcctttaattggaataacttcatcagttccatattcttatgccttctgagagttataaactaaaaagagacttgccatcttatgtgggctgaggttcctactccacggggtgatgataagtttatttacaggcagattttgtgctgcgatgaacttggaagcttctcactctckgtataattcttcctaagctgcagatggacatgccccttcttatagctcacccttctgttctgtcaaagggaaacgctcagctcatgcctttactcagggtttaatttcacaacccaatgcattctgtacaccacgtaacattttcaacttcgtgcttatccaattcttatagtgatctctcctgaatttggttagataaaaacatgcacctctatctaaggcgcacttatcctccatgactctatgcaattcaactgacctctttactgcagtaattacacgtggcattcttctttctaatttcttgtgtagaataatatgttgtcatcttgtctatagcttgcacaccacactttgacacaaatcacattatat

SEQ ID NO: 97412 - DNA, 584 bp, Homo sapiens
atgcatgcccctaaagttaacacagaggaaacaatgcctttaattggaataacttcatcagttccatattcttatgccttctgagagttataaactaaaaagagacttgccatcttatgtgggctgaggttcctactccacggggtgatgataagtttatttacaggcagattttgtgctgcgatgaacttggaagcttctcactctctgtataattcttcctaagctgcagatggacatgccccttcttatagctcacccttctgttctgtcaaagggaaacgctcagctcatgcctttactcagggtttaatttcacaacccaatgcattctgtacaccasgtaacattttcaacttcgtgcttatccaattcttatagtgatctctcctgaatttggttagataaaaacatgcacctctatctaaggcgcacttatcctccatgactctatgcaattcaactgacctctttactgcagtaattacacgtggcattcttctttctaatttcttgtgtagaataatatgttgtcatcttgtctatagcttgcacaccacactttgacacaaatcacattatat

SEQ ID NO: 97413 - DNA, 584 bp, Homo sapiens
atgcatgcccctaaagttaacacagaggaaacaatgcctttaattggaataacttcatcagttccatattcttatgccttctgagagttataaactaaaaagagacttgccatcttatgtgggctgaggttcctactccacggggtgatgataagtttatttacaggcagattttgtgctgcgatgaacttggaagcttctcactctctgtataattcttcctaagctgcagatggacatgccccttcttatagctcacccttctgttctgtcaaagggaaacgctcagctcatgcctttactcagggtttaatttcacaacccaatgcattctgtacaccacgtaacattttcaacttcgtgcttatccaattcttatwgtgatctctcctgaatttggttagataaaaacatgcacctctatctaaggcgcacttatcctccatgactctatgcaattcaactgacctctttactgcagtaattacacgtggcattcttctttctaatttcttgtgtagaataatatgttgtcatcttgtctatagcttgcacaccacactttgacacaaatcacattatat

SEQ ID NO: 97414 - DNA, 428 bp, Homo sapiens
tcggatctgttagtaataacaagatgactcaacagcataaaaatcctaatagccaacaaagggtgttaatttcttggccaagcatctgggatgtcaaaactcaggatagaaatgatgtctccaacgtagcattctcttgtttctaactgtattgcttagcacaaaggcatctcatctggatgctagcacacacacactcagggtctcatcacttatgttatttccatgatgactaagacttagagggccggacactytacaatgattggagaaacactgagcacatgccaaagctctacctcagctttatagagaaatatattgtctggaaagccacctcttctgcattctgcatttggaaattagtccaaacctgagaagaccctgaaagtaatgtctctctttgtaactaaacaaatacggaattc

SEQ ID NO: 97415 - DNA, 577 bp, Homo sapiens
ttaatctgtagaaacggatcattacattgtgatatgcctagagagaacttttctaagatttttttacaaggtaattgtttcatgaagaaaggaattttttttatctttcctaagatttacttttcatgtgaaataggtagtgaatttaataatacttcattcaggacccactagaattaggagtagaataagataaacaaacgacagccttcakaagagtaagacatagtggagaaataaaatagaacacagaatgaaggtcaatatttggagctaaatgaattataatactttttatttaataaaaactaaattgtatttactgaaggccaggtattattcaacattctttataaacactaatttatttaaacgtcatgatacaatctgaggtagttctcattttatagatgaggaaactgagaccaaaagatatgaagtaccttgtccaaaatcacaaagctcataagtggttgagctgggatttgaattcagacattctgactctaaagttcatgtgtcatctattttatttgttttgctttgtttacatgtgcctcaaggtactgtcagattg

SEQ ID NO: 97416 - DNA, 497 bp, Homo sapiens
tctatacagccactgttctgtactcttaagaaaagataaagaacacaataaatgctacgctggccatatatttcatctatctggccccacactgggtatgatggtggcccaggctattttaagttattccttagctaactgattgcttgttgtttatgsaataatttagcatgatattttataaataacaatatacttaagaattatagaaatcttgttttgatatttaaaatttagtttatatctcatccttaactatttgtaatctaaacacatccatatgacattttaatcattccaaggcattctgatttaaaaaagctttgttacaaggtaaatggttaaatgggagcaacagatgatgactgatcaaagataagcacttgtaagtgattcttaggtgtcttcttacagaatattttgcatattaaaacataacataatcctaccagtattcttaaaaattcatttattgcctaaagatttaataaagaaag

SEQ ID NO: 97417 - DNA, 531 bp, Homo sapiens
gtggcccaggctattttaagttattccttagctaactgattgcttgttgtttatggaataatttagcatgatattttataaataacaatatacttaagaattatagaaatcttgttttgatatttaaaatttagtttatatctcatccttaactatttgtaatctaaacacatccatatgacattttaatcattccaaggcattctgatttaaaaaagctttgttacaaggtaaatggttaaatgggagcaacagatgatgactgatcaaagataagcacttgtaagtgattcttaggtgtcttcttacagaatattttgcatattaaaacataacataatcctaycagtattcttaaaaattcatttattgcctaaagatttaataaagaaagagtcttctttatgtaatagggaaaggatattcatggataactgtaggtaaattctgagatctaccaaagatcagaatctgtcggtggtacttattctcttggttattcttgtcccctaacctgaaaactaaacaaaa

SEQ ID NO: 97418 - DNA, 551 bp, Homo sapiens
ttccattcaataatgataatatacctagttaaaatacctaagaataagctcagtaagaaatccacaaacctatcgtaggacacactacaaatttttattcatagaaataaaagatatgaatatatgaatagatataagatgttcctagataagtttgaagttcacaacatgccgattctttacacattattaattaaatataattttttccctaagcctcaaagatctcttttactcttttggttttttggggtttgtttgtttgtttgttttgagacaaagtctcgctctgtcgcccaggctggagtgcagtggggtgatctcggctcgctgccacctccgcctcctgggttcaagcaattctctgcctcagcctcctgagtagctggrattacaggcacccgccaccatgcccggctaatttttttgtatttttagtagagacagggcttcaccatcttggccaggctggccttgaactcctgacctcatgatccatccgccttggcctcccaaagtgctggcattacaggcgtgagccaccacgccca

SEQ ID NO: 97419 - DNA, 612 bp, Homo sapiens
tacaagcatgtaaggtagcaccaaagtgaccacaatgttagtgtcatagcaaaaatagcaatggatgaagttaaaaaagcaaggaagatttaagactgtttcaacagaaatcaagactattgyagtaagagagagattgaactcagctctgctgaaacaggcaggagagattttaagcactggggtaactagtggaaaagtactggaggatggtagaggaaggtgggtcagtgtaattaggccatctgtgtttgctaattgctgcttatctaagttaggtttacacctcccacagagactgagagatagaggttgcttcttacttaatgattacagttcaaaggaatgattccaggtccttaagaaatatattcctgggtttatacaactggcaagaagctgggggaagatttatatctccaaggggcagaggaaaaatttacaaatacaatttttctaaagtaaatgctctaagaaaagggaggtcaggagcctatagtcaggaaaaactccgtctaaagttttgtcaagccctcttggtcatcaggacaaaatctcacacattttatttggccaaacagaagaaaggacaattatttcctcaaaagacaa

SEQ ID NO: 97420 - DNA, 612 bp, Homo sapiens
tacaagcatgtaaggtagcaccaaagtgaccacaatgttagtgtcatagcaaaaatagcaatggatgaagttaaaaaagcaaggaagatttaagactgtttcaacagaaatcaagactattgtagtaagagagagattgaactcagctctgctgaaacaggcaggagagattttaagcactggggtaactagtggaaaagtactggaggatggtagaggaaggtkggtcagtgtaattaggccatctgtgtttgctaattgctgcttatctaagttaggtttacacctcccacagagactgagagatagaggttgcttcttacttaatgattacagttcaaaggaatgattccaggtccttaagaaatatattcctgggtttatacaactggcaagaagctgggggaagatttatatctccaaggggcagaggaaaaatttacaaatacaatttttctaaagtaaatgctctaagaaaagggaggtcaggagcctatagtcaggaaaaactccgtctaaagttttgtcaagccctcttggtcatcaggacaaaatctcacacattttatttggccaaacagaagaaaggacaattatttcctcaaaagacaa

SEQ ID NO: 97421 - DNA, 384 bp, Homo sapiens
tctggaaaatgagagcactttgaacaactacaagggtgggtcttttactgctccttttcctccctacttggtttatgttcaagttgaggaaccacattactccatgaagggtgatacagaaaaacaccaccaacaacaaaaacacacacaaagaaatgctgggacagagaatgctcaacagtgaagcatgarggggtacacgttggtaatgtgctgtttgttctctctgccctgtctcctaaccctctcctaactcctgctcactggtagaaggcaccctctttctctgctttttgaatgtttccttctgctgcatgaaaaggcttctctctcaacagtttacatgtcatctcaaaaacaaccatttctaagttcccagtattt

SEQ ID NO: 97422 - DNA, 384 bp, Homo sapiens
tctggaaaatgagagcactttgaacaactacaagggtgggtcttttactgctccttttcctccctacttggtttatgttcaagttgaggaaccacattactccatgaagggtgatacagaaaaacaccaccaacaacaaaaacacacacaaagaaatgctgggacagagaatgctcaacagtgaagcatgaaggggtacaygttggtaatgtgctgtttgttctctctgccctgtctcctaaccctctcctaactcctgctcactggtagaaggcaccctctttctctgctttttgaatgtttccttctgctgcatgaaaaggcttctctctcaacagtttacatgtcatctcaaaaacaaccatttctaagttcccagtattt

SEQ ID NO: 97423 - DNA, 690 bp, Homo sapiens
atacatcagcacaatataagccatatatgacagacccacagttagtatcattctgaatagggaaaatctaaaatccttccccctaagatctggaatgagacaaggatacccacgttcaccactgttatttaacatagtactggaaattctagctagagaaacaagatgaagaaatcaaggacatccaaattggaaaagaagaagttaaattatccttatttgcagatgatataatcttatatttggaaaaagctaaagactccaccaaaaagctattagtagtggtagacaaattcagtatggctgcaggatacaaaatcaacatacaaaaatcagtagcatttctatatgctaatagtgaagaatctaaaaagttgagaaagtaattccatttatgatagccacaaataagaactaaaccaaagatgtgaaagatctctgtactgaaaactataaaacattgatgcaataaattgaagagggsacaaaaaatgaaaagatactttattgttcatgggttggaagagtcaatattgttaaagtgtccatactacccaaagcaatctgcagattgaatgcaatccctatgaaagtaccagtgacattctccacagagatagaaaaaataatcctaaaatgtatatgaaactacaaaagacctagaattgtgaaagctatcctgaataaaaa

SEQ ID NO: 97424 - DNA, 585 bp, Homo sapiens
aataccaaaacatattttcttacagtacctcaatgacaaaatattcaataactcaatgataaaagattcataggacagcaacatcaattttacttaaaatgtaggtatctcttttcttcaaaaaatgtattattcaagtaatttgaatcaaaggacactaatgagccaaaagattactttctccttatggaaagtcagggccttttttcatttctatttttcctcttccttttgacagcattttaagctctccatctctgtctcattcacstgttctcctttttgcctcttacaataatacactcctctgattctcctacctctttggtcattcttcctctccctctaaccaacttaatagccctgatttcctgttcaaattatctttcataatccatatgctataataattttagttattatttatctgatatttatttctaaatttctacctgtgtcgctgatactttacttgtgcttaagttctttatttccaactctctgtaattgttccttcatatgcaatatgtttaaaacaaaattcacagcacacaccccctaaataacccccaaaagatcctcaac

SEQ ID NO: 97425 - DNA, 660 bp, Homo sapiens
aaatatattaaagatatcttttaatgaccagagtttaattttkattaaatcccatatattattttatagttggtcatttttatgttatatctaaagaatttttgcctagaagactgagaaaatactgttcaacattttcttctataaactttattgtgttagcatttacatttgggcctataagcctcaaattaagattttctatgatggagttttttcaagacaattattcagttggtctagcactgcttgttgaaaactttcattgacattttatttacgtaattattcttttcatttgtaaaagcattacttggttcttaaacatgcctggtcatttttcatggtatcttatttttccattccaattttgtttatatcctgtattactttaaaatatttaaaacatactcatgttacataccacagaatcttatgttctgacattcttgggtgtctagttttggtcttttgaaatttatctaactcttactcctgtgggcaaatgtgaaaaaaaaattctcctctagtccttttgccttcttgctttcctatctagcttctttgagtataagagcagctgcctatgtaggtttgctgagcttgaggacacatctgagggtccaggcttttctgtgatctctacaggagagaacagca

SEQ ID NO: 97426 - DNA, 535 bp, Homo sapiens
gaattctgtaaggaacagggtaagagggaggtcagggatctagaggcaatgggaagcttgtctatagttttgtcaagctgagggcaatgttatgcctgcattggtcactagaataatactccttgacgtgcaatgaacgagccatcctggcacatatttgtttttwgtttctcaggctgtgccatacttcatgtgaatctgttcattccatgatgtaatcatataatgtttctgaatggtaccaggaaaaataaatgtcataatttgggttaagatgatgtactgggcatgtatatctacatcctcccttggctccaatcattgacaattctgtggataaaaaaagacatactggtacttaccagtttttgaaccaacttcctcccctcttggtccccaacatgctccacaactgtccaatataaggaagtacaaatcaggagtatgtaaaattactaaaaatcaggaagcagatgtttctagattgaaggaaaaacaagattagtagaaatgaatacaatatatgagcattatt

SEQ ID NO: 97427 - DNA, 592 bp, Homo sapiens
tcagcagtcatgtcaattatgggcaagacccccaatttatcttgactgacagaagatagcagattgagcatttgtaatttatgggagtaatacctaacgcaactcatccatcacaagcaccctgatgacagaattttcctctctcttccatatacatagacacaccccagtttctggtaatacatcaagggttggattggcccttttcttctacaaagctactctactcagcaaaatgacacaaaactgtaaggaatatctcctggccatatgtcaaccaaaatcatacyggtagcataaagcacatttctaaacacgaatgccatgcattttaaataagttttctcatgctttgttttgtttgatttttattttaactaatccattatttgattaacatgatagaggcagtaagaagttaggcagaactagaaccatggacatgaaagggccagaggcacaggtgaggggagagagcagcacctgcctgaagaatacacttgagaaactggctgcatgcacaggccttgttcttacacagtgtggggctaagatctgccagaggtagcggcttacttgcttgggggctgat

SEQ ID NO: 97428 - DNA, 623 bp, Homo sapiens
gagctgggggagaagagaatgggaagctattatttgatgggtatagagttttcattttacaagatgacaagcaagttatgcagatggatggtggtgatgtttgcataacattatgaatgtatttaccaccacttaaaatggttaagatgataaatcttatgtgtattttaccacaataaaaaattggaaaaaatatacttagtatctaaacatagaaatgttaagttaatacaaatactttgaagttctttgttgttgtttttaaatgatggtagagccaatcatcaccacaagcaagttggtaatgatggtgaattgtggtaaacaatgaygcattttttttttttttgcttctctaggattttcaagtgaagaactgggactaagtaaaaaaaaaaaaaaaaagattcacaaggaactactagaagtcataagaaattaaaaactaacagaagtttcaccaaggaagaagaaaacaacataatttaacacaagagagggttcacaataggtaagaagtgcagaaagcacacaagtgattttaagagtggacttaagtagagcctgaagcatacacaatatgaaggacaaacccttaaggagaaaaattaaaattttaaaca

SEQ ID NO: 97429 - DNA, 532 bp, Homo sapiens
tatcccatttctaaacgtataaacaataattaaaccagacagtcatttcccctcaccagcagatcttacattggtaaaggaaaacaatatacaaatttcagcaacatgggaaattatattaaccatgaatatatatataatttattttggagttcacttgtagtcagaaaaatagatattgtaatcatatagacaaatactgtaatgtttttgaggtacacaattattcctatttgttgtcattcaccagtgagaaaaattcagttgcagactcttgcctctggtgaaggtcattaatcaagctgtgattcttaaacagctttattgagataaacttcttatgccatgtaattctaccttttaaactgtatgattcaatgttttttagtatatttacagagttgcacaactatcactgctacctaattctaaaacatttttatcamcccggagagaaacttcatacctattaaagattactcctcatccagggcaaccactaccttctttttattataaacacttcacatag

SEQ ID NO: 97430 - DNA, 600 bp, Homo sapiens
gtctcaccacagagaaggagagttcattccatgtccacagtgttggmcagcagtagtggaatctgcttccctctcatgcttcagtcctggcagaactcactcccctgtcctaactgtgtcagcccatgtagctcttcagttacttactgcattttgcttttagtctgcaacacagactcaggctataggagccactgcccagcttgataccaagcctctctggcaactctcctcctgttcatgtcccacgtggtgggccaggacctggagcccttaccacacttatttctcagttctgactgtggacgctcctccctcaatcaagctccagtttctgaagtccaagcctgagcttctctaaagttgaagactgctgcagctgcaagctcccaggaccatgaccatgcacagcttgctaagagttaggatgaagaatggcatcctaccatagggatccaggtttgtgggaatatgtgagacatttcctggaacagttcctcctcacagtctccccaccacttcccaagttatactcagggtttggtagagccaatttggttcccatggcttggcttgcatgattccccaatgtaaaaatga

SEQ ID NO: 97431 - DNA, 600 bp, Homo sapiens
gtctcaccacagagaaggagagttcattccatgtccacagtgttggacagcagtagtggaatctgcttccctctcatgcttcagtcctggcagaactcactcccctgtcctaactgtgtcagcccatgtagctcttcagttacttactgcattttgcttytagtctgcaacacagactcaggctataggagccactgcccagcttgataccaagcctctctggcaactctcctcctgttcatgtcccacgtggtgggccaggacctggagcccttaccacacttatttctcagttctgactgtggacgctcctccctcaatcaagctccagtttctgaagtccaagcctgagcttctctaaagttgaagactgctgcagctgcaagctcccaggaccatgaccatgcacagcttgctaagagttaggatgaagaatggcatcctaccatagggatccaggtttgtgggaatatgtgagacatttcctggaacagttcctcctcacagtctccccaccacttcccaagttatactcagggtttggtagagccaatttggttcccatggcttggcttgcatgattccccaatgtaaaaatga

SEQ ID NO: 97432 - DNA, 398 bp, Homo sapiens
gaattcttccctgtctcttccagattccagagtcacagcagctacttstggctatgtcactttcatctctgcctctgcctttatatggtcttctgctcttttctctctgtctcctcttttgtctcttgtaagaacacttgacattggacttagggcccactcagatgatccaggatgatctcatcttgatatcctaaatgtaatcacatctgcaaagatgctttttccaaataagatcacattaacaggtaccagacttgtctttttggggtccaacattcaactcattatgtgaaccaaaagatgaaattaaatatttaattaaagaaaaactatgtcataaagctattacaaatttaaaatgtgttcaaaaatttgtggaaagacattgttgtgca

SEQ ID NO: 97433 - DNA, 471 bp, Homo sapiens
cagctctgggccagatgccacagaggaacagaatatgaatttgaaaaataccaactatttacagggcaccaattgtgtgccagccttacaaatgttatcataaccctacatgagacatattattattctgttttgtaaagggagaaactgagaaagcataaccaaagctagtagaaggcagagctttgsaacacctgcattctcactgagaattctaacccacccgagcctgacaccaagctcctctgcatttcagcagggcactcaagaagcaatgtagatgtgtggtattatttctgaaggctctgttctgttccattggtctatatctacaaccatctggtctttgacaaacctggcaaaaacaagaaatggggaaaggattccctatttaataaatggtgctgggaaaactggctagccgtatgtagaaagctgaaaccggatcccttccttacaccttatacaaaa

SEQ ID NO: 97434 - DNA, 527 bp, Homo sapiens
accttagatgtctaaccttaatcagtggtcatctgacagaaaaactcctcaggatacacttcaaagcaagatggtttggtgttctttcccaagcactcttcatttccctgaatttgtttcttcyaaggctacctacaaaaatattgatcttgaatttttgtatttttgtaatactttcagaagcttatattaaaactgcttttctatttgaatttaaaaccttaacattacaattatgtttgaaaaatctcaacatatgtccagatattaatcaattaaatggcttacaaagctctcaggcccatttgtctctcccacctcctctttttgcatttcatatttcaacagttccaaactatttgtaatttctggtctagtcctgtcttttcatcttgagctctttgcacacagtattcctccagcttggaatattctctctcattttttcccctagccttcacaaacacccagccaccaggctgatttaggttctctagatcttttgtctccagtgaatattgtactta

SEQ ID NO: 97435 - DNA, 527 bp, Homo sapiens
accttagatgtctaaccttaatcagtggtcatctgacagaaaaactcctcaggatacacttcaaagcaagatggtttggtgttctttcccaagcactcttcatttccctgaatttgtttcttccaaggctacctacaaaaatattgatcttgaatttttgtatttttgtaatactttcagaagcttatattaaaactgcttttctatttgaatttaaaaccttaacattacaattatgtttgaaaaatctcaacatatgtccagatattaatcaattaaatggcttacaaagctctyaggcccatttgtctctcccacctcctctttttgcatttcatatttcaacagttccaaactatttgtaatttctggtctagtcctgtcttttcatcttgagctctttgcacacagtattcctccagcttggaatattctctctcattttttcccctagccttcacaaacacccagccaccaggctgatttaggttctctagatcttttgtctccagtgaatattgtactta

SEQ ID NO: 97436 - DNA, 473 bp, Homo sapiens
aaatcagggattcttgaactggttagaagggggaagggcagacaagtttkcttctcagaaaaattggcattattctgataaatatatgattgtcatgactggggagggtactactggcatctagtaggtagaggacaaggatgctgctacacatacaatgtgcagagtcacccccatagcaaagaattgtccagtcccaaacatcagtcttgctgctgttgagaatacctgctctatatcctgaactaacataggatcttgtaataaagagaagagtaattccttgccagattgaagagactggctaaggtagttctaactcattttctttggggttgctacagtcagcaatatccacaccactactgaaaatgttttggaaagagaaggattagtgagaagggtatgcaatcagacaggaaagctccaggaactcccctgaagtcttttccatgaagactgatccatgacaa

SEQ ID NO: 97437 - DNA, 596 bp, Homo sapiens
tctgctgttagtctgctaggttttccttaataggttacctgatgcttttgtctcgctgttcttagaattatttccttcacattgactttagataatctgatgactatgttctttggtgacgtcctttttgtaatgagtcttccaggacttctttgagcttcttttatttggatgtctaaatttttagcaaggacagggaagttttcctcaattattccctcaaataggttttccaaattttttgttttttcctctccctcaggaaaacctataattctttgtctgttttgcataatcccatatttcttggagactttgtttcttctaaatcttttttctttatttttgtctgattgggttaatttgaaagccttgtcttcaagctctgaaattgtttcttctacttaatctagtgtattattaacactttccactgcattttgtagtaccctaagtgtgwctttcatttctggaagttctgattggttttcttttaaaaatctatctctttaaaaaaaattttttcattgatatcctaattttttttaatttgtgttggtttttacctttatcttgtatctccttgagtaaattaa

SEQ ID NO: 97438 - DNA, 637 bp, Homo sapiens
gtttctgctgagaagtctgctgttagtctgctaggttttccttaataggttacctgatgcttttgtctcgctgttcttagaattatttccttcacattgactttagataatctgatgactatgttctttggtgacgtcctttttgtaatgagtcttccaggacttctttgagcttcttttatttggatgtctaaatttttagcaaggacagggaagttttcctcaattattccctcaaataggttttccaaattttttgttttttcctctccctcaggaaaacctataattctttgtctgttttgcataatcccatatttcttggagactttgtttcttctaaatcttttttctttatttttgtctgattgggttaatttgaaagccttgtcttcaagctctgaaattgtttcttctacttaatctagtgtattattaacactttccactgcattttgtagtaccctaagtgtgactttcatttctggaagttctgattggttttcttttaaaaatctatctctttaaaaaaaawtttttcattgatatcctaattttttttaatttgtgttggtttttacctttatcttgtatctccttgagtaaattaataatcaaccttttgaatttttatctg

SEQ ID NO: 97439 - DNA, 586 bp, Homo sapiens
tgtgttatctcgcagccactttttcaaagtatatttccttagacttaattagattaagaaaagagcagtaactaaggcttctacctcttaatgaaagcttccttagctttacaaataccaggccagatctctgaagttactgtttgaaaaggmccgattctaaagcacttttatccacatttgactctcttgaggcatttgttttttccacttcaactcacttaattgcacatgtccccagtcagactgcctaaagagaatgactgtgtctatcttggtcagtttttaccccagcacttaacacagagtctcaaataatgcaggcaaacaacaaatatttgttatattaattcagattctatataacgtagaaagcagaatcaatcatcaacgtaatagattctgcttaattataaagaaataatttaaaataacaataataatgatgatgatagttaacatttatcaaatcttccctaagtgcctcagacttttctaaccattttgtacagattaagtatcacaagtccaagaggtaaatgctattttaaactttactttatagaggagaaaactgatcacagca

SEQ ID NO: 97440 - DNA, 588 bp, Homo sapiens
tcctaaacaactcattgtctcctacaattcatcttgctcgatgaataaacatggaaaggtaaacatttgaaacaaaaacatggcatctagtagacactatatatttggagaaaaacacagtcataatagtagtggctattgctaacaattattgtgtgctataattaattataattattgtgtgctatttttatcatttctctctgaatgaatatttgattcctagtttccagactagggttgcgaataacagttctataagtttttctatgmatatattttggtgaatgtatattctgaaagtctttggaaaaagacctaaaaatgtgattgttgggtcatacaataggcatatatttaacgttagtatgtaataccaaatgtttttctaaaccaatttaatattccatgtgtaatatatgtgaattacagtttctctacttcctctacaatagttgatattgacagtcttttaaaatttgtccattttagtaagtacgtaatggcatatcattatgcttttatatcacatttccttcttgagaaataatgtcaaacccttttcacgtaactgctggctgtttgaat

SEQ ID NO: 97441 - DNA, 510 bp, Homo sapiens
atgtgcttgataacaatgcaaatgcaaggaacatgccccagacaactgaactggaatttctatgagcacagcccaggaatttgcaattaaatcaagctcgtgggtgattcttatgttcaataaagtttgagaagcatactactaagtgttgcctttaaaggcaactcgaaaacttgcagaaaacatctaaagaaggctggaggtggcctggtgcttattgtataagagcatctggcaagctccaccctctaggtggcattctggtcttgaaaagcatgataaaaatttggggttgctactaagcagggacaaytgcgcagcttgtggagtggcttggagacctccaatagccctgctaggatctggggcagacagtgggcaccagccgatgccagggtatgtgaagggcaaaggaggccctttgggggaagagaactgtgaggccacaggactactgaaatagagctccatgcccttctccattgcctctgtaaataccctggggatcac

SEQ ID NO: 97442 - DNA, 621 bp, Homo sapiens
ccatagcaaatcaacaagactgcttttatgaagtttttctgaaatccaacgttaatattattgctaatatcaacttagactcaattttattctggtctattgtacacagcaatcaaaatagcccaatatacgttcctgtgcttttcttatagggcattttacatccctacctcattctacaacataaataaaatgtaattttaaacagccttctttgagggaaaacataaactgagattaggcagcagctcagttgtgtcaggaagacagcaagattatttttcacagccatggacaggactcattaagttccatcacagtgatatagtaagagtttctctacaaaatctggttgttacttttgtaaatgggggcatacgagttttcagcattcctttagaagcccccattcacaaatgagarggaagtaagggtacgcttggggttctatagttctctgaaagttctttaaaattctgaggaattgaatttgttcctatgtgtctcagggaaccttccaggtctgggtattatttaggagggacatgaggttctccaaagctagagctgccttaagtgaataaaaatggcaagcaagaaagcccccatcaaccactcaac

SEQ ID NO: 97443 - DNA, 621 bp, Homo sapiens
ccatagcaaatcaacaagactgcttttatgaagtttttctgaaatccaacgttaatattattgctaatatcaacttagactcaattttattctggtctattgtacacagcaatcaaaatagcccaatatacgttcctgtgcttttcttatagggcattttacatccctacctcattctacaacataaataaaatgtaattttaaacagccttctttgagggaaaacataaactgagattaggcagcagctcagttgtgtcaggaagacagcaagattatttttcacagccatggacaggactcattaagttccatcacagtgatatagtaagagtttctctacaaaatctggttgttacttttgtaaatgggggcatacgagttttcagcattcctttagaagcccccattcacaaatgagaaggaagtaagggtacgcttggggttctatagttctctgaaagttctttaaaattctgaggaattgaatttrttcctatgtgtctcagggaaccttccaggtctgggtattatttaggagggacatgaggttctccaaagctagagctgccttaagtgaataaaaatggcaagcaagaaagcccccatcaaccactcaac

SEQ ID NO: 97444 - DNA, 611 bp, Homo sapiens
aggccaaaaatgctgctaacatcctacaatgtgcaacaaagaattatctggcccaaaatgtcatcatgctggggttgaaaagccctgaggtagtatgttttgctcaaatggtcttttatgtcaaagctacagagatggattattataactaattaaactcattggtaatggattatcatttggagaaaaaaatcattttccatgtgaaatataagaaaaaaatagctataaccaaggccatccaaagttttcaaaatcgtaagcatttaaagctcagatcatttcacttaagtcaaaactcacctccatgttatctagatagaggtttcacaggctcagcaacctaattttcttatatgtgtttaccccaaggatttccacaaagccwtcattcaattgactaattcagtaaccaaaccaatgacatcatcaggatctagtaaagcagcatggggcagagtgatacaaacatctgtatgtggcttgaaaaccaagtcatggaagtgaactcaagacatctttccttcttccatgaagctcttcaagtagtcttctatgtgaaatgttccacagttttccaaattcacaaaagtttctgccttaactaaacc

SEQ ID NO: 97445 - DNA, 605 bp, Homo sapiens
tgcataaagtagtgcaaatgatattcatcttaactggaaaggattgtttctccyaatttcgtgtctaacatttcgtaatttaatgaatagttatctttattatgacattaatgtttctacattagaaacattttctctaaacataagcttagtgggggatgggagacagcactctgatcctattgtcactctttatatctttgattagacaatgttgtttagtgtgaatgcagtttcagaatgcaacatatagtacagtcttgcttgagtagtataattaccgtaataattaactgtatctcacacttaagcagcattttattcttagcattatatattttagagagaaacaaagaacgggcaagaaaacaggataacatgaaacttttccaaaagtcacatctgtgttaaatcctttggcatacttttagcctattttgctatgacttctgtatctttacctactgttgcaaagacagatatttgaaactggcattcacatttcaagatgtgtatttaccagagcctgttttatgtcacagcatcacacccattatgaaagtagcaaatcatttaaaattactttaagaatcattttagaaaaa

SEQ ID NO: 97446 - DNA, 605 bp, Homo sapiens
tgcataaagtagtgcaaatgatattcatcttaactggaaaggattgtttctcctaatttcgtgtctaacatttcgtaatttaatgaatagttatctttattatgacattaatgtttctacattagaaacattttctctaaacataagcttagtgggggatgggagacagcactctgatcctattgtcactctttatatctttgattagacaatgttgtttagtgtgaatgcagtttcagaatgcaacatatagtacagtcttgcttgagtagtataattaccgtaataattaactgtatctcacacttaagcagcattttattcttagcattatatattttagagagaaacaaagaacgggcaagaaaacaggataacatgaaacttttccaaaagtcacatctgtgttaaatcctttggcatacttttagcctattttgctatgacttctgtatctttacctactgttgcaaagacagatatttgaaactggcattcacatttcaagatgtgtatttaccagagcctgttttatgtyacagcatcacacccattatgaaagtagcaaatcatttaaaattactttaagaatcattttagaaaaa

SEQ ID NO: 97447 - DNA, 605 bp, Homo sapiens
tgcataaagtagtgcaaatgatattcatcttaactggaaaggattgtttctcctaatttcgtgtctaacatttcgtaatttaatgaatagttatctttattatgacattaatgtttctacattagaaacattttctctaaacataagcttagtgggggatgggagacagcactctgatcctattgtcactctttatatctttgattagacaatgttgtttagtgtgaatgcagtttcagaatgcaacatatagtacagtcttgcttgagtagtataattaccgtaataattaactgtatctcacacttaagcagcattttattcttagcattatatattttagagagaaacaaagaacgggcaagaaaacaggataacatgaaacttttccaaaagtcacatctgtgttaaatcctttggcatacttttagcctattttgctatgacttctgtatctttacctactgttgcaaagacagatatttgaaactggcattcacatttcaagatgtgtatttaccagagcctgttttatgtcacagcatcacacccattatgaaagtagsaaatcatttaaaattactttaagaatcattttagaaaaa

SEQ ID NO: 97448 - DNA, 594 bp, Homo sapiens
gtttcctaaacagtttccactacaacagctaccaccatattaagcaccggagcaggtaaataagttaaaaattgctaattatttttatagctcctaagtgagcagcaaagataatttatagttcaggaatcatggctcttttttcaaatttttcattctccatttatgtatttgctaaaggcccatgccaagtaggaggtctgtatgtaattgtaacattagtaaagaacatcttcccttttcaaaggttgtctgtcctaagaacattctacatactactgatgtggaggaagtggctatgtcagaaaattctatgttaaattccttgaaagtaatttacaatttcttttattaacatyaagaaaattttaactttaattggatgctttatcattaaaacagtagctagtggagtacaaaagtatattgaattgtgtaaacatctgataagtgaacttaacttacatttaatcatttatttgcattctggagatctcaaaacatgtttaaatagatatggttaacctcatctttcaataccagtttaatgttcatttccaaatatttgtcttcttctttgcatagcaattacac

SEQ ID NO: 97449 - DNA, 622 bp, Homo sapiens
tataccttaaggtgatgaatttgttttatatatagctctataaagcagataagaaaaatgaaaatgtggaacatttacataaagaaaatcctattgttggtgcccttatcaaagattacttgaacatacattcatgagtttatttcygggttccctattctattccattggtttatgtgtgtttttatgccagcactgttttgattactcttgctttgtaatatagtttaaaatcatacggtgtgatgcctccaggtttgttcctttttttcaagattacttttagtatttgggtctttatggttctatacaaattttaggattcctttttcctatttctgtgaaaaatgtcattgaaattttgatagagatttcattgactatccagatcactttggatggtatgaacattttaacaatattcttccagtttatgaacaggatatgtctttccatttatttgcatctttttcaatttctttcatcagtgtcatagttgtcagtgtgcaaatatttcacctctggttaaatttgttcccattttattctttttgttgctattgtaaatgggattattttcttaatttctttttggatagttcattgttagtgtgtagaaaca

SEQ ID NO: 97450 - DNA, 622 bp, Homo sapiens
tataccttaaggtgatgaatttgttttatatatagctctataaagcagataagaaaaatgaaaatgtggaacatttacataaagaaaatcctattgttggtgcccttatcaaagattacttgaacatacattcatgagtttatttccgggttccctattctattccattggtttatgtgtgtttttatgccagcactgttttgattactcttgctttgtaatatagtttaaaatcatacggtgtgatgcctccaggtttgttcctttttttcaagattacttttagtatttgggtctttatggttctatacaaattttaggattcctttttcctatttctgtgaaaaatgtcattgaaattttgatagagatttcattgactatccagatcactttggatggtatgaacattttaacaatattcttccagtttatgaacaggatatgtctttccatttatttgcatctttttcaatttctttcrtcagtgtcatagttgtcagtgtgcaaatatttcacctctggttaaatttgttcccattttattctttttgttgctattgtaaatgggattattttcttaatttctttttggatagttcattgttagtgtgtagaaaca

SEQ ID NO: 97451 - DNA, 322 bp, Homo sapiens
gaattctttcagaacaagcaaatattggagcaggagctgcgaaagaaacctggaaggaacagatgcaattctaaaaatcatcatcctcattaggagagagaaaatattggatttcttgaaacaacaacaacaagatgctataaacgagaaayaactttttaaaagggcttttggaaattaaaaatatcatggcagaaatttttaaatcactagaagaaatgaaggtcctgagaaaatgtcatagaaggtagattcaaaagaagaagacatacaagattgtcaagaaaaaaaaacaaaaaatctctagaggatcaacctagga

SEQ ID NO: 97452 - DNA, 554 bp, Homo sapiens
ttttactaagtatgcctttctcagccctcatgcttttatttatgcttggcccatttgtgttgaagattgggagtggttcgttaaagtttccaaatattaccaggtttccagctgaactctacccattttagggtggtccctgttgcatgagcattgctagttaatggcttcagccgtagcccaggtcatcttgtttaacccagatcagtgtggccatagaacacatagttagcactgtaagcctggaatcaggatttgctcccagctcttccactctctagttgtgcaaccytggggcaagttattaaacatttctgtgtctcagttcctcaacagtataaacaggtgcagtcataggaaccacctcgcaagggttttatgaaaatcagataagttactgcatatgaaacccttagaacaaagtctggcacacaggaaacactccataaatattagctacttttaataccttccttatgtttacctgcagcgccttgggattctgtcattatattttcagtcactctcagcctccattgttgctgggaattgtc

SEQ ID NO: 97453 - DNA, 506 bp, Homo sapiens
attatctccaaaaagtgtgcacattgataaaatggaccttaaagttattacacataataattgtacctgagtgtctgtcacagttagaaacatgttaaaaatacaagataatgaaataaaaatgagcaatttattctatctaaatactagacaactatattaattaataacatttaatgtcttgcatggaaggactcaccaaattacaaatatagtccttctagaatactaaaaccataactaagtgtaggctaaaatagaaccaccagtgaacccttacctgttgatgtacaaacaatgtgwttatgtataaggaataaaatacaatttaaaatagtcatttcacatcatcaagcgaagttcagagcatgctaagaaataactgttccagaaagggttgtgccttcttcacctgcaatttctttaactgaaactggaactatcatctcccttccccaactcactggttcttgttacaccaaagaaacgtagccaactgaaaacaa

SEQ ID NO: 97454 - DNA, 549 bp, Homo sapiens
ctataaagctgcctgctttactgtaacatttagggattgctttaggagtaatgtagtattttacaagtaagattgaacacttgggttatgctttgaaatgcctctgtatatgaatcagggtcatcagaggacttgcttgtttcctgctatttgtgtaaggccctgaaatgagaagaaaacttgaactctagtagcaccacatctatcgattatttcctgcaggggcagcagtgaagttggaagtttccttggtggcacaagaagaaaagctgatgaaatggctgttggagggcctgcataagggtggcaggtagggcatttagaagtcacatttgagggttcctgaggggtttgtctctgactttaataaattattgttttaaacttgcctgatrtgactgccaagagggcagtcaattttacaatgtttatgacgatctgggttgtctccaaaatcaaagtaagcttatacatagaaaatttcaaagtgttttttttcccatctcaagaaaagatctagttgttgaacagtattaaaatgaacacttc

SEQ ID NO: 97455 - DNA, 549 bp, Homo sapiens
ctataaagctgcctgctttactgtaacatttagggattgctttaggagtaatgtagtattttacaagtaagattgaacacttgggttatgctttgaaatgcctctgtatatgaatcagggtcatcagaggacttgcttgtttcctgctatttgtgtaaggccctgaaatgagaagaaaacttgaactctagtagcaccacatctatcgattatttcctgcaggggcagcagtgaagttggaagtttccttggtggcacaagaagaaaagctgatgaaatggctgttggagggcctgcataagggtggcaggtagggcatttagaagtcacatttgagggttcctgaggggtttgtctctgactttaataaattattgttttaaacttgcctgatgtgactgccaagagggcagtcaattttacaatgtttatgaygatctgggttgtctccaaaatcaaagtaagcttatacatagaaaatttcaaagtgttttttttcccatctcaagaaaagatctagttgttgaacagtattaaaatgaacacttc

SEQ ID NO: 97456 - DNA, 549 bp, Homo sapiens
ctataaagctgcctgctttactgtaacatttagggattgctttaggagtaatgtagtattttacaagtaagattgaacacttgggttatgctttgaaatgcctctgtatatgaatcagggtcatcagaggacttgcttgtttcctgctatttgtgtaaggccctgaaatgagaagaaaacttgaactctagtagcaccacatctatcgattatttcctgcaggggcagcagtgaagttggaagtttccttggtggcacaagaagaaaagctgatgaaatggctgttggagggcctgcataagggtggcaggtagggcatttagaagtcacatttgagggttcctgaggggtttgtctctgactttaataaattattgttttaaacttgcctgatgtgactgccaagagggcagtcaattttacaatgtttatgacgatctgggttgtctccaaaatcaaagtaagcttawacatagaaaatttcaaagtgttttttttcccatctcaagaaaagatctagttgttgaacagtattaaaatgaacacttc

SEQ ID NO: 97457 - DNA, 592 bp, Homo sapiens
ggtcccagcaatgctgaggtcacccacagcctgatgcctctgtttaactttgcttttgatgcccttagcatttggataaaatctgaaactgtgagataatgcaagtaagttaaattttagagggaatccctttttgggtttcttagaaatgcaaagccaatgggtttctaagcaaggaagactgccctgcccatcctctgaaccacatttaccaaagggcaacaaccctatttatttaaatcaatatgcgctgatttatagttgtctttacagattatgtccttcaagaagggtatctttgctttattgcttaattttactgagtctctccaaaagggcttaagctcctttaaaatatatgcaggaggtaagaaagtgctgatttaactctcagagcaattcgtaggtaatattaaattgygtggcttcattactgtagtcacctttctaatttaattcattcaaacatgcaaacttcctagcaaatcaaccctaaagattatcatctgtgttactggaggtctttggaaactaaacttattctattccttcttaaccaacaccatactaccctgccactacccacccattt

SEQ ID NO: 97458 - DNA, 564 bp, Homo sapiens
attgttttcccatatggcagcttaattctaattcacatcctaggaaaattgcagctaccaaatcaagctaattttgttattttatccaagtagttaaaattatgttaattttaaaattttaagtatcttctctacaacaacatgttaatagtagctatccacagatactgggatgatgggaaaaatatttttttttctttctgctattgttctgagctttcaattttccttatcagttgacttaaataagatcactttaaaataaagagaagtttaaaaaaacctaggactttacattttaattaggggatatcraagagattcttcaacatggtttattaatacatatatcattgcattttatatcatatttatataccattgcattagaaacagatattttacagatattccataactgctttagacatggagtgcagcctataaagtgtagttacagcttctgatgagcaggaatctagaattagcatccctattaccatcaaaaagggattttgtaggggttatttgcagacttctctgtgccccattccctgtgctcaa

SEQ ID NO: 97459 - DNA, 551 bp, Homo sapiens
gtgacatggccaaaagccaggtgatgctggcagacacctgaaacagagaggcaagggccatattcytccccggggccccagagggagcacagggagtcctgctgacagctcgatttcaggactccagcctccagcactgtaagataataagtatctgttgttttaaacctcaaaactaagtttgaggtaatttgttatggccgccacaattaaactcacactggcatcaagtgtaaatttagagtccctgatatagaaatcagtaaacatatatgtaaataaataagttaatatgggaagggaggggtctaatttagcaacttttaagtgggcaatcagcggggatgactttatggaggacctggcaagatgggacctgaaaggcccaagtactaataagcatctgtgcccttgggtgaagacgcaaatgcaacgaatatgtgtctaagatcatatcaaaaatgttcacgttttcatcatcttattttcttctgacaacaaacatcctaagattgatatacattcccctccttatggggaagaagtgcagg

SEQ ID NO: 97460 - DNA, 551 bp, Homo sapiens
gtgacatggccaaaagccaggtgatgctggcagacacctgaaacagagaggcaagggccatattcttccccggggccccagagggagcacagggagtcctgctgacagctcgatttcaggactccagcctccagcactgtaagataataagtatctgttgttttaaacctcaaaactaagtttgaggtaatttgttatggccgccacaattaaactcacactggcatcaagtgtaaatttagagtccctgatatagaaatcagtaaacatatatgtaaataaataagttaatatgggaagggaggggtctaatttagcaacttttaagtgggcaatcagcggggatgactttatggaggacctggcaagatgggacctgaaaggcccaagtamtaataagcatctgtgcccttgggtgaagacgcaaatgcaacgaatatgtgtctaagatcatatcaaaaatgttcacgttttcatcatcttattttcttctgacaacaaacatcctaagattgatatacattcccctccttatggggaagaagtgcagg

SEQ ID NO: 97461 - DNA, 506 bp, Homo sapiens
ctctttgccctctgttattcatgtgttaaatagggatggcacttttgctaacgctggggttcttggaaaaatggaataagataatacatgtaaaatatttacagtaattactgcacaatcataaggtctcagtgattatcaacagtgttattatctctatcatcctcatcattgttgattccactggcacccagatttccacctcctacatttaggaaaaacttaaactgacaagagcagagactgtgccaaggccatctatcacctttcttgaatggggaccttgatttagggtgactaactrtcccagttttgagattgtactggttttagtactgaaagtactcatcccataaaatccttgattcctgagaaactgggacagctgcttacccctgaggaacagctgaatctaacagattccaatgccccattcagtcaaaaaagagagactgaagaaaggcaagctgccctcagggaacaaactgagaggtgaagccagctgg

SEQ ID NO: 97462 - DNA, 511 bp, Homo sapiens
taaattgcagaatttaataattcctaatacaattgcagtagttacagacttcaataaatgtgagttccaaccactatctgtatgtcttagtctacttgggctgcaataacaaaatgccataaaatgcatgttttaacaactaaaatttatttctcacatttttgctgtctgggaagtccaagatcaaggcactagcaaatttagtgtcttgtgagcacctgcttcctgattctatggacagccatcttttactgtcttctcacatgctggagagggcaagaggtctctcttggtccttttattttataagggcactaatytcattcatgagtattctgccccccacaacctaattatctcccaaagttcccacttcctaattccattaccttgtaggttaggatttcaacatataaattttgaagggattcaaacattcaaaccatagcactgtggtaacaagttaactgcccaaatttttgtagtttaacaaaatcaaagttacttcttg

SEQ ID NO: 97463 - DNA, 609 bp, Homo sapiens
catgaggaattaaaaaaaacttttatctgaggaatatgagtccttttaaattattaggcccagagagatgtcaaatgagattgcagcaggtcatgtcccacttccccccttgagctgtgtgttcatttcttaaacctgctattgacacaaatagcaacacattaacctcataatattgctctggacactataaccaacaccctatagcttgacaatgtgtagccaatcactatcaatgctgtttccctaaatcaatgagaaaccctgacaaacaactttgtatcagctcgctccctcttcctcttttttttttttttttgtctttaaaaatctacttgtgactgctgctaattgaagggtatattcagggcaacttgagtctatgctcccaggttgcaatccacaagtttagtgcaaataaactctctacttttgttaactttgcctcagcatcttcttttttggtcwacagacacaagtttaaaataaaattcctgtgactcaagaaaccaagaaagccagttttcattcaaaagtatctgctaacattgacttccatcagcttctctttttaacatataaatgagaagaaagaaataaatcctacag

SEQ ID NO: 97464 - DNA, 491 bp, Homo sapiens
  misc_feature (1)...(491): n = A,T,C or G
taaattacttccctttcctagaacactgcattatgttaggagcacaatttgccaagtcagcatgtcatgaaaaatgatcagaaccctttcttatacattaagtctacaatatatyggagaaataagtcagttgcttcacaaaataggttaaagctgctgtgaagaggtagggaagaaacagagcttgtatgtctctctaagtaatgaattattcatggcacttgacccccttcttctttcctagccatatgattgcatttatatcaaattgtgtcttccccatcccatctaaaaattaagtagatgttaaattccctactctcagtagcagtcacatcgcatttttcttgaacactcgtataaatgaatngttttgtaatcaattactttccttgcacgattcctcactcaagagtgagttccagcagggctaggaccacatctcattctccctntatgtgctcagtcccttgcacctggtgctggtgcnt

SEQ ID NO: 97465 - DNA, 590 bp, Homo sapiens
acatactcaaagtatataaattcaaagagatccctgccaagacatatgataatgacactgttgaaacacatagacaaagagattcatgagaggaatgagagagaagtgatccatcrcatacaagaaatccttgtaagattatgagttgatctctcatcagaaacaaatggcgaccagaaggcagtgggacaacatattcaaagtgctgaaaggaaaaaaaaatgtttaacaaaaatttctagattcctcaaaattctgctttgtaaaggatggaggaattaaggcatttctagaaaataaaaaaatgagaaaatttggtactagcaaacctatcctaaaaaatactaaagggagtccttcatgaagaaatgaacaggcagttcattcagaacaacatgaagacatcaagaacactagaaaaggtaagtacattggtaaacatacaagagagtataaatatatttttgtttaactttgttagtcctatctgatttaaaagaaaattctattaagcaataattataaatcatgatggttacattatgccaactagaccaggccatggtacctacttgtttggccaaacacta

SEQ ID NO: 97466 - DNA, 590 bp, Homo sapiens
acatactcaaagtatataaattcaaagagatccctgccaagacatatgataatgacactgttgaaacacatagacaaagagattcatgagaggaatgagagagaagtgatccatcgcatacaagaaatccttgtaagattatgagttgatctctcatcagaaacaaatggcgaccagaaggcagtgggacaacatattcaaagtgctgaaaggaaaaaaaaatgtttaacaaaaatttctagattcctcaaaattctgctttgtaaaggatggaggaattaaggcatttctagaaaataaaaaaatgagaaaatttggtactagcaaacctatcctaaaaaatactaaagggagtccttcatgaagaaatgaacaggcagttcattcagaacaacatgaagacatcaagaacactagaaaakgtaagtacattggtaaacatacaagagagtataaatatatttttgtttaactttgttagtcctatctgatttaaaagaaaattctattaagcaataattataaatcatgatggttacattatgccaactagaccaggccatggtacctacttgtttggccaaacacta

SEQ ID NO: 97467 - DNA, 527 bp, Homo sapiens
tgtttgagccaacaagttgtatggctcactactgctacttatacagaaatggtttactgtagtgtatttttatacaaagaagaaatcacaagcatattattttgccttaatttggtaaatattatctctgtgatttggatatattttaaaactattgagaacacttgttgccgatttttgcattagamacatcactataagaacagcatttgcacaatgccagaagcagaagtgtaatatgtgtgatctgttaagacactacaaccggttgcatttgaagtataaataaattaattgggtcacaggagaatacacagttgggggaagttaaagaaaaaggattatatttctcttgaaaatgttagcataagttcacagcgagtatctggaaatatggttttcccagtactatttgttgaaatgaataccttttccccattcaattcatttggcatcactactgaaaaataattgaacataaatagaccaaaataactatagattcttaaatgattggggaggtgaga

SEQ ID NO: 97468 - DNA, 581 bp, Homo sapiens
ttggaaacgatttaatcctttcaggtcttgcttttaagatatgtcagacagaaccacaggascatttaagtttagggctaaggattccacactattgatgcaagatcttttaaaacattgtacccaatgccccataaatagtgaggttttctagtctggtaggtggcaaaaggcactattcctattcctgtgagaactgcgtacagtcttccctcttctaaaccttttcagtggttcttttcctagccttgggtagctccctcatattcatatactgattagtactctactgtaaacatgacaaggatcttctgcagatctctggagttcttgtagtgactctcaccacttcagtactgcaccctgtgatatctagtgaccttggtctctacagactatcatcaatgtctcctcaagtcatgagtctttgagtgcttacctctgttcctcttttgtgtgacagagcctggaaagtctctcacagcagtaagctgagaccataatagggccaaccttgtttgattaatgtctctcagcaaacaatgtcctttgttgcccaatgcccaatgtcttaaaaacca

SEQ ID NO: 97469 - DNA, 611 bp, Homo sapiens
cagcctacacagtaggcaacccctctgtcctccagctgctagcaaccactgctgttagtcctgtcctatttttaccttttccagaatgtcatataaatgcaatcattacagtaaggagccttttgagtctggcttctgtcacttagcataatacacatgagattcatccatgttgttctattttcagtagtttgttcttttgtattactgaataattccactgcatggatgtaccacactttaaccattcaaaagctgacgaatatttgtgctgtttagggtttttgacaagcatgaatamagctgctatgaacactgatgtgcagctttttgtatgaacataaaattttcacttctcttgagtaaaacctaggaatgagattgctgagttgtgtagtaagtacacgtttagctttctaagaaactgacaaactaaataaagactaaattatttgacagactaaataaaaactaaattatttagtggttacccactaaataaagaaaaagtggaagaagtagtaattagttggacaatattgtctacacaatgataggatgaattatctctttttctctttgtaaaggctggagtgcagtggtgcaatcat

SEQ ID NO: 97470 - DNA, 612 bp, Homo sapiens
tatacataatgccatattacactataatgcaaagaataaaataaataaacataagtccatactgttattaatacatgataaataataaataagagtgaaatcttccttacaggatatgtaagagatatagaaactcctccctccaggagaaacttaactgcaccccctgacctcaactccttcctttcagagtgggctggacttagtgactcctttccaaagaaaagaacaagaaaaattggaatttaacaataaagaataatagagactggccctggtggyccccacctgtaatcccaatgctttgggaggctgaggcaggaggatcgctgaaggccaggagttcaagaccaccttgggaaacatagccaagaccttgtctctacaaaaaatttaaaaatagttagctgagtgtagtggcatgtgcctgtagtcccagctactcaggaggctgaggcaggaggagcccttgaacccaggagttcaaggctacattgagctatgatagcatcattacattccagcttgagctatagagctactttaaaaagagagagagagagaaaatggcagattactaccttaactaagatatcaaggtttacctcacca

SEQ ID NO: 97471 - DNA, 449 bp, Homo sapiens
aacgaaccattcttaaataataaaaacatattcatcagtggtctttatttactagcaccaataaaaaactagaagctctgtttagcataggaaattggtgtcatactcactttataatatcatcagtgctgggtggggacaaagccataatctgccaaaatctgcaccatccttgccaggtttgggagttctgtagagtagttaccactgccaggtctgactgccatagctcaggaaaagggtgcagtcatttctcttagcataatcttgagaagatgtctaagagacctatgtaatattaagtcacagaaagaaacaatattattggtggtttagacatggaatgtaatagctaacaattacggaatgcttacttgtttcaggaactgacgygttatctcatctaaacaatgctacagagcatgggtactgttattaaccccgtttta

SEQ ID NO: 97472 - DNA, 449 bp, Homo sapiens
aacgaaccattcttaaataataaaaacatattcatcagtggtctttatttactagcaccaataaaaaactagaagctctgtttagcataggaaattggtgtcatactcactttataatatcatcagtgctgggtggggacaaagccataatctgccaaaatctgcaccatccttgccaggtttgggagttctgtagagtagttaccactgccaggtctgactgccatagctcaggaaaagggtgcagtcatttctcttagcataatcttgagaagatgtctaagagacctatgtaatattaagtcacagaaagaaacaatattattggtggtttagacatggaatgtaatagctaacaattacggaatgcttacttgtttcaggaactgacgtgttatctcatctaaacaatgctacagrgcatgggtactgttattaaccccgtttta

SEQ ID NO: 97473 - DNA, 553 bp, Homo sapiens
atctgcaattttataggttggcgcaaaagtaatggcaaaagctgcaattactttcacaccaacctaacactaagacagtttttaaagattactattaagacataattttaaccartggtaaaaatattcttagagagaagggaataacaagaagataactttctgaataacgaagttataagctgcaaatccatgcggtgacaggcactagaactctaagagaaggcaggcatgggttccttgtggggacacagacattcctgtggagaagaaaatgtcctgatgttgatccaaggatcccagaaataagcctctagaaagattccactttatttaacaggattttctgtgtcattagtggtttccgtcattgctaagttaactcatggattcattcaaaatttataaccatccagaacagccagcgacctagcttatttatccagaagaggcatctgaattagccactacttaacattctttagcaaggacgacttgttatttaggatgagttagaactctctttgcacactacacatacaattatttcact

SEQ ID NO: 97474 - DNA, 553 bp, Homo sapiens
atctgcaattttataggttggcgcaaaagtaatggcaaaagctgcaattactttcacaccaacctaacactaagacagtttttaaagattactattaagacataattttaaccagtggtaaaaatattcttagagagaagggaataacaagaagataactttctgaataacgaagttataagctgcaaatccatgcggtgacaggcactagaactctaagagaaggcaggcatgggttccttgtggggacacagacattcctgtggagaagaaaatgtcctgatgttgatccarggatcccagaaataagcctctagaaagattccactttatttaacaggattttctgtgtcattagtggtttccgtcattgctaagttaactcatggattcattcaaaatttataaccatccagaacagccagcgacctagcttatttatccagaagaggcatctgaattagccactacttaacattctttagcaaggacgacttgttatttaggatgagttagaactctctttgcacactacacatacaattatttcact

SEQ ID NO: 97475 - DNA, 559 bp, Homo sapiens
tgtgtacctccagatttacatggcgaaacctaatctccaagttgatggtattaggaggttgggcctttgggaggtaattaaattatggggtcagagccttcagaataggatctgtacctaataaaggaggcccagatagtttgtttactttctccgccttgtgaggctatggggagaagatggcttcctgtgaccaggaggaaggccctccccagatatataacctgttcatgccttgatcctggacttctcagactccacaacttgagaaataaatatatgttgtttataagccacccattgtatgatattctttgatagcagtctgcatggactaagagacctgctaaatggcaacttcagtatcctcccaagctctatttttcctcattcttcattagtgaccaaatactgcaagtctacstcaggaacttttcctaaatttagcctgctatccattataactactactgcattaatgatcttccttatcatataatctcagcttaacctaccatctgccttctaatttgtttttctcactagatgttttacactc

SEQ ID NO: 97476 - DNA, 621 bp, Homo sapiens
gttccatatgcttcaaagaaaatgctaaactgtcacagctgtagattatgcacttgatgcactgctttctttcaacccccacatcctcactacctgcttctttgtttgatcaccaataaataccgcaggcttccagagctcaggaccttcgcagcctccataccagcattggccccctggtcccactttatgtacgcttgtcttgtcttgttcctttggctccacargactttgtagccctcacggcctggtgttggatctgatcaccccaacacacacccagctaatttttttgtatttttagtagagatgtggttttaccatgttggccaggatggtcttgatttcctgatcttgtgatctgcccaccttggcctcccaaagtgctgggattacaggtgtgagccaccgcaccctgccggtatgttgtgtttctaatttcatttgtttcaagaaatttttaaattttattcttaattcattgactcattggtccttcagaatcatgttgtttaatttccatgtattcatacagtttccaaagttccttttgttattgatttatagttttatttcactgtgatcaggaaagatacttgatatagtttcaattttgaaaaa

SEQ ID NO: 97477 - DNA, 621 bp, Homo sapiens
gttccatatgcttcaaagaaaatgctaaactgtcacagctgtagattatgcacttgatgcactgctttctttcaacccccacatcctcactacctgcttctttgtttgatcaccaataaataccgcaggcttccagagctcaggaccttcgcagcctccataccagcattggccccctggtcccactttatgtacgcttgtcttgtcttgttcctttggctccacaagactttgtagcccycacggcctggtgttggatctgatcaccccaacacacacccagctaatttttttgtatttttagtagagatgtggttttaccatgttggccaggatggtcttgatttcctgatcttgtgatctgcccaccttggcctcccaaagtgctgggattacaggtgtgagccaccgcaccctgccggtatgttgtgtttctaatttcatttgtttcaagaaatttttaaattttattcttaattcattgactcattggtccttcagaatcatgttgtttaatttccatgtattcatacagtttccaaagttccttttgttattgatttatagttttatttcactgtgatcaggaaagatacttgatatagtttcaattttgaaaaa

SEQ ID NO: 97478 - DNA, 621 bp, Homo sapiens
gttccatatgcttcaaagaaaatgctaaactgtcacagctgtagattatgcacttgatgcactgctttctttcaacccccacatcctcactacctgcttctttgtttgatcaccaataaataccgcaggcttccagagctcaggaccttcgcagcctccataccagcattggccccctggtcccactttatgtacgcttgtcttgtcttgttcctttggctccacaagactttgtagccctcayggcctggtgttggatctgatcaccccaacacacacccagctaatttttttgtatttttagtagagatgtggttttaccatgttggccaggatggtcttgatttcctgatcttgtgatctgcccaccttggcctcccaaagtgctgggattacaggtgtgagccaccgcaccctgccggtatgttgtgtttctaatttcatttgtttcaagaaatttttaaattttattcttaattcattgactcattggtccttcagaatcatgttgtttaatttccatgtattcatacagtttccaaagttccttttgttattgatttatagttttatttcactgtgatcaggaaagatacttgatatagtttcaattttgaaaaa

SEQ ID NO: 97479 - DNA, 640 bp, Homo sapiens
cactagcaagatagaagccacaatctcttgtaatctatcatttttgctgtattctactggttaaaaataactcattaggttagcctactggctctgaaggggaagagattatacaaaggcatgaatttctggaggagggaatgagggcaaagaactctgaaaagtctctcttccacaatctgaagaacttctagaaagtagaaggaagcgatattgcttagggatggacaacttggcactggttatgtgttccaagtgaggtaaccttgttcccaggaataaagagaaccagatgactgtaaacatttccctaaactgaaatgcactgttgtatgttcacctgcaatgaatggtgtaagctgaatataagatttttgacaaaataaaaattttgctgtgttctcagatctggcaggctcctgcccttgtgcaaacaatgttcctggyaactattcatctccttaggtaaataagaattggagaaaagctgtgcttagatagggtgcatttgctcttgccttggaaggttgttttctgataaggttctatatcctctgcaaatcaaatcaggcacttacagtgtgagtatgcattctcttcctgccagtctggagatgatcaaaaagcctataacaggctt

SEQ ID NO: 97480 - DNA, 622 bp, Homo sapiens
tctgaacacaatggaataaaactacaattcaataacaagargaatattggaaactatacaaacacatggaaattaaacaatatgctcctgaatgatcagtgggtcaaggaagtgattaagaaggaaattgaaaaatttcttgaaacaaaggataattgaaactaaacttaccaaaatgtatggaatatagtgaaaacagtactaagaggaaagtttatagctataagtgcctacatcaaaaaagaaaaactacacataaacaacctcatgatgtatcttaaagaactacaaaagagcaaaccaaacccaaagttagaataataaaataaataataaagatcatagaagaaataaatgaaattgaaaggaaaaaaatacaaaagattaatgaaacaaaaagttggtttttgaaagataaacgaagttaacaaactttaaaccagactgtgaaaaaagagagaagacccaaataaataaaatcagggatgaaaaaagagttatttcaactaataccacagaaattaaaaggattattacaggatactatgaacaactatatgccaatacattcaaaaacttagaagaaatggataagttcctagatacatacaacctaccaaga

SEQ ID NO: 97481 - DNA, 622 bp, Homo sapiens
tctgaacacaatggaataaaactacaattcaataacaagaagaatattggaaactatacmaacacatggaaattaaacaatatgctcctgaatgatcagtgggtcaaggaagtgattaagaaggaaattgaaaaatttcttgaaacaaaggataattgaaactaaacttaccaaaatgtatggaatatagtgaaaacagtactaagaggaaagtttatagctataagtgcctacatcaaaaaagaaaaactacacataaacaacctcatgatgtatcttaaagaactacaaaagagcaaaccaaacccaaagttagaataataaaataaataataaagatcatagaagaaataaatgaaattgaaaggaaaaaaatacaaaagattaatgaaacaaaaagttggtttttgaaagataaacgaagttaacaaactttaaaccagactgtgaaaaaagagagaagacccaaataaataaaatcagggatgaaaaaagagttatttcaactaataccacagaaattaaaaggattattacaggatactatgaacaactatatgccaatacattcaaaaacttagaagaaatggataagttcctagatacatacaacctaccaaga

SEQ ID NO: 97482 - DNA, 547 bp, Homo sapiens
ttgaagcctttttatatataccatgagttatacagtcaatacatttttgaaggcagagtatctatatctattattttttttaagaacacattgttttacacaattattttacttccagaaacctatgccacagaagacttaacaccctggacaaaaaaatatatacgtatgaggaattttgcataattgtccatagtgaaaatttggcaacaaccaaaatctcacccccaaataaatgattaaagaaaaatatatttatacagtttatgttgtacagttacacaatggaattagctagttctaatgaaaatgaaagattttcttcagaatacagttagtgaaaattgccagttggagaacatatacaacactacttttggggaaaaaaatatgtaggtgtatgtaaatagtgaaaatatyttaggcatgggattttggtaatcttcataatctacatgttaggagtgaagttttggtaatcttatgtagtctacatttgtacatttttgtattatgaagagaaactacagagaagtttgcattgtca

SEQ ID NO: 97483 - DNA, 622 bp, Homo sapiens
agattatttggttctagtaagatatatttcctctaaattttctaatttgtggaacagaattactcacagtattttctgaggatcttttgtatttctgtgggatcagttgtaatctcatatttgttatacctgattgtactgatttgtatcttctctttttttgttaatctagctagtggtctattcatctaattttttcaaagaacaaacttttggtttcattggtcttttgtttgcatttttgctttgcaatattatccagttcttctctaattttaattgtttcttttcttctgctagctttgtggttggttgtttctttgtttttgtttttctttttgtttttgtttttttgagacggagtctcgctcctcttctcccaggctggagtgcagtggcgcgatctcggctcactgcaagctccgcctcccaggccattctcctcctcagcctcccgagtagctgggactacaggcacccaccrccacacccggctaatttttttgtatttttagtagagacggggtttcaccgtgttagccagttcctttaggtgcaaaggtagattgttaatttgagatctctctaacttcttgatcaaggtgtttagcaatataaactc

SEQ ID NO: 97484 - DNA, 579 bp, Homo sapiens
ggtgttcttttccgtgagacttttctttcatttataactggttttcatttcctttctaatttaaaggagcatatttaacattccatctyaaggcaatgtgatagccatgaggtctttgtgtgataatggtaaaaaggaagttaatctataatggaagtcaacagtagataaggaaggagtattccttggtacccttccatcatttacaacgtttcacaaaacaattcaggtaagaaaaatggcttaatctatgagataaaccttacagtatccatagttacacatacctgtcatgtgattcagaccctgtaattcacattcccttgacgctcaaaataattcagagatccaacagctgagattctgaattacatatttttacaggattatagttttacatgacctggaagtcttcagaatgaagaccaaaatatacaggagaaactctatttttatgcttagcttcaataaattatagacagccatgtaaaaatatgattggataaaaagggtatgatctagtgctaattttctaagtagggaaacccagcaaagcatgcctgttttggtttttcgtga

SEQ ID NO: 97485 - DNA, 579 bp, Homo sapiens
ggtgttcttttccgtgagacttttctttcatttataactggttttcatttcctttctaatttaaaggagcatatttaacattccatcttaaggcaatgtgatagccatgargtctttgtgtgataatggtaaaaaggaagttaatctataatggaagtcaacagtagataaggaaggagtattccttggtacccttccatcatttacaacgtttcacaaaacaattcaggtaagaaaaatggcttaatctatgagataaaccttacagtatccatagttacacatacctgtcatgtgattcagaccctgtaattcacattcccttgacgctcaaaataattcagagatccaacagctgagattctgaattacatatttttacaggattatagttttacatgacctggaagtcttcagaatgaagaccaaaatatacaggagaaactctatttttatgcttagcttcaataaattatagacagccatgtaaaaatatgattggataaaaagggtatgatctagtgctaattttctaagtagggaaacccagcaaagcatgcctgttttggtttttcgtga

SEQ ID NO: 97486 - DNA, 460 bp, Homo sapiens
gtttgaatcatgcttacagcatagcagtaagtgattaaaggcttaactttcattttcgacttgtggctttcatcagctccctgacacctgaaagttcagctcttttttaatttcagctgagctgctgacagagatcactgcawagagctcccaacctgtgactagatgtatttttattaagatataatttaataaattcaccatttaaaagtgtacaattcatgttttatagtagagtcacaaggttgtacaaccatgaccactatctaactccagaacattgttgtcacctaagaaagaaacctgtattctcaacagtcactccctttctcctgttctttacctgagggtaaccactaaactactttctatttctatgcactttctggttttggagatttcaagtaaatggaatcatacaatacatggcattttataaaagtccatgtggaagccagtt

SEQ ID NO: 97487 - DNA, 521 bp, Homo sapiens
tctaatagttgatttattcagtcaacaaataggccagtatgcacactctcaatttaaggcatgagagatataatgtgactaaaacgtccaaaaccaaataagactctgctcctttttttttttctttgaggcatagcctggctctgtcrcccaggctggagtgcagtggcttgatcttggctcactgcagtctcaaactccctgagctcaggtgatactcccacctcagcctccctagcagctgggacctcaggtgtgtaccatcatgcccagctaatttttgtagagacagggttttgtcactttgcccaggctggtctggaactcctgagctcaagtgatccagctgcttaggcctctcaaagggctggtattacaggcatgaaccactgcactgagccaactctctggtctttgttattcaattgctgtgtgcctcactaatctgattcttagtactcccaaactctgaccttagtgatataaccatattctaaattcatcatcatggaatgcccatc

SEQ ID NO: 97488 - DNA, 519 bp, Homo sapiens
ctttagaacaactccaaatgttggaaagctcttcattacgttgagctggagctcttttccttgtgatattgctctttggttctacttctcattgtagagtaacacaaaataaactttcctccatatgataaasttttcttccttacttttacctagcatttccttatttattagggaaaaaataagtctactgtgtgcaaggcactctactagatgccacagggaataaaagcatcagtacagtttaaacccatgttaagaaaagacccaattgccttgcttagccagaagcctgccctgcccttggtgtcaatgggtccctatcactgtgaaataaatatttttttttgctttgtctggcaaaatcagtgcaaatcctgattaatgccttcaaggaactataatttcatagagataaaagagacaatattgaacatagtaagaacctaagccaagtgaaaattgttatattgtattgacaggctaggagatacaagagaggtagaaatctttaattaa

SEQ ID NO: 97489 - DNA, 578 bp, Homo sapiens
tatattccatttcagtgtcacaaattagcctgcagtttgatcaacagttgtatctaagtgcttctttgatcacaaaggtgcaaaacaagaaaatgtcatgaagaaaatgtgtccccatgggcttttctttcttctacttatttctttycatcatcccatgtcctctacaacttatctgtcactaatagtgctcttcttccatccttgacactccggtcatccaaggagcatcctcagtgagtggctttttctccttctcttgaccttcaactttcaggatttctttcctaataattttattaaaatcacatttctggatctccttctcctactcctccatcctaaggcttttgctacatcatggagaccattatttgctttcttaattttgtcaacttaactttaccctcatcctcccacatagatttccttcaagaaatcaaaggatagtatcaagagagtaccaagaatgagaaaaagcactgtgttcttctatttgaagcaaaataattttaaaggaaaatgtaggaggaatagattttttgttctattttaaagcagaaggtgggcaacttctg

SEQ ID NO: 97490 - DNA, 535 bp, Homo sapiens
ccacctcaggactgatggagcctccaggtccctccacgcccattgttcaaagacccaggatcctgttggtgatcgatgatgcccatacagactggtaagtaggaatttgcaagtgctaccaccttctggggcaagagaggagtggggattatctcatctcctggggaaatagaaggggagagctatgagaggcttgggtgctatcagagcctggctggagagaaggaaactaacatgtaccaagtggctgctgcatgctaggcccacagcacctacttagtgccacattctcttctaagggctttatatttacaggtccacagtccctcgcctgcaaatcccaaatccaacacactctggaaactagaaaatgttttgcaattcttttggtagcaaagcctaatctgcaggaaagtgaggctataattatactaagtgtgtttgttcatatgatttgctgcawgcatctgaatgtgtttgatatggagtatagttcagagcctgctggaagtgttatataaaatatggtatattc

SEQ ID NO: 97491 - DNA, 532 bp, Homo sapiens
tgcctatgttggtttgattgttgggggcactgggtagacagtgtaggggccatactccagcatgaatgggaataaagacaacctgtgtccagcctggcccatctgtaaagctggcttctagccaccacaacaaggtggaaggaatggctagacatgctgccagytaccagtttgaaaagtgtcttctgttgttggaaaagcacaacctcctcccaccccacttcccttgttccctgtggcccctgggccagcgaatgcctcgggagaaccctgattgccaaacaggagagtacaaaatagcacacatttgaattacagaggagaaactggagcaaatacggacagattaatgcacaaaccaaataggtggatctggggttggccagcaattctactttggaaggactttgagaatctatttggagggcagaatgtaacttaattttagttcagtttagtgaagttttgtttttgtaaggaaaacactgatgtggcctcttcactgggccatctctgcctcagacttttggaa

SEQ ID NO: 97492 - DNA, 510 bp, Homo sapiens
gattctctgcctcagcttcccgagtagctgggattacaggcgcccgccaccacacccagctaatttttgtatttttagtaaagacggggtttcaccatgttggccagactggtcttgagctcctgacctggtgatccacctgcctcagcctcacaaagtgctgggattacaggcgtgagccacygtgcctggctaacacatacacacatcttagcatacttacctgattatttcctctggatctagaagttctctcctctttctaaacctgccattttagtagtaactgaatccaagtcagcagatcttccgccagccatcagctggccaccctgcagacctctacatgcagcattcagtataactaaggaagccctagacacagtttctcagttcccacgagctcacccatccctcccccaagtcctcccacccactgcccttgtccctacccctagaggccagctgtttaccaaacccgaaagaaatcctatctgcctgagtcctgtc

SEQ ID NO: 97493 - DNA, 497 bp, Homo sapiens
gcccgattaatttttgtatttttagtagagacgaggtttcaccatgttggccaggctggtctgaaactcctgacctcaagagatccgcccgccttggcctcccaaagtgctgggattagaggaaagaaggaaaggaaggaaaaggaaggaaaagaaaggaaaagagaggagaggagaggggaggggaggggaagggagagaaaggaaaggaaagggagagaaagggaagagagaaagaaagaagaaaagaragaaagaaagaaagaaagaaagaaaaataaagaaagaagaaaaaagaaaagagaaaagggaaggaggggagggagggaggcaaggaaggaaggaagcaagaaagagagaaagagagaaaagaggctccttataaataacaaaagacacccttctcaccaagggtttttggaaattccagagtgatggggtgagaagggtgtctttggaaccaaagctgaagaccaagtacatatttcttactatat

SEQ ID NO: 97494 - DNA, 594 bp, Homo sapiens
ctgcctgaaaaggaagccaagcagaggagagcagacctgagaggtgaagagccagattcctgactacagtgttggacttttggacccagctgtgccagatgcgcttcagatttgtaagtccacatggaccttttcttcataacgagtttgaactaagtttctgctgcttgmagttccctgccaaacatagcacctaagtcacagctcctggtggtgtattgggaagatgattagttgaagagctaatgccaagggattaatgtctataaaatgggcatcctaaaataaacctaagaactaaggcggtctggccttattacatttggggttgatgccaggaaataccagggtgcctctggtcattaacatccctcccctcatgcatcaagtcctctctctctctctgtccctctcttttaagtttacatattggttcaggacagaaattggggggtttaacactttgaacttgtgagagggccacttcaagatggtttagcacaccatgagtgcctggttgctcattggcaggtcctgtgctaataagcacacctgcctgaagtgtgcttacaccttggctcagccagattgtct

SEQ ID NO: 97495 - DNA, 565 bp, Homo sapiens
attttgccattgaagtgagatctgggatgcatgtgaaaaagcagtctggtcacttctttgtagaactgttgcactgtgctaggggaccactcagtccctagttgctgcccactccctagagcccaaaggcaacaatggctaaaactgtgaaagagcaaagatggcagtccatccctctccctgggagctccatcccagggaggttcagaatcactgccagctggaaaatagcagtgagggtagcttgagaccctgagttgggaggtcctacccagtaaggaaaagtatggtcaggggcccaaataaaaaagctgtctggccacttctctataggtcagctgcaatgaaggcaacaaaggctaaggatgccacacagcaaagatggcggcttacctctccctctgggaactccaaatcagatgagtgtaatgctgctactggtgactggctggagctccaagtcagtgggtcttatcctstgaggtgctacagaatcagggccctcagaccattgctgcctagtcccgtggattcagtcattttcctatgggtatgtatgggggtc

SEQ ID NO: 97496 - DNA, 490 bp, Homo sapiens
cctgtctcttcaaaggagaaaaggcaggttccattgaccrtatatatctgaaatatgataactccaacaagacagtgagaacatcaccatctctgttgtagtgagatcaggaaatcattctttaattactggaggaagaactagtggtgagtaggtgaggaatgggagagaaattaatttgccatagacaaaatttagctaattaaaagcatttagatataacagcaggaatagctaattttttgtagtggctttacagcttgttcaccatgattcacagtgaggaatacattttacgttgtaactaaggaatccccctctgctttaacccttaacaaaaaataacctcgagtaacctgatgtcactcaatcaggtttctttctattgttttgtttccttgtccccaccttacaaaaaccattgttctgccacagcccattgagagctctccttctgccatctggattcatgaatctcaaataaaagcca

SEQ ID NO: 97497 - DNA, 490 bp, Homo sapiens
cctgtctcttcaaaggagaaaaggcaggttccattgaccgtatatatctgaaatatgataactccaacaagacagtgagaacatcaccatctctgttgtagtgagatcaggaaatcattctttaattactggaggaagaactagtggtgagtaggtgaggaatgggagagaaattaatttgccatagacaaaatttagctaattaaaagcatttagawataacagcaggaatagctaattttttgtagtggctttacagcttgttcaccatgattcacagtgaggaatacattttacgttgtaactaaggaatccccctctgctttaacccttaacaaaaaataacctcgagtaacctgatgtcactcaatcaggtttctttctattgttttgtttccttgtccccaccttacaaaaaccattgttctgccacagcccattgagagctctccttctgccatctggattcatgaatctcaaataaaagcca

SEQ ID NO: 97498 - DNA, 521 bp, Homo sapiens
tttgtttttcttctgtaaacaggacatcccaccataaggaggtaccctctactctaaccttcacaaaaaaataacctgaagtccttgttcccaccttacaaaacccactgctctgctatttcccagtgggttccaakaccaaataaatacatttacaatggtgataatgacatcaatgagtaaagtcttggtcatcctctaaaactgaaataaccgaaagtggggaattgttaaatcaagttcaagtttagcctaaagctgcctccttatatattaagtttggcctaaaggtttctcagcacattacaaactataacgtaaatggagttgtatacagactgtagcctactcttgtgccaatcaccaagttttggccaatcagaggtggccaactgttcaaaccgtgttcaaattaggctaatgccaagctgtaatcaatccggctgtttctgtacctcacttccattttttgtatgtcactttcctttttctgttcatacatcttcttccaccacatggct

SEQ ID NO: 97499 - DNA, 521 bp, Homo sapiens
tttgtttttcttctgtaaacaggacatcccaccataaggaggtaccctctactctaaccttcacaaaaaaataacctgaagtccttgttcccaccttacaaaacccactgctctgctatttcccagtgggttccaagaccaaataaatacatttacaatggtgataatgacatcaatgagtaaagtcttggtcatcctctaaaactgaaataaccgaaagtggggaattgttaaatcaagttcaagtttagcctaaagctgcctccttatatattaagtttggcctaaaggtttctcagcacattacaaactataacgtaaatggagttgtatacagactgtagcctactcttgtgccaatcaccaagttttggccaatcagaggtggccaactgttcaaaccrtgttcaaattaggctaatgccaagctgtaatcaatccggctgtttctgtacctcacttccattttttgtatgtcactttcctttttctgttcatacatcttcttccaccacatggct

SEQ ID NO: 97500 - DNA, 493 bp, Homo sapiens
taactggcccattattctgctttaggcaaaactacccatatacagaccttgctgtgcctgtggattattacctgctcttctgggcactggaccatttgctgtcagagtgaatggaaactgtggcaatgatgggattcaagacacactaccstaaattatggcaccttggtattctggaaaacagagaagcaggaaggccacttttatcttccctttcctcttctcgcttgaagcagatcataacactctcttctgagaggggccctccctatacttcaaggaaaggaacatccttatctctgaagacacgggaatacagaggagaatcagaaaaaatcaggccttggtaaatccacctccctaagtttattaccattagattatagcctcttttgtccagtcagacttctctatgacctcttcttcaaacctaagcataaaaatatacaagtttacttgtttaagtcttcatttctgaagtctcgtgtgtcac

SEQ ID NO: 97501 - DNA, 522 bp, Homo sapiens
aagactagcactcttaactttaaaaaaccttcaaaatgattctgaaatatactgaatcagatagtttattggacctctcagttcaaatacatgaactctcagaacctcagtttacttatttgtgaaatggcactaataaacttgccttgtggattactcatgacttaaagtaggtactttaaaatrtttgctacttatagcactctgaaagttcttccagaattacagatggcaaactcacaatgttaaattaaagagtctaatgaagacatagatgtgggcagaattaacaaacagaactcccaagggtcaattatctatactgtccatacaggccaggtgaactggagtttggagatatacccacattgtgtactatacaggtgttacagcacctacagttattttaactctgttatgtatatttatcctcctcactggactgggagttcctcaagggcagagaccatgacatccaagtttatttttctattcccaccacacagtatgtttccaattcat

SEQ ID NO: 97502 - DNA, 604 bp, Homo sapiens
taatatatcacaacaaggggtcagttgctattggcatctagtggatagagaccagagatgctgctaaatatattgcagtgcacggtataagctcccaaaacaaatagttacccactccaaaatagtataacccccaaaaacaaatagttacccagtccaaaatgtcaatatttctgccctaacacatacagcctctatgaatagctgaagaatataaatggaataactagataggaagaaggaagaagaaaacataaataattatttgcaaataaaatgttatggaatctcaaatacagggggaaaractacagtgggacgaaaaatgttttactccatctggtggtgatgagtagatggatattttcaggaatggctaagaaaaggtatttagaggataattaaggccacagtgtctgatgttctacagacatcagtttgtaccccaaccttgaaatagtctagctatataaatttggcaaattatttaatccttctgtaagtttgctagataaggcatcaaaatacagaattcagttgcatttctctatataacaaataaaatatgaaatttaataaaaatatgatttacaatagcatccaa

SEQ ID NO: 97503 - DNA, 541 bp, Homo sapiens
ccttgaagtctatgttgaaatattttaaagtcaattacagacagaataatagtactgctactctatttgcccaagacaccaaactatatttttaaaaatttctattaaaaataattttatttctcagtagagtttcctttgatccctgatctttacatttatcttgccagttttacaggccttatttccatgtatggcttatagagaggcagaacaggttaagctaaaaaaaataaataaataggcccaagacttgaaaagttgagttttttctgattacagaaygtttaaatccacaataagagacaatacaaagtcaccaggtagttagtgagattgccaaaattgtagctggagaagacagttgacattgaggtcattttttctaagaaaatagctctcaaatttttgtctatcttgagtagaggaggaaaaaaagaacaacaggattacttatactgaaaataatctactccctctttggtattggaaaccataaacagtatattttgacaagaaataaaatatacttattcaggat

SEQ ID NO: 97504 - DNA, 553 bp, Homo sapiens
cagtccttatcaccaactagcaaggcttgttgttttgttacttgcaatcgatctcccccattagaacatacagttcacagaggcagagaatttgttttggaactgctgtattcctagcgcctagaccaaatgtctaccatgatatgaattaggagttcaacaaatccctacttcatactagttgaatgaaaaaattaaataataagtgagtaggaattaatgcctctactttcttctcatgttctttcttttatcttaccctccccactgccacctttctacattgtgccaagttctcatgtctcaagaatgtggtgttttgttccttgttagctgtaaatgtaatactccttmacccatttttatagaaaagttaactttcccctggatgcttgggcttcatcatttaatgtcctcaattgcagatggctatccataagtttgactctgtgtgtgtgtatttgtgtgtgtgtgtgtctgtgtgtgtgtgtgtgtatgtattttaaacttgtctttaccttttagtgtttgcagtaaaaacaaaggagattat

SEQ ID NO: 97505 - DNA, 542 bp, Homo sapiens
tggaagttaatgctgtcacagagtctgaggactttggaaagctttttgagaggctactggaagcagcagcagcaggcagggtagatactgaccaagataatgggtaacattgttaagtccctgggtggaggagagagcatgcacccagggggaggartgggaggctgaggtttgggaagccagacagctgagggggtggggagaaaacacagagtgccagccttacctgtagctcctgggctgcaagaaccacgctgattgtcacaattttgatgcactttcatcctgttattagccaaaatactgaaactggctaacatgtataccagaatcagtgaaatatttgccaggagggcaaagaacattggggaaagcaagagagagaaataggaagtggagaaataatgaaaatgtaaagtagaggatttataaaacatttaagtgtttatacaaatttcatgttttcggtaatagaatctaaaatatgtaactatataagactatttttataagaaaagcatgtatgaatcacacaagttaaa

SEQ ID NO: 97506 - DNA, 500 bp, Homo sapiens
ccaacatccatttctacatgattgaataagaacataataatcacttcttatgtttgcagattacactacaatttacgaaatgctttcacttgtaacactttgagtgatccttggttgtgtctggttctggttgtaaatgggaacagtaacaggtagtcctctgtcctatgccagtggccatgatgccagcaatgtggttcctttttagggggcagccatgtcccccaccctgcctaacaacatttcaggagcatcttcctatgaagcagatgctggaaaatgagtatttttgagtgtagtcacttgtagaaaagtgaaatcaaaatgtgttccatagcaattaaccccatatttccctaaacttatcgtgacaccacattcctgatcacaagagttttagactgttcttttgaagaaggtgaggaataggcaggggaataacgactaygagatatttagaatcatttactgtgtgagtgaaggcttttaaaaaagaattc

SEQ ID NO: 97507 - DNA, 579 bp, Homo sapiens
tctgtgtgtttaagttagcactatttttatacaacatctactgtggtttttcatctcaggtggaagttcacaggaggcatgtgctaaatgaaaggtggccagttaactgtatcctctaccatgaataaaaccaaactcctaatccaacatgggcccaagaggagtaggtgaatgaggactgatgaactgagggaactgagggcattccacctctcccacagtcctggaaacattgcctcaaagcactctcttctgcttggtgccttgggcaacagcactgtacacaaagagcagaaaatcccctgtaatttgatcattttagatgtagcattcaattgtgggatgaatataaacttctgccatttagcrattaaaatactgtttgggtagcaatgtagactacataagtaattaagatctcctttttgtcttactggtatctagaaggaacccatcattctatgacttctgtcctcagaagctgagtgagatgaggaagaacaaattaggataacttcctccaaaagtcaaaacaataagccctgctgccttcctccagtctgtggcacatgctgtgcc

SEQ ID NO: 97508 - DNA, 524 bp, Homo sapiens
agatgtttatattatgcataatataatttctttcataagaattcattataacttttcaaaatactttggctctcatttagcctatgtctcagtttagctttttttttttttttaatggaaaaaagggccccatgacctattggataaygatacaatatgtgccatacttgtaggattttgtcattgtgcaaatagggtttcaggggaaagggcagaacattacccatggtttggtgtgagtgcagctcacaattaggaccatctgctgagtggtcccagagtaagacttttttggaagttggcatgtggggctgcccagcctctgggatcctctggttaaaaaaaattctgaggacactggtggcccagagactatcttgatgtatgtattgggaacccagcagttcagagatggtgaaggatagtgactcttgagggagttcaaagtcaggagagattggattcactttaaaaggctttctaggtcagtgccataaaacaatcaactcatcgttggagtagac

SEQ ID NO: 97509 - DNA, 545 bp, Homo sapiens
tgttggctaggatgcagagaaatgggatttctcatacattactgacaggaatgtaaaattgttcagcccctttggaaayagtctggtcgttccttaggtagtaacatataattcagcaattccattccaaagtgtataccaaaaagaaattaaaacatttttccacacaaaagtctttataaaatattaatggctatattatttatataaaaaatagaaaacagcccaaatgtccatcaagtgataaatggacaaataaaatatggtatattcatacaatatttcttagttcattcaggctgctataataaaatgccttagacttcttaatttatacacaacagaagtttatttctcacagttctggagactgagaagtccaagtataggatatcagcagtgtctggtgaggtcttgcttcctcttagtgccttcaagctgtgtcttcacatggtgaaaagggcaaacaagctccctcaggcctctcttattggggtactaatcccatttatgagggctcagccctcatgatctaatcaccttcc

SEQ ID NO: 97510 - DNA, 545 bp, Homo sapiens
tgttggctaggatgcagagaaatgggatttctcatacattactgacaggaatgtaaaattgttcagcccctttggaaacagtctggtcgttccttaggtagtaacatataattcagcaattccattccaaagtgtataccaaaaagaaattaaaacatttttccacacaaaagtctttataaaatattaatggctatattatttatataaaaaatagaaaayagcccaaatgtccatcaagtgataaatggacaaataaaatatggtatattcatacaatatttcttagttcattcaggctgctataataaaatgccttagacttcttaatttatacacaacagaagtttatttctcacagttctggagactgagaagtccaagtataggatatcagcagtgtctggtgaggtcttgcttcctcttagtgccttcaagctgtgtcttcacatggtgaaaagggcaaacaagctccctcaggcctctcttattggggtactaatcccatttatgagggctcagccctcatgatctaatcaccttcc

SEQ ID NO: 97511 - DNA, 545 bp, Homo sapiens
tgttggctaggatgcagagaaatgggatttctcatacattactgacaggaatgtaaaattgttcagcccctttggaaacagtctggtcgttccttaggtagtaacatataattcagcaattccattccaaagtgtataccaaaaagaaattaaaacatttttccacacaaaagtctttataaaatattaatggctatattatttatataaaaaatagaaaacagcccaaatgtccatcaagtgataaatggacaaataaaatatggtatattcatacaatatttcttagttcattcaggctgctataataaaatgccttagacttcttaatttatacacaacagaagtttatttctcacagttctggagactgagaagtccaagtayaggatatcagcagtgtctggtgaggtcttgcttcctcttagtgccttcaagctgtgtcttcacatggtgaaaagggcaaacaagctccctcaggcctctcttattggggtactaatcccatttatgagggctcagccctcatgatctaatcaccttcc

SEQ ID NO: 97512 - DNA, 529 bp, Homo sapiens
gtgtgcctaagaatagggtagatggaaagatttggaggatgatcactaaaggttgcgtggtttctttttgagttaatgaaatattctstagttagacagtggtaaaagttgtacaactctgcaaatgtactaaaggccattgaattgtataatatatgaatcatatctccacaaagttgctataaaacaaaacagctaaaacagttcagtgttggtccaagtcttcaatattcactaccccttcccctcttttcataactgacatgaatcagcaacaaatctatataatatgaagcactaaagagtaatagaggccaatagagaagctggaagcaagaaagtggtggatcatgctaagaagagattatattccactagacctcaagcaacaacaaacgatatgtttttctaacatgtacatttactgcaagttagcaaactcattcaatgttcaagaaatgtccctttgcccactataactgatctcccagctccaaaatgacctcaagtctcttgattactttattcc

SEQ ID NO: 97513 - DNA, 608 bp, Homo sapiens
tgcctttttgtgtcccttgtgattccatatgaatttgagtataaacttttctacttatgcaaaaaaattttggaatgttgatagcaattgcgttaaatctgtagatcgctttgggcagtataagcatcttaataatactaggtatagcaattcacgaatactggataactttccatgtactactgtcttattcgtttctttcagcaatatttaatggttttcagtgctcaaatatttcacctcactggttaaacatatttctaatactttttaaagattattgtaagtagaatttccttttcagattgtttgctgttagtgcatagaaatgcatctgatttgggggcgttgactttgtattctgaaactgtttgactttttatttgttctaacrtgtgtgtgtgtgtgtgtgtgtgtgttaaatatttagggatttctacacattagatcacatattagatcacatattagatcatatcatatcttctgttatttaagataattttacttctttctatcccataggaatgccttttttttcttgcctaagtgctctggcaagccctggtaagggctttcagtactatgttgaatagaagtgcaaaaac

SEQ ID NO: 97514 - DNA, 608 bp, Homo sapiens
tgcctttttgtgtcccttgtgattccatatgaatttgagtataaacttttctacttatgcaaaaaaattttggaatgttgatagcaattgcgttaaatctgtagatcgctttgggcagtataagcatcttaataatactaggtatagcaattcacgaatactggataactttccatgtactactgtcttattcgtttctttcagcaatatttaatggttttcagtgctcaaatatttcacctcactggttaaacatatttctaatactttttaaagattattgtaagtagaatttccttttcagattgtttgctgttagtgcatagaaatgcatctgatttgggggcgttgactttgtattctgaaactgtttgactttttatttgttctaacgwgtgtgtgtgtgtgtgtgtgtgtgttaaatatttagggatttctacacattagatcacatattagatcacatattagatcatatcatatcttctgttatttaagataattttacttctttctatcccataggaatgccttttttttcttgcctaagtgctctggcaagccctggtaagggctttcagtactatgttgaatagaagtgcaaaaac

SEQ ID NO: 97515 - DNA, 293 bp, Homo sapiens
gaattcatccagcttttgcccattcagaataatgttggctgtggatttgtcatagatggttcttattattttgagatgtttttccaatayctttatttagatttttaacatgaatggatgttgaattttatcaaaagtcttttctacatctactgagataattgtgtctttcttttttgtttttagtactgtttatgtaattaatcacatatattgatttgcttatgttgaaccaaccttgcatcccagatatgaagtctccttgatcatggtggataagcttctggacgtgc

SEQ ID NO: 97516 - DNA, 293 bp, Homo sapiens
gaattcatccagcttttgcccattcagaataatgttggctgtggatttgtcatagatggttcttattattttgagatgtttttccaatacctttatttagatttttaacatgaatggatgttgaattttatcaaaagtcttttctacatctactgagataattgtgtctttcttttttgtttttagtactgtttatgtaattaatcacatatattgatttgcttatgttgaaccaaccttgcatcccagatatgaagyctccttgatcatggtggataagcttctggacgtgc

SEQ ID NO: 97517 - DNA, 419 bp, Homo sapiens
tttctgcctcacagtttgagctagatcatctcatttcatcttctttagccctcagactgtctgtgttttcattgtttcagcaaattaagccatccccagatacgtagtatgcagccattgatctggtaaatgatttttctccaaacctgtccttatggctgaccagagcagtttgctttcagctgacaaggccaccagtacaccttcactgtcatgcctcagggttatatcaactccctagcccgatgtcagaatttagttaacagggatcttgatcacctttcccttccacaagatagcacactggtccattacattgatgatattgtgctgaatggatttagygaggaagaggtactgcctactctagacttattgataagacatctgtatgtcagggaggacagaaaataaatttc

SEQ ID NO: 97518 - DNA, 419 bp, Homo sapiens
tttctgcctcacagtttgagctagatcatctcatttcatcttctttagccctcagactgtctgtgttttcattgtttcagcaaattaagccatccccagatacgtagtatgcagccattgatctggtaaatgatttttctccaaacctgtccttatggctgaccagagcagtttgctttcagctgacaaggccaccagtacaccttcactgtcatgcctcagggttatatcaactccctagcccgatgtcagaatttagttaacagggatcttgatcacctttcccttccacaagatagcacactggtccattacattgatgatattgtgctgaatggatttagtgaggaagaggtacygcctactctagacttattgataagacatctgtatgtcagggaggacagaaaataaatttc

SEQ ID NO: 97519 - DNA, 590 bp, Homo sapiens
agagttttgccctgtgactaaaaacaacttgttcattttcctcaccactggatacttcaactagatcaggtaaaggaacaacaggttcaaagtactgtccatctctctcttcttcttgagtaacatcagattcttcatcagtgccaactgaagtcccactctgattcaacttggcaggagacttagatggactcaaagcagatttaaaactgaagttaratcctgttgttgactcaccaaaacggaaaagattttttctcacagggctacttgccaatggagaagcatgtactgagctactactgacactatcatccaaagcatcttcccttaaatcatagttatcccattctaatgtgggcccagtgttttcaggattgggttttattgttgtgtctgaggcaccggccgcacctgtacctgaacccttattttcttcctcagtgacttttgtttgatcatttgtcaaaaatgttttgaaatctttcagtccactcttcatttcttcagctctctgtattaacttggcagctctgccagtatctacaagtttatggggagtttgaagtggtatgtctaacagaagccgc

SEQ ID NO: 97520 - DNA, 302 bp, Homo sapiens
gaattcgataaccaaatgatcaactaaattaagtaaagacattttaaagacataccattagtttcaagaccagcctgaccaacatggtgaaatcccatctctactaaaaatagaaaaaattagccgggcatggtggcacacacctgtaatcccactactcaggaggctgaggcaggagaatcgcttgaacccgggaggcggaagttgcagtgagctgagaccatgccactgcactccagcctgggcaacagagcaagactcygtcccaaaacaaaaacaaacaaacaaaaaaacctctcatc

SEQ ID NO: 97521 - DNA, 542 bp, Homo sapiens
gtagttatctggtcatagaagggacttgtatttctgccacttttgtctcctaatgtagagaaaatgatcattttccttattcagaagtataggttagccaagaaaggtaaaccattgtctgtttatgcctggattttttttttaatcagcttaggtgtatttttttttaccctagttatactaagcctattttcaggattaaatgaggtttctgagctaataggaatcaaagagagtaaggactttgaagttaggtacaccagagtttcagtaccactcagttggacaagttatataatttttttaagtcttggtttattcttttttwaaaaaaataaggataaaaataactactattattgaacattatttactctctcacagaactcaaaccaccaattcagtgaggcaggtggcattgttatcttgcgaatagtgccatacagttaattcattgtttaattgttattgagtgcctactatttgcaaagtaaagatacagtgaggaataagacacaggcctcgccacaggaacacccacc

SEQ ID NO: 97522 - DNA, 582 bp, Homo sapiens
ggggaaaacggaactgaaaaattccactgggagaaaccaattttattaaaggtacttaaactgtgccaggtactgctatggtttgaatatgtttcccaaatttcctgtgttgaaatttagttcccaaattcatactttgacagtatttggaggtggggcctttgggaggtgtgttagtccatttttatgctgctattaaagacatactgaagactggctaatttataaaggaaagaggtctaattgactcacaattcagcatggctggggagacctcaggaaacttacaatcatggcagaaggggaaacaaacacgtccttctccacgtggcggcacgaggagaagtgtagagcaaaggtgggggaaagccccttatgaaaccatcagatctcatgagagttcactcactatcacaggaacagcatggaggtaaccgccttcatgattcaattacctcccacagttccctcccaggacacatggggattatggaaactacaattaaagatgagatttgggtggggacayagccaaactatatcaggaggtaattagggttaaataaggtaatcagggtagaa

SEQ ID NO: 97523 - DNA, 574 bp, Homo sapiens
tcacataatagttcatctggtatatatgtcataatttattctaaaacccctttaatggtaaacattaggttctttccagttttgtgttactataaatactactacaattaacatctttatgcctataggtttctctaaagagtakttctttaggaagtactctagaagtagaattacagagtgaaagtatatgagtatgcttatggttcctgatgcatattgccaaatgttttccaaaaggattatgtcaatttatattatctccaatataagagagtgccaaatgctggtggattgagtggaaaaataaaatcagtctgtgggcaagtcacttctcttcaggcattggtttcttactaagttaaataagggtatgtagtgcatcatcattatggttttccagttctgaggttgtatgattcatcagaattctgaacatttgcttataggtacttgagattcttcaatgaattttcattcctctaaattagaatccctagtaaaatcccagttcttttgagaatggataatgcctagcacatgtgctgctacttcctctcctgaatcagtggta

SEQ ID NO: 97524 - DNA, 514 bp, Homo sapiens
ggggtttggttgtattaactgccttggycacatcctcctggctgctaagaggtagatgagaaatgaagtcctctggtgactcctgctcctttctggagctatccttcctatcaaatcagtaagaatgtgagtaaggagctgttatgaagtggcttcccttgaagatgagccaatgagaacacaatagaaagatgtcaaagtatgatttggagaccatttagaaagctcctgtctaaaatgtttctcctacttgcttgtcaatgatgcctaaaattctaccattaaaaagccactttttttcaataaagaactaggagtcatattttcatgtgtttaaagagttcccaaaacaagagacattaggtgctaatggcattgtcaagagcaagggaattatgtcaccagaggcatttccttcagaaaagtaagttcaataagcattaccatatattttaaccaagacagttgaggttcttttccactttttgcaatctcctctgcagtaagtttaata

SEQ ID NO: 97525 - DNA, 589 bp, Homo sapiens
tgtcaaatgctatttttctgatgccacttccatatattgcatcagcaacaataaaaaatacagcaactcaaagcttcctttcagttccttattccctttttttgtaccaaaaaccttacccctcacctttgctscattataaaaaactatgaagattatacaactgaaaaccatccagctctgtgtagatggatttctcaggaaggaaaaatagtatctggctccaactttgcttgtttaaagatctagtgattttcatttgaatcccaactctgccactaactaattgtttcacatgtcaagccactatttctgggtctcagttttttcactagcaaaataagaaatatcaacaatatttctatcgaccattccaatcctgaaattctattactcaacaatcttagattctctgggtgggtaaaaagaagagaaggcagcaggtgcaatctcacacacactcagcaaagttcttagagcctacatcatgatgactggaaatccttgtcccacgaatgaggtgggacaccccacctcattactatcaggtttgcccactacctgacactcacactgaagtgtggatgac

SEQ ID NO: 97526 - DNA, 635 bp, Homo sapiens
cagcaggtgcaatctcacacacactcagcaaagttcttagagcctacatcatgatgactggaaatccttgycccacgaatgaggtgggacaccccacctcattactatcaggtttgcccactacctgacactcacactgaagtgtggatgactggcagctgattattttctgaaagccaagtatgggatggagtagctgatgagaagaaatgtgcaccacgtaccagaaggatgggggagagcagaataagttccaagaagaggaagtgagatattctaaaggtgagctttgctatggggtggccttggcaggttagagggcaaaggcaagcctaagtttaacctttcaaagctgaaaatgaaacaccagggagtctgctctccctccctgtgccagaacagcctcccctttagagtgcaatgctgcctgagatccatcagtctctgaggtcagaggttaatgtcccaccctgactcaggtcacctctcaaccctttcctctgaaactccagctctacatttttaagatccatataataaaacatgaccctgaggtccaccccattaaaggataaaaacggtaatccagatacatacaacgtttcagatacatggaagctccatttgcctctgtt

SEQ ID NO: 97527 - DNA, 635 bp, Homo sapiens
cagcaggtgcaatctcacacacactcagcaaagttcttagagcctacatcatgatgactggaaatccttgtcccacgaatgaggtgggacaccccacctcattactatcaggtttgcccactacctgacactcacactgaagtgtggatgactggcagctgattattttctgaaagccaagtatgggatggagtagctgatgagaagaaatgtgcaccacgtaccagaaggatgggggagagcagaataagttccaagaagaggaagtgagatattctaaaggtgagctttgctatggggtggccttggcaggttagagggcaaaggcaagcctaagtttaacctttcaaagctgaaaatgaaacaccagggagtctgctctccctccctgtgccagaacagcctcccctttagagtgcaatgctgcctgagatccatcagtctctgaggtcagaggttaatgtcccaccctgactcaggtcacctctcaaccctttcctctgaaactccagctctacatttttaagatccatataataaaacrtgaccctgaggtccaccccattaaaggataaaaacggtaatccagatacatacaacgtttcagatacatggaagctccatttgcctctgtt

SEQ ID NO: 97528 - DNA, 583 bp, Homo sapiens
gtgacctctgtgacttctgagaccagaggtgaggaggccttgcagctttccccctcgtagaacactgccctgaatgtgccacataaggaagcttccctcatcttctagaggatgagagaccatacggagaagaacaaggacctcccaatgacagccagcaccaacttccagacatgtaagtgaggccacatcggaccttggagacaaccttgcactctagcagacatcagtgatctgagtcaccccaggaaagcagaagagagatagctcagccagcccacagaattctgagaaagtatacattattttgcttgaaacaactatgtttttatgtgtttgataaatggcaaaggctaactgagccaggaagtgcgaccagataacttctcaggtaccttcagctttatgattccaaaatctttgtagagaacgaatcatagtggtaacagaacaatgtccctggaagcatctacrttctaaatcactgattttgcagaggaaaaaaaactgattcacagaggagaggagatcttcccaagtttgtctcataaaatgcttgcttgtgtaacatagattctgatgg

SEQ ID NO: 97529 - DNA, 556 bp, Homo sapiens
tctcttatttctcctcagctctacagttttactgttttatttctctaaatcttttggtacatgyttacttcccttttttgtttggccaaaatttctttttaacttttcagttatcttcaggtattttaatcactttatctcttttctttatatatatatatatgcttacattgaagcattccatcattttgtttcttgtctttctaaatttaagactttcccccttttattcacttgattctttaggcctttaatttctaatttttttgtttttatcatttgttttgtgtcttcatttcctttaaatattttgattttagcattggcctataatgtcaggcagaaatctttgccttgctgtggggtaaaagttgcaaagtgaaggagtagagagggagtctatcccctcaccctgtctgctcctcctaaactgtgcctctggggcccctgaattggattcccatcaatttctatgtcaatcctgaaagtcttaacctaagtaatgtgtgaagccctcgggtttaaattccttccttgagacaatagtgtttctact

SEQ ID NO: 97530 - DNA, 556 bp, Homo sapiens
cacatgctgtcaggaagtatttcatgatttctatcctattttcttttcctttgagtttgaacaccacaggtcttgtttaatgaggccaggtttttcgtggaagttttgggattgaaccaaggaagagaggatcaggaacagtcagaaagctgtgcacattttcaacaactaccgacagcagtgagtgcttgggaagcagygagatcataggctgggaagatgggaaatcatcaggaatcccgggctgatgaaactttagaggtctttggaaagctcccctgattatcacctcctcttctctctctcctaatttacctccaggaactacagacctttatctcacagtgagagccaaagcttcaaaagggtgattagtactgttgccaaaggaggaacagtcaatatcagctcttttccaaacccagtccttgatagaaatgctctctgtaaactcagatgaagagatgacatctgttctgattattgtgatatagcccactgcagagcacaaagcacatagtagatctttaataagtatgtgtccagttgagtggca

SEQ ID NO: 97531 - DNA, 556 bp, Homo sapiens
cacatgctgtcaggaagtatttcatgatttctatcctattttcttttcctttgagtttgaacaccacaggtcttgtttaatgaggccaggtttttcgtggaagttttgggattgaaccaaggaagagaggatcaggaacagtcagaaagctgtgcacattttcaacaactaccgacagcagtgagtgcttgggaagcagtgagatcataggctgggaagatgggaaatcatcaggaatcccgggctgatgaaactttagaggtctttggaaagctcccctgmttatcacctcctcttctctctctcctaatttacctccaggaactacagacctttatctcacagtgagagccaaagcttcaaaagggtgattagtactgttgccaaaggaggaacagtcaatatcagctcttttccaaacccagtccttgatagaaatgctctctgtaaactcagatgaagagatgacatctgttctgattattgtgatatagcccactgcagagcacaaagcacatagtagatctttaataagtatgtgtccagttgagtggca

SEQ ID NO: 97532 - DNA, 588 bp, Homo sapiens
tgtgcacattttcaacaactaccgacagcagtgagtgcttgggaagcagtgagatcataggctgggaagatgggaaatcatcaggaatcccgggctgatgaaactttagaggtctttggaaagctcccctgattatcacctcctcttctctctctcctaatttacctccaggaactacagacctttatctcacagtgagagccaaagcttcaaaagggtgattagtactgttgccaaaggaggaacagtcaatatcagctcttttccaaacccagtccttgatagaaatgctctctgtaaactcagatgaagagatgacatctgttctgattattgtgatatagcccactgcagagcacaaagcacatagtagatctttaataagtatgtgtccagttgagtggcatcagacatctaaagcagcaggaagcacttcacaaatcaagttatagaaagcaactagccaacatgtatggctgaagcktttaaggagaactttgtcagcttctcattttaattgccccaaatgaccctactgaaaggtgtccttgtttatcattttgaggaagacacctacaatgcaactgc

SEQ ID NO: 97533 - DNA, 634 bp, Homo sapiens
tgtgagccaacagtctgatgcgcacttcagggtcactgtttccagtgtgcaagtccttggctgttggaatgaaatgtctgcctctttgttctgcctcccactttctcctcyttctcttcttcctacttccctctcctccaattcaccccatgaaaatattgcataatgttcacagataacccactaagcctagcttagtctattaggagattccctttctgtaagctttcagaatcccatacatttgccagcagtgtgattgctttctaagtcaacatgactgtccccttccccaaaggaacccttcacttttctttcttaaattccactgtgtgtctcccacaaacaggttttttagtagaatctcatgaagataagaatgcctttaaagaatgcaagatttctaaaaatattcaacaaaaatattcccaatacacctctcataacaattccatcccagagtgtggtccaaaataaattgaggatttgtctgtacaacagcttcaagatgttcagaaggtgtcaaaaatggcaaggatctgacactcatcgaagtgttcagttaaccatacccacaacctccagggctttaaaaacatataaattgcaaagattgaggtgaacagtttgatca

SEQ ID NO: 97534 - DNA, 634 bp, Homo sapiens
tgtgagccaacagtctgatgcgcacttcagggtcactgtttccagtgtgcaagtccttggctgttggaatgaaatgtctgcctctttgttctgcctcccactttctcctccttctcttcttcctacttccctctcctccaattcaccccatgaaaatattgcataatgttcacagataacccactaagcctagcttagtctattaggagattccctttctgtaagctttcagaatcccatacatttgccagcagtgtgattgctttctaagtcaacatgactgtccccttccccaaaggaacccttcacttttctttcttaaattccactgtgtgtctcccacaaacaggttttttagtagaatctcatgamgataagaatgcctttaaagaatgcaagatttctaaaaatattcaacaaaaatattcccaatacacctctcataacaattccatcccagagtgtggtccaaaataaattgaggatttgtctgtacaacagcttcaagatgttcagaaggtgtcaaaaatggcaaggatctgacactcatcgaagtgttcagttaaccatacccacaacctccagggctttaaaaacatataaattgcaaagattgaggtgaacagtttgatca

SEQ ID NO: 97535 - DNA, 621 bp, Homo sapiens
gggcttggagttaatcaacctggttaagatcccacagctgatacatagcagagcaaaggaggtttgcagcaaaggaggttgcagagcaaaagagggttttccactttcagtagatctgtaagggactttggagagtttatctagtttaaccatcttgtttcagggacaggaaactgaggccagagtagttaaataatgctcatggttccccaggcagttattagtggagctgggctgatctccaagtctcattcttattctggtgtcttccccataattctgacctttgttattgtcacataatctatcctgggactaaatcctcttagctatgaaagctatatgcttggagccattgaggatgctgatatttactctcaccagttgtatcaactttggtgtgtgcaggatcccctggaccagtaaatctgtctccagtgctgggagtgtcaacagtatgttaagagatgggttagaaaaaactagaggtttagatgattgcgggttccagacatgccaggaaggtccaggccatcatttcccctccaayttcacccttgtctcttggagttagaaccataggtgagaaagggttagagggaatacagctactatgttttc

SEQ ID NO: 97536 - DNA, 580 bp, Homo sapiens
  misc_feature (1)...(580): n = A,T,C or G
aagagaaggaattagcatgtctagcaagggtagaatgagtgaggaaagcagtgggccaaagagaaggttggaaaacacaaacaggtaaaggctgggcagaagaggagaagtccagggatgggcctgggaacgagtagccagagacatgggaggggaagaggaaagagaatgagtggaataaaaatgggaagaacttggggcatcttggctgccaaagagctcttgtcttccattcaggtggccgagctggcactcaaggctggagtggcttccaatgctaggggagcaaaggcctcgtgcaagcgtgctgccatggcrccagaagcagagagcaggtctggtcctaaagccaacattccctgctccccacgggaaggtgaactctgtccagcttgttccaagcacagtctctactgtttgttcacactcagaatacttttgctaaagctctgcaaagcacttggatgatgcaaatcaccactctttgcaaagcactacaccaaggctggctacttttacttcaagctgcctgaacataattgtgtctnnnnnnnnnnnnnnnnnnnnnnnnnnnnnnnnn

SEQ ID NO: 97537 - DNA, 580 bp, Homo sapiens
  misc_feature (1)...(580): n = A,T,C or G
aagagaaggaattagcatgtctagcaagggtagaatgagtgaggaaagcagtgggccaaagagaaggttggaaaacacaaacaggtaaaggctgggcagaagaggagaagtccagggatgggcctgggaacgagtagccagagacatgggaggggaagaggaaagagaatgagtggaataaaaatgggaagaacttggggcatcttggctgccaaagagctcttgtcttccattcaggtggccgagctggcactcaaggctggagtggcttccaatgctaggggagcaaaggcctcgtgcaagcgtgctgccatggcgccagaagcagagagcaggtctggtcctaaagccaacattccctgctccccacgggaaggtgaacyctgtccagcttgttccaagcacagtctctactgtttgttcacactcagaatacttttgctaaagctctgcaaagcacttggatgatgcaaatcaccactctttgcaaagcactacaccaaggctggctacttttacttcaagctgcctgaacataattgtgtctnnnnnnnnnnnnnnnnnnnnnnnnnnnnnnnnn

SEQ ID NO: 97538 - DNA, 517 bp, Homo sapiens
cccctatagcagccacagcaagacccgcccagggagagtctgagctcagacatgcctagccccacccccacctgatgatccttccatatctgcacttgtagtggaagacaaagggcatataatcttgggggttctagggccccaccctctgccaatccctcaccacactactacagctgatactttctggaaagtgycacctcctggcagaaggccaaccagcacaaaaatagagcattaaaccaccaaagctaaggaccctcatggagtccattgcaccctccaccacttccagcagaacaggcgctggtatccatgactgagagacccacagatggttcacatcataggactctgtgcagtcaacccccagtaccagcctggagctgggcagacttgctgggttggctggaccaagaagcgagacaacaatcattgcagtttggctcacaggaagccacatccatagagaaagggggagagtactacatcaagggaacaccccgtgggacaaaag

SEQ ID NO: 97539 - DNA, 381 bp, Homo sapiens
gcttcactaagaaacaaatgtgtgataagatacaatttattatgatgagagtggtccttgacttcccatcttctctgatctttctaaaagatgcctgccattgccatttcaattttcctctctccattccctcccttgaggagagtttatctctgccagacaagttcttctggcacttttgatgttggatcaaaaaatagatgttgtatcagaaatagattagagagacagaaggagcattgtaagggcctctggaaagatgtgtagggactacacataagtgaagagctgaacaagaggggagacagtgaaagcttcataggctgagataaaggtaatgttttggtttcagtttttccrgtaaggccttgggtaaccgac

SEQ ID NO: 97540 - DNA, 458 bp, Homo sapiens
agggaatccgaacccagctaccatatgagagagttcaacttatgttcaatgtgaatgccatggcaatattaaaaggtaagaattcgctccatacgtgcttgaggtaaataggagaaatctagaatttatgtgaacagtgagaaggttggatgcgttttatgtcacgtattttaatactagcagcttattatatatgtcaatccatcaggcattcagaaatacatgcttatgaaaattttttgcaccatcagacaaaagacaagggtagaagacatttgtwaccctataaacactagtaaattaaaaacaggaggacctttatgtcctaacatatctgtgttgtgaaaggctgccctgtgaaatacgggatttcttaaacatattttaaaaatcataggtgtgagtattttttagaaatccatttaaattttctcttgttattttacaatgcctatcta

SEQ ID NO: 97541 - DNA, 586 bp, Homo sapiens
ggacaaacctacaactaagatcatactgagtgtggaaaaggtgaaagattttactgtgaacaagaaaaagattttactggaacaagaaaaggatgcctattctcaccaatcatatttcacatagtgaaagtcttagccaggacaattaggtgagaraaagaaataaaggacatctgaattggaaaggagacagtcaaattgtccctgtttaaagacaatgtgatcttatacacggaaaaaaataagactctaccaaaagcttcttagggtgatacatgaaattaataaagttgcaggatataaatcaacatacaaaaatcagtagcatttctatatattgatagtaaactagctgaaacaagaaattaagaaagcaattccttttacaatagctacaaaaatgtacttagaaataaatttaaccaaggaagtaaaagatttcgacaacaaaaatgacaaatattaatgaaagaaattaaagaaaacacaaaaaaggaaagacatccacgtttatagattgaaataactaatattcttaaaatgacccactatcctatgtgatttacaaatttggtacaatcactag

SEQ ID NO: 97542 - DNA, 586 bp, Homo sapiens
ggacaaacctacaactaagatcatactgagtgtggaaaaggtgaaagattttactgtgaacaagaaaaagattttactggaacaagaaaaggatgcctattctcaccaatcatatttcacatagtgaaagtcttagccaggacaattaggtgagaaaaagaaataaaggacatctgaattggaaaggagacagtcaaattgtccctgtttaaagacaatgtgatcttatacacggaaaaaaataagactctaccaaaagcttcttagggtgatacatgaaattaataaagttgcaggatataaatcaacatacaaaaatcagtagcatttctatatattgatartaaactagctgaaacaagaaattaagaaagcaattccttttacaatagctacaaaaatgtacttagaaataaatttaaccaaggaagtaaaagatttcgacaacaaaaatgacaaatattaatgaaagaaattaaagaaaacacaaaaaaggaaagacatccacgtttatagattgaaataactaatattcttaaaatgacccactatcctatgtgatttacaaatttggtacaatcactag

SEQ ID NO: 97543 - DNA, 567 bp, Homo sapiens
gagcagccagttatctttgatcagcttgggctgccataacaaaggaccacagatcatcaacttcaataacaggaatttctcttctcagggtcctggggctagaaatccaagatcaaggtatgggcagggttggttccttttgaggcctctctctttggcttgtagatggtcaatttcctccagtgtctttacatggctgtctctctgtgtgtgtctgtgtccttctctcctcttgttataaagacaccagggccaggcgcrgtgcctcacgcctgtaatcccaatactttgggaggccgaggcaggtggattgcctgaggtcaggagttcgagaccagcctggccaacatggtgaaacctcatctctactaaaaatacaaaaattagctgggcatggtggcaggtgcctgtaacccgagctacttgggagactgaggcaggagaattgcttgaacccaggagacggaagttgcagtgagccgagattatgccattgcactgcagcctgggcaacaagcaaaattccgtctcaaaaacataaaaaataaagacactaggcatattgaa

SEQ ID NO: 97544 - DNA, 361 bp, Homo sapiens
gagtctcactctgttgttcaggctggagtgcagtggcatgatcttggctcactgcaaactctgcctcctggtttcaagcaattctcctgcctcagcctcccgagtagctgggattacaggcactccacatagcgagacccctgtctctacaaaaatcaatttttaaaaaatgagccaggcgtggtagcacacacctgtagtcccagctatttgggaggctgaggygggaggagcacttgagccccagagttcgaggctgtagtgagctattatcacaccacttcattccagcctgggagacatagggagaccctgtccttattaaaagataaaaataaaataaagaaagaaagaagattgt

SEQ ID NO: 97545 - DNA, 361 bp, Homo sapiens
gagtctcactctgttgttcaggctggagtgcagtggcatgatcttggctcactgcaaactctgcctcctggtttcaagcaattctcctgcctcagcctcccgagtagctgggattacaggcactccacatagcgagacccctgtctctacaaaaatcaatttttaaaaaatgagccaggcgtggtagcacacacctgtagtcccagctatttgggaggctgaggtgggaggagcacttgagccccagagttcgaggctgtagtgagctattatcacaccacttcattccagcctgggagacatagggagaccctgtccttattaaaagataaaaatraaataaagaaagaaagaagattgt

SEQ ID NO: 97546 - DNA, 608 bp, Homo sapiens
ttacagaaggagggccatggtggcccatggaagtgaggagtaattcctgccaggcatttgtgaagaaggtggcatctggccaggacctttgaaagaagtgcagaaaggaggcctagtgtgtgctgggcagccacctcatcaatcactggatcctatccagtgtgagatccccattctacagatgccgacaccagggttcagggtaaggaaggcaatcaagyaacttgcccgaggtcatgcatgcaaggaacacggaagccccactctaatggagatttaaattcaggtctaatatgagaatccaagtggcaatgtgtgatgtgtctggaccacgtggtgtgaaatgcagtcggcttctcctgggaaggttactcagacagaagctttcttcacaagcatgctccccacggcctcctccctttcacctgcaccatgtctgtctcccattcaagactggcaaccccagccaggcacagtggctcatgccctgtgatcctatcattttgggaggcaaggcaggaggatccttgaggccaggagttgagacaggagacacacaacgaggctctatctgtacaaaatataacaagacttagccaggcaagggc

SEQ ID NO: 97547 - DNA, 608 bp, Homo sapiens
ttacagaaggagggccatggtggcccatggaagtgaggagtaattcctgccaggcatttgtgaagaaggtggcatctggccaggacctttgaaagaagtgcagaaaggaggcctagtgtgtgctgggcagccacctcatcaatcactggatcctatccagtgtgagatccccattctacagatgccgacaccagggttcagggtaaggaaggcaatcaagcaacttgcccgaggtcatgcatgcaaggaacacggaagccccactctaatggagatttaaattcaggtctaatatgagaatccaagtggcaatgtgtgatgtgtctggaccacgtggtgtgaaatgcagtcggcttctcctgggaaggtkactcagacagaagctttcttcacaagcatgctccccacggcctcctccctttcacctgcaccatgtctgtctcccattcaagactggcaaccccagccaggcacagtggctcatgccctgtgatcctatcattttgggaggcaaggcaggaggatccttgaggccaggagttgagacaggagacacacaacgaggctctatctgtacaaaatataacaagacttagccaggcaagggc

SEQ ID NO: 97548 - DNA, 588 bp, Homo sapiens
actgtaattggtgttttacaaacattattactattacccacaaccctacaagacagatattgttcccacttcacagctgaaaaaagattacaggctgactaccccttctctgaaatgcttgggaccagaagtgttttggattttggaatacttgcattgtattccaaaacccgaaatgctccaatgagcatttcctttgagtgccatatcagcaatcaaaaagtttcagattttgaaattagggatactaaacctgtactactgaaggtcttgmagctagtaaatggcagggtatgatctgaaccagacacaagtggtgattaagtcaaatcattactagaagtcaccttacagagaaaacaatcaacatgaggtacattctgtcacaatgcttatgctgtttagatttaatgtagatatatttgcatttgaaagtgcaaatactgtctttataaagtctttgaagaacagagttagcccttgttatttctatggttaattcaaagtgctaatagctaaaaaccagaagtcattccaaagtttgcatgaacaaaactcacaagaaagttataaaaatattttatttaa

SEQ ID NO: 97549 - DNA, 607 bp, Homo sapiens
taccagctccttgggaagctaaggtgggaggatcgcttgagcccccaggtgatcaaggctgcagtgagckgtgatcatgccactgtactccagcctggacaacagagtgagacactgtctcaaaaaaaaaggagtctatctcagagttcaacgaatggataattctagtgtggacaactctggtgtaaacatgactgaaaataattcacaaatagtctgttacagctccatccactgaaaattgtcataaaagacatttttcaaatgagttcatttttagaaaaaccattccagatatcttaccttcggaaatcatccaaggagtgtgataaacattataacccccataaactgggtaaacaacaacaatggagtgaaaaacgaccacacatgccataaagcaatgttgaagctgaaaagaacaagacataaacagttgacaactcaaatatgcatcaatatattttattctagaatccagatttaaagtattcaatgtagaaaagttcatccagtcagcaaccttctccatgtatcatatttctcagctatgtgacttagccaatgctggaaagaaaactctagatatacttacacaagtatcaca

SEQ ID NO: 97550 - DNA, 607 bp, Homo sapiens
taccagctccttgggaagctaaggtgggaggatcgcttgagcccccaggtgatcaaggctgcagtgagcggtgatcatgccactgtactccagcctggacaacagagtgagacactgtctcaaaaaaaaaggagtctatctcagagttcaacgaatggataattctagtgtggacaactctggtgtaaacatgactgaaaataattcacaaatagtctgttacagctccatccactgaaaattgtcataaaagacatttttyaaatgagttcatttttagaaaaaccattccagatatcttaccttcggaaatcatccaaggagtgtgataaacattataacccccataaactgggtaaacaacaacaatggagtgaaaaacgaccacacatgccataaagcaatgttgaagctgaaaagaacaagacataaacagttgacaactcaaatatgcatcaatatattttattctagaatccagatttaaagtattcaatgtagaaaagttcatccagtcagcaaccttctccatgtatcatatttctcagctatgtgacttagccaatgctggaaagaaaactctagatatacttacacaagtatcaca

SEQ ID NO: 97551 - DNA, 607 bp, Homo sapiens
taccagctccttgggaagctaaggtgggaggatcgcttgagcccccaggtgatcaaggctgcagtgagcggtgatcatgccactgtactccagcctggacaacagagtgagacactgtctcaaaaaaaaaggagtctatctcagagttcaacgaatggataattctagtgtggacaactctggtgtaaacatgactgaaaataattcacaaatagtctgttacagctccatccactgaaaattgtcataaaagacatttttcmaatgagttcatttttagaaaaaccattccagatatcttaccttcggaaatcatccaaggagtgtgataaacattataacccccataaactgggtaaacaacaacaatggagtgaaaaacgaccacacatgccataaagcaatgttgaagctgaaaagaacaagacataaacagttgacaactcaaatatgcatcaatatattttattctagaatccagatttaaagtattcaatgtagaaaagttcatccagtcagcaaccttctccatgtatcatatttctcagctatgtgacttagccaatgctggaaagaaaactctagatatacttacacaagtatcaca

SEQ ID NO: 97552 - DNA, 607 bp, Homo sapiens
taccagctccttgggaagctaaggtgggaggatcgcttgagcccccaggtgatcaaggctgcagtgagcggtgatcatgccactgtactccagcctggacaacagagtgagacactgtctcaaaaaaaaaggagtctatctcagagttcaacgaatggataattctagtgtggacaactctggtgtaaacatgactgaaaataattcacaaatagtctgttacagctccatccactgaaaattgtcataaaagacatttttcaaatgagttcatttttagaaaaaccattccagatatcttaccttcggaaatcatccaaggagtgtgataaacattayaacccccataaactgggtaaacaacaacaatggagtgaaaaacgaccacacatgccataaagcaatgttgaagctgaaaagaacaagacataaacagttgacaactcaaatatgcatcaatatattttattctagaatccagatttaaagtattcaatgtagaaaagttcatccagtcagcaaccttctccatgtatcatatttctcagctatgtgacttagccaatgctggaaagaaaactctagatatacttacacaagtatcaca

SEQ ID NO: 97553 - DNA, 506 bp, Homo sapiens
gttcttccaaaataaaaattcaattaggccgggggtggtggtgcatgcctgtaatccagcactttgggaggccaacacaagcagatggcttgaggccaggagtttgagacctgcctgagcagcatggcgaaaccccatctatacaaaaaatattaaaaatagccagatgtggtggcacatgcctgtggtcccaactactcgggaggctgagtgaggtaggaggatcacttaagcctgggaagtcgaggcttcagtgagctgtgatcatgccactgcactccggcctgggtgacacagtgagaccctgtctccaaaaaaaaaaaaaaaaaaaaaaaaaaatccawttgatataaagaaagaaaaaactagagcgctacgcacaacataggaaaagtagttttctttctggttggatcagaggatatatttcctttgtgtttttctgtaatttacagattttttttcctcagtgagcaagtattacttttataaactgaaaaaaaacc

SEQ ID NO: 97554 - DNA, 586 bp, Homo sapiens
ggtgcatgcctgtaatccagcactttgggaggccaacacaagcagatggcttgaggccaggagtttgagacctgcctgagcagcatggcgaaaccccatctatacaaaaaatattaaaaatagccagatgtggtggcacatgcctgtggtcccaactactcgggaggctgagtgaggtaggaggatcacttaagcctgggaagtcgaggcttcagtgagctgtgatcatgccactgcactccggcctgggtgacacagtgagaccctgtctccaaaaaaaaaaaaaaaaaaaaaaaaaaatccatttgatataaagaaagaaaaaactagagmgctacgcacaacataggaaaagtagttttctttctggttggatcagaggatatatttcctttgtgtttttctgtaatttacagattttttttcctcagtgagcaagtattacttttataaactgaaaaaaaacctgtatttttcatcgagtatttaattaacttatgaagaaggttattcattgtggcattgtttgagtataaatataacgaggtccaacaacagaagacaggttaaataaatcatgttatgt

SEQ ID NO: 97555 - DNA, 529 bp, Homo sapiens
accgtatgactcttgtgaggttgatcagtctcccctggaaggccaacagctgaagtccatcagaaagggtcctctggcccagagccagcccctgcccacccctgtcttgctgcacccagggtgcaagacccagatcaggtctgggtgacaggagggktatagaggggctgaggctcaggggccttccagcctaacttgtctggagacagttggggaaactgagaccccaagcagggaggtatggctccgagagattattctcattaacctggaaaatttttgcaagctgttaggtataggaagtctgtcacaggtaagagaaatgctttttaagagcatgagagacagcaggattgtgacaatattgaaacaccaccgtgcagattcaccaattgccaccaccgggagccccctgagagtcattgcagatgcacagccctcccctgcaacccctggacctccccgtggtctggcacctaaagggttatgcctcatggcgggaatcagggccctcagggtgccccgccca

SEQ ID NO: 97556 - DNA, 426 bp, Homo sapiens
aaattttctctgtgaagatgatttacatgtgtgattttttaagattatttttaaaaaatactttctggagaaaataccccttttaattagcaaaagatatgcctcttaagactccagtgctagcaagcatgcaggagacaggtgctctccgatatcagtgcggggaaagtaaacgggcaccaccttctggaagagaagctggctgtcatatggagggccctctcatcacaggarggcagatgctgcaagtaaatgacgaaacaggtcaccaaagccctgaaggcgatgcagtctctgacccataattccattctttccattctacccttctactcaaagggacaaataaaaaaatgtaatcaaagagtcaggtaaggccaggagtggtgactcagccctgtaatcccagcactttgggaggccaag

SEQ ID NO: 97557 - DNA, 578 bp, Homo sapiens
gtcattcaaactaagtttgaatgagaattaagtttaatggctcacttgctaaacctgagttgcacaatcctcacaattccttagggatgtggcaaggtcatccttaaatgtaaagttcttgctcacttaatggaaagcactgtagatacataaataacattgttacctgtcttagtgggtcagtataaaagacgggggtggtggtatatgtgagaatagtgaaatttatagctagttttgaggcccttgtgacttttaagaggtattatgagtcacyttaacaagttagtgtttgtgacatagtttcaatttcttatgtgaaagatagtatttcagttgtaaatgttcttttaatattctggagagctactctttcctagcccctctgttttactgactttaaaagttgtttacagtttgtttcatgttcaaatgtagggttttagtaattccttggggtggggggcaggaatgggcagaaggccattgtctctaattttccttttcccaactttcactttcttttttctatggattacatgtcaaggtgggtgagaaaaatggtggggattgagaaa

SEQ ID NO: 97558 - DNA, 578 bp, Homo sapiens
gtcattcaaactaagtttgaatgagaattaagtttaatggctcacttgctaaacctgagttgcacaatcctcacaattccttagggatgtggcaaggtcatccttaaatgtaaagttcttgctcacttaatggaaagcactgtagatacataaataacattgttacctgtcttagtgggtcagtataaaagacgggggtggtggtatatgtgagaatagtgaaatttatagctagttttgaggcccttgtgacttttaagaggtattatgagtcactttaacaagttagtgtttgtgacatagtttcaatttcttatgtgaaagatagtatttcagttgtaaatgttctyttaatattctggagagctactctttcctagcccctctgttttactgactttaaaagttgtttacagtttgtttcatgttcaaatgtagggttttagtaattccttggggtggggggcaggaatgggcagaaggccattgtctctaattttccttttcccaactttcactttcttttttctatggattacatgtcaaggtgggtgagaaaaatggtggggattgagaaa

SEQ ID NO: 97559 - DNA, 578 bp, Homo sapiens
gtcattcaaactaagtttgaatgagaattaagtttaatggctcacttgctaaacctgagttgcacaatcctcacaattccttagggatgtggcaaggtcatccttaaatgtaaagttcttgctcacttaatggaaagcactgtagatacataaataacattgttacctgtcttagtgggtcagtataaaagacgggggtggtggtatatgtgagaatagtgaaatttatagctagttttgaggcccttgtgacttttaagaggtattatgagtcactttaacaagttagtgtttgtgacatagtttcaatttcttatgtgaaagatagtatttcagttgtaaatgttcttttaatattctggagagctactctttcctagcccctctgttttactgactttaaaagttgtttacagtttgtttcatgttcaaatgtagggttttagtaattccttggggtggkgggcaggaatgggcagaaggccattgtctctaattttccttttcccaactttcactttcttttttctatggattacatgtcaaggtgggtgagaaaaatggtggggattgagaaa

SEQ ID NO: 97560 - DNA, 176 bp, Homo sapiens
tctgttatctctttgctgatattcctactttttaatattttttctgattcctttatttctttgattatgttttccttttgacatttgagtataatgaagagagttgttttaaagtctttgtctaktaagtttgatgtctgggtttccttagggatattttctgtcaatttattttg

SEQ ID NO: 97561 - DNA, 592 bp, Homo sapiens
gcttttgcaggtgtaaattaaggagcttgaaacagggagatggtcttagattaatcaactgggacttaaatgcaaactcaagtgtcctaawaaaaacaagaggtagagagacatttagcatagactgaagtggagaaggcagtgtgaacacagagacagagattgcagtgatgtgtccacatcccgggagagagaagccaccagaagctggaagagctaaatcagactgctccctagagcttcagaaggagccagaactgatgactccaagatcttagcccagtgaaactgatctggacttctgaactatgagagattccattcctgttgtttgaagctaccacatttttgagaacttgttacagtagcccgaggacactaacacaaatgggctccaggaaaatccagactaaaggtgttgtgttggtttgcaatctccttgcttaactttctgatactagacgtaaatagattggtgaaaaattttgtgattgaagaaatgtacatgaaacctacagtgtacagagaagcatctgttagttataagataaatactgataattttagttgaaaatgacatatgactgttaat

SEQ ID NO: 97562 - DNA, 614 bp, Homo sapiens
ttgctcttaggaaatatacacagaggtagttagggacaaactagcaaatgatttaggggaaaaagtgatacctacagagagagcaaacacaataaagcaaatatagcaaaacattttcaattggtgaatctgggtaaagggtatacaagattcttgcaactcctctattagtttgagatcattttagataaaatatttttggctgggcatggtgactcacgcctataatcacggcactttgagaggctatagcaggaggtctgcttgagcccaggagttccagaccagccctggcaacagggtgagaccctgtctctctaaaaaattaaaaatttgtctgtgtggactggagtatatctgtattcccagccacttgggaggctgaagtggraggatcacttgtgcccagaaggttggcaccacaatgaacaatgactgtgccactgcactacagcctgggcaacagagcaagaccctgtctcaaaaaaaaaatttaaacctcccacattccctgttacatgtaagataaaagtttgaactccttggttaggctctctgtgatctgactcttgccccctctaccattatcggtcatcaactgagaggaggaccac

SEQ ID NO: 97563 - DNA, 551 bp, Homo sapiens
catcaacaattcaaatgaataaataagtaaacacacaacttgacatgggtaaaaatagcactgaaacaggcaggactaacgatgccaatatacaggtgtcaagccaacctccccattgtggtcaaacctcaaacaccattgcatagaatctaatatatcagaattatttagcccaaatagattggtagtatgtgtgtgcaatcaawttgaaaagtgtacatttttacctatttaatgtgtttatttctagtgttatttgtaatttttgtttttaagatatattattcaatttttaaagcattaaaacctgccagtaagatgtttcaaacatttatgccatgtataattttggcttcaaaaattaaaaaaaaaacacatttatttttggtgctttaatagaaatgaataaattagcatgtctttacctattatgttgttatatctttagtgttaatttgatgtttgaaatttaaaaattaatatcttccaaaataatttatccattaaactatgtatataattttttgaaatgaccagaatataagaaaaaa

SEQ ID NO: 97564 - DNA, 580 bp, Homo sapiens
tgaggttttcaatacactcaaaattgagtgcacattgtaatgcttgctgaattgcaacaagatgtcttcaccgttaattttgggagcagcaatatgtagctccaaatcaagtgggtgagcaaaataaaaactggaagaaattgattagctctcgcttttctttatttcccaggtgacaacattcatcgctttgctgctgtacttaacccagcaaaaacgcatctgatctcttaaaaaaatgcctgcctttatgttgtgagatagtcaggaattgaaatttgattaaccctctgctgaaccagaatgattagaaagcttttcaatttgaatccagtgttgtacagggattctactaaggtgtagatgatttcgtaaagaayaccaaggcctcattttgtagcatatcttgctggaacccagatatgaggtcatcttggatttcatctgaggaaataaaggggcatttcacaattgataacatcctagattttctagcattcttatctccataaaattctttcataatcattattttgttttacacataaaataaatagggcaaagtttgttttatccattt

SEQ ID NO: 97565 - DNA, 580 bp, Homo sapiens
tgaggttttcaatacactcaaaattgagtgcacattgtaatgcttgctgaattgcaacaagatgtcttcaccgttaattttgggagcagcaatatgtagctccaaatcaagtgggtgagcaaaataaaaactggaagaaattgattagctctcgcttttctttatttcccaggtgacaacattcatcgctttgctgctgtacttaacccagcaaaaacgcatctgatctcttaaaaaaatgcctgcctttatgttgtgagatagtcaggaattgaaatttgattaaccctctgctgaaccagaatgattagaaagcttttcaatttgaatccagtgttgtacagggattctactaaggtgtagatgatttcgtaaagaacrccaaggcctcattttgtagcatatcttgctggaacccagatatgaggtcatcttggatttcatctgaggaaataaaggggcatttcacaattgataacatcctagattttctagcattcttatctccataaaattctttcataatcattattttgttttacacataaaataaatagggcaaagtttgttttatccattt

SEQ ID NO: 97566 - DNA, 515 bp, Homo sapiens
taggtatttcttttttgagacagagtctcgytctgttgcccaggctggagtgcagtcacatgatctccactcactacaacctccgcctcccaggttcaagtgatccttctgcctcagcctcccaagtaactggaactacaggtgcatgccaccacgcccggctaattttttgtatctttagtagagacggggtttcaccatgttagccaggatgttctcgaactcctgagctcaggcagtctgcccgccttggcctcccaacgtgctgggattgcaggtgtaagccaccatgcccggcctaggtatttatagcagtgtgagaatgaactaatacagctactattattaatacattacattttctactctaaccaattgcagataagtaaaaattaggataacctttttatgaaatgtaaataattttttttattttaacatggttttcagtcataccatatcccttaagcatatttccatatttttaaatacttttactagctaaaaaaaaaaaa

SEQ ID NO: 97567 - DNA, 645 bp, Homo sapiens
ctagttattagttctagaagtgcagctttgtgatacactgctgtggtttaaatattaaagggratgactccacatcttgtggctgattaggacttctaagacagtagcactgatttcagcattcctctggttaattggcaccccttttattggccagccatggtgtaaaacttgagctgggaaatactgagagatccagacaccaaccttaagtgtctttcctccttttcaaattggcgttgcattatttccccaatcaccttaccctcccacaaaatcctctattttatctctgaaaagtcgatgactattaacatttttttttgtgaatgcatggactgaccctttttaagattcctttttctcatttgtattaagagtcttacatataaatatgcttaagggattatggtatgctatgtgtttcatttactttgttgacaaaagctataatgcacttctgttctatggtatgtcatggtagtgagaattccaagacaaaagcaaaagtggcaacatgtcgaggaagaactaacatgacattcccaggactcagtttaggaataggaagtaagcagagaattgtttttcagtacaatattaataatacacaaataaattaccctaggaaaatggagaaaaagt

SEQ ID NO: 97568 - DNA, 616 bp, Homo sapiens
ttagctctcattttgtagttttaatgaaacagagtagaggcatctcagacttctccatcagtcttggcttctacagtcactcccatgaatttttctcctattttycagctacagccttccagaaaattcatatcaaccctttcacatttatttaagctctaatttttaattaattccctgattctgctaaaatctgtcgtggttctgtattgctcaacaaaaccaaattgacaaaggctttgaactctgctctttgaggagttaaaagcaaaatagcactacttgaaagaaattaaaggagtcatgaaatcatatttaatttaaaaatagtgactagtgtagtggattaaatactgccccctcccaaaattcatatccatctggaaccacagcatatgatcttatttggatatagtgtctttgcatatgttaacagttaaggatctcaagataaaatcgacctaggtttatggtgactggtgttcttaaaagaaaaggagagggcacagaggctcacaaagaaaagatgatttgaagatgattgaagtaatgcagctgcaaactcagggacactaaggattgctgagagccaacagcagtagaaaaaagcaaggca

SEQ ID NO: 97569 - DNA, 616 bp, Homo sapiens
ttagctctcattttgtagttttaatgaaacagagtagaggcatctcagacttctccatcagtcttggcttctacagtcactcccatgaatttttctcctatttttcagctacagccttccagaaaattcatatcaaccctttcacatttatttaagctctaatttttaattaattccctgattctgctaaaatctgtmgtggttctgtattgctcaacaaaaccaaattgacaaaggctttgaactctgctctttgaggagttaaaagcaaaatagcactacttgaaagaaattaaaggagtcatgaaatcatatttaatttaaaaatagtgactagtgtagtggattaaatactgccccctcccaaaattcatatccatctggaaccacagcatatgatcttatttggatatagtgtctttgcatatgttaacagttaaggatctcaagataaaatcgacctaggtttatggtgactggtgttcttaaaagaaaaggagagggcacagaggctcacaaagaaaagatgatttgaagatgattgaagtaatgcagctgcaaactcagggacactaaggattgctgagagccaacagcagtagaaaaaagcaaggca

SEQ ID NO: 97570 - DNA, 616 bp, Homo sapiens
ttagctctcattttgtagttttaatgaaacagagtagaggcatctcagacttctccatcagtcttggcttctacagtcactcccatgaatttttctcctatttttcagctacagccttccagaaaattcatatcaaccctttcacatttatttaagctctaatttttaattaattccctgattctgctaaaatctgtcgtggttctgtattgctcaacaaaaccaaattgacaaaggctttgaactctgctctttgaggagttaaaagcaaaatagcactacttgaaagaaattaaaggagtcatgaaatcatatttaatttaaaaatagtgactagtgtagtggattaaatactgccccctcccaaaattcatatccatctggaaccacagcatatgatcttatttggatatagtgtctttgcatatgttaayagttaaggatctcaagataaaatcgacctaggtttatggtgactggtgttcttaaaagaaaaggagagggcacagaggctcacaaagaaaagatgatttgaagatgattgaagtaatgcagctgcaaactcagggacactaaggattgctgagagccaacagcagtagaaaaaagcaaggca

SEQ ID NO: 97571 - DNA, 583 bp, Homo sapiens
tttagtcttcagaactgtgagcaaatacatgtctgttatgttaaggcaccagatttatggtaatttgttacagcaatcctaggaaatagtgcagccattttgaaacaaagcttgtcagaaagaatttcataccaatacatgttttcctcttcctatccctcgtgcatcatacaacacagagtatggaataaatatttgataatgtgaattctagaactctcatattgtgaaaataatacaaagtttatcatgtcktcacgatgtgttatacaaaggattttgaaaatgaaagcaatcttttcatatcacattgccctaatgtataatacaccacagatccaagtatgtccactaaaacaggaattggtaaagtacaacctggggggaaaattgaaccacctgctattttttattttttgtaaataaagtttgttggaacacaggcacacctactctgaaaaagttgaatggctgtggaagagatggaatggcccacaaaactgaaaataattatgatcttgctctttgtagaaaggaaatttccaactcttgtattgaactataattgaatattaaaaaaaaa

SEQ ID NO: 97572 - DNA, 583 bp, Homo sapiens
tttagtcttcagaactgtgagcaaatacatgtctgttatgttaaggcaccagatttatggtaatttgttacagcaatcctaggaaatagtgcagccattttgaaacaaagcttgtcagaaagaatttcataccaatacatgttttcctcttcctatccctcgtgcatcatacaacacagagtatggaataaatatttgataatgtgaattctagaactctcatattgtgaaaataatacaaagtttatcatgtcttcamgatgtgttatacaaaggattttgaaaatgaaagcaatcttttcatatcacattgccctaatgtataatacaccacagatccaagtatgtccactaaaacaggaattggtaaagtacaacctggggggaaaattgaaccacctgctattttttattttttgtaaataaagtttgttggaacacaggcacacctactctgaaaaagttgaatggctgtggaagagatggaatggcccacaaaactgaaaataattatgatcttgctctttgtagaaaggaaatttccaactcttgtattgaactataattgaatattaaaaaaaaa

SEQ ID NO: 97573 - DNA, 553 bp, Homo sapiens
tgttacagcaatcctaggaaatagtgcagccattttgaaacaaagcttgtcagaaagaatttcataccaatacatgttttcctcttcctatccctcgtgcatcatacaacacagagtatggaataaatatttgataatgtgaattctagaactctcatattgtgaaaataatacaaagtttatcatgtcttcacgatgtgttatacaaaggattttgaaaatgaaagcmatcttttcatatcacattgccctaatgtataatacaccacagatccaagtatgtccactaaaacaggaattggtaaagtacaacctggggggaaaattgaaccacctgctattttttattttttgtaaataaagtttgttggaacacaggcacacctactctgaaaaagttgaatggctgtggaagagatggaatggcccacaaaactgaaaataattatgatcttgctctttgtagaaaggaaatttccaactcttgtattgaactataattgaatattaaaaaaaaacatttcattatccatggtttgtgtgaaaatacctg

SEQ ID NO: 97574 - DNA, 547 bp, Homo sapiens
ctatcaaaccatacatttttaaagcctgtttaaaaaaaaatactacaaggcaaataaatgtgaattacattttacatatatgctacaggcagtgatacattaaataagagtaatacaacagagagctttacaaatagtttggaatttaaaaactagatgtagtagagcatatcctaaaaggaaattagtttcaaatggctgagaaagggcaaaagaacactgaaatgtacttgtctaactagagcagaagtaaatttacaagaggaagtgaattttataactaggggaaagctaaaggtttataagggtttaagtagtaagtagattactcaggtcatgggttgtcaactttttgacatcaatggacaaacatatatgtactctaatctatttgtctaaacattttcctggaaggggatgtgtttgccaatcgaataaaacaaattatttacccacatacctgaatatgtcttgtaattttttttaaaacaaaaataatattaacatagcttcaartttccttttctctctctgtgtttcaaaagaa

SEQ ID NO: 97575 - DNA, 654 bp, Homo sapiens
aattacttcaaaaaaatttatgaacaagtacgaattataaatagtctgcttgtaaagaattcaatgaatcaatgtacgatcaatagagtcctgtaaaaactttctttccgtatttccagcatcaacagtagagatgactaagagaaaaacaactcttagtttcagagccaaaggaaagtatgtctcggcctacctgtgagtcaatctaactatctatctacacacatacatacatatgtatacacatacctgtattatgcatttggaaaaaaatatgatatttttaagcaggagtctttttgttccaatttgggttcatattttatgaatttgttaaatattttattaatatgttaaatgcatttatataccgctctcaataaattaatccatgttggtaatctctttgcttctttcaaaatatatccccccatcaaatgtctatagacactaatgagagaagaatagaaggataatgatagaaggatagatgaaatggaataatttaatttcttaatatcacaaagcccaaatgcactttttttctaaatcatttyttaaatccactttaagtccctatttcaggtaataactgcttatatcaaaagataggaatctgtaatttaagatataaaagtgaaagcctcaaaaata

SEQ ID NO: 97576 - DNA, 671 bp, Homo sapiens
aaaacaaatctttttttgataaataatcatcttgctttcagcatctaaaacttattaccagaaacataccttctgccagacaaatggcattatttcttatccgaatgcctaagggtatgataggcattttgattgttattattttttattgtgtttatttctggaattttctactttgaagttaccatccttgtcgttagctagaagctacaatataaattttgcattcaagtctctgtgttttctcctttgcatgcaaatattatactgttttcaaatgataatataatcagttcacatttttattggaaagactaaaatattaacactttgttctctttgaagacgatgatctaagttttatgtagtaawcatttcaattaaattattggttcaaagatactattttaaattttgatgtaacatacttgacaatgcttttatcagattaatgaagcgtagctttgcttttcaaattttattttgatacatgggctcatacctttggtccaattcattgataattgtgtttaagaatagaaacagttccaaattttggatttatatttaagatgaatataaacatgcttagattgttccagtacattcgatatctttaacttaaaattagatataaaagttgctctattcctgttgatgctcctaaaatt

SEQ ID NO: 97577 - DNA, 671 bp, Homo sapiens
aaaacaaatctttttttgataaataatcatcttgctttcagcatctaaaacttattaccagaaacataccttctgccagacaaatggcattatttcttatccgaatgcctaagggtatgataggcattttgattgttattattttttattgtgtttatttctggaattttctactttgaagttaccatccttgtcgttagctagaagctacaatataaattttgcattcaagtctctgtgttttctcctttgcatgcaaatattatactgttttcaaatgataatataatcagttcacatttttattggaaagactaaaatattaacactttgttctctttgaagacgatgatctaagttttatgtagtaatcatttcaattaaattattggttcaaagatactattttaaattttgatgtaacatacttgacaatgcttttatcagattaatgaagcgtagctttgcttttcaaattttattttgatacatgggctcatacctttggtccaattcattgataattgtgtttaagaatagaaacagttccaaattttggatttatatttaagatgaatataaacatgcttagattgttccagtacattcratatctttaacttaaaattagatataaaagttgctctattcctgttgatgctcctaaaatt

SEQ ID NO: 97578 - DNA, 531 bp, Homo sapiens
cccctcttttcaaaattatagttttccaacattcttatgttctgaagaacttttctgcattaacaacrtacctatacttgaagtgtgataaaatacaatgaaaagatgtcaggtttttgttttttggtttttttaaaaaaaaataagagcctgaaatcacttctcttcctttttaatctttttaaacattcttctttaactagaggtggaatggtaagaaggccatctcacatgttttcttctcttcatttcttgacagtctgtgtgaccttgtacaagacacctcagctagctggtgctgaactttccttatcttttaaatacaggcattggactatattttttgaagtccctttcaggacaaatgttttgtgattcacaattcaagttttgcacataaatgccatttaaatgtcattggttagatcaccaaaagtctaataattgtataatcaggaatagatcaaataccattacaataaggttcctcaaagattgaaaaagtcctctttacaggaatgaaatcaaaag

SEQ ID NO: 97579 - DNA, 592 bp, Homo sapiens
aacaagaaaaaaaaaacaaagcacacatatcaggaattaatgaggggcatcaccacacggaaacagataatgagagaatattatgaacaaatttatagcaataaatctgtcaaactagatgaaagggatacattcacaaaaaaaacacaaattaccaaaatgtatgaaaaacaatgaaaatttgtatctataatttaaaacctttccacaaaagcccagaaggctttacaaatgaatgcctcccaacatttaaggaagaaacaacaccaagcttaaacatactccctyatggaataaaaaaaaaagtaaaaatactttccaatttatgttatgaggctaggataatcctgacactgaaacctaagaaggatattacaagaaaataaattacacatcattattcctcataaacaaagatacaaaaattctaaccaaaatattagtaaatgaaatgcagcaatatataaagagatgacacaacatgatcaagaggtatttattccagtgatgcaagataggtttaacaaccaaaagtcaatcaacatggcataagtaagacaaaatctgtgagttttggtgtatcaaaattaag

SEQ ID NO: 97580 - DNA, 440 bp, Homo sapiens
aattgggtttcactaatatctgattttccctttcaaatgaaatgcttgatgtggtagcaacaaaatgatcatactaaatcaccggtggactataacctggcaaaataactacgtctctatattttgtataactagcccataccaggattcatggcttagaatgaaagcataaatgtaggaattcagtggctgggattcctatttccttttgtcaagagayacttacaagatgaccaaaaactacctaatcctccttggcttcatttcaaaaatagccactgttagctctcaagaataaccacccatgaacatcctactaaaacgtccacaaaataatctcggtagatggagaagttttaaagggtgggaatagaatgcttatcatcttggagcacaggtgcctgtgattttagatctgttaaactacagaccccactaaa

SEQ ID NO: 97581 - DNA, 634 bp, Homo sapiens
tctgtaattcaaagccattcttcatgtatcccaaattgtagcctctgccttccatcttactggctgctggatgtgtcaatgatcaccagatccccgtgatagaaacctctgggaaattccaatctcaccaaactagactatagggaattacagctaatgacatttccacttgcactgacatggataaatgaccttaaacaaatcaatctgtgcgtcgctagtgtcccctctcccagaaaagtataaccaattactacaatctactgatcagactctaggtaattctaaatttgaattcagcaacctttctagggtgatgggccaaataattgccacttataagagaccagtagagatctaaatgcataacccaactaatgtaagttggttatatccctgtttcatgaacaactcrtttattcctggtggccctacaggatactacttactttgcggccagatcgctttgccttgtttacctcagactaacaactcatgtactttaggaatagtattctgacgcttatctgaacatagagatcccaattctataaatcttcatggctggaaattccaacacagatcagagcttcaaaatgaggtgcacccttgattatttaggcactctaggaaa

SEQ ID NO: 97582 - DNA, 409 bp, Homo sapiens
aattgcttctgctgcacatcctttgaactctgttctcatatcacatcagctgttggggtttagggaaataaaaagaacacagaaggttcccaaccttgaaatgtaataaaaattgyaggagtagatcatttttgctgtctcttcctactctcgaatattgtgtaaaccattctcttaaagcagaactccaagaacagaacgttttggatttagattggtcagcaaatctttaactagagaaggaaaatgaaatatagatgtcttgaattgcaattgtgttcagaatagagcactccttacaatttttttggaccaaaagattgtttaagtgttctgaactggtggaaaatgattttagagagagagagagatgccttctattctcctacccccatagctattagaattc

SEQ ID NO: 97583 - DNA, 551 bp, Homo sapiens
catacaaatcccttgggaatcttactaaaatgtaaattctaatacagtagtctggagtggtgctgagattctgcatttctaaatgctttcaggtgatgctgctgcttctggtatgaggaccacactttaaggagttgagacatagaccgcatgtgatgctagatgtgtaagaaaaggggaactcggaccattctgaagtgttcttcagagggggacgatacgtgtgagcctaaagctgatacgattttgatagatggagaagacaaaatataatatgatttgggatcttttatggaaacacatttgctaacttgataatactaaggacagtaatgtggttattaagacacaaaaacagagtatatatttcctggattaaacagcaggcacaccatgccagaaagccatggctgttaggattacctgctcttayatacttattttttgtcttaatgcctaaaaagaaatagacaaagtaaaagtacatttgtacctcagagcagaatagcaagttacaataactcaaccaggatttggatatattttcatga

SEQ ID NO: 97584 - DNA, 579 bp, Homo sapiens
tattgatcaaagtgcttggcaaagctcttcttccctaagcgttgtataaataatcactatgtactgacatcctcaaggcaaataaagcatatcaaatattaatcttaaaatcaatttgttggaaactagtgatttatttattgaatagagcatggattgaatggacatttataaatagtctctatcagaaatagaacaggactaaatactatttacataaaacattttgaaattcacccactaaaagcatattagtctcccctctgaaccctctccaccactacaccaaaggcaaagcttcagtagtgccctattaaggatctttcaattttatatattaagggacatttggctatcagtttctgatagtctttatcatgttaaggaagatttttgcctgtagttaagctgtttaataagtcagagaagtaacgagacagcatagtggtaaaaagcttagactctggggtcgatcagtacagattagaattgaagctctgaaaatttctagctttgtagtcttgagkcagttactttaacctctcttagcttcagtgtccagcaggtgtcaaaacgagt

SEQ ID NO: 97585 - DNA, 608 bp, Homo sapiens
taactcaacgaatactccaataatgcactaaagtaatgcattcyctacgtatgtattttcctgaaacatactagacattattagcttcggcttacaactaaacacaaatattagggcaattttcaccaatggcaaatggagaattactctctgtcagattactactactactaaggaaacatgccaaaatattaaaggccagtatctttcgaatgaaggtacatagccaaggcacaaggtacagtgtacttttgctttgcaaaaacacaagtgattcctgctggctcatgagatggtatgagagaattataactggatagatacataataattgtgctaatccaagttatataataataacattatgaaggaagcagtgttgttcattatcccattgcaaaccactactataaattcagcctctgtggtgcatcacttcctgtgcaaacaaacactgataatacaacaagctggaaattcttcaaaactagcagattgatagcacaaattactcagcgaaagagaaagccttcagcagcttcagaagtgcttgctacataagcatgattaagtgtttctgtacaaaaccacaaatcacaataatgaat

SEQ ID NO: 97586 - DNA, 594 bp, Homo sapiens
atgtgtgtatactcattgtctctaatttctctcctaccaagttttcttaaactctcactacaccaaaaatatttttgtcaagtttacaaatgatttgcacattactaaaagccaaatggtaaattctcagtccttgatttgatctttcagtagcatctgataatattcagtacttgctaaatattttgtctacagacatggttttgttattatcattcagttagaaatctttgtgttatggtttgaatgtttgttctctccaaaacttacactgaatgttaatctcgaatgtaacattattgaaaggttgggcttttcagaagtgattaggtcatgagractctgccctcataaagaaattaattctctcatagattaatcaattaacaatttatcatgggtgtgggttagttatcatgagagtgggtctgagagtcggtctgtcataaacagccagtttaggctgtcaccctttccctcttgtcctgtgatgcttttgtccatgttagggtacagcatgaggccctccacagcagctgaccagatgtagctgcctgatgtttgacttcccggtctttagaactgtaaaaaata

SEQ ID NO: 97587 - DNA, 594 bp, Homo sapiens
atgtgtgtatactcattgtctctaatttctctcctaccaagttttcttaaactctcactacaccaaaaatatttttgtcaagtttacaaatgatttgcacattactaaaagccaaatggtaaattctcagtccttgatttgatctttcagtagcatctgataatattcagtacttgctaaatattttgtctacagacatggttttgttattatcattcagttagaaatctttgtgttatggtttgaatgtttgttctctccaaaacttacactgaatgttaatctcgaatgtaacattattgaaaggttgggcttttcagaagtgattaggtcatgaggactctkccctcataaagaaattaattctctcatagattaatcaattaacaatttatcatgggtgtgggttagttatcatgagagtgggtctgagagtcggtctgtcataaacagccagtttaggctgtcaccctttccctcttgtcctgtgatgcttttgtccatgttagggtacagcatgaggccctccacagcagctgaccagatgtagctgcctgatgtttgacttcccggtctttagaactgtaaaaaata

SEQ ID NO: 97588 - DNA, 541 bp, Homo sapiens
cacaagagatcaataactagaatgtataaggaattcaagcaactctatagatagaaatctaataatttgatcaaaamatgagaaaaggtctgaatagacatttgccaaatgaagacatacaaatggcaaacaggcatataaaaatatgctcaatatcattcatcatcacagaaatgcaaatcaaaactataatgagatatcatctcaccccagttaaaatggcttttatccaaaagataggtaataacaaatgctggtgaggatgtagagaaaaggaaacccccgtacactgttggtgggaatgtaaattactataaccactatggagaacagttgggaggttcctcaaaaaactaaaaattgagctaccatttgatccagcaatcccgctgctaggtacatacccaaaagaaaggaaatcagtatatagaagagatatctccactctcatgtttactgcgtcactattcacaatcgccaacatttggaagcaatctaagtgtacatcaacagatgaatggataaagaaaatgtggtaaat

SEQ ID NO: 97589 - DNA, 513 bp, Homo sapiens
aaaattattctagttacaagcaaaccctagatacatatcagtcaaccgaatgctaaaacggaaggaaagaaacctaygaaaatgataaagaatgtactctacccctacagatgtattagctgtttatattttgtcactaaaccagtagacctgtgggatttcaaagcctcccattatttgctaacacagttagttgcctgttaactgacttgtccagagtcacacagttgtctatttattaatatatttatgactaaaatctaggtttctctatcgcacacattattaccgagacctgtgtggctgtctttatatcactacagatgaatatactttactcctcacttaaataattatgtgttaagtatctgggacctaaggcttaaattaatataatttatattctgttttatataagccttaataacaggcaaaatccctctaagtttagtgaagccccatagtctagagtaattttttatgatcatctggaaattccagtattttttgtgt

SEQ ID NO: 97590 - DNA, 513 bp, Homo sapiens
aaaattattctagttacaagcaaaccctagatacatatcagtcaaccgaatgctaaaacggaaggaaagaaacctacgaaaatgataaagaatgtactctacccctacagatgtattagctgtttatattttgtcactaaaccagtagacctgtgggatttcaaagcctcccattatttgctracacagttagttgcctgttaactgacttgtccagagtcacacagttgtctatttattaatatatttatgactaaaatctaggtttctctatcgcacacattattaccgagacctgtgtggctgtctttatatcactacagatgaatatactttactcctcacttaaataattatgtgttaagtatctgggacctaaggcttaaattaatataatttatattctgttttatataagccttaataacaggcaaaatccctctaagtttagtgaagccccatagtctagagtaattttttatgatcatctggaaattccagtattttttgtgt

SEQ ID NO: 97591 - DNA, 552 bp, Homo sapiens
gacctgttatttcaacaaacaacagtactaggaggcagttacagtaacttaattataataactaaaatattatgcagtctaaacaactgtggaataaatcaaacaaacaaaaaggatttccgttctgtggcctattagatcaagaagttaatatttattactttgctctttttttaataaacaaaaataagttgtatggarcaaatctgtctataaattaacatgcatttggggtttgtagttaatcatggcttgttttgttgtaatgaatttcctatcaatatacataaatgtacattttgcattatggtttaatgacacagtcattagaagaagaaaattgctaaccaaatcagctaatgaaaatggtagattatgtgcaaaaccactcagattatactataatattttaaaacgtgtagattttgaggattttatttaataaatattttagcttaactattgtttaattatggaacatattgtattttattaataatttgcgtacagcttcaaattgattttatgttaatacagcattgaaagaatgaa

SEQ ID NO: 97592 - DNA, 552 bp, Homo sapiens
gacctgttatttcaacaaacaacagtactaggaggcagttacagtaacttaattataataactaaaatattatgcagtctaaacaactgtggaataaatcaaacaaacaaaaaggatttccgttctgtggcctattagatcaagaagttaatatttattactttgctctttttttaataaacaaaaataagttgtatggaacaaatctgtctataaattaacatgcatttggggtttgtagttaatcatggcttgttttgttgtaatgaatttcctatcaatatacataaatgtacattttgcattatggtttaatgacacagtcattagaagaagaaaattgctaaccaaatsagctaatgaaaatggtagattatgtgcaaaaccactcagattatactataatattttaaaacgtgtagattttgaggattttatttaataaatattttagcttaactattgtttaattatggaacatattgtattttattaataatttgcgtacagcttcaaattgattttatgttaatacagcattgaaagaatgaa

SEQ ID NO: 97593 - DNA, 552 bp, Homo sapiens
gacctgttatttcaacaaacaacagtactaggaggcagttacagtaacttaattataataactaaaatattatgcagtctaaacaactgtggaataaatcaaacaaacaaaaaggatttccgttctgtggcctattagatcaagaagttaatatttattactttgctctttttttaataaacaaaaataagttgtatggaacaaatctgtctataaattaacatgcatttggggtttgtagttaatcatggcttgttttgttgtaatgaatttcctatcaatatacataaatgtacattttgcattatggtttaatgacacagtcattagaagaagaaaattgctaaccaaatcagctaatgaaaatggtagattatgtgcaaaaccactcagattatactataatattttaaaacgtgtagattttgaggattttatttaataaatattttagcttaactattgtttaattatggaacatattgtattttattaataatttrcgtacagcttcaaattgattttatgttaatacagcattgaaagaatgaa

SEQ ID NO: 97594 - DNA, 565 bp, Homo sapiens
gaacacatctcaagaatatttagaggattataatggtattcatcacccaataaattaagaattacagtatcgcaatgttgagcatccaatgaactgatacctagcttgaaagaaacaggaaaattcgaaaccttaagtggggataaaatcaatcaaaattaaaattcacctagaattaattcagttgttagaattttcacttaaaggcattaaaagttattaaaatcattttcaacatgtgcaaatagttaggcacagagaagatttaaatgtacaaataaaactcttggagrttaaaactacagtgtgtgagatgacaactaaattaatagactcaaatgcatgttagacactgcagaagaaaatggcaatgaacttgaagacataataaatactactcaaaatgaaaagtgcacacgaacaacatagaaaatgaacatattattgattagctataagcaatatcctataaatatatgtgcaaaatagttcctgaaggaataaggggaacataaaatatttagagaaataatggttacgatttttccaaagtaaatacaaattt

SEQ ID NO: 97595 - DNA, 565 bp, Homo sapiens
gaacacatctcaagaatatttagaggattataatggtattcatcacccaataaattaagaattacagtatcgcaatgttgagcatccaatgaactgatacctagcttgaaagaaacaggaaaattcgaaaccttaagtggggataaaatcaatcaaaattaaaattcacctagaattaattcagttgttagaattttcacttaaaggcattaaaagttattaaaatcattttcaacatgtgcaaatagttaggcacagagaagatttaaatgtacaaataaaactcttggaggttaaaactacagtgtgtgagatgacaactaaattaatagactcaaatgcatgttagacactgcagaagaaaatggcaatgaacttgaagacataataaatactactcaaaatgaaaagtgcacacgaacaacatagaaaatgaacatattattgattagctataagcaatatcctataaatatatgtgcaaaatagttcctgaaggaataargggaacataaaatatttagagaaataatggttacgatttttccaaagtaaatacaaattt

SEQ ID NO: 97596 - DNA, 551 bp, Homo sapiens
gcattaatattacattagttttataatatattgactgtcttcagtgtgctttgccttttgtgaggtgttaaagaaaaaaaattaagtaatacaacactgttccaactttggaaatgggtcaagtagagaaacagcaaagatayacaaacgtgtaaacgcacaaattcacaaacaccaaagttagaaaataatttaaaagcaaaattcagaaagtgaaagatgaaaagtagaccattggagttacaattagaataaaatcataaaaatgagttgaagaatatcaaataattattcttttcaacttaaaaaatacattatagatatggtttttgggtctatcaaaaaaagaaggttaggctggtatttgaggtatcccagtaaagacaagaaaaaatagttaatgaagcaccaaattacttattttttttacacatagaatcagaaaaaagcaacaaaatataaatgaatttgataccaagagcagttctagaggaatagagcttaaggatgaattttctgaattggggtttttgaaactggctatctaatct

SEQ ID NO: 97597 - DNA, 622 bp, Homo sapiens
ttaaactgtattgaacaggctttaatactgagttattatgaaacaaacrcctcattttatttaccaggaaattagataagaaatgtcaaacaggtagcttgtcttctagcatgatttgtatcaatgcattttatctgaaatgagcaaaactccttcctgtgtattgtatattttcattatggtgttgatttttctaacattttaaaatcttgtttctaaacaacacaaccccactgttaataaggatattgtgcaaaagatagtaaattcagtaggtttaatattctttatgattagtgctgcccagttttgctcctaagataaacttaaatctagtcatttgatgccaaacatcaataagatgatattcagataggtacagctgaagtatacaattcatgcagtaaaggagattactaaattactaagggaagcaggtagatacgtataagttagacccagtcttccttgtatatatttcatttagtgatatgtgaagagaacgtagtaatccatgctgtcagtcatatatctaaatttactaatgtgatgtatataaagccatcaaaaatgctttaaatgacagaaaatacttcccatatggaacacagataattccttc

SEQ ID NO: 97598 - DNA, 622 bp, Homo sapiens
ttaaactgtattgaacaggctttaatactgagttattatgaaacaaacgcctcattttatttaccaggaaattagataagaaatgtcaaacaggtagcttgtcttctagcatgatttgtatcaatgcattttatctgaaatgagcaaaactccttcctgtgtattgtatattttcattatggtgttgatttttctaacattttaaaatcttgtttctaaacaacacaaccccactgttaataaggatattgtgcaaaagatagtaaattcaktaggtttaatattctttatgattagtgctgcccagttttgctcctaagataaacttaaatctagtcatttgatgccaaacatcaataagatgatattcagataggtacagctgaagtatacaattcatgcagtaaaggagattactaaattactaagggaagcaggtagatacgtataagttagacccagtcttccttgtatatatttcatttagtgatatgtgaagagaacgtagtaatccatgctgtcagtcatatatctaaatttactaatgtgatgtatataaagccatcaaaaatgctttaaatgacagaaaatacttcccatatggaacacagataattccttc

SEQ ID NO: 97599 - DNA, 533 bp, Homo sapiens
caagtggcacaaaggttttggcatcaaaaaagacaccacttgaaaaagtcacagagtaagttgggtcccaggaaagatatggatatcaattatgtcaggaaatcagaatctcaaggagatgctagtactgcaatgtttatcacagcactattcacagtagtaaagatatggaaacttgtctacagactgatgaatgaataaggaaaatatgatgtatacataaaacacaataatattcatccttaaaatgagagaaaatacmacaattgtgcaataacatgaatgaaacttaaggacactattttgagaaaaataagccagtcacagaacaacaaatattgcatgattccatatatatgatatatctaaaatagtcaaactcatagaattatagagtagaattgtggtggagaggtggaaatggggatgtgctaatcaagggacataaaaatcgcaatttagaaacaaaataaaaagaatgagagtgtaatattagacaaaagattgaggatccagggcatttggccagaagg

SEQ ID NO: 97600 - DNA, 614 bp, Homo sapiens
attctgcctactttcttccccccataagaaccaattactgcagctttattgagactgaaaaaagttaatacacctccttctttgctgaaccaaggaatggcttggaactcttgggaaaagacaatcttttctatgatctttcattgtctaatttaatacatcataaatatgactatagctttgtataataaactccccaatactgtgccagatgttttctaagataaagttattttatgttcacaaaaaaaataaaacttttctctgggccaaatgtatgccaactttgcaaatcatatcctgaagtgcactgctgcagagtacatgcttgcgtcataaattccatagagttcgctttaactctaaatcaatccccagtttcaaagtaaacctctcaaacatattacctaagcacaaacttctccctgtgctcagttccttaattattctcatcccatattcagaaataacatttaaaaattatgctttgatcaataaatactaatctaaactttgcttcattaayccattcatttttgtcaaccattattttattcctatattcaaagctctctggtatgttcttatattcaagacactcaaggccctggaag

SEQ ID NO: 97601 - DNA, 573 bp, Homo sapiens
  misc_feature (1)...(573): n = A,T,C or G
tcgccgcagcctaaaggaagacgcagaattcagctcccctagctcntcggacgctctagcgccccgggcccagcgggaggggcggggtccgccgcgattggctgtcggagggagaggcgggcctgtgtggcggggatcgtgctgtaatggagcaggggcggcggggacccggaggtgagggctgcgagggycgcccgggagggtccgggctgggaaaagggcctccgccggagagtgcagctggaaaaggaggtcacactgggaaacggctgtctgaggacagtgggtgggcgggccgaggaaatggaattcaggaataaaggaaacggagtatgaagaaggggaagtctgtttcctgtcactggttgtaaaggaagacaccattttctgcacgtttgtctggaggcggattcccgcagtgcggctctcagcaaggctctgccggcgcgggaaaaagcggtcaactttcacgtgggcaagttgttttacggccacaaggtggcgcagaaaaaaaaaatcacacgttcttaacagaaatacggtgcgcttgggcccgtctttgcaggcgttgct

SEQ ID NO: 97602 - DNA, 609 bp, Homo sapiens
gactggattggaacaattttgggtcataaagatgctgtctggaatgcaacactraataaggatgccaccaaagcagccacagcagctgcagatttcacaaagtgtgggatgctatcccaggagatgaactgatgaccctggctcataaacacattatcaagactatggatttcatgcaggatagtaattatttgttaaccaggggacagaataaactgttttgcatatatgacttgaacaaacccgaagcagaacctgaggaaattagtgatcacagctctgatattaaaaaggccctatggtacagtgaggataaacagattctttcttctgatgacaaaactgttaagactttgggatcatgctactatgacagaagtgaaatctctaaattttattatgttggctagtagtatggaatatatttctgagggagagattttggtaataacttatggctgatccagtgcttttgacagtacagtaagtttggaaccaattaaatcctttcaagctcctgcaaacattaactctgaatctcttcaccttgagaaagaatttcttgttgcaggtggtgaagatgttaaacttataagtatgatgataata

SEQ ID NO: 97603 - DNA, 609 bp, Homo sapiens
gactggattggaacaattttgggtcataaagatgctgtctggaatgcaacactgaataaggatgccaccaaagcagccacagcagctgcagatttcacaaagtgtgggatgctatcccaggagatgaactgatgaccctggctcataaacacattatcaagactatggatttcatgcaggatagtaattatttgttaaccaggggacagaataaactgttttgcatatatgacttgaacaaacccgaagcagaacctgaggaaattagtgatcacagctctgatattaaaaaggccctatggtacagtgaggataaacagattctttcttctgatgacaaaactgttaagactttgggatcatgctactatgacagaagtgaaatctctaaattttattatgttggctagtagtatggaatatattyctgagggagagattttggtaataacttatggctgatccagtgcttttgacagtacagtaagtttggaaccaattaaatcctttcaagctcctgcaaacattaactctgaatctcttcaccttgagaaagaatttcttgttgcaggtggtgaagatgttaaacttataagtatgatgataata

SEQ ID NO: 97604 - DNA, 513 bp, Homo sapiens
ggaccttacttaatggatgaatctggattctatagggctggatacactatagtgtctttaactgaagaaacaggaagtgcctatcttccaaaagccacttcacctcaacaagtggaattaataatattaaataggtcctgtcaattggcagaaaaatatattcactagtatttatacagacagtagatatgtttttggagtagcccatgattttgaagtgttatggaaacaaagaggattctcaatctcttcaggtcaatccataaaaaaaagacatcttatttcacaactactaaaagtcatattattgccaaaatcattggccattattaaaattccgggtcattccaaaaaagatactccagaatgcagaggaaattagtgatctaataaggtcacaaagagtgctactcaaaaygcatctaaacaggaaaatctacctgtattaacttttaaggaagcacttgaaattgatataaaattaatccagagtcccaaaatcagcacaaaaag

SEQ ID NO: 97605 - DNA, 563 bp, Homo sapiens
tcagaagaatcattttggtggctatagccttatgcaatgtatttcttaaataatataatttaaaagccaaaattactccctgatctgtgggcagctgaatggatgttatgttagcaggcatgaaaatgacatttctctccttgtacatctccatcagagctcttgggtgaccaggtgcattgtcaatgagcagtaataatttgaaaggattctttttgagcagtaggtctcaacagtgggcttaaaatattcagtaaaccactctgtaaatagatatgttatcatctagcctttgtagttctatttatagagcacaggcagaatagattcagtataattcttaagggcttaggatttttttaaatggtaaaggagcattagcttaaacttaaagttaccagctgtattagctcgtaacaagagtatacctgttttttgaagctttgaagccaagcatggacttctcctctmtagctaggaaagtcctagatggcatcttcttccaatagaaggctgtcttgtctacattgaaaatttgttgtttagtgtagccaccttcatca

SEQ ID NO: 97606 - DNA, 595 bp, Homo sapiens
acaaatgaaaatgaaaacacaacatactaaatcctaaagatggcaaaaaagtagcactaaaaggcaagtttatagcaataaatacttatatttagaaagaagaaagctctttacctcttcacaacctaacattgtacaaaggaattagaaaaagaactaactaaacccaaagttagcaaaagagcaaaaataaatcaaatgagaaattttttaaaaatatattttaaaaaatcaacaagaattaggtttttttgaaagataaaattaatcaaacacttagtctaagaaaacacagaagactcaaataaaatcaggaaacatttcaatagatgtctcagaagtagaaaggatcataaggaactattatgaacagttctatgcccaacaaactggataacwtagaagaaatgaataaattcctagacacatacaatctactcaaacttaatcaagaagaagcagaaagcctgaacaaaccaataacaagtaaggaaattgaatcagtaatcaaaaaccttccaacaaagaaaagtctaggatgtgatggcttcacggatgaattctaacaaacattcaaagaagaattaataacaat

SEQ ID NO: 97607 - DNA, 550 bp, Homo sapiens
cagtacacatatatttatagttctatactgagcaatattgttttctatcacatactaaatatagccatttcagtccatcagtgtaattatttaacttgaagacaagcgccattgttttaatcattttagaaaccaattatccttattatctcacatttcataatcatatttcaatacttttattgttaatgcagttactattacagatgttcaaagtacatatatatrcatatgaaattatagataagaaattatatatttaatatattacataaaatacatattttacatatatatgtattattacacaccacatgaaaaaagacacaagaagactaaaagaaagtagtgaaatgttaacaatgggaatagaattatgggctagtttagaattctttctacttctctaaagtttccaaatgtcttgttatattacttttataattggaagaataaacataattatatattttaacatattcatgcctgttaaccatgaagtcctgactaaaataagtaaagcaatggcaattttggagcacatgtttca

SEQ ID NO: 97608 - DNA, 521 bp, Homo sapiens
tctacaaaaaatgcaagaattagcagggcatggtggcacatgcttgtagtcccagctgcttgggaggctgaagtgggaggatcgcttgagcctggtagatggagattgcagtgaactgagattgtgccactgcactccagcctgggtgacagagcagagcaagaccatgtctaaaaaaaaaaaaaaaaagaaaagaagaaaagaaaaaaaatcaaaattaktattccacatggtttccatggctcaggaattcatgagtgacttggctgggtggttctggctcagagtgtcttataaaggtgcagtgaagatgtcactggggccgtattcatctgaaagcctgactggggctggaggatccagttcccacatggctcaggtaatgctgtcaagctggggctggctattggcaggaggcctcagcccctcaccacatggccctctccatagggctgcttgagtgttttcacgacatggtcactggcttcccccagagcaagtgatccaagagaccaaggctg

SEQ ID NO: 97609 - DNA, 547 bp, Homo sapiens
agattaaagaccatagttggggttcattgtcattgacagctaacaccctgtaaatgttcaaaagtaaaaataacaggaagaaaaaataagaaagagctctatagaagtcacatagagtaataagattacagaaaatcagaatgtcagcactttctaatgggaagtgaaagacagataaggaactaactatttcaagaaattaaaaaaaaaaaraaagaaggaaattaagagaggccccatgaaaatgatggctgtattcattgacttaaataacattttctctggacctttgaggggaaaaaacataattatttttaggtaaagcacgttttgcaatttctttgccctggctgcatatttagtacattttcaggccatcaacaggattacagagcccagaaagtccaatcagaggcaggaaggaggcttagctactattggagaatgtgattctatggctcatgctggcaccaatatcagggagaataccccaaaataccacaagtgtaacatatctgggcagcaatatcctgttttttaaaaaatt

SEQ ID NO: 97610 - DNA, 627 bp, Homo sapiens
agcggcacatctggggaaatgtcctggaaaaaccaagggagccaacattcatagaattgaatacccgtgtacagagcgctgcacagaaagggaacttcaaagatctgaagagagttcctttaagaattcaattgagtacttaccagtgcgtacaggtgaggaaactccccaaggtcagggaaagaaagcactagagggaactgtgctggggccaatgcctgctccatcagattggaacagctcaaaattcataaagcattagctagagtaccaaggaggatcttgccccagtcagggagaaaagttgaccctagactaaccattgctttgttccagcctaataaagattaaaagcaagaaccaaaaggagcacattgtttctgtgtaatttaacctcatcccagaacaaagttcaacaatatttttaaaggtcgggcatggcggctcatgcctrtaatcctagcactttgagaagccaaagcggatgatcacttgagctcaggagttcgagaccagcctgggcaacatagtgagactttgtctctaaaaaaaaaaaaaaaaaaagaaagacagaaatattattaggaatgaaaatatatccagcacccaacactaataaaattcata

SEQ ID NO: 97611 - DNA, 643 bp, Homo sapiens
ggactgtgaggcttgaagggaggggtcagctgctgtagcgttgggccttattaatggggtactggatgtggccagggtgccctctttccctctgctgaggtgccctggggacagctgattaaggagcctggcacagtgtcagtagtgatttatggactgccgagaagcttctgccttgagagctaggctgctgcattattcatggtggtaagtcataaatctgctgctggagctagctgctggctcggccatggaggatgaagactgagggaagggtggtgggggaagagcagcagctgccaggacaggagaggtgttyggcaggcaggatgggttctgaacaggaatctgacgcttgctctttaggtctggtgtgtggccccatgaatcatcttgtccactcccttgcatttcagtggtgagattctaggtcttcccttggttactcaggtccagcaaccttcctcttgtctaacctggctacctttaatcatggctgaaggccacggttcctgccagaatgccagaggaatttcttaacaggacttaaaaatatcagatcacatttctttagagcaaattatctgcctaaagtcctgccatctggcaatgagggcccctatgagctagtcttactttttgc

SEQ ID NO: 97612 - DNA, 643 bp, Homo sapiens
ggactgtgaggcttgaagggaggggtcagctgctgtagcgttgggccttattaatggggtactggatgtggccagggtgccctctttccctctgctgaggtgccctggggacagctgattaaggagcctggcacagtgtcagtagtgatttatggactgccgagaagcttctgccttgagagctaggctgctgcattattcatggtggtaagtcataaatctgctgctggagctagctgctggctcggccatggaggatgaagactgagggaagggtggtgggggaagagcagcagctgccaggacaggagaggtgtttggcaggcaggatgggttctgaacaggaatctgacgcttgctctttagstctggtgtgtggccccatgaatcatcttgtccactcccttgcatttcagtggtgagattctaggtcttcccttggttactcaggtccagcaaccttcctcttgtctaacctggctacctttaatcatggctgaaggccacggttcctgccagaatgccagaggaatttcttaacaggacttaaaaatatcagatcacatttctttagagcaaattatctgcctaaagtcctgccatctggcaatgagggcccctatgagctagtcttactttttgc

SEQ ID NO: 97613 - DNA, 603 bp, Homo sapiens
ctgtttatgaacttaaattatgcaatttggaaattatatgatacaaatatttcaatagtttggctttatgtacaaaatgtgtaatagtaggaaacctaaatttaaaaaaaawgaccgacaatcatgtaatttaaaaggtggtgaaattgtatctatggtttcctaacacgggatagccatcattttttctctaaaatggtgttatatgttttgaattatagaagattttcaggaacgcatatcttatataattgtataagatgcaactgtcttgtatgcattcgtaaaactgggctcaacacattttctggaggggattctttgatcattttgtacttcttcaatcaatttggtagctgagatgtcatcagatactgcctgttaacactggtataaatttgtacatattactataatgaaagctttgtatctattctgttttcatcttcattcttaattttatgtatttatgttattttccttttttattaggcttcatatcgtttcatctattttatagttgttttccatccaaagaaccagctctttaaaaattctgctgatattataatagattagtttctttaatttctacattcaagt

SEQ ID NO: 97614 - DNA, 603 bp, Homo sapiens
ctgtttatgaacttaaattatgcaatttggaaattatatgatacaaatatttcaatagtttggctttatgtacaaaatgtgtaatagtaggaaacctaaatttaaaaaaaatgaccgacaatcatgtaatttaaaaggtggtgaaattgtatctatggtttcctaacaygggatagccatcattttttctctaaaatggtgttatatgttttgaattatagaagattttcaggaacgcatatcttatataattgtataagatgcaactgtcttgtatgcattcgtaaaactgggctcaacacattttctggaggggattctttgatcattttgtacttcttcaatcaatttggtagctgagatgtcatcagatactgcctgttaacactggtataaatttgtacatattactataatgaaagctttgtatctattctgttttcatcttcattcttaattttatgtatttatgttattttccttttttattaggcttcatatcgtttcatctattttatagttgttttccatccaaagaaccagctctttaaaaattctgctgatattataatagattagtttctttaatttctacattcaagt

SEQ ID NO: 97615 - DNA, 602 bp, Homo sapiens
gtgaaaaaaaggcggacaatattgagggaggggagcatgcrgaggagcctgggcgaacctgaaggctgctgtgggaagtggagctggactggcagccaaggcccagccgcactccctagataaacatttgcacgctgagctggaagtcatgtacaaagaccttcacagcaagtgtggtttttgatagcaaaggctgtaaacaacctattgtcctttaggagcagaaagaataattaagctaaggcattaacatacagcagtcccccctcaccccaagtttccatggtttcagttacccctggccaactgtggtcccaaaacaggtgctacagtacaataagatattctggcagggagaaaacacattcacacaacttttattacaatatagtgctataattgttctattttattattcattattgttcatctctcagtgtgcctaatttacaaactaaactttctcataggcatgtatacataggaaaaaataaatagtacatacagggtttggtactatctgaagtttcaggcaccttctgggggccctgtatcccctgcagataagggggggactacttacaggggaaaggcacatagta

SEQ ID NO: 97616 - DNA, 515 bp, Homo sapiens
  misc_feature (1)...(515): n = A,T,C or G
tccatgctagtgtttccttataaagaaaatacttcatataactaattattttttaagaaatagatattcaataaggtatctttaaacaaaaacacacaaaaaccaaagttgcatattgatcagtcaacagaaatgnntcggctgaagctcacgggaatcgaatcttgaatttcctcagaagcagtggctccatttgagttaattcagtgcttgtggcagccactgcaagcaagaactgcctggacaacacatgagtgatgctgyctcgcaccctccagaccagtccacctccagctgagttccactgagcaatatctatgggcacatgaggcacagaggagtcccctgaccgagccctgcctaaattcctgacttacagaatctgtgagatatgataaaatggttgctgttgaatccattaagctttggatcacctgagatgcagccataggtaatcagaatgtggtaccagaagtggtagctttgaacagatattctctcttttgttttgaggc

SEQ ID NO: 97617 - DNA, 638 bp, Homo sapiens
caagcataatcctttgtgggaaaaaatgtcattgctaatttaggaatcaatcctaatcctaatcagtcctttagccattttgaatacaggtaccttccagtttagcttttcagatgcagtttccatgaggaaactgacccagaattgaccaatagccctggaataacttctgtgtcatcagacgacaatgattaattttggaaatgtgttaccagatactyaatttactgcaagttcattttggaaatgagatatttaacaaaatatgctttaaatttgaccataataacacattcttgtcattctacagggattactataagcttaaatgatgtaataaatttaaaggtgcttcaaaacatttcagcactgatatgaacataatacattactatgaaggtcatttttatcttcatgattaatgtggtgtggtctcctgatacatcccacagaaaactgagaatctgaggaagtagaaaatggatatagttttgccatttattagcatgtggctcaggcaagtaatgtcactgttctgaggctccatttctatcaaaaacaaatgaggaccataatatctaccacatagggccaaaatcaatgagctaatgtacgaagaaagcctagagttccaaagg

SEQ ID NO: 97618 - DNA, 619 bp, Homo sapiens
aacgaattcagcaaagtctcaggttacaaagtcaatgtacacaaatcagtagcacttctatacaccaacaatgatcaagctgaaaataaaatgaagaactcaatcccttttacaataggtgcaaaaaataaaataaaatatctaagaatatatttaaccaagaaggtaaaaatctctataaggagaactacaaaacgttgctgaaagaagccatagatgactgaaacaaatggaaacacttcccatgctcattgattggaaaaatcaatattgtgaaaatgaccctactgcccaaagccatctagagattcaatgcaattctatcaaaataccaacatcatttttcatagaactagaaaaaaacaataatccttaaaattcatatgggaccaaaaaagagctcaagtaacaaargcaaatccttagcaaaaagaacaaatacagaggcatctcattaccaaatttcaagtaatactacaaggctgtagttaccaaaacagcatggtactggtataaaagtagacatatagaccaatgaacaagaatcgataacccagaaataaaactaaatacaaccaactgatgttcaacaaagcatacaataacataatttggggaa

SEQ ID NO: 97619 - DNA, 629 bp, Homo sapiens
tattatgagaatagcatgggaaaaacctccccccttgattcaattaccttccaccaggtcactcycacaacacatggggattatgagagctacaattcaagatgagatgtgggtggtgacagagccaaatcatatcataacctttactcagtttcctccaaaggttatatcttacagaattatagcacacaatcaaaacctgaatattgacattggtacaacaaatttgtatagttctataccatttccttacatgtataagttcaagtaaccatcactgcaaaaaagacacggaaatattccattaccacaaaggtctatcttgtgttcctctttgaagtcacaccttcctccctgcttaccattgtctctaagccctgacaaccactgatttcttttccatgttcataattttttcatttcacaaatggtatatgcatagaattatattgccttagtcagttggagcggctttaataaattactatagtctgggtgacttaaacagcaaacatttatttctcatggttctggagcctggaagtatgagatcagtatgccagcctaaacaggctctgatgagggccttctttctggctagagagaaatatttcaaatatctttctctt

SEQ ID NO: 97620 - DNA, 629 bp, Homo sapiens
tattatgagaatagcatgggaaaaacctccccccttgattcaattaccttccaccaggtcactctcacaacacatggggattatgagagctacaattcaagatgagatgtgggtgrtgacagagccaaatcatatcataacctttactcagtttcctccaaaggttatatcttacagaattatagcacacaatcaaaacctgaatattgacattggtacaacaaatttgtatagttctataccatttccttacatgtataagttcaagtaaccatcactgcaaaaaagacacggaaatattccattaccacaaaggtctatcttgtgttcctctttgaagtcacaccttcctccctgcttaccattgtctctaagccctgacaaccactgatttcttttccatgttcataattttttcatttcacaaatggtatatgcatagaattatattgccttagtcagttggagcggctttaataaattactatagtctgggtgacttaaacagcaaacatttatttctcatggttctggagcctggaagtatgagatcagtatgccagcctaaacaggctctgatgagggccttctttctggctagagagaaatatttcaaatatctttctctt

SEQ ID NO: 97621 - DNA, 629 bp, Homo sapiens
tattatgagaatagcatgggaaaaacctccccccttgattcaattaccttccaccaggtcactctcacaacacatggggattatgagagctacaattcaagatgagatgtgggtggtgacagagccaaatcatatcataacctttactcagtttcctccaaaggttatatcttacagaattatagcacacaatcaaaacctgaatattgacattggtacaacaaatttgtatagttctataccatttccttacatgtataagttcaagtaaccatcactgcaaaaaagacacggaaatattccattaccacaaaggtctatcttgtgttcctctttgaagtcacaccttcctccctgcttaccattgtcyctaagccctgacaaccactgatttcttttccatgttcataattttttcatttcacaaatggtatatgcatagaattatattgccttagtcagttggagcggctttaataaattactatagtctgggtgacttaaacagcaaacatttatttctcatggttctggagcctggaagtatgagatcagtatgccagcctaaacaggctctgatgagggccttctttctggctagagagaaatatttcaaatatctttctctt

SEQ ID NO: 97622 - DNA, 629 bp, Homo sapiens
tattatgagaatagcatgggaaaaacctccccccttgattcaattaccttccaccaggtcactctcacaacacatggggattatgagagctacaattcaagatgagatgtgggtggtgacagagccaaatcatatcataacctttactcagtttcctccaaaggttatatcttacagaattatagcacacaatcaaaacctgaatattgacattggtacaacaaatttgtatagttctataccatttccttacatgtataagttcaagtaaccatcactgcaaaaaagacacggaaatattccattaccacaaaggtctatcttgtgttcctctttgaagtcacaccttcctccctgcttaccattgtctctaagccctgacaaccactratttcttttccatgttcataattttttcatttcacaaatggtatatgcatagaattatattgccttagtcagttggagcggctttaataaattactatagtctgggtgacttaaacagcaaacatttatttctcatggttctggagcctggaagtatgagatcagtatgccagcctaaacaggctctgatgagggccttctttctggctagagagaaatatttcaaatatctttctctt

SEQ ID NO: 97623 - DNA, 581 bp, Homo sapiens
tatactacctcaagcagtcttttgattcaaaacaattcctatcaaaatcccaatggcattattcaaaggaatactaaaaataatcctaaaattaatatggaatcacaaacaccctgaataaccaaagcaatcttgagaaaaagaaaaaaaaaaaagcttgaggcatcacacttcctgagttcaaattgtattgcaaagctataattgaaacaacgtgatactggcataaaaacagacacatagaccagtggaacagaagagacactccagaaataaacccatgcatrcactatcaactaatctttgacaaatgtaccaagaacacataaatgggaaagaatagtcttttcaataaatggtgctgggaaaactaataatttccatgcaaaagagtaaaattggacctgtatcttacatcatacaaaaaaatcaactaaaaattgaataaaaacttaaatgtcagacatgaaaccataaaactatttgaagaaaacataaagagctgcttgaaattggtcttggcaaaaattttttggatatgatgccaaaagcacaggcaaaaaaaaacaattttttaaaca

SEQ ID NO: 97624 - DNA, 581 bp, Homo sapiens
tatactacctcaagcagtcttttgattcaaaacaattcctatcaaaatcccaatggcattattcaaaggaatactaaaaataatcctaaaattaatatggaatcacaaacaccctgaataaccaaagcaatcttgagaaaaagaaaaaaaaaaaagcttgaggcatcacacttcctgagttcaaattgtattgcaaagctataattgaaacaacgtgatactggcataaaaacagacacatagaccagtggaacagaagagacactccagaaataaacccatgcatgcactatcaactaatctttgacaaatgtaccaagaayacataaatgggaaagaatagtcttttcaataaatggtgctgggaaaactaataatttccatgcaaaagagtaaaattggacctgtatcttacatcatacaaaaaaatcaactaaaaattgaataaaaacttaaatgtcagacatgaaaccataaaactatttgaagaaaacataaagagctgcttgaaattggtcttggcaaaaattttttggatatgatgccaaaagcacaggcaaaaaaaaacaattttttaaaca

SEQ ID NO: 97625 - DNA, 560 bp, Homo sapiens
attgggaaaatacaaaatgagccaggaagatcttgtagtgccrgaaactaagatggtgctaaaaattgaaagaatgggtcatgtcaaaataacacaggaaccaaacttaaaaagctcttgatggctgaaagttgaagaaattcgagaaacaaaataagtaaagtagtactggattctagcccaaagtataaaataaatatgagtccatactgatataaataaatatttgggtaaaaaatgaggaaaaaagatatgtttccctatatagagaaagtctaaataatttatgtagatacttctctcttcagagaggcagaaattaaccgtacgcttcttgagagtagaccatacttagaaattttcttgcaaacagtacatcatggaaaggagagaaaaaaagaataactatacagtggagaaacttgacagaagtacctcatccaggcaatcaaggttaacattaacagtggtttggcatgttgattgcatgcaatctttccatgatgtgatgaatatgaaatttttgtggtcttcctactaaatacccataaaacaaatat

SEQ ID NO: 97626 - DNA, 560 bp, Homo sapiens
attgggaaaatacaaaatgagccaggaagatcttgtagtgccagaaactaagatggtgctaaaaattgaaagaatgggtcatgtcaaaataacacaggaaccaaacttaaaaagctcttgatggctgaaagttgaagaaattcgagaaacaaaataagtaaagtagtactggrttctagcccaaagtataaaataaatatgagtccatactgatataaataaatatttgggtaaaaaatgaggaaaaaagatatgtttccctatatagagaaagtctaaataatttatgtagatacttctctcttcagagaggcagaaattaaccgtacgcttcttgagagtagaccatacttagaaattttcttgcaaacagtacatcatggaaaggagagaaaaaaagaataactatacagtggagaaacttgacagaagtacctcatccaggcaatcaaggttaacattaacagtggtttggcatgttgattgcatgcaatctttccatgatgtgatgaatatgaaatttttgtggtcttcctactaaatacccataaaacaaatat

SEQ ID NO: 97627 - DNA, 560 bp, Homo sapiens
attgggaaaatacaaaatgagccaggaagatcttgtagtgccagaaactaagatggtgctaaaaattgaaagaatgggtcatgtcaaaataacacaggaaccaaacttaaaaagctcttgatggctgaaagttgaagaaattcgagaaacaaaataagtaaagtagtactggattctagcccaaagtataaaataaatatgagtccatactgatataaataaatatttgggtaaaaaatgaggaaaaaagatatgtttccctatatagagaaagtctaaataatttatgtagatacttctctcttcagagaggcagaaattaaccgtacrcttcttgagagtagaccatacttagaaattttcttgcaaacagtacatcatggaaaggagagaaaaaaagaataactatacagtggagaaacttgacagaagtacctcatccaggcaatcaaggttaacattaacagtggtttggcatgttgattgcatgcaatctttccatgatgtgatgaatatgaaatttttgtggtcttcctactaaatacccataaaacaaatat

SEQ ID NO: 97628 - DNA, 560 bp, Homo sapiens
attgggaaaatacaaaatgagccaggaagatcttgtagtgccagaaactaagatggtgctaaaaattgaaagaatgggtcatgtcaaaataacacaggaaccaaacttaaaaagctcttgatggctgaaagttgaagaaattcgagaaacaaaataagtaaagtagtactggattctagcccaaagtataaaataaatatgagtccatactgatataaataaatatttgggtaaaaaatgaggaaaaaagatatgtttccctatatagagaaagtctaaataatttatgtagatacttctctcttcagagaggcagaaattaaccgtacgcttcttgagagtagaccatacttagaaattttcttgcaaacagtacatcatggaaaggagagaaaaaaagaataactatacagtggagaaacttgacagaagtacctcatccaggcaatcaaggttaacattaacagtggtttgrcatgttgattgcatgcaatctttccatgatgtgatgaatatgaaatttttgtggtcttcctactaaatacccataaaacaaatat

SEQ ID NO: 97629 - DNA, 193 bp, Homo sapiens
gttgttaatttggaacgttccactgtaaatgatctttattaagattttgtcatttctgtaagactttgctccttccagggcctaacacttgtccatgtataagccraaagaagctcagttcttcagaaattaaggatcccatttttacctaaaatactggctttgctctcaggttccgttgatcaacttagcc

SEQ ID NO: 97630 - DNA, 618 bp, Homo sapiens
cactgtaaatgatctttattaagattttgtcatttctgtaagactttgctccttccagggcctaacacttgtccatgtataagccaaaagaagctcagttcttcagaaattaaggatcccatttttacctaaaatactggctttgctctcaggttccgttgatcaacttagccagcaattttttccaacctaagcatgcatgaaaagygaaacaaaagggtagaacacaaaaatccctgcgaatttccaaaagccaaattttataccccctgcaatactactatttactacctgtttctttctgacccagtcagatgtaaaaggcctctaactggatccaagccagttagttaccggatctaatctaatcaagggcccagttcagtttctgtcgtgactgctggacccagtttggatcagaaaattgttcaaagaaacttggagagcttaaaacaaaaattcatggagctttgggatccaagagagaacttaccacaatccccagctgctctgagatctcgagcgatgggcacaacaggtggttgagtacattgcttggtcactcagcgctcctggaggtcgttagaagctctactttggatctcacttctgatgcca

SEQ ID NO: 97631 - DNA, 457 bp, Homo sapiens
tttgctttcctttatccatgcagtgaatcttcctgtcaacataaacaggaatgctgatgaccatttcaggaatagcartggtagcaatgaaagatatccccactggagctccaattaatgcacacagctgccaagtaattttcttacagcttcttgccccagaatctgaagccagaaggtttttgaaaatatggcagaaatctttattaaaatgtttccttcagtaatatgttaccacgtacataatatacacacatacctatgtacattctttgacatacctcaaagattgctaccattagtttaaccaataaattaaaactaaaaaaaaaaataggaaggggagaaaggagagggaatcagggcaaaattttgatgttttatctagtaagaaattgcaaatatctcagaatttctctgagggaaacctataagcagagaatctttaagataaaat

SEQ ID NO: 97632 - DNA, 457 bp, Homo sapiens
tttgctttcctttatccatgcagtgaatcttcctgtcaacataaacaggaatgctgatgaccatttcaggaatagcagtggtagcaatgaaagatatccccactggagctccaattaatgcrcacagctgccaagtaattttcttacagcttcttgccccagaatctgaagccagaaggtttttgaaaatatggcagaaatctttattaaaatgtttccttcagtaatatgttaccacgtacataatatacacacatacctatgtacattctttgacatacctcaaagattgctaccattagtttaaccaataaattaaaactaaaaaaaaaaataggaaggggagaaaggagagggaatcagggcaaaattttgatgttttatctagtaagaaattgcaaatatctcagaatttctctgagggaaacctataagcagagaatctttaagataaaat

SEQ ID NO: 97633 - DNA, 457 bp, Homo sapiens
tttgctttcctttatccatgcagtgaatcttcctgtcaacataaacaggaatgctgatgaccatttcaggaatagcagtggtagcaatgaaagatatccccactggagctccaattaatgcacacagctgccaagtaattttcttacagcttcttgccccagaatctgaagccagaaggtttttgaaaatatggcagaaatctttattaaaatgtttccttcagtaatatgttaccacrtacataatatacacacatacctatgtacattctttgacatacctcaaagattgctaccattagtttaaccaataaattaaaactaaaaaaaaaaataggaaggggagaaaggagagggaatcagggcaaaattttgatgttttatctagtaagaaattgcaaatatctcagaatttctctgagggaaacctataagcagagaatctttaagataaaat

SEQ ID NO: 97634 - DNA, 588 bp, Homo sapiens
gatgcattatcatttggagttgktatgaagcttatctttttggggtttccaattttaatttccatttgtggagcttagattttttttaatgtgccttatatttggcacattaacttaagacaggttaccaaatactgaccctgaaatagcctttccagtaagtctcatttttgtggaaaaggatcctgatcaataaaataaaacacatatgcctagaagttgtaaaactgcagctatgatttggagtcttaaaagcttcatgacattggtctgggcaatgattttttggctataatcccaatgtacaggtaccaaaagcaaaaatatgtaaatggggttgcatcagactaaaaagcttctgttcagcaaaatgaataattaacaaagtgggagatgtgatttctatattctgcttcacacccttatagaaagtagtcttggaatcatcgcatgcctttgttttcaaactccttgtcagtaatacctctatagctctctttttactacttcctgaaggaaaatgaccgttttttcatcttatgaataacatttccctttttatttataagaacacaaaatacttcttaa

SEQ ID NO: 97635 - DNA, 569 bp, Homo sapiens
aaacaaatgtatttgaaagtattttattcttatctttcatgcttttaattttataatttcacgttaygtctcttggtttcgttacaggaatcttctttcagttcactaattgtatcagtttatcactgctgcataacaaaccattctgaaactcagcagcttaaaacaatgagtatgtattactattgctcatgaaccaagtcagcaggctgatccttgtgatctcagttagattcacttaggtgtctgaaggaagctgtgggttggctttgcagattttggctggttttagccaaaatgtctggggtctcaactaagatgactcagctcttctctgggtactctctcctcaggctagcctaggcatattctcatggtggttatggggctgtgatagagcaggaccattgaggccaagtctcaagctcctatcaggtttcattattatttttgtgaaccctacatatgttgcctttgcaaacatcacttcattaaaaagtataaaaatcatgttttacaatggtattggtagaaagattaatatgatccaagctacacttattactgta

SEQ ID NO: 97636 - DNA, 605 bp, Homo sapiens
gtccaaaacctcttcatgagctcaccttctgccttcctaaatgttccaactgccttcttatgcttgaaattccacagctgtgtttcttttagtaagagtatttccattttaaaggggataacttagtgtgagtaaattttagaaagacaagataagggaaaaaagaagcataaatagtgaagaaggatactacatgaagaaagagaagactaccattaagcaggggagagagatgagaatagtattggaaggttgtgggggctgaaagactaaattcaccctcatgactctggagcagctcttttcctaagatacctatgagttaaaactcagaaatcttagtatatacacaatcccactttggcaaatgagctcaaagcctaatgaggaccatgaaacaagacttcatttttttggtgggatgaaggggtcatgggagaatccaaatgtcctccagaaagactagatatacttggtctctcgggttggttaamagtagggagcaactctgaaagagatgaagattctattccatgtggtagatgattgtgggaaatgtgtgactaatgcacacttcctgagccaaatcacatttgggcagctaa

SEQ ID NO: 97637 - DNA, 581 bp, Homo sapiens
catattctttaagaaaagagaaaatgggccgggcacagtggctcatgcctataatcccagcacttcgggaggccgaggcgggttgatcacttgaggtcaagagttcgagaccagcttagccaacatggcgaaaccccgtctctaccaaaaatacaaaaattagccaggcatggtggcaggcatctgtaatctcagctacttgggaggctgaggcaggagaagtggttgaacctgggaggcagaggttgcagtgagccaagagaaaatggatttaactttgagaagtggtagatgtcaaggttctctaaggagaaaagcgataaaattgctctgtgacctaaaaaaagaagccatatatacagaagaacagtaggatatttaacaaattggtgctttaattaataaaaccaatgcatatttacattttatcaggtatgagtgtatttgattctattcctcttttaccaatttatgaaacctaattgagttgttccagtgttagagagtaaagactgagtgamctacaactagaatttatttgcatacaaaaacatttttatggtcaaaaggatcagaaagag

SEQ ID NO: 97638 - DNA, 587 bp, Homo sapiens
atggaaggaatggtcaatgttagcaatgtgatctttcctttacaacttacagtggggtaaggacaattcgcatgtttgactataaaagcaagggcagtttcatgaccctaatccatttgggcatttctgctagtgtcctgggcccatctgtctccacacctgtgtatccagagatggtgctgactgtggcaattaccaacacatggagkttctttgatttttaataggaagagtcatttatttccccagaggttttctctttaaatgaaaacactccttccctgatttataggacataccactgttgtttattctgaagagtccatgactggaacaccagggaaggcttttgatttttgtattctttctttatacctgctctttggttttccttgggagggattctacaacagacttactaagcaagactctggaactctgctcccattttgtacccttctcacccaggcatcatgtttgcttagccgcgtccactcttggggacaagagagaatatggtggtagctcatgaggacaggtccagtttgcagccacagcctaagactcaactgaataaacacctgaat

SEQ ID NO: 97639 - DNA, 571 bp, Homo sapiens
acttttgtacaaaaaatgtttatatcaatgcaaacttttaaaaaataatatgtattttccaaaaacagtttggataccccttatattattggaaggcctcctcatacaatgaagtttgttgcagatttctctgccatcggctggtgatcaggcagattgttgttttcctcccccactcctctagaatattagggatgtttgctaaagaggaaatatattaccagttagaaattcttctttggctatccaataataaaacagttgcagtttgactttatrtgctttatgggggacatagagtatttgcttggcctagcaggcatgctaatgttattggaatgatggtcattggtttctacacactccatttggacagagaaactggagataaatggtcctgcctagtgacttacagtagaccttcaagtaggaaaggatgatcagagggaaggagcagacgggagtgctttgcagccttccctcattgcataggttgctgtagaagtggtagtcctggtgaaagaaagactctgccttggcttggtgagtacaggaagacaggaggcattgc

SEQ ID NO: 97640 - DNA, 608 bp, Homo sapiens
taataatttgcttaaacaagaatcatcaatggatgctaaaattaataggtgaaattttaatgctaagcagagtatttgcatagtctcaaagtttttccctacaaattacttttaattataaacayggaaatagtaattttaaagcagagaaacctgacaaactccacattaaccaagagatcaaagctaacatcaccaatattgagacaaaccagtatcatctaccttctgatactgattcactgaaaaagaaacagtatcactcttgtggtgtttttcaaaaaaaagaaaagaaaagaaaagaaaaacctaaatctaatcatgtggaaatctcagggatacacaaaatcaggagatgctctaaataacaactggcatatccttcaaaaatgtcaaggttatgaaagagacaggacggctgagaaactgatccagattaaagaaaaccacagaagcatgacaaataaatgcatggcatgactccagattggatcctggaccaggaaaaataatttgtctataaagggcattatcaggacaattaactaaatttacatttgactgtggattagataatgagtgggtcctgtgttaaacctaaacctatt

SEQ ID NO: 97641 - DNA, 535 bp, Homo sapiens
aatttcggtaaccagaagtaattgtttcaatacaatcttacctataccactcccagcacattgaaatactgtgtgtaggggaaagaaaaatcacaatgattgaatctgatatttctatatctgtagttagacacaggcaagtgttttatccagttctgtctctgcagtatctctaatgtgtgtttatctccatcatcaatgctgatccactaggtagagcaaggccacmatcatccctgtgtacttactgagatcagtttaggatcttcacagctggactttcctgaatctgccttgcattcaccactgcatccttcacagcacagttctatctctctataaatgcaaatcttaccttctcattcccctggtacaaattctttattggattttcattgtacattaaataaattagaagcccttggtgtggaatgagggcacaacaggtctcctgatcctaggcatgaaacctctgcagccccatctgtgttttcattctcctctcttccccataattacaactatcacctcctaa

SEQ ID NO: 97642 - DNA, 386 bp, Homo sapiens
gaattctgtccagacatccaccatatgtatgcattttagaatgacgttcataagaaaatacaattgaaattcaggagtggcctttgaaagagctaactttagttatctggaaaatgtacttctatggaagccttcacttcctgataacataaggcagaggaagtgtcatcataaaygcgaagacccagcacggcagtgggttcatgaagttcatcaggcagcaagtgtattgacagagctgtttccttgagcaagaaataccagcaaaaatgcacaaaaagtgaacatgtacaacaaaactgagggtttaattaaatggaaatcttttttgaccccatggacagaagattttcctaaaatatgatggacttttctgctttcattta

SEQ ID NO: 97643 - DNA, 574 bp, Homo sapiens
gctggggtaagaaaagtaataatccacatttcagccttgtcagcaggactgcttctatccccagtctcagtgtccaaggagtagatggaagggagaattccacgttgtcacagttgcctccacgggattactccgaggctacctggggtctttgcccaccwcctcagagtccccagacggagaggcgccttgccaccctgtcatctgggtcccctggtgaatggagcctggcgtcaggccttaatggggtaatgagttggaggcgtcggaaacaatgagttcagcttgttaaaaggacagggctggcaccatgaggacagagggaccacagctggagacagagaaatgggtctttgggggcctggtggtgcctctgtgggccccaagggggctgggtggctgggctaccactggccctgtgcctcttaaaacccattacttgctgcctttggcttgggagctgggagctgagcgtttcatcagtgcagattggacccagcggatcaatggctcagtctatgggcttttcctccccctcccctctgcctgtcccccttccttaactagatgtggg

SEQ ID NO: 97644 - DNA, 574 bp, Homo sapiens
gctggggtaagaaaagtaataatccacatttcagccttgtcagcaggactgcttctatccccagtctcagtgtccaaggagtagatggaagggagaattccacgttgtcacagttgcctccacgggattactccgaggctacctggggtctttgcccaccacctcagagtccccagacggagaggcgccttgccaccctgtcatctgggtcccctggtgaatggagcctggcgtcaggccttaatggggtaatgagttggaggcgtcggaaacaatgagttcagcttgttaaaaggacarggctggcaccatgaggacagagggaccacagctggagacagagaaatgggtctttgggggcctggtggtgcctctgtgggccccaagggggctgggtggctgggctaccactggccctgtgcctcttaaaacccattacttgctgcctttggcttgggagctgggagctgagcgtttcatcagtgcagattggacccagcggatcaatggctcagtctatgggcttttcctccccctcccctctgcctgtcccccttccttaactagatgtggg

SEQ ID NO: 97645 - DNA, 496 bp, Homo sapiens
ttccccttgaaaacagccttaaaaagagcaaaaccacagcaattttttgcaaaatgaaatttagccactacttgtttttaatgtagatatattttcaattttaataaaactcaaagcatccagaatgcattattaatatgtcatggcttcagctcctgggacaaaatgttttcagcccctccagagtttgcagtgcaaatcttgaataccggtgcaatcatcaggtgtagagagcaaagtgaaactgaccctcctgattataggttcacaccaactccacccaaaaatggccttgtgrcacctgatataactcacttttctaccactctaattaatgctttacttcctcacaatgctttctggaatcaggcttggggacagtatctgatcccagggatgcagtgagtaacatgagcagcaatgacattgacctcctatgactcatcatctacacaggtgtaacagggagggtcctttgtagactctcatcttacaa

SEQ ID NO: 97646 - DNA, 603 bp, Homo sapiens
tatattcctggcctcgagtcgatcaaagaacatataaaaccatccagtgaaacttttctggatttctaactgaataatccattctaattcactggtctttaatctctgagaatgagaagtagctgagtggtatcacatgatatatacaaaggtgttatcgaatttgatggcaggcgaaaactgttttgcctgcatgttctaatgaaacatggaagtttcaagtcagtgagataaattttaaggtttagattactagctgtgtggcccactctgtagagctaccaaagacaaagtgacagaaaaataaccctaataaacacttcttcgaaaggatggagttgaacaggatccttttggttggagaccttgtgattactgccaaattggttgtttataataggtaartgttgattgagcagagacaaagctggaatcttagcattgaatacccccagccttggcccaagtatgcaggaggtagagagttgggctatttggaaaagagacagataattaaatcttttagaggagaatgcttttgaatgcatatatgtaagttaagccataatttaaatgctcaaatcctaggcggctccagaattt

SEQ ID NO: 97647 - DNA, 573 bp, Homo sapiens
cacagcatcaccttcactgccctgctaaatctcattcttacctcggcaccctctggagactgatattttggtgctggctctcaggttttctgcctgccttgcttaaggtgggaagagtctttggaaagactcaacaactcaaaggaatcaaaggaagctacacccgtcactccaaagatggaaggaggacctcactatttgaggtagacagctaggatctgcccactgaggacagactcctggtacccttggatctggtcattgcaaagtggagtatttaatgattcaccacaggagcttctcatgctcaggcagctttgaggcaaaagactctaaaaatccccaagtaagggtaatatctcagaaacacaaagcactgcgttgcatatggtttatcacatgcagtatttgtaacccagagttcacagaaggagctctgcaagggaataaggtaaataaattgatgttatagagaaaaacgagcagaccatttgtaataggtggctaacttcagcattaattgctccttggtaattacygaatcattgctgattctgttttcttacatgatat

SEQ ID NO: 97648 - DNA, 598 bp, Homo sapiens
taactacaaggacacagtcaagcacatttggatacacctatagaaggggacgttatgcagccactgagggggtcagtgaagttttatgatgtgggggaataaatacgacataaggttaagtggaaaaacaacataatgttcaaatgactatgtattgaaagaagaaaacaatattgacaatactgcattaattgaactatgggaaatttttactgagtttattctttttaaaaacattttcatatgaggataaaaaattataatttttaaaaattacattaaaaatatcatggcagtccaattgccacttactacctcaggttctcttaacagaatgcagagctcataagtcttgcctgagaaacatccttcttccttgcctgggggtgcccacctgggcagccagacagccagcctctttctgttgtcacagagggctcccgttggcaagtgtgagccccacwcatgcattagacatggagtgctttgttggcatttggtgatgaggttgttagaaaccctaaggtaggctgagagcctgaggagcaaaagccattggaatttgagaagggatgacatactgttattataatatttt

SEQ ID NO: 97649 - DNA, 572 bp, Homo sapiens
catcatagcctatgaaaagaggaggtgctaaaataagtggcacaaaaaactgtggggactgaggaggctaatctgatttttcaggatactgaaactttttataacctttttataaccaagccactgcaaatgatcctcttccattcctagggcatggctggtaagaactagagcaccgtgtgagaagttaataagacgcccaatttatggagcacccactgggggctattgtatgttcattatccctacttctcacaacaaattaaatactatgaccccatttcaaaactaaggggactggggctcagggatttgtccaaaatcagttcatgctctttcytccatatcagcaactcagattagaagacattcttgaaaatcattaaaacaaatttctttcctttcctccctccctttactcctcatgtcatttctgaataatgactactattttattggacagttactgccctcctcccacctctctggctggtcgagagaattgaggcccttttgtgattaaggaaattctctatctgctcacagggacaagcccatgtttcttgctttac

SEQ ID NO: 97650 - DNA, 516 bp, Homo sapiens
gatcatgttgttctgcaagaccacacttgccggaggaacaactagagtgttcctggagataactgctggagtccaggatagcttccaagaagctgtctccatctacagtgagtaacagtgaaccaggactgtcatcagacagctaggagcaatctcactgcactcaatgcctcatttgctatgctcatgtgtccatttattcattcactcattcattcaagtatttctacctgctaaggcgctgtggaagatacaggcttcagcaatgtgtggcatggtccataatccatgggagaaacatacatacatacaaatgatagtggagccattgttctctctttccttcttcccccttctccccttccccccttcccaatgccctttccctctggaaaactgaaatatctattgtattggtaggtaattgattctcaattttcttccatgagttctaatgtcttttgctttttggttagtarcaagagtgaagacattcaatgagaaattttagaattc

SEQ ID NO: 97651 - DNA, 529 bp, Homo sapiens
gaccatcatgaacgattaaagctatccttaggatactgacctaaataatactaagacttacagcagcatactgtatgcgttcagaacacagaaaatgcaaaatgatttatcttctccctccccctccaaaagctaaattttaaagtaacaagccattaataggaataccaaaaggctatagatagtacatactgtaagagaagaaatcgtrttgtgctgagatgcaatgtttctttgttttactttgaggcttattttagctatgcttgcatgatgacattgacatcaggaggtcagtgctgacactgggttgatatccgttttatgagtgaaatgttttccgaaaattaaatctcatctactcaaacaccaaatttcatgtcatcttcaaaaccacctccctacccccactgctcaagattgatgggatctagtttggtggtatgtaataaattggaatcaccttctgcagatagttcaatatgtaatggtgaggaattaattttttaaataaaaaacattcaagaat

SEQ ID NO: 97652 - DNA, 336 bp, Homo sapiens
gagccaccacgcctggccctgcaaaattcttaatagcatagttaccaggaaactctcttgagatggagtcctgtgaatttggggggtgacatctttcctcttctcctttgactccactcttctcctaaaaagatgtggaaatacttccttttcttctgaaaggagcactaggattactcccaaaggtcctttataggtggctcaggctggagttctatgtggtggtaaaaacataaacaatgggaccagatggagggggtcctagttctggcccttcactcactagctctgtaaccttggcaaagttactcascttctctgggccttggtgttctt

SEQ ID NO: 97653 - DNA, 455 bp, Homo sapiens
gccccctgccaggagatctccacctgtgtggaaagtactggcctggttccagagctgcctcaaagagaactaagcccagcccctgctggaggctcctcaagcccctcagctgacctgctgacctgttctcatgtgtgcaaagataacagaggttagacgygatggaggaagtggctcccatggaggtggtcctgggggagggccattcacccttgatatcatcataccctttattccataaatggaacttgaaactccaaggcagatagtttcctgctaatagaaccttgattctgttcaggtgccatcatatgtccaactatatacccactcaccatcctcttgtgctgtagctaggggtggtcatgtgatcagtctctggctaatgagctggaaatagtcttctggaagtctttggaaagccttttgcttttatgataaatgaagagaagtgg

SEQ ID NO: 97654 - DNA, 530 bp, Homo sapiens
ccaggctggagtgcagagggactatctcagctmactgcagcctccgcctcccgggttcaagcgattctccagcctcagcctcctgagtacctgggattacaggcacacgccaccatgcccagctgatttttctatttttagcagagacggggtttcgccatgttggccaggctggtcttgaactcctgacctcagttgatccacttacttcagcctcccaaattgctgggattagaggtgtgagctaccgcaccccacctgaattttgtattttttgtagagatggagtttcaccatgttgcccaggctggtctcaaactcatgagctcaagtggtccgcccacctcagcctcccaaagtgctacaattacaggcatgagctaccacacccagcctttacattatgttttctaatagcctacttttcttatggtatcttaatgtaatttcgttgtatccttagtatcctttatcatgctttggttttacttatctgtctgattaggattttaagtgccccattatagcat

SEQ ID NO: 97655 - DNA, 574 bp, Homo sapiens
aaacatattttcatgcaatgattattttccccagaatccccagcaaacctatcttcatgcattattggctctgattaagtttaatgcccatctgtggcacagactaactcactgtttaccaaatcaagttatccttccttctgcagaagctagactgcatttcccaacctcccttgcagttagatttggccatgtgacaaaattctggctaataaatgtggrcagaagtgacatgatcctgatgctttctttcctttctggctgactggagtgaagatgactcccagggcatacttggaaccataaccacatgtttaagatgggtggatcaaccgaatagacggagcctgggtcccagaatcactgcatggaacagggtcattcaattgggatccattcatatgaataagaaataaacacctatgataataaagccatgcagattatggtgtttttcttgtaaaatagattaccaatgtgactagagggatgggatatatgaaaaccaattgggatccatctctgggactggaaaggagtgattagccaaaccacacagctgagaatggcaaag

SEQ ID NO: 97656 - DNA, 574 bp, Homo sapiens
aaacatattttcatgcaatgattattttccccagaatccccagcaaacctatcttcatgcattattggctctgattaagtttaatgcccatctgtggcacagactaactcactgtttaccaaatcaagttatccttccttctgcagaagctagactgcatttcccaacctcccttgcagttagatttggccatgtgacaaaattctggctaataaatgtgggcagaagtgacatgatyctgatgctttctttcctttctggctgactggagtgaagatgactcccagggcatacttggaaccataaccacatgtttaagatgggtggatcaaccgaatagacggagcctgggtcccagaatcactgcatggaacagggtcattcaattgggatccattcatatgaataagaaataaacacctatgataataaagccatgcagattatggtgtttttcttgtaaaatagattaccaatgtgactagagggatgggatatatgaaaaccaattgggatccatctctgggactggaaaggagtgattagccaaaccacacagctgagaatggcaaag

SEQ ID NO: 97657 - DNA, 298 bp, Homo sapiens
tccccagtggcccttgcagtgcagtgaatacaccacrataactcatggattacagtcctaaccttacccccaaattctgcccacttattaaatactgtcatcatatacatttctgttacattaggattagaaaaaagttctgtttggaaataactccaagaacagtttttatactttattttcacattgaagatcagtctgatttgcttcagcctcaaagagtgtgtttatgtaaaattaaatgagtactggcggcgagctgcaatttttttctaaacgagaaatgggttaagacagt

SEQ ID NO: 97658 - DNA, 570 bp, Homo sapiens
gatattctgattctaattcgtacattgttttcctctttgtccatgattacctttagctctttgagtatctttaacccatttcccatttgccgtgaaaatattccccagtggcccttgcagtgcagtgaatacaccacaataactcatggattacagtcctaaccttaccccmaaattctgcccacttattaaatactgtcatcatatacatttctgttacattaggattagaaaaaagttctgtttggaaataactccaagaacagtttttatactttattttcacattgaagatcagtctgatttgcttcagcctcaaagagtgtgtttatgtaaaattaaatgagtactggcggcgagctgcaatttttttctaaacgagaaatgggttaagacagtcattctaaagtctttgtctatgaagtccactatctgggcttcctcaagaacatttcttattgatttcttttattcctttgaatgagccatactttattgtttctttgtatgccttgtgattttttttgtagaaactggacatttgaattttacattgtgataattctggaa

SEQ ID NO: 97659 - DNA, 567 bp, Homo sapiens
ttgacagatcacaataagaagggtgagtacagtacaataaaatagttttagaacgagaccacattcacatagcttgtattacaacttattgttataattgttctcttttattatgaattattgttgtggatctcttactgtgcctaatttataagttaaactttatcatagatatatatgtatatgtacagaaaaaaatatagtatatatagarttcagtactattcatggttttaggcatccactggggatcttgggatgtatcccctgcagacaaggcaggactactgtaactactaacaactctaattttcttgagggtttggtgtgcatgtggattgaaggttagtttcctggatagcatgttcattagagttatagtcttcaggcctgcctgagttgtacctgcattgacatatcagatgaactggactttcttcttcaagcacatctcaccacctctttagatgcctttctccacagagttgatagaaatgagacagccaaatgctgctcaggtcattgtgcacagggggcttgcctaacatgcccacagcgaagaattct

SEQ ID NO: 97660 - DNA, 545 bp, Homo sapiens
caagctacggtgggctctgcccagttcgaacttcccagtggctttgtttacactgcgaggggaaaaccgcctactcaagcctcagtaatggcagatgccagtggggcttgttttatccataaatgtccaatgcatccaccctggctttgggttttctttactcctgtcacctgaggatttcccttgctttttgagaatttttaaatattttatttgtaaatagtttcatatcaatatttttaatgacaaatatttaatattttaaacattttatccaatatttctgttcrcagcagaaaggtgtgatccatcatgttgatgggctcagaacctactaaacttttctccctcttagtttccttatctttaaaatgaaaataataacagtgcctgtcttgtgaggttcttgttatgcttaaatgtaataatacatgcagagcactttaagttctacaaaactgactggaacacagcagacattcaataaatgcgagcctaaattattgctttgcccagaactgagttcatcatctccccaccagccc

SEQ ID NO: 97661 - DNA, 586 bp, Homo sapiens
tgacctaaccaactccatcttgcttccaacctccaagctgtccttgttcgttcctgggcataggctgaactaactttggaagaaacttagtttatagtttaaaacaaagatgatacagccctttcccaaaacaaacctccttcttgtctggggactagactgccttcataagactgtcaaattagccacaagattagaagttatggtttagggccagacacagtggctcaygcctgttatctcagcactttgggaggccgagacaggcagatcacttgaggtcaggagttcaagaccagcctggccaaaacggtaaaactccgtctctactaaaaatacaaaaattagctggatgtggtggcaggcgcctgtaatctcagctacttgggaggctgaagcaggagaattgcttgaacccgggaggcagaggttgcagtgagccgagattgcaccaccgcactctagcctgggtgacaagtctcaaaaaagaaattatggtttaggagtcatgtagctggagactacaagattctgaccctctccaaattgctcctagggataaaatcattattgtaaaacctaagac

SEQ ID NO: 97662 - DNA, 502 bp, Homo sapiens
ttaccctgtttggcctcgaacttgggttcaagtaatcctcctcctcagtcacctgagcagctaggaagagcagtggggcctggtaggccaagtttatcagcaggacaaagcaggacagggtggagctcctggtgcttakcgccccagcagtggccactctgcagtgggcagagttcatggtccctgcattaagttcccaacctgccacccatttcctgtggcaccagggagaatttgtgaccttctctcattttgcttctgatgcttctccttttttattttttatagactctggtctcactatgttgctcaggctggtctcaaacttctgggctcaagcaatcctgcctcggccttccaaagtgctgggattataggtgtgagccacggcgcccagccacttctcctttttgaggtactttccttccccatcttcccatttttagttgatattattttgaagtagggcctcaatgcaaaactctttagtttgttcattcat

SEQ ID NO: 97663 - DNA, 599 bp, Homo sapiens
ctcattggttttctgagtgttgattcagagcttccttccacccaagaaaagcataaatgccaaagaagagtgttcacaggcgttgagggtggagaagtgggagcctttctgggacagtgttacaggagagaagtgggaggtgggacacatatgtagctgcctcctcaagcaagtagggacatggtctcattcctgcacagccctggggtatgggagtgtggtcccattccatgctgacctgaaattaggatgactcactgaggcctgggactgagccctgagtaccaccatcactgctgggctgcagaaatcattcaggtagctgtgtggaggacagaaggcatggtatccccacccacaaatggaccatgtggattcatgatgcccatgtgytcttccaaatggtgtctgtagctccccattctcctgcaccatctcagggaggagagcagttggcccctcccatcaaacaaagaaagcacatcttgagattgaattttccaatcttgaggaaagtgggggctcagagccagggttcatttgacttacaaaaatacagaaatgtgatatttcttggaaccagaacagaggaaacacat

SEQ ID NO: 97664 - DNA, 672 bp, Homo sapiens
atagttacaattatatccctatgtgtcaatctgaaaagatggctggcatatgtaagagaaaacactaattgtagaacagtatatgcagtatgatcttattggtgcaaagtaagagaatgtgtgtgtgtgtgtctgcacgtgtgtgttcctgagcctatttctttgaagacagttgctgccacctgccagtttcaattcctccaaggtgcagaatgggaaaacctctctccctctcctcaaaacctcagtaaagcatgatgtatttctctggggtttggaaggttcaaaatgttcagggcagaaagaagggtgacaaggctgcattggcaaaaatgaaaataaaaacaagtaatgtgatttttaaggcaaattggatgctatttctaggcaacagaaatatatttacagtgttattctttttaaaaataaaatggcattattagagaggcatcaatgtaatatatatgtatgtaaacatacagcacacaatatatgtgtgtgtatatatatgtatataatgcatacacacatatttgcttagtttrctggctgcctcagcaaagaaaagcctcaacttccatccccttcatgtggctgagctgtcccttagattctgacattataagcgattttgaaatatatccatgattagtaaattaatttgtgcattcc

SEQ ID NO: 97665 - DNA, 659 bp, Homo sapiens
ttgacaggtgcaccctgggaattctggggtttgtgggcttgtctgctggccattaaagtctctgtctctttcctgtatttcctctctctcttgtgcctacctatctctattataaaaaaccaaggtgggtactttcagaaggttctctaaagtactctcttgtcccagagcctgttttgtagcttcctcctgatatcaggggctgcctgagtagtaaatttatgctttaggattggttgtccctcagctgaatcaggggatagacaggtgtgctttactaaggcctcccttggcctttccaggaaggcagtgggattttcatcaaatccctggtcaatcatggatgatttagtataattgagaggcttggtcctggtcttacataagccctccattatgcacacctgaaagtgcctcctcttccaggcttccatcttgtcattggaatcctatttagggtaatccattgatactgcttctctcccagttggataatgtttgcccccttccctgacactatatgtgatactaagctcatccccaaatctctctgctgcttgcagagcagsctgcttctcagtgtctgtcaaggtctggttcaaaagcaacataatgtctctccaggagagatcaaatatttgggtgaaattctggaaagc

SEQ ID NO: 97666 - DNA, 654 bp, Homo sapiens
gcctatgatgattattctatgcctgtctcatcattttatgatggatgtgtgaaagataggtaagttgtttctttagtttcaaaggacttcaaatcaagacaaactgtactcaaggagttgtatttgcagcgagacctgatttaaacgacaagattctagacttcaaactaatgctgtgatgagatgaagctttggtagacttaggatacaattagtgaggtgtgtgcattacttggagccagagagcagtctacagtaacyggcctctaagaaggaccccaatgaacattacctcctggtattcatgcactggtgtagtttcccctctcagtgtaccacggttcatctatatgaccagtagaatatgccagtagtgatggtatgtcatttctaagatgacactttttcgcactcaagggttagccttctgggaaacatagggtttgggatttgaaaatttagaaactgaagcaacttttattctggtagttacaagctctcattactgcttctctctatatatttctaataataattaatttaattaaatatcttcttattctcaccatacaattttttcatattttactattggtaatgattttaactactacagaagtggtctatatctatctgcctatttatctacatctc

SEQ ID NO: 97667 - DNA, 654 bp, Homo sapiens
gcctatgatgattattctatgcctgtctcatcattttatgatggatgtgtgaaagataggtaagttgtttctttagtttcaaaggacttcaaatcaagacaaactgtactcaaggagttgtatttgcagcgagacctgatttaaacgacaagattctagacttcaaactaatgctgtgatgagatgaagctttggtagacttaggatacaattagtgaggtgtgtgcattacttggagccagagagcagtctacagtaactggcctctaagaaggaccccaatgracattacctcctggtattcatgcactggtgtagtttcccctctcagtgtaccacggttcatctatatgaccagtagaatatgccagtagtgatggtatgtcatttctaagatgacactttttcgcactcaagggttagccttctgggaaacatagggtttgggatttgaaaatttagaaactgaagcaacttttattctggtagttacaagctctcattactgcttctctctatatatttctaataataattaatttaattaaatatcttcttattctcaccatacaattttttcatattttactattggtaatgattttaactactacagaagtggtctatatctatctgcctatttatctacatctc

SEQ ID NO: 97668 - DNA, 570 bp, Homo sapiens
caaaagtgatacagtgatttttgacttcatagaggtcagcaccctaaccactgtgttgttcaagggttaactgaaaacgcactggattgcatgagtataagataataatgagaccttattactttccagttgaggtaggggaatttaaattctacataatatctgctatcaatagatttrcccagtaaattttatatcaaataagttctaagtcttatttcacatttttatctcagtttctaaatgtgtcattattacattggatttaggagcaaaatccattataatctgttctaacaagaagattgttttttggtagtctcttaaacttcatattgggagaagattatgctccttgaggataagattcatactgtaacaattttctatatcctccataatgttttgcagattcaataactatttaatgaattgagttaaatttgcctatactcttacaagtcatactctcataaataaccttctaatcctcaattcctccaaaacatagaaaaaaatgccaatataaaaaagcaagaaagaaggtattaaccatttgtccttcaaaat

SEQ ID NO: 97669 - DNA, 554 bp, Homo sapiens
gaagtggctgggctcaatagctcaggcctgtaatcccagtgccttgggaggccaagtcaggagacttacttgaggctaggagtttagaaccagcctgggcaacaaagacagatcctcttctctatgaatttatttattttttttaaattagccaggcatggtggyattcacctctcagtcctaggtactcaggacgttgaggcaggaagatcacttgagccaggagttcaaggttgcagtgaactatgattgcaagctactacactccagcctggtagatagagaaagagactctatctcttaaaaaaattaagaaaataattatattcacaatactatacaaataaacccttggaaatacatttagcaaaatatgtgtaagaattgtatgctgaaaactaataatctaagcaaatggaaaatcattccatgctcatggattgggagacctactcttgtttttctagtaattctcccatcatagatctatagatttaatactattgttaccatacattagccatattatatgaacataaatatttcatttgtga

SEQ ID NO: 97670 - DNA, 554 bp, Homo sapiens
gaagtggctgggctcaatagctcaggcctgtaatcccagtgccttgggaggccaagtcaggagacttacttgaggctaggagtttagaaccagcctgggcaacaaagacagatcctcttctctatgaatttatttattttttttaaattagccaggcatggtggcattcaccyctcagtcctaggtactcaggacgttgaggcaggaagatcacttgagccaggagttcaaggttgcagtgaactatgattgcaagctactacactccagcctggtagatagagaaagagactctatctcttaaaaaaattaagaaaataattatattcacaatactatacaaataaacccttggaaatacatttagcaaaatatgtgtaagaattgtatgctgaaaactaataatctaagcaaatggaaaatcattccatgctcatggattgggagacctactcttgtttttctagtaattctcccatcatagatctatagatttaatactattgttaccatacattagccatattatatgaacataaatatttcatttgtga

SEQ ID NO: 97671 - DNA, 554 bp, Homo sapiens
gaagtggctgggctcaatagctcaggcctgtaatcccagtgccttgggaggccaagtcaggagacttacttgaggctaggagtttagaaccagcctgggcaacaaagacagatcctcttctctatgaatttatttattttttttaaattagccaggcatggtggcattcacctctcagtcctaggtactcaggacgttgaggcaggaagatcacttgagccaggagttcaaggttgcagtgaactatgattgcaagctactacactccagcctggtagatagagaaagasactctatctcttaaaaaaattaagaaaataattatattcacaatactatacaaataaacccttggaaatacatttagcaaaatatgtgtaagaattgtatgctgaaaactaataatctaagcaaatggaaaatcattccatgctcatggattgggagacctactcttgtttttctagtaattctcccatcatagatctatagatttaatactattgttaccatacattagccatattatatgaacataaatatttcatttgtga

SEQ ID NO: 97672 - DNA, 554 bp, Homo sapiens
gaagtggctgggctcaatagctcaggcctgtaatcccagtgccttgggaggccaagtcaggagacttacttgaggctaggagtttagaaccagcctgggcaacaaagacagatcctcttctctatgaatttatttattttttttaaattagccaggcatggtggcattcacctctcagtcctaggtactcaggacgttgaggcaggaagatcacttgagccaggagttcaaggttgcagtgaactatgattgcaagctactacactccagcctggtagatagagaaagagactctatctcttaaaaaaattaagaaaataattatattcacaatactatacaaataaacccttggaaatacatttagcaaaatatgtgtaagaattgtatgctgaaaactaataatctaagcaaatggaaaatcattccatgctcatggattgggagacctactmttgtttttctagtaattctcccatcatagatctatagatttaatactattgttaccatacattagccatattatatgaacataaatatttcatttgtga

SEQ ID NO: 97673 - DNA, 462 bp, Homo sapiens
ttcttgcttttctagttctttaaggtgcattattgttttattttttkgaaatcatctacttttttgatgtaggcatgcaacgctataaatttccctcttaggttttgatatgttgtgtttgtatttttgtttctttcaaggaaatttttaatttccgtcttaatttgtttattcacccattggtctttcagaagcatattgtttaatttctatgtatttgttcagtttccaaagttcctcttgttattgctttcttgttttattccattgtgttcataaaaggtaattgaaatgattgtgatgttttaaaattcattgagacttgctttgtggcctaatatatggtctatcctggagaatgttctatgtgctgatgaaaagaatgagtattctgtaactgtcagatgaaatgttcttcaagtgtctgttaggtccatttgttctggagcacagattaaatcc

SEQ ID NO: 97674 - DNA, 637 bp, Homo sapiens
tttatcttcgtagtttgttggttttctgtagtgataaattttgattgctttctctttctcatttgtatgttttctctaccaatgagttttatactttcacatgttttcacaaaggtagttatttttccttcacttccaggtataggagtcccttaaggattttttataaggctagtctagtagtgatgaattttctctagttttgtttgcctgggaaagtctttatttctctttcatctctgaataatagctttgctgggtgtagtattcttttctgacagttttttttccaacactttgaaaattatcttattctctcctgacttctagggtttattctaagaaacctgctgttagtctaatagggattcccttattttgacttagcacatttttcttactgctttgactatctttgacttttgacagtttatttacmatgagcttcagtgaaaacgtttttggattgaatctatccaaactcctggaaaacattatgctttaggctttgaggagaggcagccagctttcctcattctgccaccttggaggaattgaaattctcaggtggcagcaaatgtctccaaagaaatagactcagaaattctctctctctcttactttgcaccaaaaagat

SEQ ID NO: 97675 - DNA, 637 bp, Homo sapiens
tttatcttcgtagtttgttggttttctgtagtgataaattttgattgctttctctttctcatttgtatgttttctctaccaatgagttttatactttcacatgttttcacaaaggtagttatttttccttcacttccaggtataggagtcccttaaggattttttataaggctagtctagtagtgatgaattttctctagttttgtttgcctgggaaagtctttatttctctttcatctctgaataatagctttgctgggtgtagtattcttttctgacagttttttttccaacactttgaaaattatcttattctctcctgacttctagggtttattctaagaaacctgctgttagtctaatagggattcccttattttgacttagcacatttttcttactgctttgactatctttgacttttgacagtttatttacaatgagcttcagtgaaaacgtttttggattgaatctatccaaactcctggaaaacattatgctttargctttgaggagaggcagccagctttcctcattctgccaccttggaggaattgaaattctcaggtggcagcaaatgtctccaaagaaatagactcagaaattctctctctctcttactttgcaccaaaaagat

SEQ ID NO: 97676 - DNA, 573 bp, Homo sapiens
tattatggaaaacagaggggagattcctccaaaaaacataaaatagaacgaccatatgatctaacaattccactactcagtattcataggaatatattcaaaggaaaggaactcagtatgttgaagaagtatctgcactcccatgtttattgtagtactattcacaatagccaaatgtggaatcaaattaagtgtctaccaatggatggatggataaagaaaatgcgataactatacaccatgaaatactgtccggccctaagaaagaatgaaatcctgtcattcatggcaacatggatgagccattatgttaaatgaaataaagccaggaagagaaagttaaacacagcatcttctcacacatatgtggaagctaaaaataaagttaatctcacagacgtaaacagtagaacagagcatactagaggctgggaaaaccaggagaatgaaggatgrggagagcttggtcaatggacaaaagatcatagctagacaagagcaatgagttctagccttctagagcactggagggtgaccatagtgaacaataactcattatatacattcaaagag

SEQ ID NO: 97677 - DNA, 582 bp, Homo sapiens
cagcacttgctccatcccttggacagtttctttctgcatgtccatgggttttcattatcctatgaaygactacttcaaaggcaggggcacgtccttacttaactctgtatccccgttgcctggccgtggtgaatatccaatatgttggcagaatgaagagcaggtcaatgggatgaacaaacataccagataaggaactcagagtctgggccagagcaaggagggtgcatgtggggcctatagggatgggaaagggagggcgcctgagtagggggagaggtggtgagcactggaggtggagcacggcagagcattatcctccctggctcctcatcctcgccagcggctgccctgacagtattaatcaaggccagagcatgtggaaatatcagtccactgtgttctattcaagttctctggaactaaattatgttgtcaggattggacagagcaggaatggaaaagaccaggctggatgacatggggctgttaaaaggagatgaatgagcccagtggtttccattcaatttttcaaggtttcccaaggcaggtctgacaaataccaccttataattcccagac

SEQ ID NO: 97678 - DNA, 569 bp, Homo sapiens
gttgtggttttatgctttaaatttagaacagtttgttatgtagcaatgaataactgaaacaccaacccagttataacagtgagaatgtattcagctacaaataagagaaaactatttgcagcatagaaacaaacaaatagggagcatttttcttgcacatcaaaaccagaggaaggtagctgctcaaaggctgcatgaaatgaaggccagcatgtttacagctctctcagccttgccctcaaggtgaaaagatagctgctgcagctccagatatcatrttctaactccaagcaggaaggagaggaggaaagttttgcaacagccactctaagccccctttatactgcgagagccaaagctttcccagaatcatcaccagccgacttaggtcatcttaggtctttgtgaacttaggttatatggccagtcccagctgcaaaggagacaggcagtgtggataatgggatgatcataagtggcttagaccagttatgatccatttgcactgccacccgaaacaaaatttgggttcccttgagctaaagaaacggggaagaaatattggacga

SEQ ID NO: 97679 - DNA, 636 bp, Homo sapiens
tgttttcattcctccctcctgccccttgacccggtccccaggaaaccaatgatgtgctttatatcactgtagatcagttcacattttctacagtttcatatcaatggaatcacacagcatgtgcttttttgtgtgccttctttttgcttagcataatttttggagattcacccatgtctttgtatatatcaatcattcattcctttttattgcagagttatattttatggtatgggtataccatgacttgtttatccatttccctattaatggacctttgcgttttttggctattacaaataaagctgctatgaatattatgtacaagtctttgtgtagccatgtttctttcttcttgagtaaatatctacaagtagattggctggcttatatgatagatgtatgttaaattttttttttaactgtcagactgttttccaaagtggtcgtttcattgtacayccctaccagctgtgtgtaagagttccagttcctccacatcctcaccaacacttgatgtggtcattactccccaacttcttaattcccttaaggactctggtccaggcaaccttttaataaatcatctgtggcccagtagggaaaatcactgaggaaaggaaaaagaaataagtg

SEQ ID NO: 97680 - DNA, 531 bp, Homo sapiens
agtgtgcacaagagagatgaggacaatgccctatgagaagatgggagagaaatcagaaagagggcccctggaagactgtragggccgggacagcctgcaacctggacattatttttctagctactgatttggctgatttttgtctcagcagctgagcttaccattgctaataaagcctgttcacctagccctggccttaagtcctatacgggtcctggctggggtcctggaattccagctgtttcctgtgtgggactgactgcagcctctggaaattcacatggcctctctaggactgggatttgcaaagcggtctccaggatcgcttagagcagagcctctcaaaccttagagggcagggctcagaaccacacagagatttgttcaaacagatggctgcaagaatctatatttcttttttctttctttttttttttttttttggagacagagtctcattctgtacctcaggctggagtgcagtggtgtgatcttggctaccgcaacctctgcctcctgggttcaagcaat

SEQ ID NO: 97681 - DNA, 531 bp, Homo sapiens
agtgtgcacaagagagatgaggacaatgccctatgagaagatgggagagaaatcagaaagagggcccctggaagactgtgagggccgggacagcctgcaacctggacattatttttctagctactgatttggctgatttttgtctcagcagctgagcttaccattgctaataaagcctgttcacctagccctggccttaagtcctatacgggtcctggctggggtcctggrattccagctgtttcctgtgtgggactgactgcagcctctggaaattcacatggcctctctaggactgggatttgcaaagcggtctccaggatcgcttagagcagagcctctcaaaccttagagggcagggctcagaaccacacagagatttgttcaaacagatggctgcaagaatctatatttcttttttctttctttttttttttttttttggagacagagtctcattctgtacctcaggctggagtgcagtggtgtgatcttggctaccgcaacctctgcctcctgggttcaagcaat

SEQ ID NO: 97682 - DNA, 637 bp, Homo sapiens
tttaacttcctggttctctttggcccccttgcctctagtttcagtaaacaactttcccgccagttctaatcagtagttcagatctgttcccctggtcacctgctttaacctaagtcaccctggttacctgctccatcttgagtcacccctggtcacttgctctgacccaaatcatcctgagtcacctgttctgtaaccacccttcccaccaaactactcaccccgccactcaggatcgtagtctgctctctttaaaacagccagttggaattagctcagactatgcagttgaaccccaggaaataggggaacgacacagcagtaggggctacctgcaacaggaataagaacccctgcccctcccctgtccaggtgtgctctcaccattactccatccacaagtcgcacgcttcartagaagtaaaaattgccttgctgagaaaattaaatttatgttcaagtgctatttcattgtggcactgaggaacaagcattttgtttctaacagagtggcaaatctaaataactgataattgtacaatacaggaaacaatgcatttgggcagacacagctctagtaaaaaaaaaaaaaaaaaagggcaattatacagaaaaatgaagagagaataaaactacc

SEQ ID NO: 97683 - DNA, 604 bp, Homo sapiens
ggctctcttctctgacaaaaaatattgtaggatctaacattcttgtattcaaacaccttttcttttatttgctttctttttattttccttctctcatatagatggrgaaataattttagtctctcaacacttgatatcagaatctcttatttgaaacattggcttttgttgagaaaatgctctgataaattcactttaagatctcagggccttggtattatcatctggtatccaagttctaaaagagtaaaagagaggctttgctactaaacagaggagaggaggactggggatttaactttcctgggggcagccagaagggatgccttcagggtgaagcctgctggggaaagagaagagtaatgactttcaaagttgccaaatttaagaaaaaaaatggagagagaagaaaaaggctttaagattttctctgcaagatgactagtgtaaagtacttccagttcattccccatctctcctgtgaaaccttccaattcaggggctggggggagagaaaggggagctaagtcatatgttcatgttgatgaccaaaaatgcttccctagtttcaagagccagagtgtggagtgggggaagcagctgc

SEQ ID NO: 97684 - DNA, 596 bp, Homo sapiens
acatcaattagtgtggtcattttttgaaaacaccaagagctaaaaataaattcaagtgccttcttattttctttgaaacatttttcsttttctcaagataaaatatttgaaataaattaacagaatctagtttgttgcctagtccagcattgtccctccaaagggaggcttaaaaaaatatatgctgaatgaatgacagtggtattccccaattctgaggacttttaacatttacagtgtgtgtcctacaaccaaggacttaacaattaactgtgtgataggattaaaataccatagttttgtatcagctactgtattctgccatcccaggaatttaactttcctgtgtttaaaaaataggagggtggcgggaaaaagggtcaaatgtctgctgaatacaggaaatccatagcaggctgtaaaccagaaaacatcaaaagctgcaccagaaactctggacagatgaaaactgtgagactccatttcttactactgtttaatgagaaaggcaataaattcaacatgaaaaccacaacttgtactctctcgtcaggatctcctcaaaacatatgtggcagaaaaagatgggtttaaaa

SEQ ID NO: 97685 - DNA, 596 bp, Homo sapiens
acatcaattagtgtggtcattttttgaaaacaccaagagctaaaaataaattcaagtgccttcttattttctttgaaacatttttcgttttctcaagakaaaatatttgaaataaattaacagaatctagtttgttgcctagtccagcattgtccctccaaagggaggcttaaaaaaatatatgctgaatgaatgacagtggtattccccaattctgaggacttttaacatttacagtgtgtgtcctacaaccaaggacttaacaattaactgtgtgataggattaaaataccatagttttgtatcagctactgtattctgccatcccaggaatttaactttcctgtgtttaaaaaataggagggtggcgggaaaaagggtcaaatgtctgctgaatacaggaaatccatagcaggctgtaaaccagaaaacatcaaaagctgcaccagaaactctggacagatgaaaactgtgagactccatttcttactactgtttaatgagaaaggcaataaattcaacatgaaaaccacaacttgtactctctcgtcaggatctcctcaaaacatatgtggcagaaaaagatgggtttaaaa

SEQ ID NO: 97686 - DNA, 550 bp, Homo sapiens
gtgtaacatttcttacaattagacacctccaaattccccactggcaaatctgtrtatacttcagcatataaacaccttttgagggcctcttatctggagattatttttttccatatgatgagatgtttagtgtgattcctgcatgagaagaccaatcagatctattaaggcctttttggtcagaggatgttcaggtaaattgtacagctagattggatgtaccccatcctcttcccactcaatcactgcttactagtggtttcttgggagcttgggctggcctctggtgaaatttgttggggttctatctgtattatttcccatgaagccatttttcagtcacatggtgactgatgttctataggatgcacaagaagtatttttttcttctataattttttcctgttttgtttgtttgtttgtttttaatttccttatctcttgaatttgtcttcatgccattggctggagtatgaagttttctttctatgaaacaatctttgagagggtagagtcagaatcagctgtgtaatttgcgggaccagtgcaa

SEQ ID NO: 97687 - DNA, 550 bp, Homo sapiens
gtgtaacatttcttacaattagacacctccaaattccccactggcaaatctgtgtatacttcagcatataaacaccttttgagggcctcttatctggagattatttttttccatatgatgagatgtttagtgtgattcctgcatgagaagaccaatcagatctaytaaggcctttttggtcagaggatgttcaggtaaattgtacagctagattggatgtaccccatcctcttcccactcaatcactgcttactagtggtttcttgggagcttgggctggcctctggtgaaatttgttggggttctatctgtattatttcccatgaagccatttttcagtcacatggtgactgatgttctataggatgcacaagaagtatttttttcttctataattttttcctgttttgtttgtttgtttgtttttaatttccttatctcttgaatttgtcttcatgccattggctggagtatgaagttttctttctatgaaacaatctttgagagggtagagtcagaatcagctgtgtaatttgcgggaccagtgcaa

SEQ ID NO: 97688 - DNA, 550 bp, Homo sapiens
gtgtaacatttcttacaattagacacctccaaattccccactggcaaatctgtgtatacttcagcatataaacaccttttgagggcctcttatctggagattatttttttccatatgatgagatgtttagtgtgattcctgcatgagaagaccaatcagatctattaaggcctttttggtcagaggatgttcaggtaaattgtacagctagattggatgtaccccatcctcttcccactcaatcactgcttactagtggtttcttgggagcttgggctggcctctggtgaaatttgttggggttctatctgtattatttcccatgaagccatttttcagtcacatggtgactgatgttctataggatgcacaagargtatttttttcttctataattttttcctgttttgtttgtttgtttgtttttaatttccttatctcttgaatttgtcttcatgccattggctggagtatgaagttttctttctatgaaacaatctttgagagggtagagtcagaatcagctgtgtaatttgcgggaccagtgcaa

SEQ ID NO: 97689 - DNA, 546 bp, Homo sapiens
ggcaggctgccatctttgctgctttgcagcattcatgcatgatacctccaggtacaggaagaagcaaggcagctaggayctggagcagatcctcagcaagctgcagcagccctagggagagtggccagactactaaaagaagaacaaacaagcagaaaacaacagcaacaacaaaaccacaaaatccccatccaaaggtcagtaatctcaaagaacgaaggtagataagcccacaaagatgggaatcaatgcaaacatgctgaaaactcaaaaatccagagtgccccttttcctccaaatgacagcagcgtctctccagcaaggtctcagaactgggctgaggctgagatggctgaaatgacagaagttggcttcagaatgtggataataatgaattttgctgagctaaaggagcatgttgtagcccaatgcaaagaaactaagaattagataaaacaatacaggagctgaaaaccaaaataacagtttagagaggaacacagtcgacctgttagagctgaaaaacacactataaaaacttcacaa

SEQ ID NO: 97690 - DNA, 451 bp, Homo sapiens
tccactctgtttcaaggtcttggtcagttttagagtaattagcctcaaaaattaggttttggattttttttttttttttgagacggagtctcgctctgtcatccaggctagagtgcagtggcatgatcttggctcactgcaacctctgcctcctgggttcaagcgattctcctgccttagcctcccgagtagctgggattacaggtgtgtgccaccatccctgggtaatttttkttttttttagtagagacggggtttcaccatcttgaccaggctgatcttgaactcctgacctcgtgatccacctgccttggcctcccaaagtggtgggattataggcgtgagccatcacacccagccaggttttggatttttaaatgagatatactggcatgcttggctatgtacagtgatttattccctaaataaatacaagtttacaattgaattc

SEQ ID NO: 97691 - DNA, 481 bp, Homo sapiens
aggcaccgaaggtcacatagctactaagggtcacacatggtctctttttcatacattccggtcacaagcacagcccttttcctattcatgaacacagactcctccactggatgtgacttccagtagaggttgccaggtagaaagtcacagcaaattattcttcaagaggtgrttgtccttgggtgcccctggtatatgcagcatagctgggcaggtcaaaagatatttgggtgcccctgtgctctttgggaggggaattgggattggggtgaagaggggaaggaaagatgagtcatttactgagttctccatcagaaaaatgactcaggacattagcaatcttactgagagcatttagtggtagtaaaacaggcctggtctaccagtcacgagctgactctgcccaacgactagtaattagcagaggtaggatttgaacccatttgtgtctggctccagaacctgcagtctgaaccaattt

SEQ ID NO: 97692 - DNA, 481 bp, Homo sapiens
aggcaccgaaggtcacatagctactaagggtcacacatggtctctttttcatacattccggtcacaagcacagcccttttcctattcatgaacacagactcctccactggatgtgacttccagtagaggttgccaggtagaaagtcacagcaaattattcttcaagaggtgattgtccttgggtgcccctggtatatgcagcatagctgggcaggtmaaaagatatttgggtgcccctgtgctctttgggaggggaattgggattggggtgaagaggggaaggaaagatgagtcatttactgagttctccatcagaaaaatgactcaggacattagcaatcttactgagagcatttagtggtagtaaaacaggcctggtctaccagtcacgagctgactctgcccaacgactagtaattagcagaggtaggatttgaacccatttgtgtctggctccagaacctgcagtctgaaccaattt

SEQ ID NO: 97693 - DNA, 481 bp, Homo sapiens
aggcaccgaaggtcacatagctactaagggtcacacatggtctctttttcatacattccggtcacaagcacagcccttttcctattcatgaacacagactcctccactggatgtgacttccagtagaggttgccaggtagaaagtcacagcaaattattcttcaagaggtgattgtccttgggtgcccctggtatatgcagcatagctgggcaggtcaaaagatatttgggtgcccctgtgctctttgggaggggaattgggattggggtgaagaggggaaggaaagatgagtcatttactgagttctccatcagaaaaatgactcaggacattagcaatcttactgagagcatttagtggtagtaaaacaggcctggtctaccagtcamgagctgactctgcccaacgactagtaattagcagaggtaggatttgaacccatttgtgtctggctccagaacctgcagtctgaaccaattt

SEQ ID NO: 97694 - DNA, 481 bp, Homo sapiens
aggcaccgaaggtcacatagctactaagggtcacacatggtctctttttcatacattccggtcacaagcacagcccttttcctattcatgaacacagactcctccactggatgtgacttccagtagaggttgccaggtagaaagtcacagcaaattattcttcaagaggtgattgtccttgggtgcccctggtatatgcagcatagctgggcaggtcaaaagatatttgggtgcccctgtgctctttgggaggggaattgggattggggtgaagaggggaaggaaagatgagtcatttactgagttctccatcagaaaaatgactcaggacattagcaatcttactgagagcatttagtggtagtaaaacaggcctggtctaccagtcacgagctgactctgcccaacractagtaattagcagaggtaggatttgaacccatttgtgtctggctccagaacctgcagtctgaaccaattt

SEQ ID NO: 97695 - DNA, 574 bp, Homo sapiens
tggggcctgtcggggggtaaggggctagaagagggataacattaggagaaatacctaatgtagatgatgggttgatgggtgcagcaaaccaccatggaacgcgtatatctatgtaacaaaccttcacattctgcacatgtatcccagaacttaamgtataacaaaaaataataaaaataaataaataaataaataaataagaaaagaaatgagggattccttgtgcctctcccacaaaattgctgagaacattaaatcaggtgatgcacacgagttgcttagcatagcacctgatacataataagaaatcaataggtaaaggtgattattatgattaattagcattgatatgaatgcccaaggtcacagagcaggttagcattgaaataggtattttctgacttgccacttggtactcactctgctactcactgctgcctctcacccaattaaaattcctggctctgccctctgagagtcactgttcctaaaaaagaactccatttgtagtaagaagccacaaaataaattgtcaccaagtccagcggtcagatccaaattgcataaaagcatt

SEQ ID NO: 97696 - DNA, 574 bp, Homo sapiens
tggggcctgtcggggggtaaggggctagaagagggataacattaggagaaatacctaatgtagatgatgggttgatgggtgcagcaaaccaccatggaacgcgtatatctatgtaacaaaccttcacattctgcacatgtatcccagaacttaaagtataacaaaaaataataaaaataaataaataaataaataaataagaaaagaaatgagggattccttgtgcctctcccacaaaattgctgagaacattaaatcaggtgatgcacacgagttgcttagcatagcacctgatacataataagaaatcaataggtaaaggtgattattatgattaattagcattgatatgaatgcccaaggtcacagagcaggttagsattgaaataggtattttctgacttgccacttggtactcactctgctactcactgctgcctctcacccaattaaaattcctggctctgccctctgagagtcactgttcctaaaaaagaactccatttgtagtaagaagccacaaaataaattgtcaccaagtccagcggtcagatccaaattgcataaaagcatt

SEQ ID NO: 97697 - DNA, 512 bp, Homo sapiens
ccatcaacggggaaatgtttatgtaatgtatgacttgctcccttgcttgaactttcaccataaaaccattaagaaggattatgtagaatctgtgtagttacagaaactatgcagacgatgtaataacacatgacagaatgcccaagatgtaggtgaaaagcaggaaacagttatatatatactgattataactttgtcaaagcatactatataaaaagacttggagaaatgacacaaaagttataattgctttaagatcatgccttttttttttyccctctgttttctaagctgtaagtaataatgctctaggctataattaaaaaacttacctttagggccttccagggcagaaaagtgtggtggttatacacttaacctgttagagtaattaaaaagatctccttctaggatattactttttgaacttattttgtctgcaaaagctaagattgaattactttttgtgatatcaaatattaaaaatttagaatctaccttagctttagcag

SEQ ID NO: 97698 - DNA, 497 bp, Homo sapiens
acttatagacttttctgtttctgtgccactcataatagcaccttgttagatttttttttcttttcttttttttttttttttttttttttttttgagacagagtcttgctctgtcgcccaggctggagtgcggtggcgcaatctcgggtctaccatgcccagctaattttttgtatttttagcagagaccaggtttcaccatattggccagactggtctcgagctcctgacctcgtgatctgcccgcctcagcctcccaaagtgctggaataacaggcgtgagccaccgcgcctggcctgttaattcttttatatatcaaactcctgtgtaggctttgcattgaagaaaarattttgctgttgaaacacacacacacacacacgcacaaagaatgttaccgcatttgctaagatttctgtccacagagccaaaaagagaaacatgatgaattatattaactcataagagaaaataaagaataaacataatatgtcaca

SEQ ID NO: 97699 - DNA, 497 bp, Homo sapiens
acttatagacttttctgtttctgtgccactcataatagcaccttgttagatttttttttcttttcttttttttttttttttttttttttttttgagacagagtcttgctctgtcgcccaggctggagtgcggtggcgcaatctcgggtctaccatgcccagctaattttttgtatttttagcagagaccaggtttcaccatattggccagactggtctcgagctcctgacctcgtgatctgcccgcctcagcctcccaaagtgctggaataacaggcgtgagccaccgcgcctggcctgttaattcttttatatatcaaactcctgtgtaggctttgcattgaagaaaaaattttgctgttgaaacacacacacacacacacgcacaaagaatgttaccrcatttgctaagatttctgtccacagagccaaaaagagaaacatgatgaattatattaactcataagagaaaataaagaataaacataatatgtcaca

SEQ ID NO: 97700 - DNA, 602 bp, Homo sapiens
tcttctttgcagcaaaggaaaaaatcaacaaagtgaagaaagaatgtacagaatgtgggagaatatttgcaaactatacatcttacaaaggattaatacccagaatatatatggaactcaagcaatagcaaataatagcaataatctaatttaaaatgggcaaaagacctgaatgcacatttctcaaaataaggcatacaaatggccaagaggtatataaaaaaatgccaaacatcgttagtaatcaaggaaatgcaaatcaaaatcccattgagataccatctcacccaatttagaatggctgttgtcgaaaaggcaaagaagtgacaaaagttagcaaggatgccrgaaaatgagaacactcatacactgttggtggaaatgtaaatgagtatagcccttaaagaaaacagtatggaggtttctcaaaaaaagtgaaaatacaactaccatatgattcagtaatcccactgccgggtatttatccaaaagaaaggaaatcattatgtcatacagatatctgcagtcccgtgtttattttaacactattcacagtcaacctaagtatctgtcaatagatgaatggatgaagtatttgtagt

SEQ ID NO: 97701 - DNA, 530 bp, Homo sapiens
aatgtttttttaaacctttcatttgttaagtgattttcttccttttttcttttttgagacagaatctcactctgttgcccaggctggagtgcagtggcagaacagtggctcattgcaacctgtgtctcctgggttcaagcaattgtcctgcttcagcctcccgagtagctgggattacaggcatgccctaccatgcccagttacttttcgtgtttttagtagagatggggtttcatcatgttggccgggcttgtctctaactcccgacctcaagtgatctgcccacctaggcctcccaaagtgttcggattacaggcatgagcaaccacacctggctaattttcttcttttaaacattagagaccakagcatggctgtgtaaagaagaaatattttcccactgtaactgaaacaatgtgttcaaagaggtaaggagaaatactctaaggaagacaagtaccctctgaaaggtaggaaatgaccaaacatttgaatcagtcatgaactagttgaaggtatattatggtatg

SEQ ID NO: 97702 - DNA, 546 bp, Homo sapiens
atgtgtgtttgtttttccccctgtatcttctctcacacagttggtgatttcatggaagtctgtgtctattagtaatttgttcccaaccatttgtatttggggattcccggggatacactgctacttatttagcttgttgtaaaagttgttaatcagttttatattttcatatttatttgaattaagtttttaactgtagtagattaaaaagagcaaaaaaatttgaaagaaataagtacaaacaaaagcataattttttgaaaagaaaggaaaaattaaattgatcaataaaagttagatctttttttyggaaaaattaatagtaaggtaaattttacacaggactgattttttttttaaatgacacacaacatgggaacaaagacacaattgatgatcaacaatacaacatttaatttgaaatcctaagcaagtgagtgttttctaggtatatagaaaccagatcaaaaagtagaaaactaaatagatcaatgtgcagaaaacagttaacatagcaggcctgaagctttgtctttataaggacct

SEQ ID NO: 97703 - DNA, 575 bp, Homo sapiens
attccctgttgattccagcctttgagggccctcatcacacacctccactcccctgccctctctgccccactgcagtcctggctgggcctccttgattcagcaagccccacaaattgctratgggatcagggctggaagaccagattttgaacaaagctaggtcaagccctggcatgtgtgttttggtatatggcatttgttcctgaaatggccagctatctaagcaggagaggcatggatctggagctggggaaacttggtcctggctcttcaatcatgacctatgggaccttcagcccatcacttctcctccctgggttatggtttcttcagctttaaagtgagagaattttaccaggactctgcgatctctttcagcttttaaaatgtgtaatgttttcaactctgggcacacatcaaattcaaacccaggcagctttccaaacacgccgagggccgggccacatctccagagactctgaattgggctggtgtagcacctaggtccagggacagatccaggtccatggggcctaaggagcatacagtttgagggcctggttaagaagaacaaa

SEQ ID NO: 97704 - DNA, 531 bp, Homo sapiens
ctattattctttgttctcaggttgatgtacacagaagcaatacatctcagttgagacgaattctgtcctaaggtgtgagtttctgtgttcctgcttatatgagattgttttctctgtatcctargcatgttcttcagggggctgtgacttggggtgcagtggaagaagggggcttatcagcaggaaactatctccagagttgccagaaatctggattaggatctacagaaaatgttgtctgtcaggtagtctggaactacagataaacaatactggggtcagaggccatgcgaactatgagcagaaataaatggccactggggaacttacatctgtaaattgttgaatttcagatgcactagctcatgcatgtcatatgtacatgcatcatctggttacgcttgtgtcattacattatatcaggtgaccgcagtacccattctgatagcccacagagaaccccaaaggctgaccccaggctgtgcagtgcttagcaggggctccgggtctttcctggggtgttcttaacta

SEQ ID NO: 97705 - DNA, 518 bp, Homo sapiens
taatcagcctggctttggagggggtagaacaggctgtctttatcagtaagctctattgtgctttcttccttagaatatcctatctgggctcaattcatttttgtcaaggatttcacaaggctacctagaagagaactatagaygtagcctacccttatttagtctttcataaatgttggcacaatgcttcagctgtcattggtgaagacattgggagacaatgtgcttatgagtgttgtgcagtgtattctaaagaaaaatgtttgaggaaagaaaaagttacatgatagtatggaaatgtacatcaataccaccctctggaaaggcttatccctgcctttctgtctgctttttccttagtcttctccctgcattttcccttccatattgttgcttacacttctctctggttctcaagctttagcggcgcatgtacatgggaagcttactgaagtacagatttccaggctaagactggacattttttccggaaatcctctcaggatttctgactcagg

SEQ ID NO: 97706 - DNA, 518 bp, Homo sapiens
taatcagcctggctttggagggggtagaacaggctgtctttatcagtaagctctattgtgctttcttccttagaatatcctatctgggctcaattcatttttgtcaaggatttcacaaggctacctagaagagaactatagatgtagcctacccttatttagtctttcataaatgttggcacaatgcttcagctgtcattggtgaagacattggragacaatgtgcttatgagtgttgtgcagtgtattctaaagaaaaatgtttgaggaaagaaaaagttacatgatagtatggaaatgtacatcaataccaccctctggaaaggcttatccctgcctttctgtctgctttttccttagtcttctccctgcattttcccttccatattgttgcttacacttctctctggttctcaagctttagcggcgcatgtacatgggaagcttactgaagtacagatttccaggctaagactggacattttttccggaaatcctctcaggatttctgactcagg

SEQ ID NO: 97707 - DNA, 523 bp, Homo sapiens
ggattccctctctgtctatcttgtggaaaggtgtcaataggattggtaccaattcttctttcaatgtctgatagaatttagctgtgaatccatctggtcctggcctttttttcttggtaattttttttttttttttttttttttttttttttttaccatttctatctcgctgcttgttattggtctgttcagggtttctaattcttcctaatttaagctaggagtgttgcatatttctagaaatgtatccatctcctgtagtttttcttgtttatgcatgtaaatgtgttcatagtagtcttgaatgatcttttgtatttctgkggtatagactgtaatatcccttattttgtttctaattgagcttatttggattttttcttttcttttcttggctaatcttgctgatagtctagattttttcttttcttttcttggctaatcttgctgatagtctatcaattttatttatcttttcaaagaaccaactgtttgtttcatttatgttttgtagttttttgtt

SEQ ID NO: 97708 - DNA, 504 bp, Homo sapiens
catgatgtgaagccagagaaagaggccaactcagtggaaaacagagccaagagctggagagaaaccaatttctgatgacatcattgggcctctgaatccaatcctgtatggagctagcattctttctggccttctcaattaagtgaatcaatattttttttttcttaatcttgtttgaaccagcatttctctcatattcaacagtttagatttctgggttgatttgagtaatcggattataaaaagtcactcaaactcattgaaataatttggggggataaaagggatgtttaagttttcctgtaattcyttcatttctattatgtgagctcacatagctatttagcttcaaagtcaaattagatattctttcctactggtttccagtagcttgtactatttgatgctgtttagaaatgtgtaaacacaatgctggccactaaatattaaccttgttagaaatttttaatctaagaattagtgccatatcaatagtgatatatt

SEQ ID NO: 97709 - DNA, 622 bp, Homo sapiens
tttctttccccaacagagtagagcttggcacatgggcttgtgggcagaaaatgtgttttagaaactggttccaaccaaggagagtataggactaggaagaataaacaggaaaggaaggaaagtccatccacagttgcattatcaaggggatccctgctctgagcaattgggtttaatcttgctgggagccatatatgtaaccatgttgaaagccacttaaaagtatccatcaaggaaatggaagagggtaatattttttctagcagcttacatccctttggttgccacatgcaacgtcaccccagatttttctgtgcccttttccagtcaactccccttttcctcaaagcaactattttgatatcttgcactataaattagttttgcttgttctggaaattcacttaaatggaatcaaaggtatgtacttttgtatctggcttctctgttcagcrtgaagtttttggaatttatccatgctgctttatgcatacttaatttggcttttctattgatgaatagtatttcatgatatacaccacagtttatgtatcaaatctcctgtcgaatgacattggtatagttttgttttgcctataagtaaatatgtatctatgaacat

SEQ ID NO: 97710 - DNA, 565 bp, Homo sapiens
aagactccatctcaaaaaaaaaaaaaagaaagaaagaaagcaaattagcaatatgtgtcaaaagcttgaaaataatttgtagtcattaagaataatgttctaaaagaaaaaaacaacaggagaaacaatcatagtatattttaggtaaaaaagtttacaaaatgtcatgtgtggtatgatcccaaatttgtaatgacagtgtatacktacatagatccatgcaaacatatacatacacacatataatgtttgtacagatatgcatagaaaaatgactgaaagacatcaagcaaagtgttaatattaattatctctgaatcatggaattgcggtaatttttttctcctggatgagtctctctactttcaaattttctgcagtgtaaatttaatacttttgcattcagaggaaaaaaattttaagtcggtattttaataaagaaagaataagaaagacaagtttacatcctgacgggaaaaaagtgggggtaggggagagaaaagatacttcgcgaggacaatatggatgtgaagggaacttactaatatactcaggcctttaaaaa

SEQ ID NO: 97711 - DNA, 639 bp, Homo sapiens
gttaaatttcactatgcctaatttttaaattacagtctattataagtatgtatgtgtaggaaaaatagtacatgtttactatccactgtttcaggcatcaactgggggtcttaatacatatctttttacagataagggtggagctacagttaccttccaaaaggtagtattgccactgccattgttgcctgctaatgtaaattccaaagaagtagatgattttgggaagggcagaaaataaaaattttcatcaatattaatgattttgccattaatgcagattaccattgccatagtctgagaagtgacatgaaacttgagattgctagagctcataggacagtagaacagtgaagacattgaggtttaaagtgttaatgttatgaagatagctaaaaacaggacttgatcagtataatcctctacctaacacaacttggaatggggcagagagtaaagaaatggacctcggtaaggaygtgcatgagcactaagagatagtgcttgatgcaagagcaataataacaacaataaccacaacaaaggtatattattgggagcattagagaagaacaacagaaaactaaaaatgttgtggatgttacctccaagcaagaaaatgggactagggacacaggc

SEQ ID NO: 97712 - DNA, 575 bp, Homo sapiens
tctgttctgtgctgctgggtcaggtgttcctcaggcccgggtcagtatccctcgctcctccttgtctccccaccactctgtgtagagaggaaggggccgagggctggtcttcctcagcttacccctagtgtccagctgctttctgcctgttgcctgccctttgggcccgctgccatggatgggagaggtgcgcatgttcgtgcagccaagctgggattatggcatttgcacagggatgtagctgtgggtctrtgtgtctgggttgttgggggacaggctggggtgggtgccctttagagcttggcctctgcatgactgcctagtccctcagtgaatgctgcaattaattggctactagggagacattagccagctaggtaggtctgctgtaaccatccccctgtgtctgagcaggcttgctaggggccagggccgtgtctgggaacaagggctggccctctggcatgtttcccctacatgtgtggagagtggacttatcccaggcccaagggatctgaagatccccacagccagggaggaagctgcagctccagatggatggttcccggaactcc

SEQ ID NO: 97713 - DNA, 575 bp, Homo sapiens
tctgttctgtgctgctgggtcaggtgttcctcaggcccgggtcagtatccctcgctcctccttgtctccccaccactctgtgtagagaggaaggggccgagggctggtcttcctcagcttacccctagtgtccagctgctttctgcctgttgcctgccctttgggcccgctgccatggatgggagaggtgcgcatgttcgtgcagccaagctgggattatggcatttgcacagggatgtagctgtgggtctgtgtgtctgggttgttgggggacaggctggggtgggtgccctttagagcttggcctctgcatgactgcctagtccctcagtgaatgctgcaattaattggctactagggagacattagccagctaggtaggtctgctgtaacyatccccctgtgtctgagcaggcttgctaggggccagggccgtgtctgggaacaagggctggccctctggcatgtttcccctacatgtgtggagagtggacttatcccaggcccaagggatctgaagatccccacagccagggaggaagctgcagctccagatggatggttcccggaactcc

SEQ ID NO: 97714 - DNA, 494 bp, Homo sapiens
caactgcaagatcttaggcaagtgacttagcctctccagatctgtttacttatctgtaaaatggagacaataatacctcattggttgtgaagaagattaaatgagactatgtatgtaaagctcttggcacagtgcttgatacaattagtggaagtgggggttactgatattattataccaaagagatcccaaagaaacacaatccgtgcaaaactgtgttctctatgcaaatgcagcctccagacaagttcctagccctacttctaagcagatggccaccttcaagcctctgtttatggaaattctggwgccatcatggattaatgttggcgcagacaataacatttcaaaataatttgccactttttaactgtctggcagatctgggtggaaaaggaccctggatctatggtgcatgcttcttggttcaggagaagaaggcagattggtagctggttacatatacctgagtagtaaaagatggcacaggctga

SEQ ID NO: 97715 - DNA, 596 bp, Homo sapiens
gtgctctgaccattgagtgtcattgctattagccacttaatccccacaagaggccatgctctaggtcaccctcattttagagataaagttcagccctgcttttcttctctrcctgatctcagcatagacagctgagcattgctttgactccagcaagcagaacaccactctcagagcccttgttattagcttgaattgaaattgcatcttgacctcaaatgagattcaagagcataggaacaaatacttttagaagaactaaaggagatgataaaactgtcatcgcatatgtcaggcctttctccctggatttccatgtccctgtttctctctccctctcctctggatgtcctactggaatcttgtagtattcacctggctatgagggagaacattgtgaaattccagaattgccacagcaactttggtaatgtggactccttacttggtctgtcctgtcttctgccattgcaatctgatggagctgtgggcgtcctgatgccagatataatccaaccaaataaatctctaagaacataaaataaaagctatctcacagtttccttttgtttcctgcacaaaagctattctcagta

SEQ ID NO: 97716 - DNA, 623 bp, Homo sapiens
tttagctgagaatttttcaaatatgttgttttaactgctgctgttttggtttatgtattttaattgaagtttcaaattgtgtgcttgcaccccatggagtaataaccacaaagggtagaattttgttaattgaaagaataaatttgaaaacaatgccctaaataagttagacaactaggttatagatgagacttccaagagatatacagatatatttgttagtgcctgtakgcacccttaaatacatgtggatccttttatataataataacagatagaatggtaacataaaagtgtaaactgctttaaaaaaagcattatattcttgaactagttgagttgtaaagtgtttctaaagaaagaatttcacaaagattaaaatgtcattatttgctcataatcactgcgtaaccactatatgccagatactattctaggcactagagaaaaaaataaatgaccaaaaataaaataatttgcctttaaggaatttaccatcaagagatagacacacaaacagttggaaaacaatgtgaaaactgctagagaatggctagacatggagttctacgggcatcgaaaagagaattttcaattgagacttgcaagatagttagatatta

SEQ ID NO: 97717 - DNA, 623 bp, Homo sapiens
tttagctgagaatttttcaaatatgttgttttaactgctgctgttttggtttatgtattttaattgaagtttcaaattgtgtgcttgcaccccatggagtaataaccacaaagggtagaattttgttaattgaaagaataaatttgaaaacaatgccctaaataagttagacaactaggttatagatgagacttccaagagatatacagatatatttgttagtgcctgtaggcacccttaaatacatgtggatccttttatataataayaacagatagaatggtaacataaaagtgtaaactgctttaaaaaaagcattatattcttgaactagttgagttgtaaagtgtttctaaagaaagaatttcacaaagattaaaatgtcattatttgctcataatcactgcgtaaccactatatgccagatactattctaggcactagagaaaaaaataaatgaccaaaaataaaataatttgcctttaaggaatttaccatcaagagatagacacacaaacagttggaaaacaatgtgaaaactgctagagaatggctagacatggagttctacgggcatcgaaaagagaattttcaattgagacttgcaagatagttagatatta

SEQ ID NO: 97718 - DNA, 623 bp, Homo sapiens
tttagctgagaatttttcaaatatgttgttttaactgctgctgttttggtttatgtattttaattgaagtttcaaattgtgtgcttgcaccccatggagtaataaccacaaagggtagaattttgttaattgaaagaataaatttgaaaacaatgccctaaataagttagacaactaggttatagatgagacttccaagagatatacagatatatttgttagtgcctgtaggcacccttaaatacatgtggatccttttatataataataacagatagaatggtaacataaaagtgtaaactgctttaaaaaaagcattatattcttgaactagttgagttgtaaagtgtttytaaagaaagaatttcacaaagattaaaatgtcattatttgctcataatcactgcgtaaccactatatgccagatactattctaggcactagagaaaaaaataaatgaccaaaaataaaataatttgcctttaaggaatttaccatcaagagatagacacacaaacagttggaaaacaatgtgaaaactgctagagaatggctagacatggagttctacgggcatcgaaaagagaattttcaattgagacttgcaagatagttagatatta

SEQ ID NO: 97719 - DNA, 633 bp, Homo sapiens
attcctctctttgtatcccataatgtacattcagctaaatgttcaacagtatttccaaatttacataatcagaatcacagaaacttgaatcaaactataaaaatcatagaattctagttcaagcacactttcaatgccatgtatttatttttacttttcaaatagtcatttttagtttttatttttgtgttttataagagtcagggtctcactctgtttccctggctggagcacagcagcctgatgacarctcactgcaatctcaaactcctgggctcaagtgatctacccacctcagcctcccaagtagctggaactacaggtgcttgccagcacgcctcactaatttttaaaaccttttgtaaagaagaggtctcactatgttgtccagattggtctcaaactcctggcctcaagtgaccctcctgccttagccttccatgagccaccatgccaggccacttttcacaaagtcatttttagaaatagcagcatacaagcacatcgattttcataatgattaagaatttttttaattgaaataagatactgagatcccaagtctcaaagtagcaaaagtttaagttgtttcaggttttctaaatcttatagtttatagccaaaacacaaaag

SEQ ID NO: 97720 - DNA, 599 bp, Homo sapiens
catttcatcatgagatcatcagcctctcccaataaatgagggccgagattgtctctgtttttaagcagttatatccctgttgccaaaaacagtacctggcatacagatggtgaataaaaacaaatgaatgatttaagaactttttttaaagtttggtgaaacaaaaggtacagtcatttcaaagccaaaagaatattcatttcaccatgactgtaaggatttctttttttctataactcaagagtaagtggtatacaaagagtttacacttaagtttatttctaaaaagttcctttgagacaagctgtattcattcttactaacatgggcaaaaccacgttaacaacagtcagaaaataataacttctctcttagaaatgaacactttagaatatcttctgattttctgaaatcaacttaatgcactttaagcttttgttgcggagaaaacmaaagaaccaattttttttaagtggatcaaagcccaaagtatcaactaatcttaaaaaccaaccttgaaccaaccaaatattaaccaagagaaaagtcagtctataacattttttcaattaggcctctgtagtaagaaagcagtgaag

SEQ ID NO: 97721 - DNA, 582 bp, Homo sapiens
  misc_feature (1)...(582): n = A,T,C or G
gaaaagattattgaaatttataaaaccctagaaagactgatcataaaataacacaaattaccaaaaccgcaaatgaaagaggagacatcactacaggttatataggcattaaatatattgaaaatatgtatacataattgagattagatagtggacaactctagaataccaatataaaaagacacagagaacagggcaattgggaaattaccccccttaatggtttcnttttttaaaagacattgaattcatgtctctcaaccaaaagcaaagtracaacaaaaaacacctgttggtccagagggtttatctggtgtattctagcaagtggtaaatcttatacaaaatttttgggaaaatagagaaagaaggattttatttatttttgggaaaatagagaataaaggaatattttcagccttattttgtaaggctagcataaccctgatattaaagccttacaagagtattataaggaaagaaaaagattatgtcataaatacagacagaaaaataacacatatcaacaaatagaatccaacaatatataaaatgagaaatatatcataataaagcagggtt

SEQ ID NO: 97722 - DNA, 582 bp, Homo sapiens
  misc_feature (1)...(582): n = A,T,C or G
gaaaagattattgaaatttataaaaccctagaaagactgatcataaaataacacaaattaccaaaaccgcaaatgaaagaggagacatcactacaggttatataggcattaaatatattgaaaatatgtatacataattgagattagatagtggacaactctagaataccaatataaaaagacacagagaacagggcaattgggaaattaccccccttaatggtttcnttttttaaaagacattgaattcatgtctctcaaccaaaagcaaagtaacaacaaaaaacacctgttggtccagagggtttatctggtgtattctagcaagtggtaaatcttatacaaaatttttgggaaaatagagaaagaaggattttatttatttttgggaaaatagagaataaaggaatattttcagccttattttgtaaggctagcataaccctgatattaaagccttacaagagtattataaggaaagaaaaagattatgtcataaatacrgacagaaaaataacacatatcaacaaatagaatccaacaatatataaaatgagaaatatatcataataaagcagggtt

SEQ ID NO: 97723 - DNA, 465 bp, Homo sapiens
tttgccccaactttattcaactcttcaggcagtcatgatgttaatcagttgcttctatttgtttttgacaaatgccccccaggtaaaagacttttcacatggccaagaacccaatcaggttaaacaaagacaaacttccaagtgggatcttccatagaatcaccagacagagcaaataataattctctgggaatgaggctttgaaagagctacaaccctattattcttccttcagtgactaccagcccttgtgggctgttagttttcaaggctaccacagagctgggtagatgggtgggatatgggagtagggcaacctaaagtgccacaaagctcattgttcttactgagatgcagtctttttttttttttttttttttttaagagctcttkggattcccgtaagcctttgcttaatttctacctttctaaaaaatggaacctgacaagttttgcctgttttgc

SEQ ID NO: 97724 - DNA, 465 bp, Homo sapiens
tttgccccaactttattcaactcttcaggcagtcatgatgttaatcagttgcttctatttgtttttgacaaatgccccccaggtaaaagacttttcacatggccaagaacccaatcaggttaaacaaagacaaacttccaagtgggatcttccatagaatcaccagacagagcaaataataattctctgggaatgaggctttgaaagagctacaaccctattattcttccttcagtgactaccagcccttgtgggctgttagttttcaaggctaccacagagctgggtagatgggtgggatatgggagtagggcaacctaaagtgccacaaagctcattgttcttactgagatgcagtctttttttttttttttttttttttaagagctcttgggattcccgtaagcctttgcttaatttctacctttctaaaaaatkgaacctgacaagttttgcctgttttgc

SEQ ID NO: 97725 - DNA, 672 bp, Homo sapiens
aattccccacctatccataaggctgaacttatgcctcacattgagcagtgagattctgttcatgggacagtcacctctgtttcaataaggactccttacagattgcgttgcactgcctttgttggagctttaagaattttgggagagattgtagttgttgaccttggaatttggatttttaagtactgaagctatatccattcgctcattatataaagattcagtatgcatgatcactaggaaatgtggatgtacgtgtgtttggactggaagcaagtgatgggggaaaaaggctttgaagacatatgaaattaagttagattaacttttcgagagtataactatgttatggtttttgttcattttacrcctaaataatatttgaatttataatatgtgattctctcctctcacagaagttacagtcagtatttttctttctagagaagcagaaagccacatacagaagcgccaatgcaaagaaagagcacctatttttgctttgggctttgggctctgggagatgtagttgtatctatcacagtgtctctacccagcaatatgtgatatataattataagtcaaggataagtttttaaataattatattagactgtgatttgtacaggtgagtattatcctttaaatttttagattagaaagctacatgtc

SEQ ID NO: 97726 - DNA, 623 bp, Homo sapiens
gttggagtaggtagaaaagtcttcaggaaggacacaggttattatcaaaaccttaagtaatacccgagatttaaaaagcagagccaatgattgagtcatttctaaaactggaaagagcacaagcaaaggcgtagagataggccaaaaaattgctgtgcaagagacactttggaggctaattgaatatgacatctgctagtcactcagatcagcagacccgacctagggataagaggaaggacggctgtatctgtcaggagagtgaaacttagcgcagtgagaaataaactcaggtagcttgagtagcatgttagttttctattcctgtttacatttatggaggttttagggaagaatgytattccttaccttttccagcttctccaggctgcccacattctttgccttccaaagatgccatgtcttaatccgtggaacatatgaattccgtcaccttacatggcaaaggggactttgctgatgagattaaattaaggatcttgaaactgggtggttaccctgaattagccagatgggtttcctcagtgtttaagattaacacaaagtacaacaaacatcttataaaaataaaagtttctagaatgaggaaatctttcaaaaaa

SEQ ID NO: 97727 - DNA, 582 bp, Homo sapiens
gagggcaacacagtaagtgacaacttgtcaatgcaatcaccttgttattcttcaacatcactactcaccactcgggcagaatcaataatgggtgatccacaatcatcattaaaactaaagaactaataaagtgaactcagccaaaccaatttatataacttggaccagcttctgtattttatactttaaaagtgatttcttctatattttgtttaatattttatgtaatgatatagtacacaaagatatgaacttattggagcaatgttcactttacattaaagttctgaattatcaaacaaatatgttcaactgaatacaatttttccattccttgttgttacttgaccttgatattttttaaagaatatttacatcacrtagtttttaaagacttaaaactaatcaaacatgtctaatgtttttcttattcattaaatttataaaaacaaattcatgatatataagcttctgacataatgaactctatctttaagcctttcttgtaaatcaatatatgttctaacataaaggtctctttttgttattgttttcttacatgatcctgtgaaaaattgaatg

SEQ ID NO: 97728 - DNA, 563 bp, Homo sapiens
aagcttattttgctgtaatcagcctacccagtgagggtcagacaggcagaaagagtaaacatcagcctagagaatacagctttagctgccctaactacaaagtckccagttttccaaagaatatgacccctatttactggctaacccctgacaatccatcagtagaacttcattaacttagcttatagctttgaactttggcaaaattaaaatgccaatgcatggaccatctacaatatatgtcacaggtatgaacggaatatggatgggaagaggcaaagtgaactttaggaaggaagcaccagaaataaggaaagggctggaaacaggaaggtgggggacacttcactggccgcttgatcatttgaccaagggtcaggagtgtgcagagagggagaacccactgacgccaagtcaaaggtcagcatgttggactggaccgggggatgggaaggatgctggtaacgtttatgtgtaagcttcatgagggcaggcttctgtctgttttgcttaatgctgtaactccagcaactaaaacagtacctggcacatggtggatactc

SEQ ID NO: 97729 - DNA, 563 bp, Homo sapiens
aagcttattttgctgtaatcagcctacccagtgagggtcagacaggcagaaagagtaaacatcagcctagagaatacagctttagctgccctaactacaaagtctccagttttccaaagaatatgacccctatttactggctaacccctgacaatccatcagtagaacttcattaacttagcttatagctttgaactttggcaaaattaaaatgccaatgcatggaccatctacaatatatgtcacaggtatgaacrgaatatggatgggaagaggcaaagtgaactttaggaaggaagcaccagaaataaggaaagggctggaaacaggaaggtgggggacacttcactggccgcttgatcatttgaccaagggtcaggagtgtgcagagagggagaacccactgacgccaagtcaaaggtcagcatgttggactggaccgggggatgggaaggatgctggtaacgtttatgtgtaagcttcatgagggcaggcttctgtctgttttgcttaatgctgtaactccagcaactaaaacagtacctggcacatggtggatactc

SEQ ID NO: 97730 - DNA, 563 bp, Homo sapiens
aagcttattttgctgtaatcagcctacccagtgagggtcagacaggcagaaagagtaaacatcagcctagagaatacagctttagctgccctaactacaaagtctccagttttccaaagaatatgacccctatttactggctaacccctgacaatccatcagtagaacttcattaacttagcttatagctttgaactttggcaaaattaaaatgccaatgcatggaccatctacaatatatgtcacaggtatgaacggaatatggatgggaagaggcaaagtgaactttaggaaggaagcaccagaaataaggaaagggctggaaacaggaaggtgggggacrcttcactggccgcttgatcatttgaccaagggtcaggagtgtgcagagagggagaacccactgacgccaagtcaaaggtcagcatgttggactggaccgggggatgggaaggatgctggtaacgtttatgtgtaagcttcatgagggcaggcttctgtctgttttgcttaatgctgtaactccagcaactaaaacagtacctggcacatggtggatactc

SEQ ID NO: 97731 - DNA, 563 bp, Homo sapiens
aagcttattttgctgtaatcagcctacccagtgagggtcagacaggcagaaagagtaaacatcagcctagagaatacagctttagctgccctaactacaaagtctccagttttccaaagaatatgacccctatttactggctaacccctgacaatccatcagtagaacttcattaacttagcttatagctttgaactttggcaaaattaaaatgccaatgcatggaccatctacaatatatgtcacaggtatgaacggaatatggatgggaagaggcaaagtgaactttaggaaggaagcaccagaaataaggaaagggctggaaacaggaaggtgggggacacttcactggccgcttgatcatttgaccaagggtcaggagtgtgcagagagggagaacccactgacgccaagtcaaaggtcagcatgttggactggaccgggggatgggaaggatgctggtaacgtttatgtgtaagcttcatgagggcaggcttctgtctgttttgcttaatgctstaactccagcaactaaaacagtacctggcacatggtggatactc

SEQ ID NO: 97732 - DNA, 594 bp, Homo sapiens
tggaggaagaaacaatggaaagagtttgagaaatgggcatatatgataagctatcctttcctcatgcagtttataaattatgtttgaagattaaaacaaaaattataatactatctgatatccaagaaaataatatttaaaactagggaaggtaaaggtctgtatatggtcactatccaatccttccctctccaaaatcagaatgaaagcaaaattctcacacttcacctacagtggcagaatattgacaacattagactgttgtcatatatgtatgttgttacacctagagaaacaactatgaaaatcatacgaaattaccccaaaacactaaaaataagtcaagatggaatcctaaaatatatttaagtaacckgcaggaaggcaagaaaagagaaatggaggaatgaaaaacagaagaaacaaatagaaaacaaataataaaatgacagagttgaatgctggcatatcaataattaccttcaatgtaaatggtgtaaatatccagtcaatggacagagattgaaagagtggataaaaaattataacccgataaaaaattataggagactcactttaaatttgaaacaggta

SEQ ID NO: 97733 - DNA, 610 bp, Homo sapiens
atatttgtggttgttttttcctcaacaaggtgaaaatataaaccttaataatcaaactacgacatccagatccatgatgtctgcgtctttatattccatactgttatgaattaaactgtgtcctcccctccatcagaattcatatgtggaagccctcacctctatgtgcctatatttggagagagggcatttaaggagataatcgaggttaaacgaagtcataataatggggccctaatccagtaggactggtgtccttataagaagagaaaaagacactagagatttctagtctctaatggaaaagaggaaaaggtcacataaggacacagcgagaaggcagctatctgcaagctgaagagagacctcattagaaaccaaattttctgataccttgatcttgtgcttcctaactccagaactgtgtgataataaattctgtcacttaagccaccagtctgtggtattttgtatggcagccctagcccactaatgcacatacctagcatggtgctgaatgcatttttaaagtttgttgcrtaagtaagagcttgccatctctccttctctcagcatgaagtatatcttgtctttaagcaaaatttacaaa

SEQ ID NO: 97734 - DNA, 607 bp, Homo sapiens
gaacacttcctccatgaaggcttccctgaccactggtatacctcctagaggcattcttaccaccctgttcctcctcctagcagaaaaacaaatacaactgggttgtttgcttgattcctgttcacatcccacattgaccatgtaaggacctccttacttccagtcttgagtctagcagactgcctgggacataatgtatgtgtgaatgaatgatgttctggttttgaaaggctgttttaatataagtgggaatacatcatcttagttgtaattatgatccagcaataaagttgattactgaaattgacagtgaattagtgtatattttaaaaagtagaacattcaaaagtcattactctgttcccttcctatgcccaacattataaatacttttaaacattatgttatattttgatcttccacatttgaaagggacacgttgcaataaaagaatgactagaataaaaatccagaagtcagagaaatatgattgtttaacctgcaacagatgtgctaaatattacattaatcatgctctcttgggacacaaagaaagttctcccyattcctcaaaagtacagagccatggcccgttgcaaagttgttt

SEQ ID NO: 97735 - DNA, 607 bp, Homo sapiens
ggctttaaagaggagatagagataggggtagaaagttaattcaaatgtatgacagagaacttcccaaacctagagaaagatatcaatacccaagtacaagaaggttwtagaacaccaagtagatttaatgcaaagaagactgtctcaaggcatttaataatcaaactccaaaaggttaaggataaagaaaggatcctaaaagcaactagagaaaagaaacaaataacacacaatggagctccaatacatctatcaacagacttttcagtggaaaccttacaggccaggagagtgtggcatgacaatattaaagcaatgaaggaaaaaaaaacttttattctagaatagcatatctggtaaaaatatccttcaaacatgacagagaaataaagactttccacaaaaaaagcagagggatttcatcaacaccaaaccagtcttacaagaaatgctcaaaggaaatcttcaacccagaagaaaagaatattaatgagcaacaaggaatcatctgaaggtacaaaactcactggtaatagtaagtacacagaaaattataacactgtaactgtggtgtgtaaacttctcctgagtagaaagaccaaacaat

SEQ ID NO: 97736 - DNA, 607 bp, Homo sapiens
ggctttaaagaggagatagagataggggtagaaagttaattcaaatgtatgacagagaacttcccaaacctagagaaagatatcaatacccaagtacaagaaggttatagaacaccaagtagatttaatgcaaagaagactgtctcaaggcatttaataatcaaactccaaaaggttaaggataaagaaaggatcctaaaagcaactagagaaaagaaacaaataacacacaatggagctccaatacatctatcaacagacttttcagtggaaaccttacaggccaggagagtgtggcatgacaatattaaagcaatgaaggraaaaaaaacttttattctagaatagcatatctggtaaaaatatccttcaaacatgacagagaaataaagactttccacaaaaaaagcagagggatttcatcaacaccaaaccagtcttacaagaaatgctcaaaggaaatcttcaacccagaagaaaagaatattaatgagcaacaaggaatcatctgaaggtacaaaactcactggtaatagtaagtacacagaaaattataacactgtaactgtggtgtgtaaacttctcctgagtagaaagaccaaacaat

SEQ ID NO: 97737 - DNA, 289 bp, Homo sapiens
ggatacaaagaaaacatattctacagctgtccaatgtgtttcaagctaagcattattataaaagcatcaaaaagcttaaaaatttttaaagtttataaagtaagaaagttacagtaagctaagattamtttatcattgaaaaaagttttttaataaatttggtgtagactaagtatagtgtttatcaactctacagtagtgtacagttgtgtccttgggcttctagattcactcaccactcactcactcagagcaatttccagtcctgcaaactccattcatgctaagt

SEQ ID NO: 97738 - DNA, 662 bp, Homo sapiens
tgatattcaaaacttctctgataccgcaaaagcagcactgagaggaaagtttatgtcataaaatgcctacatcaaaaagtctgaaagagcacaaattgaccacttaaggtcatacctcaaggaactagagaaacaagaayaaactaaacccaaagctagcagaagaatagaaataacaaagatcagagcagaactaaatgaaattcaaacaaacaatacaaaagatcaatgcaacataaagctggctctttgaaaagataaacaaaattgatagaccattagctagattaaccaagaaaaggagagaagatccaagtaagctcaattagaaatgaaactggagacattacaattgacaccacagaaatacaaaagatcatttttgtatttctactatgaacatctttatgcacacaaactagaaagcctagaggaaatagataaattcttggaaacatacaaccttcctagattaaatcaggaaaaaaatagaaaccctgaacagaccaaaaacaagcagcaagattgaatcagtcatttaaaaattgccaacaacaacaaatgcccaagaccagatggattcacagctgaattctaccagacattgaaagaagaattggtaccattcccacagaaactattccaaaagactgagaaagaca

SEQ ID NO: 97739 - DNA, 534 bp, Homo sapiens
atttctttcaaagctcaaagttgtgtggtctgtaataggtcctgaataactgacaaagttgaaaaatacagatgttgcctaactctccagacaaaatgtgaggtgcaattttcaagttttaaaaaaaattataggatgtactttcagtatttcctgataaattacttgaatctttgaaatgtttatttttcttttaagtcatcccgttggtttaggccttttttttgtgacagaattctacaacatataattgcactacaggtaggtattaagtaaccattaagaaacagcaacaaaaaaagtaacaacaacagactgatgacccatttctctgttagcaaggtatttttgtatagtctattttagtttacmttgtaaaatgtatgtgatttaatttctcttgtgtctttggtgaaaccgccttctcagttcatgtctgtattttatgctattaacatattttggcatctgagtccatattcagaattttctcatctcattccaaagaagtaatttttactaatagatggtatt

SEQ ID NO: 97740 - DNA, 579 bp, Homo sapiens
cactagggactgaagtgaaccctcagcatactgcagcagccctagggaaaagtggccaggctggttgttatgtgggtcccaaattttgtatcttcttactgggcgggtcttccaggattgggtctccagccaccccctgctgggactattgagccagtaggagctctacaactccctgggacagagctcccagtgagaggggcaggttgctatctttgctgtcttgcagcccacacccttgctgcctccaggctctggggagtccatgaagcccaggggctggtctggatccccagcacagagcacccacctcacagaaaagtggccagactgttctctgtgcaggtcccagtccacacttctcctcactaggcagggctgcctgacctgggacttcagtaaaactgccttrcccctgcctgattacctcaattagaaacagcccagcagttaaaggaataccaacatgcagagatgagaaaaaaacaacacaagaattctggcaactcaaatggccagagtgtcttgtgtcctccaaacaactacggtaattctccaaaaagggttcttaaccagcct

SEQ ID NO: 97741 - DNA, 419 bp, Homo sapiens
taaagccagttgctaattagtataagaaaccatgattaagtttggcatattcagtttttccaacccccccaaaatctctttattcataattaggcaagttaagtcccctgaaaaactgacttggaaatatcttgacttagcatgtgtyattaaaagaggagacacaaaagattttggtggagtgttataaaaatattttcccatttattttgcccaaaccaactgcactcttttgaaaagatgtataataaaaattaattttgtgaatttatgtaaaacatatgctttggtgttttatgttagacctttatttcaaacatacattagaaaataggcaaataaatgtagtccatgggtcttcagttatagtaagtaaatctgaactctccttttggggttcccacttcattcgtgaattc

SEQ ID NO: 97742 - DNA, 537 bp, Homo sapiens
atccatgcctttttgttagcataataatggactcctggaaaactgagtacacaagcttttgtctatcatggcaagttacacttatgcaatgcctgctgcattggcatatcccaacacagttattctgttattggcatccttcattactgtaggttgtctcaycagctgtagtcagtgtcttcctggggcaataacaccaaaacagtgatatttcttcagcattatagacttgacatggagtcaaaatttcatcagcaatgaccctggcaaatttgtcaataaatttctcctctatttcaagatcagtagatgctttgttaccagatctttaaaaatttaatgctatgtcttttttaaaaacttctacagccagcctattgaacgttcatacttccctttatcagttcatcatgatagatctttgcttgtttcatgatcagcatatcattaagtgtcatgtgttcactgtgacactgatggatctgcactttcaatacatgattgagatccttatttttagctgtgtgcagtgttttc

SEQ ID NO: 97743 - DNA, 537 bp, Homo sapiens
atccatgcctttttgttagcataataatggactcctggaaaactgagtacacaagcttttgtctatcatggcaagttacacttatgcaatgcctgctgcattggcatatcccaacacagttattctgttattggcatccttcattactgtaggttgtctcatcagctgtagtcagtgtcttcctggggcaataacaccaaaacagtgatatttcttcagcattatagacttgacatggagtcaaaatttcatcagcaatgaccctggcaaatttgtcaataaatttctcctctatttcaagatcagtagatgctttgttaccagatctttaaaaatttaatgctatgtcttttttaaaaacttctacagccagcctattgaacgttcatacttccctttatcagttcatcatgatagatctttgcttgtttcatgatcagcatatcattaagtgtcatgtgttcactgtgacrctgatggatctgcactttcaatacatgattgagatccttatttttagctgtgtgcagtgttttc

SEQ ID NO: 97744 - DNA, 556 bp, Homo sapiens
tttatttctgaactttggaagagttcaggaaaaaagtgatactttgaatggttaggcctaaatctcaagtcaatcttttgagctgggaataagtcaatgtcatgcaaagcacacaaaataagggaaaaaggagtggatcccagaggaaaattagtatacccttaccagagaaagcttaataaattctggatcactaaaacaagtcatttatgacaatttcttatagatctgatattaatactccaagtacaattttatattgactgaaggctgataatttgttttgtggcataaaattaaataagggtaaggaaaggtgctattgattaagtttcctggagaayagactctgaaatggaaatttgcaggcatgaagttcattaggaagtgatttcagtatcaacatttgtaacagagtgaaagaagaataagtgagcagtgggaaaagttgaactctgaaaaagttggccgcagccaatcccttggagatctctgaaactagcctactcttctaatagtctagtcttctacattgccctgaattgaggcaagggga

SEQ ID NO: 97745 - DNA, 582 bp, Homo sapiens
ccaaacctcaaaagtagggaagctgagagtgcagccttcagtctgtggccaaaggcccgagagcccctggcaaattactggtgtaagtccaaggatccaaawgctgaagaacttggagtctgatgttccagggcaggaagcatccagcacaggagaaagagaaaaagcatccaggcaggaggaagaaaacagatggagaaaaatgaaacagaagacttagccagtctagtctttccatgttcttctgcctgcttttattctagccatgctgggagctgattagattgtgcctaccagattgagggtgggtctgcatctcccagttcactggctcaaatgttgatctcttttggtgacaccttcacagacacacccagaaagaatacttagcatccttcaatccaatcaagttggcactcaatattaaccattaccacctgcgatatcaggactaagtaccggcaaccaggatgctagacaaagtggtcagtgtcattagtagaatatcatagtaattaacttcaagaaatgtgataggattaggatcaatgcaccaaaactgacattcagcaagcccctcca

SEQ ID NO: 97746 - DNA, 615 bp, Homo sapiens
ttataaactgtttcagaccatagaaaaagatgaaaaacttcacagttcattttatgaagcaatactaattttgatatgaaacccaataagagtataataaaaaggaaattataaatcagtttcatttgtgaggatttaaaaaatcattagcaaaatgaatccagcaacatattaaaataatttaacataataaccaactggagtagaaccagaagtgcagacgtggtttaacattagaaaacaatttctataaaacaaaaacagatggctatcctccctcacttcaattatttgacattgttctggaggttccaattagcacaaataaagacgtaaagttgtttagtatttgaagatgatatgattgtatgtaagaaaaatccaagattccaagtgraaaacttgttaccaaaaaaaagcaaatacaagtaagtaggctggatataaaattaatatacaaaaattgatggctttaatatctaaaaacaaaaactacttctaacgaataatggcataaagtaccaaaaaatcaatagcaataaaaaataaatctccaagaataaatattgtaagtaaataattaacaagatctaaataacaaacggatttaaatac

SEQ ID NO: 97747 - DNA, 615 bp, Homo sapiens
ttataaactgtttcagaccatagaaaaagatgaaaaacttcacagttcattttatgaagcaatactaattttgatatgaaacccaataagagtataataaaaaggaaattataaatcagtttcatttgtgaggatttaaaaaatcattagcaaaatgaatccagcaacatattaaaataatttaacataataaccaactggagtagaaccagaagtgcagacgtggtttaacattagaaaacaatttctataaaacaaaaacagatggctatcctccctcacttcaattatttgacattgttctggaggttccaattagcacaaataaagacgtaaagttgtttagtatttgaagatgatatgattgtatgtaagaaaaatccaagattccaagtgaaaaasttgttaccaaaaaaaagcaaatacaagtaagtaggctggatataaaattaatatacaaaaattgatggctttaatatctaaaaacaaaaactacttctaacgaataatggcataaagtaccaaaaaatcaatagcaataaaaaataaatctccaagaataaatattgtaagtaaataattaacaagatctaaataacaaacggatttaaatac

SEQ ID NO: 97748 - DNA, 615 bp, Homo sapiens
ttataaactgtttcagaccatagaaaaagatgaaaaacttcacagttcattttatgaagcaatactaattttgatatgaaacccaataagagtataataaaaaggaaattataaatcagtttcatttgtgaggatttaaaaaatcattagcaaaatgaatccagcaacatattaaaataatttaacataataaccaactggagtagaaccagaagtgcagacgtggtttaacattagaaaacaatttctataaaacaaaaacagatggctatcctccctcacttcaattatttgacattgttctggaggttccaattagcacaaataaagacgtaaagttgtttagtatttgaagatgatatgattgtatgtaagaaaaatccaagattccaagtgaaaaacttgttaccaaaaaaaagcaaatacaagtaagtaggctggatataaaattaatatacaaaaattgatggctttaatatctaaaaacaawaactacttctaacgaataatggcataaagtaccaaaaaatcaatagcaataaaaaataaatctccaagaataaatattgtaagtaaataattaacaagatctaaataacaaacggatttaaatac

SEQ ID NO: 97749 - DNA, 619 bp, Homo sapiens
taggatattttcagtactccaggaagttcccttgggtcccttttcaaacagtacctacccagaggtaaattactcttctgaattttagccctttaggctaattttgcctattttgacattgtataaaaggaataatacaatatatatatttttgtgtctgttttctttcacctagcattgaagtttgtgattcttttatgttattgtctgtggcagaagttctttttttctttaacttttgtttggtaattcattttgtgaatatactataatttatccattctactgtcagtggacagtatttagctatcacaaataaagctgccctgaacattcttgtatatatcttttgctggatatatgcactcatttcttttgtgtgtatacctagaagtggaattgctatatcatagggtaggtgtatgtttagctttagaaggtactgacagctattttttaaagtggatataccagtttctactccagctaacaatctgtgagaattctagttgctctgcatccttgccattactcagtatcatccagctgttaaacttttgctgtcctgatgggtgatcctttttctrtgattgcaaggggattctagatttcctaataa

SEQ ID NO: 97750 - DNA, 559 bp, Homo sapiens
ttgagctaaaacttaactatttataaaagttatcagagcacaggataagcaacatgaaaggtgggcatgtgaggttaggtctaatgctgagctggtgtgcacaggtgcagcacagcaggtgtgaagatgctgaaatgcttatgtgtagggcactaagtaaggcctctgctctgagccctccaggacacccaccacccctcccaggatgatcctcctgctgtgcagcaccgggagggcactgtatggaccctactccagctgtggtcagcatctattctgattggtcagtttccctacatggccagttgtaaaattctttgactataactctggggttgggaaaaaactgcatcgaggacagtaacgggtagggatgggaactgagtgtgcaaatgtagtcctggacaaagttaaatgttggattttccctttaggggctggagagtcatccctagaccataattaaggagtgayaggcacaggtgcttagttgagtcacacctgtcagggtgatctcagaggagaaggtaattagagtgagacatgccttctgagtgaa

SEQ ID NO: 97751 - DNA, 575 bp, Homo sapiens
tttgctggagcaagatcataaaactagtttctactctctgagagaagtctccctctggcttcaggggaagaggcatcacaatttattatgcgtttccttcagggaggatcattatctgcatatgtaaaatctgacattcacagggaaaagtcacaggcgaggaagccacactgtcttgctctcattgctacaatcctggaaaacatggacaactgtttccttcaggcagctgtgccttccccacagctctgattggtgaaagccacgagctgctttaaagaaaggtcatctgagagctgctcttcattgaatctgctttccccaaatcagcgcagccctttctcaacactgatgagggttgggagtcagcccctaactcccacattctgtgtgtgagcacagtttccttggtatgtaataaacataaaattcaagtaagaattttattataacctatataamtatatttaaaagtatatttaaatatacataactaaacattcttattaattcccacagaagttatatactttggccttcagaatatatttaatttgaatatgtttgaaagtctt

SEQ ID NO: 97752 - DNA, 524 bp, Homo sapiens
gcagtgagccgagtttgtgccactgcactccagcctgggcaacaagagggaaattctgtcaaaaaaaaaaaaaaaaaacaacctagtttcagtgaaaaagtaagtgaaaggtaagatgataaaaacaacaaactgagcaaactgagatgaccaggaagctgaaagtagctaaagataggatggaataaacaaacatatcaaaatcaaagtatattactatattataatcttctgtttctgattatatgtggcctaatcagtctgcaataacgttgcaacatttttagaaataaaaaaaaattctcttgaacgtatagctagactaacaacattatgagaactctctaaatttcttgcagaaaaggctgaacaaggagtgatagaattgggattgtgcctgccatrgggatgctttctgaccttagtaaccatcgatatttgttattgtcatgtggaaaccagatgtgcattgcgtccccagagggcaaggagttgagctaagcctcctaaaccaaggtggaacc

SEQ ID NO: 97753 - DNA, 524 bp, Homo sapiens
gcagtgagccgagtttgtgccactgcactccagcctgggcaacaagagggaaattctgtcaaaaaaaaaaaaaaaaaacaacctagtttcagtgaaaaagtaagtgaaaggtaagatgataaaaacaacaaactgagcaaactgagatgaccaggaagctgaaagtagctaaagataggatggaataaacaaacatatcaaaatcaaagtatattactatattataatcttctgtttctgattatatgtggcctaatcagtctgcaataacgttgcaacatttttagaaataaaaaaaaattctcttgaacgtatagctagactaacaacattatgagaactctctaaatttcttgcagaaaaggctgaacaaggagtgatagaattgggattgtgcctgccatagggatgctttctgaccttagtaaccatcgatatttgttattgtcatgtggaaacsagatgtgcattgcgtccccagagggcaaggagttgagctaagcctcctaaaccaaggtggaacc

SEQ ID NO: 97754 - DNA, 500 bp, Homo sapiens
cttcgctcctctgcacctgagcaattcatttgctgccaagaatctaagaatctccaaagatttttctccctaaatatatgaaaatattttaagtaaaaagcaagccattgagattttgacttgggtaggcctgagggatgcaggtagattcttagctcggccataagccccccactctagcgtccctgtaaactgcagcaccagaagcattgaagtgatgtgccattccaaacccgatatgcaggacatggggaatgcacccctggattcatcagtccaggaagaccagcaacgccctgccatggatgaatgccctaatgtgtaagcagattrtcatcatcagaatgaaagatgtacagtattcaaagtctttcaaatatctgatcaaataatcctcatggccaatctcttgaattgtgttgttttattcaaaatgaagacatttctccagtttctgtcagttagaagctgtaagttagagtaaaaacatcccctaagaa

SEQ ID NO: 97755 - DNA, 571 bp, Homo sapiens
gggttgggggagtggatgtgtctcctttttcaatttctaaaagttttaattcttctttgccccattaattaatgtaattacctaacttaaaaaaattgaacaatgctattcatgaatttatcctgctttattttggtatgtttaaactatattgattaatatataaaactaaaatttaaattgaaagtgtactgattaaytcaaatttagagtattttgttgagtatgtttatataaataataataagaaatatttgtcaattgtgtattggggggtgtctgtgtgttgtccctagacatactgtagtgtaagacctaaaaagggtcactattatatgctgtcttgacatctggtaaaattgacaaccttccttttcactgggatgaagcagtgtctgcttattcctgagtagaagatttcagtcttctgccatctcgtggaatcgttcaaacaggccaatcacaccctcccatgggaacaggggcacctcatcctcttgatactacaaagtcttctccacagcccttgttgttcagtctgttccaagtgcagccccacgtgaccttccat

SEQ ID NO: 97756 - DNA, 608 bp, Homo sapiens
agtggttccaccgttggtatttttattttctctcctgcaggtccaccacgtataggtgttcatgttatatactttacaaactaaaaagtgccattacaaaacagtccatgtgcagtgcacagccagcgaatctatgagcaaaagccttttagctttcaggttttctaaaacagatttatttccatgtattctagtcagcatgtggtgtacacgtggaatctggattctcatgtctcttttattctggaaacagtttattgccgatttcaatattggctttctgtcactctttcctgctctcttctggagatcctatttagacatgtccttgcttctgtcaatctgccctacatatttcttaactacttttcctattttatttcaaaatctttttatctctctaattagattstatatctgtttattgtttttccatcttgtttttattttttattttttctcactctgggcttaaccctaaacaaattctttttagtacaattgtctaaataaatgtgttaactatttatttgtagcccgtatatagtttctcccatttgttgttaatttctattttaatgaccatgtttaactctaagttttgttta

SEQ ID NO: 97757 - DNA, 608 bp, Homo sapiens
agtggttccaccgttggtatttttattttctctcctgcaggtccaccacgtataggtgttcatgttatatactttacaaactaaaaagtgccattacaaaacagtccatgtgcagtgcacagccagcgaatctatgagcaaaagccttttagctttcaggttttctaaaacagatttatttccatgtattctagtcagcatgtggtgtacacgtggaatctggattctcatgtctcttttattctggaaacagtttattgccgatttcaatattggctttctgtcactctttcctgctctcttctggagatcctatttagacatgtccttgcttctgtcaatctgccctacatatttcttaactacttttcctattttatttcaaaatctttttatctctctaattagattgtatatctgtttattgttttyccatcttgtttttattttttattttttctcactctgggcttaaccctaaacaaattctttttagtacaattgtctaaataaatgtgttaactatttatttgtagcccgtatatagtttctcccatttgttgttaatttctattttaatgaccatgtttaactctaagttttgttta

SEQ ID NO: 97758 - DNA, 574 bp, Homo sapiens
agacggtgttccataaatgaacgcatgagctctcaaaagaagcatgcattgtttctatcacatgtgctagatatattattgatgcctcatgcatgcgcattacaggaccttgaactcggaagagggaagatagctcaaaggtgtattcctggatgcagtccaaattctgaatggttcccagtgtatttaagtgacaggctggccctgcacaatcgctgtggacacatgttatcccaacatttactagagcttggaggctgaggcaccttcacatgtcttaccagaggcagattccctgcttcacaggggctggcttcactagctgatttccctgacagccttgacttgtcaatggcaaagggaaatgcaacccatctggatataggcagtaatcgcccatttttagggctccaaatttgcagacgttaagacctgtgggtacaagtgacctgcacagcgaaggtggagaagaacaggccatggccacrtagtgggaacgtgggagggaccccggcacccctgatgagtggaggcttgctggaactgcacagactctgggaacgggaaagaattc

SEQ ID NO: 97759 - DNA, 533 bp, Homo sapiens
agaaacccaacaggtgactatggcttcatgtatttatgggtgtcgtttgaagaagcacaggttaccttcatgtgaaaaccacaccactttggagatccacacctggctcagagtacaggtacatctcaagctacagcagctataggaacccttaatgggggccatcagaggtgttgagatcctacaatgccaattaacactcccttaataacacctgagaaaatggagccgtgcacckgtgagaatcacattttccagggctgctacctccgtcatcagcaagtctcttcttcttaacctgtgaaagctgtaggagggccttgagtgctctcaaggctcatttcaatgatcccattttcaactatcccagaagaacacaacatacttccttgggagctcttgtggctctgaagacctctcattaaggtaaatacattcttgcagagctaagccactattgccattaatgtctggcacccagccattgtatggattcccagagcacagggtctcatgtggtgagatgcagagaa

SEQ ID NO: 97760 - DNA, 576 bp, Homo sapiens
aattccataaggagtggacagaaggcagcagggacaggaagacaccagtgtaggggaaagtcagctccaaaaggtgtcaagagaatctgtacttgttgcctaggctgaagacacatttgtctatttaactgctttgcttagagctatttagtaatatattactagtaaatatagtaattaacatttataagcacgcaccattttacagcttttatggtacgcttgtaacctatattctaatttaaaactcaacacagctctacaaggtagctttaatataaagacagcaagaccgaggactggagaaagactacatccagggttaccgagtcaaggctgaaaccttgacactttgatgtcasagcctagctgggattcatgtaatagtgtaacctgaacgtgattgaaggcggtatccaaggaaatctggcgtgcaaatactgctgaatttctgcaaaattcttgatcagtaccaagggtgatgtagatgtagtcattttagcctccacccattctctgaagttctattaaaggcaattaatcaaggccagggtaaccacatggcagaggaaatgt

SEQ ID NO: 97761 - DNA, 532 bp, Homo sapiens
tgccttgctctcagaatgcaaattgtgcccagtgactgggtccataaacttggggaaatgcaagagacagactgatgaataatgaatacttctgcacacagttaayatatttgttttatagcacctcaatggtctcaagtgataatgcaacttggctatttaagcctattttatataagtggaatgtacagctcaaataatgcaacctaaattacacttgcatatatgagctacggagcatatagtgctctattgtttttgcagatcggaaacctaggtaagagctgttaagggcaccctccctggtcactatcagactgtggtagcactgtgctgatctggaatctgagtcccagagccctacccatcaaatgacatgacttcccttagcaaatgggaatttttcagatggattcatgcacagatgacatattctcccaaatgcgcagttcagcccttggtgcatctgtgccaatgcttcagcacctgccttagcaaaccacatgtcctgtgtcaagtgatttaacataac

SEQ ID NO: 97762 - DNA, 561 bp, Homo sapiens
gcctatggtttaatgtattttgggcagttccagtgacctaacttcagtatcaacatctgtatctataaaagactcagaaaaatatgacaggtcttctacatccttagagctttccctacacaaagactatccaatacagagatcatgagactgtaaaagagtaagaatttgctacatggcatgtgcaaatgactgacatttagaagacactacagagtatgcagaaatgatgaacccatccrgacagagaaatcattgaaaaagtaaaaagagaaaccccaggctggctaactaattaatgatgcacgactgatagaaatatagaaccatgaagcaccatgtgattccctgatttcctctagaaagcaccatggcttagatattgcccactgaagccatggaactctaattctaacactctcgctccccaacctcaccccttctctgaactctattagtccctcacagaagggcagaaaaacatcagcctttaccgtggtcaggtctgaatttaccgtttaacctagacagtttctctccttcgcctaggggatgacaact

SEQ ID NO: 97763 - DNA, 561 bp, Homo sapiens
gcctatggtttaatgtattttgggcagttccagtgacctaacttcagtatcaacatctgtatctataaaagactcagaaaaatatgacaggtcttctacatccttagagctttccctacacaaagactatccaatacagagatcatgagactgtaaaagagtaagaatttgctacatggcatgtgcaaatgactgacatttagaagacactacagagtatgcagaaatgatgaacccatccggacagagaaatcattgaaaaagtaaaaagagaarccccaggctggctaactaattaatgatgcacgactgatagaaatatagaaccatgaagcaccatgtgattccctgatttcctctagaaagcaccatggcttagatattgcccactgaagccatggaactctaattctaacactctcgctccccaacctcaccccttctctgaactctattagtccctcacagaagggcagaaaaacatcagcctttaccgtggtcaggtctgaatttaccgtttaacctagacagtttctctccttcgcctaggggatgacaact

SEQ ID NO: 97764 - DNA, 570 bp, Homo sapiens
attgtattctattttttaacttttaggttcaggagtacgtgtgcaggtttgttatataggtaaattgagtgtcatgggggtttggtgtacagattatttcatcacccaggttataggcatggtacccaatggctaggttttcattctgcaccctcctccttccctctgccctcgagtaggccctgtctgttgttcctttctttgtatccacctgtattcatactgcatgtactttttgctgcttttttttttaatctctcccwttttttcctttgtcttttccatggcttgccaaaataatgattagagatgctagaaactggtttacgatcataaaaaagaaagccacatgtttgattgagaaattaaaaggtccttttttgatgttatcatggagttgctgtataagacccaggatgccaatctttgggttgctgtataagacccacgagaaaaataaatccttctttgtttaagagattataattggatttccattctgtgctgctgaatccaaatctagacctaggagattactaggtcagtatttttcttcatgcagcagtgttt

SEQ ID NO: 97765 - DNA, 665 bp, Homo sapiens
taagtatccatcaagagatgaatgaataaagaaaatatagtacatatacaaaatggaataccattcagccataaaaaacaatgagttcctgtcatttgctacaatgtggatagaactggaggtcattatgttaagtgaaacaagccaggcgcagaaagacaaacttcggatgctctcacttatttgtgggagctaaggcttaaaacaattgaactcatggagataaacagtataaaggttaacaggctgagaagggtagtgagggtttgggaggaaagcggggcacactaataggtacaaaaacatagttagaaagaatgaataagacctagcatttgctagcacaacagggtgactatagtcaaaaataatttaatcgtacatttaaaaataactagaagagtataatcagattgtttgtaacacaaaggataactgtgtgaagtgatgsatattcaatttaccctgatgtgattattatgcatgtatcaaaacatctcatgtactccataaattttcaaaagaagtatgtatagcataacgcttaaaataatatactgtaatagtctacaacttggcaagaaattaagctttcgtttatttttgtcacaacaggtatactacatgcagattaaaatatatattttatatatatatatatacca

SEQ ID NO: 97766 - DNA, 665 bp, Homo sapiens
taagtatccatcaagagatgaatgaataaagaaaatatagtacatatacaaaatggaataccattcagccataaaaaacaatgagttcctgtcatttgctacaatgtggatagaactggaggtcattatgttaagtgaaacaagccaggcgcagaaagacaaacttcggatgctctcacttatttgtgggagctaaggcttaaaacaattgaactcatggagataaacagtataaaggttaacaggctgagaagggtagtgagggtttgggaggaaagcggggcacactaataggtacaaaaacatagttagaaagaatgaataagacctagcatttgctagcacaacagggtgactatagtcaaaaataatttaatcgtacatttaaaaataactagaagagtataatcagattgtttgtaacacaaaggataactgtgtgaagtgatggatattcaatttaccctgatgtgattattatgcatgtatcaaaacatctcatgtactccataaattttcaaaagaagtatgtatagcataaygcttaaaataatatactgtaatagtctacaacttggcaagaaattaagctttcgtttatttttgtcacaacaggtatactacatgcagattaaaatatatattttatatatatatatatacca

SEQ ID NO: 97767 - DNA, 586 bp, Homo sapiens
gctctttctgtccaccatgtgaagctgcattgagaaggcagcagtctgaaacccaagagagctctctcaccagaacccaattatgctggcactctgctgttggacttccagcctccagaactgtgagatgtgcattccgttatttaaaagccactcaggttatggaactttattaaagcagcctgaacygctgaagatggaaattgatcatgagaagtgggagtgctgttattataaatacctaaaacaaagtgaaaatggttttgggctcagtgattggcagagattgatgaggttttatgcaaaatgctagattactgtggaagaaatttaaaagccaattctcgtgagggctcggaaagaaatatagaagaaaacgctgtcttctcagaaaataattaaataatcatgaacagaatattgataaaatatggacagtaaaggtcattctgttggagtctcaaatggaaatgaaaatgttattggaaaatggagcaaaagcaatccatgttgaaaagtggaaacaaacttctttgaattgtattcatgctcttgtgttttgcggaaggtggaacttgtgtgcagt

SEQ ID NO: 97768 - DNA, 586 bp, Homo sapiens
gctctttctgtccaccatgtgaagctgcattgagaaggcagcagtctgaaacccaagagagctctctcaccagaacccaattatgctggcactctgctgttggacttccagcctccagaactgtgagatgtgcattccgttatttaaaagccactcaggttatggaactttattaaagcagcctgaaccgctgaagatggaaattgatcatgagaagtgggagtgctgttattataaatacctaaaacaaagtgaaaatggttttgggctcagtgattggcagagattgatgaggttttatgcaaaatgctagattactgtggaaraaatttaaaagccaattctcgtgagggctcggaaagaaatatagaagaaaacgctgtcttctcagaaaataattaaataatcatgaacagaatattgataaaatatggacagtaaaggtcattctgttggagtctcaaatggaaatgaaaatgttattggaaaatggagcaaaagcaatccatgttgaaaagtggaaacaaacttctttgaattgtattcatgctcttgtgttttgcggaaggtggaacttgtgtgcagt

SEQ ID NO: 97769 - DNA, 586 bp, Homo sapiens
gctctttctgtccaccatgtgaagctgcattgagaaggcagcagtctgaaacccaagagagctctctcaccagaacccaattatgctggcactctgctgttggacttccagcctccagaactgtgagatgtgcattccgttatttaaaagccactcaggttatggaactttattaaagcagcctgaaccgctgaagatggaaattgatcatgagaagtgggagtgctgttattataaatacctaaaacaaagtgaaaatggttttgggctcagtgattggcagagattgatgaggttttatgcaaaatgctagattactgtggaagaaatttaaaagccaattctcgtgagggctcggaaagaaatatagaagaaaacgctgtcttctcagaaaataattaaataatcatgaacagaatattgataaaatatggacagtaaaggtcattctgttggagtctcaaatggaaatgaawatgttattggaaaatggagcaaaagcaatccatgttgaaaagtggaaacaaacttctttgaattgtattcatgctcttgtgttttgcggaaggtggaacttgtgtgcagt

SEQ ID NO: 97770 - DNA, 586 bp, Homo sapiens
gctctttctgtccaccatgtgaagctgcattgagaaggcagcagtctgaaacccaagagagctctctcaccagaacccaattatgctggcactctgctgttggacttccagcctccagaactgtgagatgtgcattccgttatttaaaagccactcaggttatggaactttattaaagcagcctgaaccgctgaagatggaaattgatcatgagaagtgggagtgctgttattataaatacctaaaacaaagtgaaaatggttttgggctcagtgattggcagagattgatgaggttttatgcaaaatgctagattactgtggaagaaatttaaaagccaattctcgtgagggctcggaaagaaatatagaagaaaacgctgtcttctcagaaaataattaaataatcatgaacagaatattgataaaatatggacagtaaaggtcattctgttggagtctcaaatggaaatgaaaatgttattggaaaatggagcaaaagcaatccatgttgaaaagtggaaacaaacttytttgaattgtattcatgctcttgtgttttgcggaaggtggaacttgtgtgcagt

SEQ ID NO: 97771 - DNA, 536 bp, Homo sapiens
gaattctcttttacttactaaggttgagatgcctatttgatattcaaggcagtcgcaaatgagatgagtgttcaggaatgagatatcagctaaagatataaattttagtcttgtgcccatatcttagctgcaaggaaggattttatgaactgctggtgagactgtaaatcagtgcaatcaacgtagacaaakaaataaatgcatacaccatgtcatcttgtaataactcccaacccccaacacctaaagaagagactgtgtgtttaagttgggagtgtattgtggagtaagaataagaaacaggatgggtgctatagggagagagagtaaaatctagaacacattattaagttaggtgatggaatactatatgaccattcactgaagtgaaacaacgggggaaatatgtatccatcagctctaggagttccatttttcaagcatagcctcatggatgctaacttctcgatgtgtctagacagtgcatttatgagtaacaagcaaaatgcctacaacaatccacacaacattgtctg

SEQ ID NO: 97772 - DNA, 443 bp, Homo sapiens
gatataaattttagtcttgtgcccatatcttagctgcaaggaaggattttatgaactgctggtgagactgtaaatcagtgcaatcaacgtagacaaagaaataaatgcatacaccatgtcatcttgtaataactcccaacccccaacacctaaagaagagactgtgtgtttaagttgggagtgtattgtggagtaagaataagaaacaggatgggtgctatagggagagagagtaaaatctagaacacattattaagttaggygatggaatactatatgaccattcactgaagtgaaacaacgggggaaatatgtatccatcagctctaggagttccatttttcaagcatagcctcatggatgctaacttctcgatgtgtctagacagtgcatttatgagtaacaagcaaaatgcctacaacaatccacacaacattgtctga

SEQ ID NO: 97773 - DNA, 587 bp, Homo sapiens
tttcacctattattaatatcttacattagtataatatcattgttataacgaatggatcattatttatacattgttattaactaaagtttatacacttttcatgtttcctcagtttttatctaatgtcccctttctgtccctggatcccrtcaaagatatcttgctacatctagtagtcatgtctcgttggactcctaatggctgtgatagttttgtagacatcccttgttttggatgaccttgatgatttgatgagtatggggtcagataatctatggaatgtccctcaactggacttgtctgatgttctctcatgattaacctggggttatgaacttccagtaggaaggccatggaggtaatgtgacattttcatcacattgtatcaagggtacatatatcgacatgacttttgatattgatgttggtcacctggctggggcagtgtttgtcagatttccccaatgtgaagtacactttttcctgtctatattgtctagactctagaatgctagactctagaaagtctagacactttttcatatctagactcccttgggagagcctagacctaaggagtggagatt

SEQ ID NO: 97774 - DNA, 587 bp, Homo sapiens
tttcacctattattaatatcttacattagtataatatcattgttataacgaatggatcattatttatacattgttattaactaaagtttatacacttttcatgtttcctcagtttttatctaatgtcccctttctgtccctggatcccatcaaagatatcttgytacatctagtagtcatgtctcgttggactcctaatggctgtgatagttttgtagacatcccttgttttggatgaccttgatgatttgatgagtatggggtcagataatctatggaatgtccctcaactggacttgtctgatgttctctcatgattaacctggggttatgaacttccagtaggaaggccatggaggtaatgtgacattttcatcacattgtatcaagggtacatatatcgacatgacttttgatattgatgttggtcacctggctggggcagtgtttgtcagatttccccaatgtgaagtacactttttcctgtctatattgtctagactctagaatgctagactctagaaagtctagacactttttcatatctagactcccttgggagagcctagacctaaggagtggagatt

SEQ ID NO: 97775 - DNA, 552 bp, Homo sapiens
aatatgctgtgtgtgggtgtgtgtatatcttgtggaacctcaaattcaggattatatacctgatgtgcagctgaggccaaacactgagtcacaggtgcttagagataaaaacttatttgatttggccaaagtgagaaggtgaatggacaagatccctcaaacccatcttaacaaaaagaagaagcagggagtttttatgcagcaggagaataaggtaggggagtttcaggaatccaggggaaaaagtctggttcatcatagataaaaccttgagcaacaagacttctgggcatcaacagctggttacaatgtccttcagggcgttcattccttccgcagacttttttgtgaccctgaagttatttcctccagcttgacaaagaaacaggacatcagcagtttatatttatattgtaggaacatagaatgttgggcaaaaagtgagcagttaacctgtgccatcaagcaagggcctgatcagaattttyatgatttcagtgactaaaaaaatctgtgttgctgaaatcccaaagggtccagttacatgtatgt

SEQ ID NO: 97776 - DNA, 605 bp, Homo sapiens
ttgaaaggctcacttccaggggtgtaggtaggattatcaattattagagcttatttcatgtcacctctttataattcagtctagtggttaggagtccataattmttccatttcacaaatcagacaatgttgatattaggaaatgtcattatgctatgatcactataaaagagaaaagctaaaaccaatttaactgtgacagcccatagttatggctgcaggatgcatcttgactgcagagatgttaaaatgtgaaagacaatgcacttgaatatcaattaaaaatggcaatattagctgggtacagtggctcatgcctgtaatcccagcactttgggaggccgaggcgggtggatcacctgaggtcaggagttcgagaccagcctgaccaacatggtgaaaccccgcctctactaaaaatacaaaattagttgggcatggtggtgcatgcctgtaatcccagctacttgggaagctgaggcaggagaatcacttgaaccagggaggcggaggttgtggtgagcagagattgtgccattgcactccaccctgggcaacgagcgaaactccatctcaaaagcaaacaaacgaacaaacaaacaacaa

SEQ ID NO: 97777 - DNA, 605 bp, Homo sapiens
ttgaaaggctcacttccaggggtgtaggtaggattatcaattattagagcttatttcatgtcacctctttataattcagtctagtggttaggagtccataattattccatttcacaaatcagacaatgttgatattaggaaatgtcattatgctatgatcactataaaagagaaaagctaaaaccaatttaactgtgacagcccatagttatggctgcaggatgcatcttgactgcagagatgttaaaatgtgaaagacaatgcacttgaatatcaattaaaaatggcaatattagctgggtacagtggctcatgcctgtaatcccagcactttgggaggccgaggcrggtggatcacctgaggtcaggagttcgagaccagcctgaccaacatggtgaaaccccgcctctactaaaaatacaaaattagttgggcatggtggtgcatgcctgtaatcccagctacttgggaagctgaggcaggagaatcacttgaaccagggaggcggaggttgtggtgagcagagattgtgccattgcactccaccctgggcaacgagcgaaactccatctcaaaagcaaacaaacgaacaaacaaacaacaa

SEQ ID NO: 97778 - DNA, 623 bp, Homo sapiens
agagaaatactagatctgtctactctagtagaatataagctctttaagacagaatattgaaagtgtttcatttaccattcactatttcatcacactataactttcatataaaatgttcccaayaaatacatgctaagtaaaagaagaaaggaatttgttctttattatatagatattgaataggcccagatgagttttaagcatatttgtaacttgatgaggtcactgtattgtggagaatagcctaaagaaagaaggcaacctggacataacagaagaagataatattatggactacttactcagagctggaccatgtcctaagcacatcatgtattttatacctcttaattgtcataactttgtgaagtagatcttatcagtattttatgtaaatcagaaactgaggctcagattagataagaaattgcccaagatcacacaaattgtgtatgtggtagaaacaggattcaaaaactgaatttttcatcctaaatattatattcctgattactatgctctactgcctgtaataagtcaggtaaatagtaaagttgacctgaattaaaacagttttcctttaggagtaggagaggaatagatagaagaaagttccagacaaa

SEQ ID NO: 97779 - DNA, 574 bp, Homo sapiens
agtagaatataagctctttaagacagaatattgaaagtgtttcatttaccattcactatttcatcacactataactttcatataaaatgttcccaataaatacatgctragtaaaagaagaaaggaatttgttctttattatatagatattgaataggcccagatgagttttaagcatatttgtaacttgatgaggtcactgtattgtggagaatagcctaaagaaagaaggcaacctggacataacagaagaagataatattatggactacttactcagagctggaccatgtcctaagcacatcatgtattttatacctcttaattgtcataactttgtgaagtagatcttatcagtattttatgtaaatcagaaactgaggctcagattagataagaaattgcccaagatcacacaaattgtgtatgtggtagaaacaggattcaaaaactgaatttttcatcctaaatattatattcctgattactatgctctactgcctgtaataagtcaggtaaatagtaaagttgacctgaattaaaacagttttcctttaggagtaggagaggaata

SEQ ID NO: 97780 - DNA, 574 bp, Homo sapiens
agtagaatataagctctttaagacagaatattgaaagtgtttcatttaccattcactatttcatcacactataactttcatataaaatgttcccaataaatacatgctaagtaaaagaagaaaggaatttgttctttattatatagatattgaataggcccagatgagttttaagcatatttgtaacttgatgrggtcactgtattgtggagaatagcctaaagaaagaaggcaacctggacataacagaagaagataatattatggactacttactcagagctggaccatgtcctaagcacatcatgtattttatacctcttaattgtcataactttgtgaagtagatcttatcagtattttatgtaaatcagaaactgaggctcagattagataagaaattgcccaagatcacacaaattgtgtatgtggtagaaacaggattcaaaaactgaatttttcatcctaaatattatattcctgattactatgctctactgcctgtaataagtcaggtaaatagtaaagttgacctgaattaaaacagttttcctttaggagtaggagaggaata

SEQ ID NO: 97781 - DNA, 547 bp, Homo sapiens
ctttgtttttctgtcttttcatgaaggattcaagtaaaggctcaccactctaatgtgtagcttcttattttggcagcactttgatatgcctcatgatattgttgcatctgaagatgggactgtgtacattggagatgctcataccaacaccgtgtggaagttcaccttgactgagagtatggttttcacagtattattgttcacattttccctcagtttgattgcttaaaagcatatgaaacaaaaacatttgcatttccttatctttttactgatgagagtaggaatcaaagtataaagcagttgtcaaaagacctatttggtgtccawtaagtggaaagaaacgatttttttgctggcacttatccccttgtttccacaggaaattcttgatgcctgaagtactgtctgttacattcaaagtcaacattaattccagcttagttccagaaggagagacggggctttggccaagcagaggggctgacttctttccataaaggctcattccccatatggccctttagctctcagtagctgctgagca

SEQ ID NO: 97782 - DNA, 623 bp, Homo sapiens
actacatatttagaacttagcggccaattatgcgatataatttcatgaacaatctataaaaatgtttgcatttcttagaagtaacgaaaagaaaaatatcacatyggggttacattataatttggtaaaaactgtatggaattgaagaattataaattgtattcatgtttaaatatttggttaatcagtgagccagaaagctaaagtctgctgttctcttatcttaccaagcatgacattctataatagagacaaacccacataaaattgtttaaatgctactttctatgatgtagtattcacaaatagcagatttggagactctctacattcctgtgtaaggaggcgctacccagcattgttctagtgctcaataaatatttgattaatgtcaaatagatgaagttcagaagaaattactgacatacttaattatatacttggctataaagactaataaaaaaccacacacacacaaattattcactatatattcaaggtagttttatttacaaagaaagaaaatggacaaccaccttaacctttcatattagaatatataagtaaagacaaattaattcaataaaatatcattgtagctattaaaatatgtattgagaatt

SEQ ID NO: 97783 - DNA, 587 bp, Homo sapiens
agcatgttagtgtaccagtactgtaggcaattataacayaatggtgagtacttgtgtatctaaacatatctaaatatggaaaaagtatgccaaaactacagcataaaagatttttaaaatggtaccacctatatgtatatgtataattagttaccatgaattgagcttgcgggtcagagagttgctctgggtgaatgaatcagtgagtgagtggtgagtgaatgtgaaggcctaggatatcagtgtacactaccgtagatgttacaaacactgtagagttaggctgcattaaatttttaaaaaactattttctttctttaatagtaaattaagcttagcttactgtaacctttatattctataaacttactaatttattaaaaaaccttttaactcctttgtaggaacacttagcttaaaacacaaacacattttagagctgtacaaaaattatattcttattctttcagcttttttctatttgtaactttttcctttttaaaacatttttgtgcaaaaatgagacgcaaatacatacattaatttaacccacacagagtcaggctcatacctaacactgtgttcca

SEQ ID NO: 97784 - DNA, 587 bp, Homo sapiens
agcatgttagtgtaccagtactgtaggcaattataacataatggtgagtacttgtgtatctaaacatatctaaatatggaaaaagtatgccaaaactacagcataaaagatttttaaaatggtaccacctatatgtatatgtataattagttaccatgaattgagcttgcgggtcagagagttgctctgggtgaatgaatcagtgagtgagtggtgagtgaatgtgaaggcctaggatatcagtgtacactaccgtagatgttacaaacactgtagagttaggctgcattaaatttttaaaaaactattttctttctttaatagtaarttaagcttagcttactgtaacctttatattctataaacttactaatttattaaaaaaccttttaactcctttgtaggaacacttagcttaaaacacaaacacattttagagctgtacaaaaattatattcttattctttcagcttttttctatttgtaactttttcctttttaaaacatttttgtgcaaaaatgagacgcaaatacatacattaatttaacccacacagagtcaggctcatacctaacactgtgttcca

SEQ ID NO: 97785 - DNA, 599 bp, Homo sapiens
ctgtatttttaaatgaaggctcttagggatgatgtttcctgagggacctttatgactgcttcattactctttcaagctgcttttgaattgaaccagagtttggtacatgttggatttgaatatcacccatggtagctcaagcatgggagctgctttctaccacattactcatcatcagggggtaatttctgaatttaccacaggtgctggggactaacttggcccttttaatctactggttcgtaatgaagatttaaggagaagccattgctcttatttaactgsatgtacacactaaatttagtgtagtcattccaattgaaattcaatagaaaatggattgttaagtcagaaaactcagttggaataactaagaagataacaaagcacattgcttttataatcttttgaagtcgggggagacagataggtgaatgcacatgataaggacggggtctttggcatcattctgcagagtcgggctgggaagcaggcataccctggctatgacctgcagctatgctttggcagctctgagtacctcctgagctaggtgcttccctggtgccttaggatactcctccccagcctaccacagg

SEQ ID NO: 97786 - DNA, 584 bp, Homo sapiens
tgacaagaaaagcctttctagaggcaaaagcaggagacagtggtttcatgtggaattarggaaacgtctgacctgtgtttgcaagtgggttgaaaagaaaggaagccccatctctttgaatgcgtggggccagtggcctcagtgtgaggagcttcttcctctgggtcttgaggcatccaggtatagggccgagccaaggtgggctgaagtgtggtgagaccatgcacaggacacaggctgacctgattctggacaccagtaaggaagcactcagggacatgaacttctgagaaccaagggggtgtcaggatgtgggggatatcagggatccaataatgattgggatgctgggaggaagggcaccgcattttataacacttttgtaatcccactcaagtgaagctggattcaacaataacaaaagcaagtatgttgagcattcaataaaaataccccatttctacacagctgcagagatccctgggccccaggatttatctgacaattgtgcacacgaggtgatgccaaaagtgagaggttcccttgtcccaagaaagttaagcggagagttaaataccaacgac

SEQ ID NO: 97787 - DNA, 584 bp, Homo sapiens
tgacaagaaaagcctttctagaggcaaaagcaggagacagtggtttcatgtggaattagggaaacgtctgacctgtgtttgcaagtgggttgaaaagaaaggaagccccatctctttgaatgcgtggggccagtggcctcagtgtgaggagcttcttcctctgggtcttgaggcatccaggtatagggccgagccaaggtgggctgaagtgtggtgagaccatgcacaggacacaggctgacctgatyctggacaccagtaaggaagcactcagggacatgaacttctgagaaccaagggggtgtcaggatgtgggggatatcagggatccaataatgattgggatgctgggaggaagggcaccgcattttataacacttttgtaatcccactcaagtgaagctggattcaacaataacaaaagcaagtatgttgagcattcaataaaaataccccatttctacacagctgcagagatccctgggccccaggatttatctgacaattgtgcacacgaggtgatgccaaaagtgagaggttcccttgtcccaagaaagttaagcggagagttaaataccaacgac

SEQ ID NO: 97788 - DNA, 584 bp, Homo sapiens
tgacaagaaaagcctttctagaggcaaaagcaggagacagtggtttcatgtggaattagggaaacgtctgacctgtgtttgcaagtgggttgaaaagaaaggaagccccatctctttgaatgcgtggggccagtggcctcagtgtgaggagcttcttcctctgggtcttgaggcatccaggtatagggccgagccaaggtgggctgaagtgtggtgagaccatgcacaggacacaggctgacctgattctggacaccagtaaggaagcactcagggrcatgaacttctgagaaccaagggggtgtcaggatgtgggggatatcagggatccaataatgattgggatgctgggaggaagggcaccgcattttataacacttttgtaatcccactcaagtgaagctggattcaacaataacaaaagcaagtatgttgagcattcaataaaaataccccatttctacacagctgcagagatccctgggccccaggatttatctgacaattgtgcacacgaggtgatgccaaaagtgagaggttcccttgtcccaagaaagttaagcggagagttaaataccaacgac

SEQ ID NO: 97789 - DNA, 584 bp, Homo sapiens
tgacaagaaaagcctttctagaggcaaaagcaggagacagtggtttcatgtggaattagggaaacgtctgacctgtgtttgcaagtgggttgaaaagaaaggaagccccatctctttgaatgcgtggggccagtggcctcagtgtgaggagcttcttcctctgggtcttgaggcatccaggtatagggccgagccaaggtgggctgaagtgtggtgagaccatgcacaggacacaggctgacctgattctggacaccagtaaggaagcactcagggacatgaacttctgagaaccaagggggtgtcaggaygtgggggatatcagggatccaataatgattgggatgctgggaggaagggcaccgcattttataacacttttgtaatcccactcaagtgaagctggattcaacaataacaaaagcaagtatgttgagcattcaataaaaataccccatttctacacagctgcagagatccctgggccccaggatttatctgacaattgtgcacacgaggtgatgccaaaagtgagaggttcccttgtcccaagaaagttaagcggagagttaaataccaacgac

SEQ ID NO: 97790 - DNA, 339 bp, Homo sapiens
ctgttttatggaactaaaaacaacttttgggccaagtggacagtttaagaaatgctattctagctgaccttatgtttaaacattgcagttttaaaacaaaaattgcttttaataattgaacatggaatatttctgagaaatgcatkactaatatctatttatgtgaaaacaacaacttgcttttttggtgtcctgtcttcaagttttgttattgatggcaaataaattttaattatgtcttttgaccttacatttacttaacatgcaattacaacgaatataacttaaaaattaaatttaagaaagctctttttttcttctcatttccaaaagtggttt

SEQ ID NO: 97791 - DNA, 617 bp, Homo sapiens
tgccggtataacttctccactggtctttgctctagctcttcatcacaagactctctggctataaastgatttttcttctagctttacttcagggagaaattgcccttatcatgtgtctgagagagagctagtcttttaaagagtcctatggtttttattaaaatataataaattgccttatcttaatgcatgagccataaactgtaatatccattttatggatttattttcaattttaaattattacatcagcatctttgtgagtttgtagatctggcatgcttttggtttgtaaatattcatgaaagagagactgattaattttaaggagttattgataaaattactgatgaaattttagataattaaaaccaccttaaggaaggccctctcaggatggccatggacctccttgtgggaaatgtaggtggcttttggaaaccacattaactttgtaattgactttttaaaaactgaaatgaaaaaggatacaaatgggaaggaaactatcttatagttttgttattcaaggaatcctgactttatttggcatatttcaactcaaagacacttctcaattactgaattttctccctcttcaatatcagtttttgaaa

SEQ ID NO: 97792 - DNA, 588 bp, Homo sapiens
agtgaagccaggtgtctataatttaacatacacacgccttgaagatttcagacacaagagtttagtagctacctaagttataaaaggaagtaaatccgtaagacacaacaggagagaggagtaaacaatagccaaagtaaaactggcttgtaaaaacagtggtgagtaatcctaagagcaaaggcctgcatatctagagagaatgaccaaagaaactgagttctgtgtgctatttcatcatctctttaatagtggctcagagtgtatgtttttatgtgtgaaaagtaactaatttttttattttcttccaataagtgacacatggattgtccctattctttggataaaaaatggaactacacaacctttagtctggctagatcaaagcagcagtaagtaacaaattttaaaaacatctttatatatatgcatatgtaaaggcagggaataaaatattgaaaagtctagcttttgaaaagccatttcayttcaaactaaaatatcattcttgtagagcatagagttttaaagaaaagtgtcaaatcaaaagccattatatgtgaaaaatatataattacctggtaagag

SEQ ID NO: 97793 - DNA, 588 bp, Homo sapiens
agtgaagccaggtgtctataatttaacatacacacgccttgaagatttcagacacaagagtttagtagctacctaagttataaaaggaagtaaatccgtaagacacaacaggagagaggagtaaacaatagccaaagtaaaactggcttgtaaaaacagtggtgagtaatcctaagagcaaaggcctgcatatctagagagaatgaccaaagaaactgagttctgtgtgctatttcatcatctctttaatagtggctcagagtgtatgtttttatgtgtgaaaagtaactaatttttttattttcttccaataagtgacacatggattgtccctattctttggataaaaaatggaactacacaacctttagtctggctagatcaaagcagcagtaagtaacaaattttaaaaacatctttatatatatgcatatgtaaaggcagggaataaaatattgaaaagtctagcttttgaaaagccatttcatttcaaactaaaatatcattcttgtagarcatagagttttaaagaaaagtgtcaaatcaaaagccattatatgtgaaaaatatataattacctggtaagag

SEQ ID NO: 97794 - DNA, 406 bp, Homo sapiens
ggctcatccttctggttctccagcccacgtccctgctggacaggccaaggctggctctgctgcgcctatcacccccaccctgagcccacactgccacctgccggctcgctgctgccactgctcaaagtgaacaagtcaggccctgaagaatgaggaagcccctcctctcaccttgaaacacaatacccaccagcactcataattgcagacaaaacccgtcattttaaccctgggcttttcttccacccttgagatgttctatgaggttgaacccattcaagtattccatttttggggctcacccccgccccgccagcatcwctctctggacaaagcctgacacttatgtccccctctctgtaagcaaaataatcattttgcatgccctctgttctgaacatcacta

SEQ ID NO: 97795 - DNA, 396 bp, Homo sapiens
actgggctcaggtgatcctcccccttcagcctcctaaagtgmtgggattacaggcatcagccaccacacctggccatgcatatatttctagcagaagtaaaaacaggaaaggaagggaagaaggaaagaaaatgactataaaagtatagaaattgtagcttctgtagtaacaaaagagagccatcaatagagaagattataccactaaaatctagaacaaggaagacaggtcaatgtcttagtgtagagatgattcttaaacatctctgaggttagttttagtgactaggctttaaatgaactagaaattaaattaattgcctatgcatagtaatacccactgctcagacattgctatctcagatgtcacacttctagccctgctcaatagcctgt

SEQ ID NO: 97796 - DNA, 527 bp, Homo sapiens
agcacactctagccatcccatctcacgtaaagagagggcaaaacattgagaagcacttacagagttcatagtacaaaggcacagttccactaaaagacaagacctaattacaggactgtagtaagcttcccctccgcccacaacttaccaccacattactaaaggcctattgcagcagttctttcatttctaattttctttgagtttttctcttttttagttattctagccaaagatttgccaatttcgtctttttttwaaaaaaaaaaaagtaacctcagttttgttgattttcttttactgtttttctcttctctattgggttaatatttgctttaatctttgctatgtccttccatttctatctttgtacttggtttattctttttctggtttcttaagatataaagctctgatgattatttgagatttttttttcttttaatgcagacatttacccctataaacttctctcttagcactgtttttgctgtattccataggtattgatgtgtttttactttcat

SEQ ID NO: 97797 - DNA, 527 bp, Homo sapiens
agcacactctagccatcccatctcacgtaaagagagggcaaaacattgagaagcacttacagagttcatagtacaaaggcacagttccactaaaagacaagacctaattacaggactgtagtaagcttcccctccgcccacaacttaccaccacattactaaaggcctattgcagcagttctttcatttctaattttctttgagtttttctcttttttagttattctagccaaagatttgccaatttcgtctttttttaaaaaaaaaaaaagtaacctcagttttgttgattttcttttactgtttttctcttctctattgggttaatatttgctttaatctttgctatgtccttccatttctatctttgtacttrgtttattctttttctggtttcttaagatataaagctctgatgattatttgagatttttttttcttttaatgcagacatttacccctataaacttctctcttagcactgtttttgctgtattccataggtattgatgtgtttttactttcat

SEQ ID NO: 97798 - DNA, 636 bp, Homo sapiens
ttgatcaaagagagagtgagtatttggtgagagggggtctgcactggggataaaaagtttctctgtacccctaatgcattggctgttttgtctttgcatggtgggtcttctctgattgtgacaccatgaagcatttccttttcaacaaccctgaagccagtgcctcatcaagaggagctctggagtgctaagttgccaatatcttgatcacagcttttaatttgctaatttgttagctggaagaaagtgttaggaattgctaggaggcacaatgagagcatcagcttctccccctgaaacatgttaaagactataagtgtgcattgtagggtgagacagggayctttgtgggaatacaatagggaaagaggtcataattatgtaaaaaatgttaggtcacattttctccttattttgcaacactattttccattcacgatttcaaaaagcacagaatttccttgtgcttatctctgtctttaaacttatcacataataattgacttttcaatcttccaaacaaaactgaacctcatctgtcttgtttactttgatgtttttgatgagtcagatctggggttaagaatattctagatagtagaaaaaataaataaagtctggaaatagggttgaatt

SEQ ID NO: 97799 - DNA, 623 bp, Homo sapiens
gttgtaaaggttgtacattgtatcacacatgtacaatggtgtatgtgtgatgccactgtgtacccaccagaatrgctaatcttaaaaaagacttacaatatgaagagttagtgagaatgtggagtaatagaaactaccatgttttgctgatgagagtttgaattggtaccaccactttggaaaacttttgtccacgttccctgtgacctagcaattcctttcctacttacatgcccagtaaaaatgtgtgcatggtggtatcaataaaaatgtataagaatgttcattgcagtatttattatttatattagctagaaactggaaacaactcaaatgtctatcaagagaagaatctcttgatatattggggtacatctgtacaatggaaaatcacacagcaatagaaatagatatactacaatacatgcaacaaacattttgaatgaaagaagttggacgccaaagagtactgtatggtttcgtttaggtgaagtttaatattagtaaagcaatattttagtgtttagggatgcatccttaggtgataaaagtataaagaaaaagaaggaaattatatgagacaggttcactcatgagctagaaaccatcacacaagctatttc

SEQ ID NO: 97800 - DNA, 623 bp, Homo sapiens
gttgtaaaggttgtacattgtatcacacatgtacaatggtgtatgtgtgatgccactgtgtacccaccagaatggctaatcttaaaaaagacttacaatatgaagagttagtgagaatgtggagtaatagaaactaccatgttttgctgatgagagtttgaattggtaccaccactttggaaaacttttgtccacgttccctgtgacctagcaattcctttcctacttacatgcccagtaaaaatgtgtgcatggtggtatcaataaaaatgtataagaatgttcattgcagtatttattatttatattagctagaaactggaaacaactcaaatgtctatcaagagaagaatctcttgatakattggggtacatctgtacaatggaaaatcacacagcaatagaaatagatatactacaatacatgcaacaaacattttgaatgaaagaagttggacgccaaagagtactgtatggtttcgtttaggtgaagtttaatattagtaaagcaatattttagtgtttagggatgcatccttaggtgataaaagtataaagaaaaagaaggaaattatatgagacaggttcactcatgagctagaaaccatcacacaagctatttc

SEQ ID NO: 97801 - DNA, 472 bp, Homo sapiens
tccccaatctattcaccttgaagttgtctaacagatggatctttctgggatgaaaccctcatcatgtcactcttctgcttaaaaccttctcctgccttcaggagaaagcccaggtccctggagaacctcgcaaagctccggcttacttctccaggcccatcccaccgcagttgttcctcagccacctcgttcacactctgcctctcacatgggagccatagtcagggcctgcctgagctgggccatgttctttccttcttctgggcctcagcacactgctccytgtccagtgttaaagatttattgttaaaataaaatagtaaggaagactttactcagggctattgcaatagaggtgttggaaaaggtgagagagattggactcaactcccaatacaacgaaaatggcaggggatgtgcaggcaaggagcagagtaagagctcagtggatgggaaatcactaagaggagac

SEQ ID NO: 97802 - DNA, 490 bp, Homo sapiens
tttcttaaatagattttctgagctttttattctctctttcccctagggaatatcaataatttgtaactctgattgttttatgtgattccagatgtcttgaagactttgttcttttttttttttttttttttttttttgcctgcttggattagttttaaaaaaactgtctttaagttctgagattatttcttcttcttgctctggtctataattaaagcttttgaatgtctttkgtatttctttcaatgaatttatttccagaatttctgctttggttttcctaaagttatctatcttcttggtaaatttcttacttatattctgaattgattttctgatttcttggtatgggttttcagatttctcttgcatctgattgagctccttttaaatcaatattttaaatttttatctggcatttcaaggaattctttttaaacggaatatgttgctaaataatcattgtagtcctttggtagtgtcatatttc

SEQ ID NO: 97803 - DNA, 490 bp, Homo sapiens
tttcttaaatagattttctgagctttttattctctctttcccctagggaatatcaataatttgtaactctgattgttttatgtgattccagatgtcttgaagactttgttcttttttttttttttttttttttttttgcctgcttggattagttttaaaaaaactgtctttaagttctgagattatttcttcttcttgctctggtctataattaaagcttttgaatgtctttggtatttctttcaatgaatttatttccagaatttctgctttkgttttcctaaagttatctatcttcttggtaaatttcttacttatattctgaattgattttctgatttcttggtatgggttttcagatttctcttgcatctgattgagctccttttaaatcaatattttaaatttttatctggcatttcaaggaattctttttaaacggaatatgttgctaaataatcattgtagtcctttggtagtgtcatatttc

SEQ ID NO: 97804 - DNA, 400 bp, Homo sapiens
tcctccctctctctcttgctcctactctggccatgtgacgtgcctgctccctgtttaccttctatcatgattagaagcctcctggggcctccccagaagcagatactgctatgcatcctgtaaagcctgtagaactgtgaaccaattaaaccttttaactttataaattacccagtctcaggcacttctttataaccatgcaagaacagcctaatacacctataaaggagataaatgggaatgaggtagaagagastgactgggaaaataaaggtaggcaaaggtgagcccaccattaaaacctgtgacctgtctgctctgaatgctgtgctgccctgggtgtgaaacggaattagggcctggggataggatttgaccaggaccccatggtgtcatggga

SEQ ID NO: 97805 - DNA, 591 bp, Homo sapiens
tgtggtgtgtgtctgtattaatagaaataataataaaagaaccaattaaccaggaaaacatacaccaaaataagtacgttcttaaaaatagggtatcctatgcccaaaaggcaaatacaatcagaattaaagaaaaaatattttcacatccacaatcttaatactatagaaactcagaaaacattgaaaaggccaattccaaytcattttataaaaccagtataactttgttaataacacaactacaaaagattaaagaaaagacaccacagcttgtgaacatagacacaaaatcttcacaaagtatttgtaaaggtaaactagtaacatataatttagataaaacatcattatcaattgatgtattttagaaatgcaagaggaatatgacattaggaaatcaatcaatagaatacctcacattaatacaatgaagaatagcataaccaccttcatagatgctttgaaaggcataatatttaacatccttcatgataaaactctcagcaaactagaaatagaaagaatttcctcttgataaaatacatttaaaataaatacaaatttaaaatctatttaatggtgaaaacc

SEQ ID NO: 97806 - DNA, 613 bp, Homo sapiens
caatcagaattaaagaaaaaatattttcacatccacaatcttaatactatagaaactcagaaaacattgaaaaggccaattccaactcattttataaaaccagtataactttgttaataacacaactacaaaagattaaagaaaagacaccacagcttgtgaacatagacacaaaatcttcacaaagtatttgtaaaggtaaactagtaacatataatttagataaaacatcattatcaattgatgtattttagaaatgcaagaggaatatgacattaggaaatcaatcaatagaatacmtcacattaatacaatgaagaatagcataaccaccttcatagatgctttgaaaggcataatatttaacatccttcatgataaaactctcagcaaactagaaatagaaagaatttcctcttgataaaatacatttaaaataaatacaaatttaaaatctatttaatggtgaaaaccaaatactcttaagattcaggaaaagagaaaacaatatttattctcagtgcttctattcaaaattttactggagctcccagagagctcaataaagcaagaacaagaaataaaacacatacagtttagaaagtaagtaaaa

SEQ ID NO: 97807 - DNA, 434 bp, Homo sapiens
taaaattttgcccagtatttgaatagatttgttgcaggagtgggagactatccttgattcagttcatcatcttgaaactgcaacttcatcatgttttctcttttctttcctttttaaaattttgaaataatttttttcaggattcatggtaattttcccccaattaaaaaatatgttggaatatacataacataaaatttaccatcttaaccattttaaaatgtacagttcagtggtattaaatacattaataatgttgtgcaaagatcaccaccatttttctcccagactcttttcatcttacaaaagtgaaactgtgtacctgytaagctacttcccgttagcactccctccagcccctggatgccaccatcctactttctgtttctatgaatttcactactctaacgacctcatataagtggaatcatata

SEQ ID NO: 97808 - DNA, 434 bp, Homo sapiens
taaaattttgcccagtatttgaatagatttgttgcaggagtgggagactatccttgattcagttcatcatcttgaaactgcaacttcatcatgttttctcttttctttcctttttaaaattttgaaataatttttttcaggattcatggtaattttcccccaattaaaaaatatgttggaatatacataacataaaatttaccatcttaaccattttaaaatgtacagttcagtggtattaaatacattaataatgttgtgcaaagatcaccaccatttttctcccagactcttttcatcttacaaaagtgaaactgtgtacctgctaagctacttcccgttagcactccctccagcccctggatgccaccatcctactttctgtttctatgaatttcactactstaacgacctcatataagtggaatcatata

SEQ ID NO: 97809 - DNA, 593 bp, Homo sapiens
aaccagtgaataatcctccatttctttcctacgctttgcagtaggattcaaaagacttgctcagaaagtatttaacaaagtctgtggacttcccctgaggttccttctggattcctcagctggtaattcccatcaatgcctttcagacaatcattcttggttcataagttgaaggcaaggagcttgctgttccttgtaattcccaagatggcctccaaatgttgtagacataaatatatttcagccactaatttgtggctgaaaggcagccaatgggacttggggaaggaatttcaaccatatggcggctgatgaatcatcctgtgttaatgaaagtacatctcagctcagcctctggtattctgtacctggtgctcacttggggaccaggaartctggcatagagatgttaaatggtggctgggaatcccaggtgcttgggggtggggtggagagcaagcaaggatctcctccaccaaaggcgatccattccagaagtcagtgttctgggaatgagtcctaccctgtgggttcttccatggccttggggctaagcaggaatctctcttgattggcaggtcccccagtgaacg

SEQ ID NO: 97810 - DNA, 603 bp, Homo sapiens
tgtggataagtaaatgattcattgggaaatggctctgagccttctgagaaccttaagaaacatattcttttttactcctggctggtcatgcatargacttagaaacgaatgataacagaatatattttctgtccctctttgacatcacctgagtttcagtaaaatgtaatcttctatgggtggaagagagtttatagagccggccaagtctgatcgccacctgtgtcttccaccaacccagatgtatgtccctacctgcttattaacttttgatgagaaacgttccgggaagaacctgcatccatatgtccccttgatttatgtcttcctctgcattctcactgctaccatcatgagacccttgccacctcaagcactggtcctgtttggagtattcataatattcggggtagagcatcagttctccctgagctgatttatttctcatctcaatattattagtcttccttattcagagaagctcaagggactacagtagttccctgttacctgcaacatcaacatgaggcttttctccagggtcttcaagtaacgtcttaatctttttccatttgtcttcatctcctattactccttagtata

SEQ ID NO: 97811 - DNA, 578 bp, Homo sapiens
caacttctccatcgtctcagagtccaagttatgataaatttctaacttttattccccagatgacctctcaatttaattcaattcaacaagcatttattagcacctactgtggtggtgggagggaagagggtataagaaagcaaaagtcagccccaagtgtgacaaactccttaagagaatggaacatgccattttcaaaccgtgattagaatacaaagtggactctcggrggatgagggtggcataggaggagagatttagactgagagtgaatgagaacttttcatgatgggtggcatttgagcacagtttcaagcacagtggcatgtggcaaggggttccacatgaaggaatcatcatcatgaagagggtgggcttaggacttactcaggctctttccttgggtactactgtgactggagcttaggtaaatgtaataaaaataggtcaaaatataggtgtggccaaatcatggagaaactgaagagcagactagggagttggggatttgattctgtaagtagcggggagctattgaaagtctttgaggaggagagggccatgaatgataagacagc

SEQ ID NO: 97812 - DNA, 578 bp, Homo sapiens
caacttctccatcgtctcagagtccaagttatgataaatttctaacttttattccccagatgacctctcaatttaattcaattcaacaagcatttattagcacctactgtggtggtgggagggaagagggtataagaaagcaaaagtcagccccaagtgtgacaaactccttaagagaatggaacatgccattttcaaaccgtgattagaatacaaagtggactctcggaggatgagggtggcataggaggagagatttagactgagagtgaatgagaacttttcatgatgggtggcatttgagcacagtttcaagcacagtggcatgtggcaaggggttccacatgaaggaatcatcatcatgaagagggtgggcttaggacttactcrggctctttccttgggtactactgtgactggagcttaggtaaatgtaataaaaataggtcaaaatataggtgtggccaaatcatggagaaactgaagagcagactagggagttggggatttgattctgtaagtagcggggagctattgaaagtctttgaggaggagagggccatgaatgataagacagc

SEQ ID NO: 97813 - DNA, 476 bp, Homo sapiens
tttatattaggaaatctattaaacatagatgtcggataataccattgttaaatatttaatgttagtctagaagccctggtcaatagaataagatttaaaaccgaaacaagaggtatgattttagacataatttttttcatgcttccagaactgagcagacataatttttttaaatgaccataatttgtagaggacgaaattgcacacaatgaataaaacaatttaaaaacctaccaatcaatttcactaaagtatctggattcagggtaaatatgctattcatagtagccataactaacacaacaaaactctgtgatacagaaatcaggaaccatcgtcacaaaaataatacaggataaagatgaagamaggacaatataaaagatttgaacaaattggctgggcgcggtggctcatgcctgtcatcccagcactttgggaggccgaagtgggcagatgacttgaggccaggaatt

SEQ ID NO: 97814 - DNA, 472 bp, Homo sapiens
gcctgtgctgcatcagcttcacacctagagaagagagtgaaagagaagggagagccgtccttttgggctgccttgaaataaaggttgacccatgggttcatgtattgtcattcattctcattttctcttcctctctttctctctctcccctgccccttaagttagcttttctacaccctacctggataaggataagaaatagaaggaggggacactttaggatgctacaaaataaaatacaacaacaacaacaataacagcagcagcaacaacaacaacagcaacaaaaggggaagaaacaaatctggccactgcacattcctccttgscaacaaaaagccgcggatgcaaaaagctgcccttcactgcatagacagaagagggcgcgctcgagctatgaatctcggaaattactcaaaccatcagcctctgcaagaagcaaagtggacggccgggcgcggtggctcactcc

SEQ ID NO: 97815 - DNA, 582 bp, Homo sapiens
cgcccctctcacttcttcttctttctgttcacactgacttggggattttgggatattcaatcactgacaatacttcttagcacttcctacaggccaggcactgttctcagagctgtgtgtgcaccgacttgcttcctctggacacccagtggaggagtggggatttgaacttggtggtctggctcaaggtgctgtctacagtgtcctggtcacaaactaaggtcgttgctctcaggatgacttctcctggctgccctgagacacaggatgaggactttataatacactggggtgcagagcatctcctgttcttgattttcaaagtcattaagyatggcccctcacatgctaactgaggcaggtatggaaaaatgtccgaatccctaatgaccataaacagaaaagttaagaaggggcagttcaaaagaaaggctgacttgggaaggaaaccttgtctaggaagcaaccaacaaggaagagctgggaattacacacagtaatgtgatgtgtgtttccaaacaaagagggatgctgcttttggggaaaccaccaatatcccccagtaatctgttaaaaaaaaaa

SEQ ID NO: 97816 - DNA, 616 bp, Homo sapiens
cttaaaacaaatgtaacacctggatacatttcttaagcatcaggaggcacaggtctcaggatgttaagccagtctcctctgatcaccacaaaaagtgaatgttatttgagtcatccataaaatgaattkgaccaattctattacattactccctttctaaattaatgtttgatcttgcatacatgagatgttcccaatctagaaattttttaaaagagttttactaaatgaaattaaatctccgtgctttgtgtaaatttgccatatgagcaaactatagtgatatgttgtttacaaaaattattgggtgaacataagagaatgaaagatggtaaataaaactcctttcctttgttaatcagaatattttctagctaaattttagtgttttctttttgtttcttaatacatgcccaaatgtgttcaatagattttttaaaattcctccacaaggataaatctgaagtataattcagaaacctgcgcataaccttcaatttcttttcccaagtcccatggcaattctataccgtgaaaccataaacatgtgagcccagttacaaatgttaatttgtgaaatttatttggatggatatttgacagtttcttcctgctg

SEQ ID NO: 97817 - DNA, 518 bp, Homo sapiens
atggcgtgaacctgggaggtggagcttgcagtgagcggagactgcgccactgcactccagcctgggtgacagagcgagactccatctcacaaacaaaaaacaacaacaacaaaaaagaatgcactgataatatttgacataaatttgtaatgaccttatgatatttaagaattaaagaacattatcttttatttgtcaagttaggcaatataaaaataaayttacacaaaatataatctgctgaattaattttatctatttcttttgaaatattttgtatatgcatggtacagatctctactagtagtcatagaatgggacatattccatattattaaatttgctatataaacatttgtgacagtttttaagagaacttcatagataaacagtagttgatagcaaatctagcagcctagtattaaccatagtcctaatgttaactcttgtccttaaaaaaggacttcttcaagctagatgcagtgtctcatgcctgcaatctcagcactttgggaggc

SEQ ID NO: 97818 - DNA, 518 bp, Homo sapiens
atggcgtgaacctgggaggtggagcttgcagtgagcggagactgcgccactgcactccagcctgggtgacagagcgagactccatctcacaaacaaaaaacaacaacaacaaaaaagaatgcactgataatatttgacataaatttgtaatgaccttatgatatttaagaattaaagaacattatcttttatttgtcaagttaggcaatataaaaataaatttacacaaaatataatctgctgaattaattttatctatttcttttgaaatattttgtatatgcatggtacagatctctactagtagtcatagaatgggacatattccatattattaaatttgctatayaaacatttgtgacagtttttaagagaacttcatagataaacagtagttgatagcaaatctagcagcctagtattaaccatagtcctaatgttaactcttgtccttaaaaaaggacttcttcaagctagatgcagtgtctcatgcctgcaatctcagcactttgggaggc

SEQ ID NO: 97819 - DNA, 518 bp, Homo sapiens
atggcgtgaacctgggaggtggagcttgcagtgagcggagactgcgccactgcactccagcctgggtgacagagcgagactccatctcacaaacaaaaaacaacaacaacaaaaaagaatgcactgataatatttgacataaatttgtaatgaccttatgatatttaagaattaaagaacattatcttttatttgtcaagttaggcaatataaaaataaatttacacaaaatataatctgctgaattaattttatctatttcttttgaaatattttgtatatgcatggtacagatctctactagtagtcatagaatgggacatattccatattattaaatttgctatataaacatttgtgacagtttttaagagaacttcatagataaacagtagttgatagcaaatctagcagcctagtattaaccatagtmctaatgttaactcttgtccttaaaaaaggacttcttcaagctagatgcagtgtctcatgcctgcaatctcagcactttgggaggc

SEQ ID NO: 97820 - DNA, 502 bp, Homo sapiens
cacactctggttttggtatgccattcatgatctggcttttattttttttttcttcttgtractgtttgtaaagaccaccagagtcagttttctttaagcattcaggactaacaatacatgttaagtctcctaccttaagagtaattgacttgcaagttgtataatttagttcacaagaaacttgattcccttccctttccacagggcatcatgctggtctgttatactaataaaatatgctaattggatatagtgaactagaaatagcaaccactctagttatattggtaagacatttgtgtatcaaagaatgtaaaataaattttactaaaattcagggaattttcacctgagtgaaatatctatgggtctaatagtggaaggcatatcaaatatgatggttaatactaagtgtctacttgattggattgaaggatacaaagtattaatcctgggtgtctgtgggggtgttgccaaaagagatcactatttgagtcagtga

SEQ ID NO: 97821 - DNA, 621 bp, Homo sapiens
aatcacattgtgatatgtactcattaggctaatcttcataacaattctcctctaagaaacactgggtcacttgatcaccaccaaatattgaattatattaaaggacttataaagaaatatggtagagtaaatatataattacagaaattcccttgttgatggcccaggaaagatgactgaaggggaggtgaatgaaaagccagaaaaactaaggagagtcacaattttgttttttcctggcttaaaggaatgtgagagaaatacctcaggaataattatctggaactgactgtctataatagataaaagtttggcaggagaaaacattggaataagaggaaactgccactccccaaaccactggatactttttcatagtagctaaaaagcatcacattgtatagaaaaccactaaattttgagtttatctccaacaktccctcaaatgagaggagaaatggctggaaaatggtgagttaagcaattgttgttttcatatatccaaagactcagtgcagcgaaactggtggactcaccctaagatggggaaatgatccaaagttcccccacaaatagacagtataagatctagtacaaaaggtttaacaaacttccaaagaa

SEQ ID NO: 97822 - DNA, 426 bp, Homo sapiens
tgaggggtatgtgaggaagcaagtgcagggtctggccactgcacacagccaggtacactggctgccgcggtggggtaggtagctccaggcactggttctgtgtgaggctgtggctaaaccaggcgtacctcaagcagcttctactgtggacactggcatctggatgaggagaatgcagtggtgcctgaaaactcgaagacatcagcaacactggaaccccaaggggtgggggtgggcatgttacaggtctcttgttcccaccacccacagcatgttgaatgaygaagtgggtgtgttttagctagtttgtgttacagcttgttcagtcccactgactcactctggcccatggttcctgggctggcccggttctgctgctgcttcccattacatggggcagcttcctgacaccagttaaagatggga

SEQ ID NO: 97823 - DNA, 549 bp, Homo sapiens
aagtaaagggctaaagtcacatcctttacttatttttttttgttatttcataagagtggttgcatttggggagtggctgcatttagatatgagattgttaaagttgatgttttggagagtatgctgactgttcactgggtggtggcaggtggagggaggagraaggatgaggagagaaggattatgtgcccatgagttaggttagtccagagggttgaaccattgtactctatgtgcattttagttaatattgctgtgtttaaaggataaacaagtcctaatgctcaaagtatgttataagtagaggtagtaaaatcactcctttataaatgaatctttgttagtttttaggaagcactgtcttctgggagtgacttttcttaatccacctcttggaggtaggcatagttctttacttagtcactggaatgctggaagatggagaagaggaagggtgaatggaagggctctttgctagtatctccatatctacaaggtggttttagattataaccataggtctatatgtgcatatttagtaaagtgcct

SEQ ID NO: 97824 - DNA, 484 bp, Homo sapiens
gctccaaattatacgtcgggcttgcgaatgtgctgctttgagggttccagaacctgcctccatggaagaatcccactcctccccacccttacacaaataccatgtccctaatcagcaatgagttccaaccaaagaaaattctctcttcctgatttctgtacagaagcttaggaattcaagccaaggaatttaagttgtgtttttaraggattatatctatggagatgaatactaaagccaatgtgtaggtgattgtgaatatttcattcaaacccaaaatctcttccagtggtcaacagcaagggctataaaatgcaagcatgatatcttccctgcttatttcacctctaagcagtaagggaaacaccttgcagaaataaaacactccttggccagcctcccacatcccccaagccccagcatttgggtccagatccacctcatcagaagggaggcgcagacaccatgaaggaggagatggcag

SEQ ID NO: 97825 - DNA, 536 bp, Homo sapiens
caacctcaaaattagatcttatttatagtttcaactattatttaattctcaattgtggtgttcagtataatgtttaaaaaagtgtatatttttaaaaaactttttaactttttaaaattacatgtatatataaatttaacatagacaagattactaatttgaaagaaaatggttttttcttctgtagacattatcttgtctgacttctatatcaagggtgaaacaaatgacatttacatactgtcatagctaaattttgttcagatataaattaagaaagaaaggcaatttaatagaagagaatttgatttgtacaaacaatctaacatattgtcacactgtggaagaaacattttataataatcttatttttgtaaattacccctttgraaaaaaaaaaaaaagaagcttaacccacctgagtaagtttcatatatttactagcagggaaaatataatatttaaaataatctcactttttaaggacattttagtggcatgaaatgtcatcttctttccatgcatttttgaaacta

SEQ ID NO: 97826 - DNA, 580 bp, Homo sapiens
ttatttttttaaattgtgtttatttatttatatattttgtgatggggtcttgctttgttgcccrcaatgaagtgctgtagcatgatcatagctcactgcagccttgaactcctgggctaaagcgatccaccaacctcaccctctggagtagctgcgattataggcataagccaccatgctgggccctgatcaaattttaaattatattctatacctcacattactgacccaatgttaatatgcatttatgtattggaactcagtgtataaataattatagtttactagtcattgcagtaattgattttgagaattatgctcattaacaatcagtggagctgtttttgaactactccttagattttggaatatgactgcttgtatttgaatatctgcctcagaatttctcccatatgtgaattaaggcaaataagggaaaaaaactggtgaagcatcattttatcctatttaaaataaggacaactaaataatgattgtcttgagaataaagaaagtgattattttagtctgctcacatgctgctaataaagacatactcaagatggggtaatttataaag

SEQ ID NO: 97827 - DNA, 593 bp, Homo sapiens
attaaattggaaaagcaatgaaaaagtatggacaacttgtgggaaatctttgattgtattcttatacttcttcatacttgattttaaatgtatgctttgccacagaggaataaaaaaataaaaatttagattacacattaagggtattttatgcaaggaagatgagacatgaaatgagaatgtatttattgaaaggaaaagctttttttcgatctcaaatatttatcaataacacaagtatgttttgtgaaaataaaattaaaagataaattattttcataactccttattcaatactcttatgattaactgaccaaccatctgtatctattacgtttttaaagtctttgcctatttcagaatatttttcagttataaaacataagtttcaaaataatcaaacagaaaattttgaagtggtaatcttctsccatcatttcaaaaaagagaattttaaaacaagtcagatttcatcaagaaactttgaagatttaaaaattatatatattaataaatttatctatacttgtatatcattgtaatctgcaaaatactctgttttcaaactccttactttagtctatctgatgctg

SEQ ID NO: 97828 - DNA, 569 bp, Homo sapiens
cctgttaatttatgtactcttaaacccttctcccagagattctgattaagaatatgtgggattcaggaacctgcatttgtgaccaatgctctaggtgattctgactctgatgtagttggcccaccagaggcactttgagaaaggctgtcttgcctcatccccttgcagtctctgtttactactgcttatcctgcactccctttaattcccattgacagacaggactcttcagggtccaaaaagggaaaacctaagtgcttcaaactttctcagagtccatgccatatgccaacagcacccaacaacatgcccaatgattccaactccaactcttccattctttggaatcaatttctaattccatctgctctagaatgtcttcctgatcaggcraagtgagagagagcttggcaatagcttttctttaggcaaatcacaatcacctctttagccctttgctccatcaactacaaaactagacagatggacaagatcaatggttctcagatctgttggggaagcagagtacctacaagtctttgtgaaatgctgtagaatatagaaccatt

SEQ ID NO: 97829 - DNA, 213 bp, Homo sapiens
ataaagtagactattccttagtcccacttaaattttaagtcactaagattaaaaaagaagttaataaagattccagggacrtaaaatcattcaattcaataaactgctctgaatcaaattagtctgaaacactttatccttaaaactgcaaaaacattgtgatactaaatattcaatattatcagtcaggcaaattggcccaggtcaaatgag

SEQ ID NO: 97830 - DNA, 435 bp, Homo sapiens
ggctctgcagccatcgacctgggttctgaggagctcgatcttgtytttctacttctaaaaggttgggatgaaggaccctggccacagaagtaaagccagaattatccttgcttcttgctgtgtatttcaggactcctccattgctcttgctgttcattcaacaaacattgagcatctactttgagcctgatgcatgtctaagcactgaggaaataacaatgaaaaactgacaaaaatccttgctctcgtggagttttccttctccaaggggagtcagtatgaagaaaaacatatactatatgaaatggtgataatgctgtggagaaaaactaagcactgaaggggagaagtttgcagtttaaaatagggtggccaggccgggtgcgatggttcacgcctgtaatcccaggcatggtgatttgggaggccgagcgg

SEQ ID NO: 97831 - DNA, 508 bp, Homo sapiens
cttgctctcgtggagttttccttctccaaggggagtcagtatgaagaaaaacatatactatatgaaatggtgataatgctgtggagaaaaactaagcactgaaggggaraagtttgcagtttaaaatagggtggccaggccgggtgcgatggttcacgcctgtaatcccaggcatggtgatttgggaggccgagcgggggtggatcatcggagggcaggacttcgagaccagcctggccaacatagtgaattccgtctctactaaaaatacaaaaacattagccgggcgtgctggcaggcgcctgtaatcccagctactcgggaggctgaggcaggagaatcgcttgaatccaggaggcacaggttgcagtgagccaaccttgcactccagcctgggtgacagagacttcatctcaaaaaataaaatagggtggccagaggagtcctcgctgggaagacagttaagccatgacctgaatgaggaagggtgttaaccctgctgatacct

SEQ ID NO: 97832 - DNA, 508 bp, Homo sapiens
cttgctctcgtggagttttccttctccaaggggagtcagtatgaagaaaaacatatactatatgaaatggtgataatgctgtggagaaaaactaagcactgaaggggagaagtttgcagtttaaaatagggtggccaggccgggtgcgatggttcacrcctgtaatcccaggcatggtgatttgggaggccgagcgggggtggatcatcggagggcaggacttcgagaccagcctggccaacatagtgaattccgtctctactaaaaatacaaaaacattagccgggcgtgctggcaggcgcctgtaatcccagctactcgggaggctgaggcaggagaatcgcttgaatccaggaggcacaggttgcagtgagccaaccttgcactccagcctgggtgacagagacttcatctcaaaaaataaaatagggtggccagaggagtcctcgctgggaagacagttaagccatgacctgaatgaggaagggtgttaaccctgctgatacct

SEQ ID NO: 97833 - DNA, 508 bp, Homo sapiens
cttgctctcgtggagttttccttctccaaggggagtcagtatgaagaaaaacatatactatatgaaatggtgataatgctgtggagaaaaactaagcactgaaggggagaagtttgcagtttaaaatagggtggccaggccgggtgcgatggttcacgcctgtaatcccaggcatggtgatttgggaggccgagcgggggtggatcatcggagggcaggasttcgagaccagcctggccaacatagtgaattccgtctctactaaaaatacaaaaacattagccgggcgtgctggcaggcgcctgtaatcccagctactcgggaggctgaggcaggagaatcgcttgaatccaggaggcacaggttgcagtgagccaaccttgcactccagcctgggtgacagagacttcatctcaaaaaataaaatagggtggccagaggagtcctcgctgggaagacagttaagccatgacctgaatgaggaagggtgttaaccctgctgatacct

SEQ ID NO: 97834 - DNA, 489 bp, Homo sapiens
ggtatacatagtttcctgcattgtatataactgggagaaatgggtattgaaaacatatatatatatatataatatatataatataatatatatattatatataatataattatatataatatatattatatatacacacacataaacatatatttatatttgcatatatatttgcatattttttgtttgtgttaaaaaattggaagaagaaacaagagactaataaaagtaaggtggaaaggttggggtacagtggtagaaggaacaaggwatgagcatgtatatctttccatacagttttgatctctgaattatatacatatgttaccaattcaaaataccatcttaacaaaatatcttttaaaaaatgaaacagtaattaaagttgtatatagaataacatgaagtttattgctttgcttccatttataagtgaaacaatttattttatacactgcaatctctaaaagatgatcaaactttgcagtt

SEQ ID NO: 97835 - DNA, 595 bp, Homo sapiens
gaaaattttacaacacaggttctttgaggtcacttttcctatgtttcaaaaactgactataaaaacaagtacttttcccccaactttattgagagaaatgcttttgcttttaatcatatctaacatttaagacaggttaaagaaaggaaatatcccttttaattatggagctttttaattactgtgtggtttacaacagtctcacttacaagtcatcgtcctttcaaaactaaagctagcatctctctttatagtattatttactggcttcccttgcatctggcacccaggtcagcgcatagcagatcaaactataatctgagctcagatcacaatgaaacaaaagccaaggaaagcccagttagcattactatattacttacagcatgtaaataagctgaattagataatttacattttatccttacattaattgaactttgctgtgcaagccagaaaggtatctattagaaaaaaatattaaaagcaaatgaagccaacagatatatagagctaaacaatgagaacacrctcttttcaaaatttccatcagatctataaggcagtataacagaaagaaaatgattacagtaat

SEQ ID NO: 97836 - DNA, 603 bp, Homo sapiens
aataaaaacccctgctctgttttgttctttgtgctctttccattgctccacatgggagaagcacccttctgcagaagaaaatttgccttgctgagagatcctttgtctcagtgctggttcttctttgtagcactaagcatttgttttcaacaatgatgctatctataagagcaattaggagaagttacagcccttgtgaccactggctacatggcttctgggcagtaagcaattatgggatgagcttagaaacaatggctggttaacttttaactatgcctgcaacttttactctgtggtcctatgttaaytgttatataggtggtttcagccaaatacctgataacattaactgagcactaacaaatcaaaatggcttgtggaattggttttggaaaatgctttcaaattaaatttcaccagagttggaataattttgaccaaagcatttttacttataaacatagggtcaaagtgttcttttgttgaatccagtagatcaaagtcttgcaatgcccaagataaatgaaaaagagaaaagagctcaacccattttccagacaccacattcactggtataaaacatatggttggctggccata

SEQ ID NO: 97837 - DNA, 550 bp, Homo sapiens
ctctcttctcgagaagattctggatgtagtatggagcaaacacactgcgtgatcaacttcatgagccacttcacttttgctttctgtttaaataagtaggcgtggcctaaacctagattctatgtgccagacactttacaaggattatgtaattaaattttcccagcartcttataagagggttcgaaaattatccctattttaaaatattaggaaatgaaaactcagagatgataagggacatgtctgaggctacagcaggagggcagccaggctggtattcagtcttgtctcatggcaaagcctgagtgctgaccatgctgctggactgccttctccatgtcttctgatgacagaaggcttccaaccttgccgccacacatgccctgcacacacattccccttctacatgagtgtgggccttgctgcatctgtctggacagacgtgatgcccttgactgtgggtttttgctcctgcaagtctcttcatccttcactgcatcaatatctgttagacatcttacttcctgtcgcctgttcacactccacc

SEQ ID NO: 97838 - DNA, 550 bp, Homo sapiens
ctctcttctcgagaagattctggatgtagtatggagcaaacacactgcgtgatcaacttcatgagccacttcacttttgctttctgtttaaataagtaggcgtggcctaaacctagattctatgtgccagacactttacaaggattatgtaattaaattttcccagcaatcttataagagggttcraaaattatccctattttaaaatattaggaaatgaaaactcagagatgataagggacatgtctgaggctacagcaggagggcagccaggctggtattcagtcttgtctcatggcaaagcctgagtgctgaccatgctgctggactgccttctccatgtcttctgatgacagaaggcttccaaccttgccgccacacatgccctgcacacacattccccttctacatgagtgtgggccttgctgcatctgtctggacagacgtgatgcccttgactgtgggtttttgctcctgcaagtctcttcatccttcactgcatcaatatctgttagacatcttacttcctgtcgcctgttcacactccacc

SEQ ID NO: 97839 - DNA, 536 bp, Homo sapiens
gacatcctgtttacctcaatagatcaacaattcttgagatcaggatctattcggctcagtgttatgtacacagtaattgctcaagaaattagtctggggagtaggaagaaaaagcaagcttcagccccacagccatctgtctcctttattcttgaatctcatctgacttgtccactgtggtatcctcagagcacagggcagctcttggtacatggtggatgcttgtcaaatgtttgtggaatgaaggaaagaagaaatctaattatccagaaagaatacaaacaaggtacttgagccctgtttttgagtatgcagggtcagggtccccccagtctgggtccagccttggtcctgcctctcgttatggtgagactgacccctcaaaatctctcattcttccaaaagatggtaacaattgtggcatctgcctggcagagacagtcgtgctcaataagtaactcatgggtttcccattgcttcacagcccctttgcagtttgtytgggctatctgaagatttctggccaatagtttgta

SEQ ID NO: 97840 - DNA, 590 bp, Homo sapiens
gcacatgcactcactgactctcctcccactgccgcaccctaccctcacatcattcattccttcaacaaacctggattaaatgtcagatgttgtcctgtgtcctggtacaatgcttgtcagtaatatagaacacctgtctctttcagagaaacccaggctaaggcacacgtgcatgcatcacctcacatctggaggaytgcagaggtttcccaatcagttttcctaactctagcctctttccctgcttgcttttcctatgataaatattttctccttcccatctttattcctagttattcaaatgttcccatgtatatgcatttcaaggcccagtctggtggacatcttcccaatacttctttattttggaaattacccctcactccattcccactcatgggtatgggtacagtgacactaggagctaccacattcttccatgagccatctccatcatccccctccaccagagttccttggtgctgaaacagaccaatcagagttcttggctgagatattttacaagagaatttaataaaagattgattccctctttagtcacaaactaaaatgtgtgagcctccacagct

SEQ ID NO: 97841 - DNA, 576 bp, Homo sapiens
ttgtcccttgggcagaaatgtgctgagagaacacttccacctacctcacaatgttgaatcctcaccactacctgtgagtcttttgttccttttgtgtgtgtgtgtgtgtgtgtgtgtgtgtgcgtgtgtgtgtgtgtgtgacagagtcttactctgctgcccaggctggagtgcagtggcaccatcttggctcactgcaacctctacctcccaagttcaagcagttctcctgcctcagcctcccgagtagctgggattacaggtgcccagcaccatgcctggctaatttttgtatttttagcagagatggggtttcatcatgttggtcagactggtctccaactcctgacctcaggtgatccrcccacctcaggctcccaaagtgctgggattacaggcgtgagccaccgtgcccagcctctgttcttattttaaaggcaaaaaactgaggctcagcaaggaggacagtctgttcagcaccacagagctagtcaacgttgtgatctgtgctagtttcctggggctgccttaataaagctccacaaactgattggcttaaaacaacagaagctcatt

SEQ ID NO: 97842 - DNA, 685 bp, Homo sapiens
caccttctttaatgggccgagtggtgcaccctaaaatttgttgaagccctaacccctaatgtgactgtacttagagacagattttacagaagtaattaaggttaaattaaggtyataaaagtggaatcctaatgaccttagaaagcggatccctttgtctgcacgaacacacagtaaaaaggccgtgtgaggactctgaggaggccgctgcctgccatccagagtgagagcccttacaagactctaaccctgctggcaccaagatctgagacttccagtcttcagaattgtgagaaaataaatttctgtcacgtaagcctcccagcctgtggtattctgttatgacagtctgagctgactaacacagccttgatctccatagcccccaccctccacactgacatgcttctctcaccctgaggactgatccttttccttcattccccaaaagcaccacactttcataaaagcttggaagcatgctgggtgactgcagcacagagcttataacaaaatcatgaatgtgattgcagacataagtcttcctagagataaacctaattgacaacttccccctgtaggaaattttctacggcccttatatcagcatgctgctacacttttcccagcacccttcttacacctgtcattttccctgcacttcaaatgagaaggaaattccttc

SEQ ID NO: 97843 - DNA, 597 bp, Homo sapiens
gtggtcaccaggaaggaggcaaaactggagatctggagaacagaaatggaataaagacttcatttttcactctagattctcaattttcacttagttttcagggctttttttttctaatcatagattagcaattaaacacttttaataaaatgattttaacagcactaaattacataagaaaaaaattcacagtgctatagaaaataaaccaatggccaatgaacatagaaaatgctatcaacatgactcatcattaaataaatgcaaattaaaggtagtaacaataacatccaaattactcctcagtgatttctcaaagaacttagaatggccgtttgaaccagcaatcccattgctggtcatatatccaaaagaaaagaagctgttgtaccaaaaagacacatgctcgtgtgttcatcacagcactattcacaatagcaaagacatggaatcaacctaagckcacatcagtggtaagctggataataattccatgtacaccatggaatactgggcagccataaaacagaattaaatcatgttctgtgcagcaacacggatgcagccagaggccattatcctaagcaaattaacgag

SEQ ID NO: 97844 - DNA, 598 bp, Homo sapiens
caattctttttggataagagcctttctcaaattgattatacatttccttcctacacagagtaagctgaacatagtttaaccttgaacacaaggtcatcattatgaatgcagtcacaattaaagaatatcagacattagatagtctatcccatgcattttttagatgggtaaattgagacccagagaggtggagggaccatggtttgaggtggtaaatctatgatttgaatcttagcaccstgacttctagtctagccctgaagaaagctgcatccgaggagccatggtcaaattctctgggtatttaagatgcctagactctttgctccagcaccacagggctccaattgttgtattttattttagttattgtgcctgttttcatagctcttctgcctcctcccatgttatcaactcacttcttaatccttcagtctatccaaatcaaacaaactctatttgttttgttttgttttgtttttaagggacaagatctcattatgtcactcaggctgtagtgtagcggcacaattctggctcactgcaaccttgaactcctggcctcaagtgatctttcagcctcagtctcccgaggagc

SEQ ID NO: 97845 - DNA, 591 bp, Homo sapiens
agggatatgtttccctttacctccagatgtggccatgtgaaaagttttttggcagtgctgcatgagcagagtaatgatgtaggtggacaggtgagccccagaattgaggcttagcytggcagtgttcttggctttgcccaggaaaaaactcaagggcgagccagtggtgtgagatggcaatttttcattgaacagtactgttccttgtgggtcagggataattcataggcagtgcgcccagagtccacaggcaatggtatttacactttcttatgtccactttaattccatgcaaattgaggggtgggttatttagaactttctaggaaatgggtggcaatttccaggtcgctgccatagaaaggggcagtagcttcctggttatcaccatgcatttataaattgtcatggcagttgtgggagtgccttgtgctctcgtgctaatgcacagtgagggcagccaggggtccctttccttgccatctgctggtctctgctggtttcttcacttcatctcattgggactgagaaacaagtgctgatgtcctacctcggtaagatgggtcacatcccgactgcttttagggagca

SEQ ID NO: 97846 - DNA, 539 bp, Homo sapiens
tggtatgatgctgataacctgggtgacaaaattttctatacaccaaacccctgcaacatgaaatttacccagtaacaaactggcacatgtaccctttgagcctaaaataaaagttggaaagaaaaaataaaaaatgcttgaatttagataaaggaggttgtggaagccaaagtacctacaatgtaaatgaagcctccaggtagcagacttcagagagggtagttggtaaaagatgtcaggctgggcgtggtggctcatgcttgtaatcccagcactttgggaggcggagatgggtggatcacttgaggtcaggagtttgagaccagcctgtccaacatggtgaaacctgtctctactaaaaatacaaaaattagccagttgtggtggtgggcacctttaattccagctacttggaaggagaatggcttgaactygggaggtggaagttgcagtgtgctgagatagtgccaccgcactccagcctgggcaacagagtgagactccatctcaagaaaaaaaatgataaataaaggatgtca

SEQ ID NO: 97847 - DNA, 596 bp, Homo sapiens
acatatctgtccttacctttagggccactctctgttggtcactgtatcccaggagtgccttgaaattaggacatgtaagtcctccaactttgcccctcttttgaaaaagaattattttggcatttttccaggtctgttgaatatcagtttctataaagagtaacttgagttgatagatcaattttgagaggactcacattttaacaatattgagtcttctgaccaataaacatgacrtatctctccatttatttagatctttgatttctgtagcagtgttttgtagttttcagtgtataggtcttacacattttgttaaatgtatctcgactatttgatatttttgacaccatggaaatcagtattttaacatcagttttcgatgtttcattgatagtatttagaaataaaattgatttttgtatattgaccttatatcttttgacgttgctaaactcatcagctctactagcttttttgtagattccttagcatttgttttatagataatcatgtcatgggcagatattattttgatccccattctaccatcaaataatggagacctggaaagacaaggggacctgcctaaggtc

SEQ ID NO: 97848 - DNA, 333 bp, Homo sapiens
gggatggaaaattacatattgggtacaatgtacactacttgggtgacagtgcactaaagtctcagacttcaccactatacaattcatccatgtaaccaaaaccgacttgtatcccaaaagctattgaaataaataaayatatatacatatataaatatatatgtgtatgtatatatataaatatcagcaagtataaaagtatatacagcagaatgacccttgttgacccttggcccccagccacctagttttcctccccacaaaaaaaaccatcatttacttcttagacattcttccagaaatttgttacagttctttaagcaaatgatatta

SEQ ID NO: 97849 - DNA, 333 bp, Homo sapiens
gggatggaaaattacatattgggtacaatgtacactacttgggtgacagtgcactaaagtctcagacttcaccactatacaattcatccatgtaaccaaaaccgacttgtatcccaaaagctattgaaataaataaatatatatacatatataaatatatatgtgtatgtatatatataaatatcagcaagtataaaagtatatacagcagaatgacycttgttgacccttggcccccagccacctagttttcctccccacaaaaaaaaccatcatttacttcttagacattcttccagaaatttgttacagttctttaagcaaatgatatta

SEQ ID NO: 97850 - DNA, 546 bp, Homo sapiens
attttctgagatgttacagagtaaaatggggccataggtaatagagtcatttcttctttgaagagtcattattatcactcaaagttcatagttcacgttagggttcactcttcatgttgaacattctgtgggtacaatgcattttgacatgtatctaccattactgtatcacacagaatagtttcactgccttaaaaatcctctgtgctctacctccttctcccataacacctggcaaccactgatctttatactgtatccatagttttgccgttgccagaatgtcatagagttggaaccattaagtatgtaacctctttttaaattcaacctcctacttttcatctgttaattatcttctttgctagaccgttttcaaatacaatgcttggctcctgaggtatcttaagtaatcacattgtgagcaaagcctataggcttcccccagagtgagtgatccaagagagagcagggacgaggccacaatgccacaatgccacwcatgacctaatcatttctaccatattttatttgttagaagtgagt

SEQ ID NO: 97851 - DNA, 631 bp, Homo sapiens
gcataccagtcaggttcagaggctttatgtcaggtagtatggtgttcagatttaagctctggaattaagtagctatgtgaagttagaaattattcttgattttttctcatctgtaaatgaaattaataatggtatttgggycatgaagatgtatcaatagtaaatgaaataaaaagtataaacattttagcacaatgcataattgaatagtaaaagatcaataattgtgacacataatcctcatcactgttataaagataatccacattacattctccctcacttctttcatgtctttatttgatcatctctattttaagtgaggcctttttctggctgtttaaaactgtaatacttcataaatttttcactccccttccctgctttacttttcttcataacatttaatattatcatactatatttcttttactatctagcttaatttttttaatataatttaagtactgggatacatgtgcggaatgtgtaggtttgttacataggtgtacatgtgccatggtggtttactgcacccatcaacccattatctacattaggtatttctcctaatgctatccctcccttagccccgcacccaccgacaggcctgtaagtgtgatgttcccct

SEQ ID NO: 97852 - DNA, 631 bp, Homo sapiens
gcataccagtcaggttcagaggctttatgtcaggtagtatggtgttcagatttaagctctggaattaagtagctatgtgaagttagaaattattcttgattttttctcatctgtaaatgaaattaataatggtatttgggccatgaagatgtatcaatagtaaatgaaataaaaagtataaacattttagcacaatgcataattgaatagtaaaagatcaataattgtgacacataatcctcatcactgttataaagataatccacattacattctccctcacttctttcatgtctttatttgatcatctctattttaagygaggcctttttctggctgtttaaaactgtaatacttcataaatttttcactccccttccctgctttacttttcttcataacatttaatattatcatactatatttcttttactatctagcttaatttttttaatataatttaagtactgggatacatgtgcggaatgtgtaggtttgttacataggtgtacatgtgccatggtggtttactgcacccatcaacccattatctacattaggtatttctcctaatgctatccctcccttagccccgcacccaccgacaggcctgtaagtgtgatgttcccct

SEQ ID NO: 97853 - DNA, 631 bp, Homo sapiens
gcataccagtcaggttcagaggctttatgtcaggtagtatggtgttcagatttaagctctggaattaagtagctatgtgaagttagaaattattcttgattttttctcatctgtaaatgaaattaataatggtatttgggccatgaagatgtatcaatagtaaatgaaataaaaagtataaacattttagcacaatgcataattgaatagtaaaagatcaataattgtgacacataatcctcatcactgttataaagataatccacattacattctccctcacttctttcatgtctttatttgatcatctctattttaagtgaggcctttttctggctgtttaaaactgtaatacttcataaatttttcactccccttccctgctttacttttcttcataacatttaatattatcatactatatttcttttactatctagcttaatttttttaatataatttaagtactgggatacatgtgcggaatgtgtaggtttgttacataggtgtacatgtgccatggtggtttactgcacccatcaacccattatctacattaggtatttctcctaatgctatccctcccttagcmccgcacccaccgacaggcctgtaagtgtgatgttcccct

SEQ ID NO: 97854 - DNA, 622 bp, Homo sapiens
acaatgagtatgtccattcaccttgaggaagattttatttgaagaaatctttgtcatcaaaaagcttgaaaaccagggctctaccttgatttcatagtcttgagaatgatggagaactcaatttayaccatgattttcattgagaaagcaggttgcatgttaagagattaggtgataggatgactgaaaggtatttgtgatcttatgaaaggtacaatgtggcaggcagcctctatgagggaccccagtgatccctgtctcctggtattcatgcctttgtgtaataccctccccttagcatgggctggacttactgactcacttgtagtgaatgcaatatggctgtcctgatgggctgtcacttctgaaattagcttatgaaaaaaccgattacaggtatatctcattttattgcacttagctttattgtgcttgcagtattacattttttgacaaataaaaggtttgtgtccctcagtcaaacaaaaatgcaatgggtttctttctagtcccccacctcaattttagaaattaaaaaattttccaaacacagtgagtagtagtctatatctgaagggtgaatgaagcaatgagtgaccaagttgcccacttaaggaggcac

SEQ ID NO: 97855 - DNA, 622 bp, Homo sapiens
acaatgagtatgtccattcaccttgaggaagattttatttgaagaaatctttgtcatcaaaaagcttgaaaaccagggctctaccttgatttcatagtcttgagaatgatggagaactcaatttataccatgattttcattgagaaagcaggttgcatgttaagagattaggtgataggatgactgaaaggtatttgtgatcttatgaaaggtacaatgtggcaggcagcctctatgagggaccccagtgatccctgtctcctggtattcatgcctttgtgtaataccctccccttagcatgggctggacttactgactcacttgtagtgaatgcaatatggctgtcctgatgggctgtcacttctgaaattagcttatraaaaaaccgattacaggtatatctcattttattgcacttagctttattgtgcttgcagtattacattttttgacaaataaaaggtttgtgtccctcagtcaaacaaaaatgcaatgggtttctttctagtcccccacctcaattttagaaattaaaaaattttccaaacacagtgagtagtagtctatatctgaagggtgaatgaagcaatgagtgaccaagttgcccacttaaggaggcac

SEQ ID NO: 97856 - DNA, 622 bp, Homo sapiens
acaatgagtatgtccattcaccttgaggaagattttatttgaagaaatctttgtcatcaaaaagcttgaaaaccagggctctaccttgatttcatagtcttgagaatgatggagaactcaatttataccatgattttcattgagaaagcaggttgcatgttaagagattaggtgataggatgactgaaaggtatttgtgatcttatgaaaggtacaatgtggcaggcagcctctatgagggaccccagtgatccctgtctcctggtattcatgcctttgtgtaataccctccccttagcatgggctggacttactgactcacttgtagtgaatgcaatatggctgtcctgatgggctgtcacttctgaaattagcttatgaaaaaaccgattacaggtatatctcattttattgcacttrgctttattgtgcttgcagtattacattttttgacaaataaaaggtttgtgtccctcagtcaaacaaaaatgcaatgggtttctttctagtcccccacctcaattttagaaattaaaaaattttccaaacacagtgagtagtagtctatatctgaagggtgaatgaagcaatgagtgaccaagttgcccacttaaggaggcac

SEQ ID NO: 97857 - DNA, 615 bp, Homo sapiens
gaattcttcctcttttgcagatttcttcccctaattgtcctgttttgtgctgtcacccctgtgctctccctcctccccagttatcagcagctggcaggaaatgtttatagaagaagcctttctttctgtttttaatagcctcctaggctgcaacctcccaaatgagaaccttgttaaccagaaggactstaggctactgatttatatttcagtcataccgagaggaggaaaaattacaaaggtagaaagaaaaatgccaatgtacacatggactagttccgacatcttctctgataaagaatgtatatatctattcaggctctggatgctaagggattccttccagatctcagtatttgacctcttacttttgggtcacgtggattcttcgtgcctcttgtgggcttgctgaaagcaaaagtaacaatttcatactcttgccattgaaacaaggggtctattacttttaaatcataagggcacttgtttcaacagaaatgttagtatcttggtgaagatggggtctaagttcttggtggcttctgaggatggcgaagggctcaccttctgtcatcccgaaccatcactgatgggacagtgtctctccatgtgtag

SEQ ID NO: 97858 - DNA, 615 bp, Homo sapiens
gaattcttcctcttttgcagatttcttcccctaattgtcctgttttgtgctgtcacccctgtgctctccctcctccccagttatcagcagctggcaggaaatgtttatagaagaagcctttctttctgtttttaatagcctcctaggctgcaacctcccaaatgagaaccttgttaaccagaaggactgtaggctactgatttatatttcagtcataccgagaggaggaaaaattacaaaggtagaaagaaaaatgccaatgtacacatggactagttccgacatcttctctgataaagaatgtatatatctattcaggctcyggatgctaagggattccttccagatctcagtatttgacctcttacttttgggtcacgtggattcttcgtgcctcttgtgggcttgctgaaagcaaaagtaacaatttcatactcttgccattgaaacaaggggtctattacttttaaatcataagggcacttgtttcaacagaaatgttagtatcttggtgaagatggggtctaagttcttggtggcttctgaggatggcgaagggctcaccttctgtcatcccgaaccatcactgatgggacagtgtctctccatgtgtag

SEQ ID NO: 97859 - DNA, 472 bp, Homo sapiens
cagccacaccagttattttaaatcaacttcacatatatcaaacatgaaaaatattatattttcttatattttcttttggcaatatcgatgatatcctttcaatgaagtttcagtttcaggggataaaaatagctagaaatgtaaatacacttaaaaagtaaagttttaaaaataatttttaaatgtaagtcatacactcacataattatgaaattaggcattagtwttgcactgtataaaatgtaaaagatcagtcttatgtgctctgcctccaccccatattccagtctcagctttctatgttgtttcttctgatggcatactctccacttttcaccctaatattacataacacttcaatgtcctccattggcttcaattccttttcacagcttctcagtgttaaaaagcttctgagttacctcaagatatctgttttgagatgttcctgaaaatccttgccttataaaac

SEQ ID NO: 97860 - DNA, 591 bp, Homo sapiens
cccctccttacttaattataacttctttctctagcagtgaagactctgactctcattgtctacaatgtagacaatgttggctgttttgttcaagcctagtgtacacgtacagaagttttagaatagctataccattacacagtgagaaacacagtttcatctacatgacagtatttatatactgtccctctgactttagcctttaaaaatccagtcaaaacactgtttacaatgctactacaatcattttcttttccccacctctttccatgaggttgatatcatacatttctaagagagttataattagttggcaccatctgcaatccattctgggatctgctatcttgattaattaattaatttttaatttttttagatagtrtctagctccttcactcaggctggagtgtagtcatgcaattatagctcaatgcagcctcgaactcctgggctcaaggaatcctctcgcttcactgcttcaacctccaaaatagctggaactacaggcatggaccaacatactctactaatattttaaaatttttgtgtagagatatggtctggctatgttgtagtcatgagaatgtg

SEQ ID NO: 97861 - DNA, 621 bp, Homo sapiens
gggccatcatgctgtctacacagagttctaagttccaaaacgtccacctctcccagtttagtaaattttataatattgaactatgttggctgtagtggttgaaagtraggtgtgagtgaatctggtttctacttcatttctgtagaatatttaatctatctatttgattttccccttgtaatatggtttagatgtgtattccccccaaatatcatgttgaaatgtgattcccagtgttggaggtggagcctggtggaaggtgactggatcatgggagccgggcccacatgcacagtttagcgtcatcctcttggctagatgtgagttctcactcagttaattcatgcaagatctagttgttaaaaatctgggacctccctgctacttgctctcttgctcctgctcttgccacgtgatgtacatgtttctgcttcaccttccaccatgattgtgagcttcctgaagcccttaccagaagcagatgccggtatcacactttctgtacagcctgcagaactgtgagccagttaaacctcctttctttataaattacccagtctctagtatttctttatagcaatgcaaaaatgatctaatgcacattgtttatcttctcctcca

SEQ ID NO: 97862 - DNA, 621 bp, Homo sapiens
gggccatcatgctgtctacacagagttctaagttccaaaacgtccacctctcccagtttagtaaattttataatattgaactatgttggctgtagtggttgaaagtaaggtgtgagtgaatctggtttctacttcatttctgtagaatatttaatctatctatttgattttccccttgtaatatggtttagatgtgtattccccccaaatatcatgttgaaatgtgattcccagtgttggaggtggagcctggtggraggtgactggatcatgggagccgggcccacatgcacagtttagcgtcatcctcttggctagatgtgagttctcactcagttaattcatgcaagatctagttgttaaaaatctgggacctccctgctacttgctctcttgctcctgctcttgccacgtgatgtacatgtttctgcttcaccttccaccatgattgtgagcttcctgaagcccttaccagaagcagatgccggtatcacactttctgtacagcctgcagaactgtgagccagttaaacctcctttctttataaattacccagtctctagtatttctttatagcaatgcaaaaatgatctaatgcacattgtttatcttctcctcca

SEQ ID NO: 97863 - DNA, 537 bp, Homo sapiens
atgtgtattccccccaaatatcatgttgaaatgtgattcccagtgttggaggtggagcctggtggaaggtgactggatcatgggagccgggcccacatgcacagtttagcgtcatcctcttggctagatgtgagttctcactcagttaattcaygcaagatctagttgttaaaaatctgggacctccctgctacttgctctcttgctcctgctcttgccacgtgatgtacatgtttctgcttcaccttccaccatgattgtgagcttcctgaagcccttaccagaagcagatgccggtatcacactttctgtacagcctgcagaactgtgagccagttaaacctcctttctttataaattacccagtctctagtatttctttatagcaatgcaaaaatgatctaatgcacattgtttatcttctcctccaaggaaatgtttctttatgtctcttacttctggacccattttctttcaagctaccttcctgtagttggtgctgtgatctaccaatcccagatttcaatatttcaaaat

SEQ ID NO: 97864 - DNA, 621 bp, Homo sapiens
gggccatcatgctgtctacacagagttctaagttccaaaacgtccacctctcccagtttagtaaattttataatattgaactatgttggctgtagtggttgaaagtaaggtgtgagtgaatctggtttctacttcatttctgtagaatatttaatctatctatttgattttccccttgtaatatggtttagatgtgtattccccccaaatatcatgttgaaatgtgattcccagtgttggaggtggagcctggtggaaggtgactggatcatgggagccgggcccacatgcacagtttagcgtcatcctcttggctagatgtgagttctcactcagttaattcatgcaagatctagttgttaaaaatctgggacctccctgctacttgctctcttgctcctgctcttgccacgtgatgtacatgtttctgcttcaccttccaccatgattgtgagcttcctgaagcccttaccagaagcagatgccggtatcacactttctgtacagcctgcagaactgtgagccagttaaacctcytttctttataaattacccagtctctagtatttctttatagcaatgcaaaaatgatctaatgcacattgtttatcttctcctcca

SEQ ID NO: 97865 - DNA, 601 bp, Homo sapiens
tattttacttagtggtagactattttttcaataaagtataaataaatgtaatttgctgggttttgacaaatatatgtaatgtttaatacccacacccattaacctatacggcatatctagttttattctgctttgcaggtattgtgctttttacaaactgaaggctgtggaaacctcacattaagcamgcccatctatatcatttttccaacagcacatgcttgctttatgtctctgtgtcacatttggtaattcccacatttcggacttttgaattatttttatgtctgttacggtgatctgtgatcagtgaagtttgatgttactagaatagtttttggggaaccacaaactgcacttatgtaaggcagcaaacttaatccttaaatgtgtgtatattttgactgctccaccaattggctgttccccatctctctccctcttgtcaggccttcctgttctctgagacatgatattaaaatcaggtcaattaacaaccccacgatggtctctaagagaaagaaagagttgcatgtctttcactttaaattaagagcaggaaataataaagcttaaagagaaaggtgtggcaaaataatta

SEQ ID NO: 97866 - DNA, 607 bp, Homo sapiens
aggagctttattttgaaaaattataatccaaaactttccaaataataaaacatcttgactcacagatttaagaaactcagcaaactcaaaaaaattgcaattcatcacatcattgtcaaactgttcaaaaccaaagataaagagaaaatattaaaagagcttggggtgggaggtggggcctgcattacattaggggaacaactctgaagagagaagacaacgatgtgactatttaaagctctgaaattctatacacacagaaaaagtgttctaaaactaaagggaagcaatgatattcttagacacacataaaaaaaaagctgagagtatttgcttctatcaggtttcatgctattataagtattttaaaatcttcrtgtataaagaaaatgattccagaaagaagcagagagctgcagaaaaaagaaagaaaaacattgaaaaaggaaaatgtaaaaggtaattgtttacaacaaaaatagtaatagtgtcttacggggcttatgacatatatagaaataaaatatatgacaataagggcaaaaatgacagaggttttaattgaagtttacaggctcttagatgttttgattgcttgaagtactaa

SEQ ID NO: 97867 - DNA, 607 bp, Homo sapiens
aggagctttattttgaaaaattataatccaaaactttccaaataataaaacatcttgactcacagatttaagaaactcagcaaactcaaaaaaattgcaattcatcacatcattgtcaaactgttcaaaaccaaagataaagagaaaatattaaaagagcttggggtgggaggtggggcctgcattacattaggggaacaactctgaagagagaagacaacgatgtgactatttaaagctctgaaattctatacacacagaaaaagtgttctaaaactaaagggaagcaatgatattcttagacacacataaaaaaaaagctgagagtatttgcttctatcaggtttcatgctattataagtattttaaaatcttcgtgtataaagaaaatgattccagaaagaagcagagagctgcagaaaaaagaaagaaaaacattgaaaaaggaaaatgtaaaaggtaattgtttacaacaaaaatagtaayagtgtcttacggggcttatgacatatatagaaataaaatatatgacaataagggcaaaaatgacagaggttttaattgaagtttacaggctcttagatgttttgattgcttgaagtactaa

SEQ ID NO: 97868 - DNA, 619 bp, Homo sapiens
accgatgtggtagcacatgcctataatcccagcactttgggaggccaaggtggatggatcccttgagcccaggagttcaataccaggctgggcaatatgaaagatacaaaaattagctgggtgtggtggtgcatgcctgtagacccagctactcagagggctgaggtaggaggatcacttgagctctggtgatcaaggttgcaggaagccaagattgcactaccaaactccagcctgggygacagagtgagaacttatctcaaaaaaggaaaagaaaagaaaaaaaaaactttcttaagagaatcatttaattataacatttttaaaaaacaaggataaagctaagaacataagacaatctggtctcattttttcattacattgatgaggaaattaagtctcagagaagctgactcatttgcccaagtcatatggccagttaacatccacttcagaatacagggtatagagaaaatacgcattcactggccttctctgttttccatagtttctaatagccatccttgatgattcaataatggagtgttaatcttgccaaccaagccatttcctgttcataatcatgcttttcaagaaaacattatactcccatacattt

SEQ ID NO: 97869 - DNA, 619 bp, Homo sapiens
accgatgtggtagcacatgcctataatcccagcactttgggaggccaaggtggatggatcccttgagcccaggagttcaataccaggctgggcaatatgaaagatacaaaaattagctgggtgtggtggtgcatgcctgtagacccagctactcagagggctgaggtaggaggatcacttgagctctggtgatcaaggttgcaggaagccaagattgcactaccaaactccagcctgggcgacagagtgagaacttatctcaaaaaargaaaagaaaagaaaaaaaaaactttcttaagagaatcatttaattataacatttttaaaaaacaaggataaagctaagaacataagacaatctggtctcattttttcattacattgatgaggaaattaagtctcagagaagctgactcatttgcccaagtcatatggccagttaacatccacttcagaatacagggtatagagaaaatacgcattcactggccttctctgttttccatagtttctaatagccatccttgatgattcaataatggagtgttaatcttgccaaccaagccatttcctgttcataatcatgcttttcaagaaaacattatactcccatacattt

SEQ ID NO: 97870 - DNA, 405 bp, Homo sapiens
aaaatattgtgtttaatagctccatggcattctgctaagtgatatgtggtgaaatgtattagttatttattgctctgtcatcagtcattccaaaatctcagaagcttaaagctgcagatatgtataatctggcatggtttctgagagtcaggactctgggagcagctaggctgattggctcaggcttggattctcccacatggtcacagctgagatgttgagtgggaccatggtcatctcagggtttgactgaggcttgagctgcccacctccctcacggcactgctggctggagatgtcaatgcctcactaagcagaactckccttacatgatggcaaatgtcttcctgccaggtgggagacataggagaaagcaaggaatgagtctcggtgacttttacgaag

SEQ ID NO: 97871 - DNA, 405 bp, Homo sapiens
aaaatattgtgtttaatagctccatggcattctgctaagtgatatgtggtgaaatgtattagttatttattgctctgtcatcagtcattccaaaatctcagaagcttaaagctgcagatatgtataatctggcatggtttctgagagtcaggactctgggagcagctaggctgattggctcaggcttggattctcccacatggtcacagctgagatgttgagtgggaccatggtcatctcagggtttgactgaggcttgagctgcccacctccctcacggcactgctggctggagatgtcaatgcctcactaagcagaactctccttacatgatggcaaatgkcttcctgccaggtgggagacataggagaaagcaaggaatgagtctcggtgacttttacgaag

SEQ ID NO: 97872 - DNA, 405 bp, Homo sapiens
aaaatattgtgtttaatagctccatggcattctgctaagtgatatgtggtgaaatgtattagttatttattgctctgtcatcagtcattccaaaatctcagaagcttaaagctgcagatatgtataatctggcatggtttctgagagtcaggactctgggagcagctaggctgattggctcaggcttggattctcccacatggtcacagctgagatgttgagtgggaccatggtcatctcagggtttgactgaggcttgagctgcccacctccctcacggcactgctggctggagatgtcaatgcctcactaagcagaactctccttacatgatggcaaatgtcttcctgccaggtgggagacataggagaaagcaaggartgagtctcggtgacttttacgaag

SEQ ID NO: 97873 - DNA, 564 bp, Homo sapiens
ttgagctaaaacttaactatttataaaagttatcagagcacaggataagcaacatgaaaggtgggcatgtgaggttaggtctaatgctgagctggtgtgcacaggtgcagcacagcaggtgtgaagatgctgaaatgcttatgtgtagggcactaagtaaggcctctgctctgagccctccaggacacccaccacccctcccaggatgatcctcctgctgtgcagcaccgggagggcactgtatggaccctactccagctgtggtcagcatctattctgattggtcagtttccctacatggccagttgtaaaattctttgactataactctggggttgggaaaaaactgcatcgaggacagtaacgggtagggatgggaactgagtgtgcaaatgtagtcctggacaaagttaaatgttggattttcyctttaggggctggagagtcatccctagaccataattaaggagtgataggcacaggtgcttagttgagtcacacctgtcagggtgatctcagaggagaaggtaattagagtgagacatgccttctgagtgaatatga

SEQ ID NO: 97874 - DNA, 593 bp, Homo sapiens
aatgcttactaggtaaggttaacttatcttttttttgagacagagtcttgctctgctgcccaagctggagtacastggtgtgatcatagctgactgcagtctccaacttctggactcaagcagtccttccacctcaccctcccgagtagttaagattacaggcacacaccactatgtctaagtaattttttattttttgtagaaacagggtcttgctatgttgcccaggctattcttgaactcctggcctcaagtgatcctcccatcttagcctctcaaagtgctggaattataggtgtgagctaccatgctccaccaatgtttgcttttaaatggagtccaattcaaaaatagttcataaaaaatattcaactcaagggcagattttagaaagctgtcttacctcattgcttttaacggcagtaaggcatatatattttgaaatcgagagtgtgatctgtgtgcctacacctaatatctccattaacaataatgaaatcttgctcgtgcctgctgccctaggctccaggtataattttttttattgcaaaggactgataactgatatacctcttttctcaattcctgggaaa

SEQ ID NO: 97875 - DNA, 412 bp, Homo sapiens
catgtagcctctggaaaactccagtgtacatttatagaagcatgaaagtggaaaagacaaataatctttygatattatggaaatagtgtccatctcctggacccttggaagtcagtcttcaagatatcccagaatgtccaaaactaaactcagccatctccctgaaatatatttttcatgtagtgtttctgaactcagtaaatgtttctgtagcgtgttaactgccaagctatcttggggtactcttatccccacattgctttaattgcaagtcttaattgattctttttcttacatatttggtcagtttcttcatttttctaccagtgaacttgaatccagctggacatttcccatttctcttttgataaaaccaagtagtaaagtatttctgcgtttataaatatgaatt

SEQ ID NO: 97876 - DNA, 607 bp, Homo sapiens
gtatacattgtgaagtaattataatcaggctaattaacatatccatcacctcacataattaacttttgtgtgggttgtgtggtgggaacacgtaagatctactttcttatcaaatttcaaatgtacaataaagtattattaactatggccaccatgctgtacattagctctctagaatttattcattctgacagaaactttgtattctttgactaatacctccccattcctctcactcccaacccctggcaaccaccattctactctctgcttctgagttcaacatttttagattttacatataaggctgaaaaaatattcctttgtatgcatacatatcacattttctttatccatacctccattagtggacatttaggttgatccatatcatggctattgtgaataatgatgcaatgaccatggaagtgtagatatcccttcaacatacctatttcagtacctttgaaggaaattgtgggtcatatgttagttttttaattttttgaggagcstccatagggtattttataatgactataccattgcgccctgccaccaaaaatgtacatgggttcctttgtctttaaatcctcaccagagattg

SEQ ID NO: 97877 - DNA, 571 bp, Homo sapiens
gatagagccattcatgtcagaagaatattattaagattatcatctataatgagtagaatattaaccatatagtataaataaatttgtgatcacagttttaaatgtataaaaatgaatgtactcatayagtcacacatattgtataaagcagaaactactgcatcttaacactaaaaaattaatagtacttaagaatggctggttagataattggtcattttatttttttaatgttggtcttttgcctgggttataaattttctgcaaaaaagcctaggttacatttataatcaagaaataaatgaatgctacttattaaaattcccagaaaatggaaattgtcataaaagtaaccactcacttacggctacattactataataaaataaagaagaaggcagatttgaccactcttctgccttgaccttgtaaggacaatatgggttaatcaaatactgtggagtgatatagctttggcatgaatttacaaggctgttgaaaaattacatcataacttttcccggacatgaactactcaaacattttttgaaggtgttatttatttaaacag

SEQ ID NO: 97878 - DNA, 611 bp, Homo sapiens
aaatccagttctgtctgaagccaaaacctctactcttgatttgaacactgtgatacaccagtccccatgctgacatatataacctgtatgtcctattatatatatacctcagtttattcatctacaatctagtaataataatgcctaccccatgggaatattattctgaagattaaatgagaaaatgcatgtaaaatacttagcaaggggcctggcacattggaatggtggccatctccyatctgctcaattgtcgttacactccaggctaggggttcctgacttggattcatggatgagcttcagatgacagcaaaacccctgaagttgaaagcactaggttgtgtagatgcacagacatgcatgcttatagtactgagtcagatctaacagccagggcatgggagatggggagctgattgaaaaaataaaaatcccactcaagggaagtgtgatttcattgagaagccctggcatcttcccttcagggagctcatgacaattaaagggacatatagatcattttaaaattcttataacagcaagaaaacattaacagatcaaatattagtcaatgtctccaactgaaagccagactactttagctaaaa

SEQ ID NO: 97879 - DNA, 597 bp, Homo sapiens
agagtccaccactctttcagtacctgtgtgtaaagttctagaagatttgatggatttgaacattctttctcttctccacacaggagtttcaatttttctaatgctgcagaggcccgaattaaaaagtgatctataagaaataaaaacatgaggattacttcacctagtttcagagtgttatttaaacaaaaaacacattatgtatgaagatgaaatgacaagatgaaataatattatgacatatggagaaacagaattatagtaataatatcttatctaaaacatgaaatatctcataatgcctaatcctaattaagtaaatttatcatgaaaatttttyctacaaagcaaaatactgaaaactttctagagtcactcttgccatttcttaaatgcagtctgtattctcattatgcttcttttatgataatgcactcaaaataattaaacaaatttaaaacttactggaatatacaaataatatacataaatatacagaaagggcttccactgaaaacttaagatttcataaatgtagttgcaaatgttattcaaaagaccatgattgaccaaatcaaattccttacaaaatgccag

SEQ ID NO: 97880 - DNA, 582 bp, Homo sapiens
actagtgttcccaaatgtttggctcttttgtatttatgcacctcaaaaatatattgacatatgttgacatatttttgaggtgcacagatacaaaagcttagcttagcctaagctgaaagcactgcctgagttttcataaaatcagtttcacgaaattacagttcaattactacatttctatcatctcactagtcaagaaatactgacatttcctcttaatatcagtaaataatttttaaaaaccagaagttcttcatggaaatgctaaccaaaagtttattttctattatcttaaaggagaaaaactgtaatgtgttttatatcatgccaaggacccctaattaatttctaaaatgctgctacaatatatcaaagtacctacctataagcaagaattatgttaggctacaaatagttaaaccaaacagcagttactttacataaaataatrtatgtaacatactatgatctaaacaccttggcaacatggagtgggaaatagtatatagcaataagtaaatttcctttaaaagtacagcgaaaaattacatttaaaaagtcaattttttgtctaaactgtta

SEQ ID NO: 97881 - DNA, 566 bp, Homo sapiens
agactaatcgtggcagacacccccactgcctccctgctaccccacgtggtttgaaagtaacagaattccctgaacggtaatatgctacttatcttcctgtcagtcattcartaccatttataaattctagagggctactgttagtaaaaccctcttgctttctattcctgagcatgtttcatcgttgtccattttgatcttggaaatgtaatctttaacaaggtaccaatgtctgtgaaatgtcactccaacaaaggatatcagtattctccatggcttttgttgtactcggatttgaccttcattgctaattgttggtctgtgttcctagcttatggcttatttggacatacatttcttctgttaccacttcaaagcttttgtctagaaattagactggtaaaataatatagaagggttttcccctatgatatccttttcctttgatacaaataattgaaaattgggtatgatagcataaaaggacttaaagtttgaaagttttaagaaagatttggagaatcaggagtaaaagagaacaaatgcatgtgagtatgaaatattat

SEQ ID NO: 97882 - DNA, 575 bp, Homo sapiens
tttacctatataacgaacctgcacatgtacccccaaacctaaaagttaaaaaaaagaatatttctacaatgaataaaacagtgttttgctttgccatttctctcagcatccctctgtccaataacccaaaacagtttattagaagggatgggttggacatggaccaaaagagagcaaaagtacaaaccatgatctgactacgtttaagtatccaaaccaagaggatggaaagctgcaacaccatgagtcagtcctctagggatgtggctcctcatggtgcctctgtagaactcatttccacacatgtaaaatgagatgstaagtatttatcctgtagggcaatggttcataatgttttaattcattcaagaagaattggatcattacttagttggccattgggctgggttctgcatctagttcacagagataaacgtggcagatgggatccttgtcaccacagagctatagcctgatgaaagacagagattcacctacatatacaaccccaaatcacattttcaacagatatttatagagcacctacaatgggttagccactgtaatgcagtggg

SEQ ID NO: 97883 - DNA, 468 bp, Homo sapiens
aacatgaccttaatggactataacatcaaaatgttaaccagcactggaataaactctagttttcctgagcacaaattcctaacaactgaacctacaacaggtctgawgatacaactgcaaattgattcaatttgagaaggatttcaaaatcgtcagcatattgtttagggaagaaatcagaaggaaggtaccttcatttgggacaaattatttaccagctggtcctgccatgtctgtgtctataaggaaagcatgacgcttctatgcacaggaagtgccatcccaggctcttctgtttttagaatggcatttctcttgccctgaccactctctatggagccataaattcttttacaaatattgtttcccacagcatgttttccaccacatggcatttcccctggtctgccctatttcatcttgctgtcattttgcttccggttatccaatacatctgaatcacatatg

SEQ ID NO: 97884 - DNA, 597 bp, Homo sapiens
gaggaatttcatctcagccactttaccarctggggacctccatagctggtgattctccctcaccacctagtgcctcatttgtgcctgggccttccactctaggcaccccaccaacttggcctgactgtattataccttgtacccatattcagtggttcctgaactcttgtcctgagaccaaaaagaatgatacactgacaatttgaataatgaggagggcagggaagaattttattgagtgacagatcaactatcagtgaacagagaatgcagggatggtacccccaatcccttcagtcaggtggtttttctctcagcgtgtctgggtccggggcttttatgggcacataataggggagtgcatgctaattggtttgtaagtaggcacaaaaggttaaagcaaatacactactcagagatgggcacaacagtgtagaaaaccaattagaaaagggtaggtatatgtaaaataggtgaagagtggggatgaatcagagaaaagtgtgccaaacaggaagacaggttctcaatccagtctatggatttgactggtagcttggctttcaggcttcaaactgtctttagcttggaggtaag

SEQ ID NO: 97885 - DNA, 597 bp, Homo sapiens
gaggaatttcatctcagccactttaccagctggggacctccatagctggtgattctccctcaccacctagtgcctcatttgtgcctgggccttccactctaggcaccccaccaacttggcctgactgtattataccttgtacccatattcagtggttcctgaactcttgtcctgagaccaaaaagaatgatacactgacaatttgaataatgaggagggcagggaagaattttattgagtgacagatcaactatcagtgaacagagaatgcagggatggtacccccaatcccttcagtcaggtggtttttctctcagcgtgtctgggtccggggcttttatgggcacataataggggagtgcatgctaattggtttgtaagtaggcacaaaaggttaaagcaaatacactactcagagatgggcacaacastgtagaaaaccaattagaaaagggtaggtatatgtaaaataggtgaagagtggggatgaatcagagaaaagtgtgccaaacaggaagacaggttctcaatccagtctatggatttgactggtagcttggctttcaggcttcaaactgtctttagcttggaggtaag

SEQ ID NO: 97886 - DNA, 585 bp, Homo sapiens
catatgggatttagtgcttaccacactccagtgtggcctcatcttaagtaattacatttgcagcaaccccatttctaaatgaggtcatattctcaggttctgagggttagggcttctacatatctttctggaggatacagcacactcaattcctaatagcaactgaagcttcttcttaaacaaaaaaraaaatactcttatttcagttatcatattataaagtgttctgaatcctattggaaactttcaacctcttttttgatatttgttgtaatgactattaaaaatagcataaatttaacatagaaatttaaaaatatattacaaaaagtctgggcacggtggctcatgcctgtagtcccagcattttgggaggccgaggcaggaggatcacctgaggtcaggagttcaagaccaacctggtcaacatggtgaaactccatctctactaaaataatacaaacattagcaggtatggtggcaggcgcctgcaatcccagctacttggatggctgaggcaggaaaatcacttgaacctgggaggtgaaagttgcagtgagctgagatcgcaccattgcactacag

SEQ ID NO: 97887 - DNA, 592 bp, Homo sapiens
atgaatacatgccatgggatatgcaaaacatttaaatatggtgtagaaagaaatgttacaacttttatttgcaaatgttttatattaaaaaggaggaaatcgagggtacatactgagatcagtgtccccatgtaagccctagtccaagtgacacttctcatgttctctgcctctattacctggagccaatagaaatcctcatggacaattaactttggtgccrttattctgttgaatgctcaagtgtatgtgtgcccagttaaatcaaaccttggatcatttttgctcaaacttagctattaaaccaacacaaagtttaaaatgccttacatagattttagttaaggaactgtgatttgatgacactatttataaagcaaacacaagtgaaataacataagtttgacagaactgacctttttcctattgcataaatactcttgtcaccagccacagagttcatctgtcccttcatggtagaggagattctgtaacaataaaagagaagggaactgttttacaaaagcaaattgtgctaaaaagagaacgttatgtaaataaatatttagactttttgttttgggttgacttt

SEQ ID NO: 97888 - DNA, 679 bp, Homo sapiens
caccacgcccggccctagtcttgttttctgagactggctgggaagggaaccttgctggtggttgtggggaggtctgagcactccagtgagcagctgattatttccctgggtggctgggaatagctcaggagtggcactgactgccagctgacctctggagttsccatggttgggagagaagtaacagcagaaggcaaggcctgagcaattcctgcaatccaggcaggatgccagggtggagggacacagctatacacccatgccagcataaatccatgacgatcaaggaccaggtacctctctgttgccacctggagcaaaagccttgagagcttggctacaatcttggggagaagatagggggagggaagaacatctaattgacaaagaaaaccccaagagattgagttttccctaaactaaaactaagctttctgccatagggccagtgggagctggagactcaaattaactgaggggaaaaaatcaaaggaatgttgtcagcacatgtgagctgatggcctgtgaattttggacctactgcattattttttgggatacactgcccatgcaattcttcagtaacttttaaaataaacttttattttaggatagattgacatttacagaaaatttgtgaagacagtacagagttctcatataccccacaccaagtttc

SEQ ID NO: 97889 - DNA, 572 bp, Homo sapiens
ccatgtctaatggtttctttatctggatcccccatagtctgtttctatcacctgccatttctgcaattttgtttctgttgggaaaataagaatattcataatccaaggtcattttaatgtgatcagtgctgaaatgattgtgagtcaaccttcagtccctgtgagagttagtctttttccaatttgccctaatttccagtattattcttcaaggttttaactcagtcttayataacaggaccacctctctgacgaggtcttgactccatgaatctgttgaaagctctgctcagcttctcagcctttttagatggaagtgactccaatgttgggctcatcttttgctggactttagccccattggtcttcactctcttaccagttctgatatattcgaagagaaacatacttaaatttttaaatttttttcagcaatacagttgttgctctaactagtctgccattaccaaaaggagaactccaatgacagctgaaaaggaaggtagtatgagggaagagttgtttttgtcatagtttttaagatgtgaagtaccaatttaaatgtgaatgcc

SEQ ID NO: 97890 - DNA, 571 bp, Homo sapiens
tctaggttaggagggtgttagggtgttagggtatgtggggggaatgttrtctgttataggatgaccacatttcttaggataatactttgttggagcaatcttccaagtattaagaagtcccccaccacccctcaaaaaagcgcattttagaatgggaagaaatccacccctttgcttctctgactttctctcatcaccttctgctttcctccctaaaaccaaatcccacttgccaagggtatgttcaggttgttaattagaaggctagtatccaaaaatagctccctttccaggctgcccagtacctgaaattcccagggataaaagcaaagccatcatttcatgtctgcttttaaaatatattcctgggagaaatccatatccatttacttacttactaaatgcttattgagaacttattatatgccaggaatagagctgcaaaaatggtagacaaggcctacagttctcatgaagttatgctttactatgggaaaagacagaaaagaaagaagacaattttagataccggtaaatatttggatttgagagtggctgaaagggtgggatg

SEQ ID NO: 97891 - DNA, 554 bp, Homo sapiens
aaaataataataataaagattttttttgcccataatgagagtttgcaaaaawaaaaaaattgtggcaaatcagtaccattacccaagtggaagacctatgcacttcctcctagaagaaagagaaccattttctgctgggcaacatagacagtagacctgagaaaagttcagttttcttttcaaaaagaaaatttgtttcccaatttacttcagcaatgggtaaaactcagatgagaccctcttagttggtcttcccttaaggcagcccagagttcaggaagggaagagtcgaattcactttcaggaattcaattcagtttctttttattctattctatttccttcaatacagtttgataaacacccagggaagtgctatgagttggagaaccatgtagatgctgggagacagaatgggaagaggcagggttgtgcttctcctcttctgaatccagattggatatgggcatcacttgaccaaggaatgctcttttgggcagggtgggaccaaagaagataaaaaagccataaaaaaagcaggatcaaaaaagatt

SEQ ID NO: 97892 - DNA, 578 bp, Homo sapiens
attgcttctttgctttgtagttttatttktgagaaatctttgaggcttaggatgaaggtttgttactcagaaggaattatgcttggcccctgggaatgaccagttcagaatcactctctattaaattctcagcttggggacttttggtcacccacctcacacaaatttagggagaacctgttgctccaaatactcggcagtgatttttctctttttctttcagctctagggcttgaaatgactgatccctcctgattcctttgcgggtagagaagtgagttgcttctagtttgccactgcaatgagggtaccgccctctgggggcccttactttaagagattactgattggcttgccattttggctgtgctctcagcttgatcttccctttgtatctcttgaaaaggtgaaaatgaagttgaccaggtttcacaaatgccctcagggcaaaggccagctgcactccccactagatttctctttgggttcctctgtgccttcaaccctggcctgagaattccttatgtctcctcagttcattaatgcctttaagaatatttacactcgcactcacatgg

SEQ ID NO: 97893 - DNA, 578 bp, Homo sapiens
attgcttctttgctttgtagttttatttgtgagaaatctttgaggcttaggatgaaggtttgttactcagaaggaattatgcttggcccctgggaatgaccagttcagaatcactctctattaaattctcagcttggggacttttggtcacccacctcacacaaatttagggagaacctgttgctccaaatactcggcagtgatttttctctttttctttcagctctagggcttgaaatgactgatccctcctgattcctttgcgggtagagaagtgagttgcttctagtttgccactgcaatgagggtaccgccctctgggggcccttactttaagagattactgattggcttgccattttggctgtgctctcagcttgatcttccmtttgtatctcttgaaaaggtgaaaatgaagttgaccaggtttcacaaatgccctcagggcaaaggccagctgcactccccactagatttctctttgggttcctctgtgccttcaaccctggcctgagaattccttatgtctcctcagttcattaatgcctttaagaatatttacactcgcactcacatgg

SEQ ID NO: 97894 - DNA, 578 bp, Homo sapiens
attgcttctttgctttgtagttttatttgtgagaaatctttgaggcttaggatgaaggtttgttactcagaaggaattatgcttggcccctgggaatgaccagttcagaatcactctctattaaattctcagcttggggacttttggtcacccacctcacacaaatttagggagaacctgttgctccaaatactcggcagtgatttttctctttttctttcagctctagggcttgaaatgactgatccctcctgattcctttgcgggtagagaagtgagttgcttctagtttgccactgcaatgagggtaccgccctctgggggcccttactttaagagattactgattggcttgccattttggctgtgctctcagcttgatcttccctttgtatctcttgaaaaggtgaaaatgaagttgaccaggtttcacaaatgccctcagggcaaaggccagctgcactccccactagatttctctttgggttcctctgtgccttcaaccmtggcctgagaattccttatgtctcctcagttcattaatgcctttaagaatatttacactcgcactcacatgg

SEQ ID NO: 97895 - DNA, 536 bp, Homo sapiens
cagtcaatattcaatgaataaggcacaataattcaccaaatccatatccctttctttgactcaaatctatcctatctgccacatcagtttaggacaacagaaagtgtttgtcagaataaagatcttaaatatcccccccatcctcttatcaactacataytactttacaggtgaacaaaaaaccttggggaaaaacagtaatcaatgaacttttttttttttttgagacagagtctcgctctatcgcccaggctggagtacaatggtgtgatctcggctcactgcaacctccgcttcctgggttcaagcatttctcctgcctcagcctcccaagtagctgggattacaggtgcctgccaccatgcccagttaatttttttctttttttttttttttttttgtatttttagtagagacggggttttgccatgttggccagcctggtctcgaactcctgacctcaggtggtccacccacctcggcctcccaaagtgctgggattacaggcatgagccactgtgcccgacctgcatgtg

SEQ ID NO: 97896 - DNA, 578 bp, Homo sapiens
ttgagggtggaatagagccctgtttcatgatattaccaggattactcgtctgattccttctcatgtgtgtagattatttcagtgggaaaatctggaactcaaggctgctggtcagattctttagtcccatggggtggtccctgatttgtgcactgccccttcccctagagatggagcttcctgcaaaccagacagcagtgattgctattgttcttctgggtctctccacccagcagggctaccaggctggtgctggggaatgtctgcacagagtcctgtgatgtgatccgtcctcaggtctcccagctgtggatgcgagcacctgctccggtggaggtgacaggggaccgaagtggactctgtgarggtcctcggcggtcgataggtttactgtgctgactttctcagaggctggttattctagcagtgaagttgtcacatgggcagactcaggacctctggttatccaggatgttgcaggaggtggaataagctcttgttttctccttcctaggagcagggttgttctgtcatgagttgctgtcatgtcctgagctgactggcctccagccaggagg

SEQ ID NO: 97897 - DNA, 494 bp, Homo sapiens
gaatttggactgggactacaccaatagctcttgagggtctccagcttgctgactgcagatcttggacttgtctccacagaagataagtacatcctgtttgttctggatgtgtttttcacaagaaacttacttcaaattaaggatatatttagattttaaagtaaaagaatggaagagagcagggcactttggttcacacctataatcccagcactttgggaggccgaagggggaggatcatgaggtcagcagtttgagaccagcctggccaacatgrtgaaaccctgtctctcctaaaaatacaaaaattagccaggcgtggtggcaggtgcctgtaatcccagctacttgggaggctaacgcaggagaattgcttgaacctgggagatggaagtttcagtgagccgagactgtgccattgcactccaacctgggtgacagagcaagacttcatgtcaaaaaaaaaaaaaatggaaaaaatataacatatagat

SEQ ID NO: 97898 - DNA, 494 bp, Homo sapiens
gaatttggactgggactacaccaatagctcttgagggtctccagcttgctgactgcagatcttggacttgtctccacagaagataagtacatcctgtttgttctggatgtgtttttcacaagaaacttacttcaaattaaggatatatttagattttaaagtaaaagaatggaagagagcagggcactttggttcacacctataatcccagcactttgggaggccgaagggggaggatcatgaggtcagcagtttgagaccagcctggccaacatggtgaaaccctgtctctcctaaaaatacaaaaattagccaggcgtggtggcaggtgcctgtaatcccagctacttgggaggctaaygcaggagaattgcttgaacctgggagatggaagtttcagtgagccgagactgtgccattgcactccaacctgggtgacagagcaagacttcatgtcaaaaaaaaaaaaaatggaaaaaatataacatatagat

SEQ ID NO: 97899 - DNA, 576 bp, Homo sapiens
tacatatttcttagaatatttagctcacagacagctctcagacttcattttatttggatgacaaccttctaaagaggaaggcatcactcctgttttcaatcatgaaaccaggaattcaggctttaaatagatgtcaccaggtctcagcgcatagaatcaccctcaggatttcttttctttctttttttttcccctgcaatggagtttcactcttcttgttcaagctggagtgcaatggggcaatcctagctcactgcagcctccacctcccgggttcaagcgattctcctgcctcaagcctcccaagtagctaggattacaggcacatgccaccatgcacagctaattttttgtactttttggtaggaatgttagccaggctggtctcgaactcctgacctcaggtgatctgtctgccttggcctcccaaagtgctgggattacaggtgtgagccactgtcacctggcgcaccctcaggatttctgtyccctgctcttatgggctacactgttccctagattttcctccaagaatatgagattttagtgcctacaacaagctgatgtaactgtggg

SEQ ID NO: 97900 - DNA, 577 bp, Homo sapiens
ttttttatggctaaatggtattgcattgtgtacacatactacattttaaaaattcattcatctgttgcacagtcrggtgactatagccaacaattaaatattgtaaacttcaaaatgtctacaagggataatttttgaatgttttcactacaaagaaattataagtgtttaaggtgatggatatgctaattaccctgatataattatacaatgtatatatgtataaaaaaaatcacactgtaccccataaataaatataattattatgtcagttaagaatgaaataaaacttaaaaatatataaattatagctttgccatgtgaataaattgggtcacagagaagagcatttgagagaaatgataagacataagactaaatgctgaggaattctaaagtttagatgttgaatcaagaatgaggagcaaataaagaatactaggaaagggaaaatgaggtagaagggaaactaggagactgtgtcaccttgaaagccaagaaaggagaaagtttcaggctcagaagatcaacagagtcaaaggctactgcaaagtaaagggaaatgaaaactaaaaaa

SEQ ID NO: 97901 - DNA, 610 bp, Homo sapiens
aataaaaatactatgtagcatttgggtagctagcacatggctataaaactagtggatttttagctctatttatatggaactgaagctacagttgtgtggaactaagcttcccctctgttggtaaatggcagatacctagttttcatcaatagttacattgagcttactctgatgtcttgttttgcataattcttttatcaggcttactctgatggtctgttctttatatattttttaatctgtgcatcctatggttgccctgacagtgtatctaatacgtgtgattagtcatattcttcactcctcaacaaaattacatcagtttttcacagtagtcaatgaaccttatatcaacacctcaacaaccttttttataaaaatcttataatttggttctaaaatgatatacagaaatgccccaaggcaagagtagctaagacacttttgaagaacaaatttggataacttattagacttcttataaaacagtggtaattaaggcaatgtggtgttacacgagtaatcatgtagrtcaatggtaaaagagaatctgaaaactgataattacctgtagacacttgaattatgacaaagttggcattctagaaca

SEQ ID NO: 97902 - DNA, 588 bp, Homo sapiens
gaaggggagtttagaagaggttgattccaaccctcatgaactttaaaatattaattgaagttaggctgtagtgagttaaagatgcatattgtaatcttgagagcaaaaataacacaaagagatcatacacccttgagataaatgtttctaaatggacaagaattttatcagattttggttaactttggaaagtgatccatgtgtacttgggaaggattctaaagttgctgggctcagcactctacgtatgccccataatggaagagagtcagtgtgtttaatgtatatcccaagcagtgtgtggtctgcttaccccgtctgcttttgagagaggtraaatctcctacggtaattctggatttctcctggcaattctgtccatttatatttcacacatttttggactatgttgttaggggttcacagatcatgtcttcctggctttttgttactagtattattattgaatgatcttctttagacccaacaatgatgcactttgccttttatgatatttagtttgttatgaacattgccacaccagtaatcctttgaatgttgctggtctattattttttagactcgtgt

SEQ ID NO: 97903 - DNA, 525 bp, Homo sapiens
cttcaaaagaaagctagaatatcccttcaacagcaaaaataatatctgttatttcacccttttatctccagcaccaaagaattacaacattatttgcagaacaaaacaattctatttcatagaggtaaccttggcatcagtgtaagtccaggcaaaaatggagacgggctttggaaaatgagagttttcactgatattggacaaatgtctagtgtgattgcctagcccataaaaggcattttataaacacttgttgaagaattgaatgacctatgtaagagaaagaggagagtcacagataatggatatttcacagccattatatggtggggtaaaatccaaaatattcctaagggttctcaaagggmcagtgtagatggcagcaaagtcattgcatattgccacatggctttaaaagtgccaaagtgatccataccagaggttataaagtaaacaacaacagctatggcttcaggcaaaacaagggctatcaacaaagaagccaggaagctcttcaaggacagc

SEQ ID NO: 97904 - DNA, 534 bp, Homo sapiens
caaacatgggacgaacgtgggataaattttcctatgtgtctacatagcaattagtcctatatattttatttttccctctacttgtaaaagcataaatttcttacaaagtggcccatctcattatatcatactgctctcaccaattgtttgtatgcaactaataagagctattaatatgtggtctgctcattttacacaataagtaaatcaccagaattccttttaaaatggccaccattagaggataattatatgaagccctatgaacaattcagaataaaaaatyctctgtaaagctgatacaagattgctgtctttcctatgaaatatatgccatatattaataatcagcaaaatcggcataatctagttataaaggacactacttttattttttctttttttatatgtgttaataatttactaattctgtaattatcaagagattttggagcataaagctaggtaggctttggtttcatagatatggtgccttttaaatgttgtatttgatgatataaaaatatgctaaaa

SEQ ID NO: 97905 - DNA, 638 bp, Homo sapiens
agccattccacaaacctttactgagtatccaatttttgtgactggcccacattaggcrttggggataaaaagaggagtacgaattcacagcttagagaagggataggcatgtaaaccaaagattatgcacctctatgtgtgttaattgtaaatatgggctctgtgctgtgtgagcacagtgggtggggaaataaacagagacttggaaaggcatggcatgtttaagaagcatcaggttctatctgacttatgtttatggtgtgcacatgtaagtggtagagggttgatgggaggtgagtcaagaaagagagcttggagacaggagaaatgctaaatcatgtgggcataattttgtaagaaggagccaatgggcctttttgattatggactgctattatccaatttaacttttagtacaatcactaactctagaataaagcttgtattgtagtgaaggagagggggcacggaagcagatgtggagaagatattatctcctggactggcagagcctaaagtccctgcctgaataattagccaggtacccctccagcagcatgctttaaagaagtgtctggccccctatctccagtctagatctgtcaaagctgaataaataaagaaaagttgctttaatt

SEQ ID NO: 97906 - DNA, 638 bp, Homo sapiens
agccattccacaaacctttactgagtatccaatttttgtgactggcccacattaggcgttggggataaaaagaggagtacgaattcacagcttagagaagggataggcatgtaaaccaaagattatgcacctctatgtgtgttaattgtaaatatgggctctgtgctgtgtgagcacagtgggtggggaaataaacagagacttggaaaggcatggcatgtttaagaagcatcaggttctatctgacttatgtttatggtgtgcacatgtaagtggtagagggttgatgggaggtgagtcaagaaagagagcttggagacaggagaaatgctaaatcatgtgggcataattttgyaagaaggagccaatgggcctttttgattatggactgctattatccaatttaacttttagtacaatcactaactctagaataaagcttgtattgtagtgaaggagagggggcacggaagcagatgtggagaagatattatctcctggactggcagagcctaaagtccctgcctgaataattagccaggtacccctccagcagcatgctttaaagaagtgtctggccccctatctccagtctagatctgtcaaagctgaataaataaagaaaagttgctttaatt

SEQ ID NO: 97907 - DNA, 638 bp, Homo sapiens
agccattccacaaacctttactgagtatccaatttttgtgactggcccacattaggcgttggggataaaaagaggagtacgaattcacagcttagagaagggataggcatgtaaaccaaagattatgcacctctatgtgtgttaattgtaaatatgggctctgtgctgtgtgagcacagtgggtggggaaataaacagagacttggaaaggcatggcatgtttaagaagcatcaggttctatctgacttatgtttatggtgtgcacatgtaagtggtagagggttgatgggaggtgagtcaagaaagagagcttggagacaggagaaatgctaaatcatgtgggcataattttgtaagaaggagccaatgggcctttttgattatggactgctattatccaatttaacttttagtacaatcactaactctagaataaagcttgtattgtagtgaaggagagggggcasggaagcagatgtggagaagatattatctcctggactggcagagcctaaagtccctgcctgaataattagccaggtacccctccagcagcatgctttaaagaagtgtctggccccctatctccagtctagatctgtcaaagctgaataaataaagaaaagttgctttaatt

SEQ ID NO: 97908 - DNA, 638 bp, Homo sapiens
agccattccacaaacctttactgagtatccaatttttgtgactggcccacattaggcgttggggataaaaagaggagtacgaattcacagcttagagaagggataggcatgtaaaccaaagattatgcacctctatgtgtgttaattgtaaatatgggctctgtgctgtgtgagcacagtgggtggggaaataaacagagacttggaaaggcatggcatgtttaagaagcatcaggttctatctgacttatgtttatggtgtgcacatgtaagtggtagagggttgatgggaggtgagtcaagaaagagagcttggagacaggagaaatgctaaatcatgtgggcataattttgtaagaaggagccaatgggcctttttgattatggactgctattatccaatttaacttttagtacaatcactaactctagaataaagcttgtattgtagtgaaggagagggggcacggaagcagatgtggagaagatattatctcctggactggcagagcctaaagtccctgcctgaataattagccaggtacccctccagcagcatrctttaaagaagtgtctggccccctatctccagtctagatctgtcaaagctgaataaataaagaaaagttgctttaatt

SEQ ID NO: 97909 - DNA, 612 bp, Homo sapiens
cttaacatataattaatataaattttaagatttttatattctttttttcatactaaatctttgaaatctggtatttatggttactgcacttcttaatgtgggttagccacatgtcagtgatttaatagctacgtatgactagtggctaccatattgaatggtacaggattgagtggtgagatgtgccattccatcttctttccattgttcacactcataatctatttcaggagtacagtgcttcacttttcatacgtgcatatcagctgggcatatagtcattttaaattctgaattaacctgaagatgaaagaacagtggccaacttatttccttttaagaaaaactctctctagttaaaaatacaacatgcataagtatgtgaggtaatgtataattattaatagctcaatttagcctttccataaggtatacctatttgaaaacatgttgtacatcataaatatatagttttcatcaatttaaaaataacttaaaaataaataaaaacatcatttataagtctaaaaagtgctaggggcaaaataaggccctctctctagcctattgamccattttgaagtaaatgattacagctgtggaatgcttcaa

SEQ ID NO: 97910 - DNA, 535 bp, Homo sapiens
taagtcttgaaataaggcagtgtaaattccttttcaactggtgtttctttctgtgtgttcagaagttgtctttggttcatgctaggtactttgcattcccatatagatatataatgagctcatgaatttcttactgcacacacatacaaaagcctacttggagtttgattggaattgcattgaatctatacatcaatttggggataattcacatcttaacaatattgaatcttctaatcttggcgtacggcataacattccatttatttaggtcttttaaattttttctcagcagtattttctagacttcaccatacaggcatgtacatattttgttaaatttatctcagtgttccatgtttttagaagctattatagtattccatgttttagaagctattgtacattgaaagttaaaattttattattcaattattcattktaatatatgtaaatacaaatgattttggacttttatcatgtaaacttgttaaattcacttcttaatttgtagatttcttaggatttactatgt

SEQ ID NO: 97911 - DNA, 622 bp, Homo sapiens
tcataaaattctctgacgtttacttgtatttctgtggggtcagtggtgttatccccgtagtcacttctaattgtgtttattttggatcttctctcttttcttttttattagtctaggtwgcagtctaattattttattttatttttttcaaaaatccaattcttggatttgttaatcttttgaatgtgttttcaagtctcagtctctttcaattcagctctcatttgagttactttttgtcttgtccttgctttggggttggtatcttcttggttctctagttatattagttgcgatgttaggtttttaaatttaaattttagctttatgatatgggtatttacttctataaatttgtctcttaacactgccctagctgtgttccagagattcttgtatgtcgtatctttgttctcattagttttaaaaagatttttcatttctgccttaatttctacatttaccccaaagttatgcaggagcgggtgattcagttgtcatgtaactgtatgattttgagcaaatttcttagttttgatttctaatttgattgcactgtggtccaagagtatggtcgttatgatttcaggatttttttgcatttggtgaggagtgttttgtg

SEQ ID NO: 97912 - DNA, 622 bp, Homo sapiens
tcataaaattctctgacgtttacttgtatttctgtggggtcagtggtgttatccccgtagtcacttctaattgtgtttattttggatcttctctcttttcttttttattagtctaggtagcagtctaattattttattttatttttttcaaaaatccaattcttggatttgttaatcttttgaatgtgttttcaagtctcagtctctttcaattcagctctcatttgagttactttttgtcttgtccttgctttggggttggtatcttcttggttctctagttatattagttgcratgttaggtttttaaatttaaattttagctttatgatatgggtatttacttctataaatttgtctcttaacactgccctagctgtgttccagagattcttgtatgtcgtatctttgttctcattagttttaaaaagatttttcatttctgccttaatttctacatttaccccaaagttatgcaggagcgggtgattcagttgtcatgtaactgtatgattttgagcaaatttcttagttttgatttctaatttgattgcactgtggtccaagagtatggtcgttatgatttcaggatttttttgcatttggtgaggagtgttttgtg

SEQ ID NO: 97913 - DNA, 606 bp, Homo sapiens
tgctaaaagagaattttatatgttctcaccaaaaacaaatgttaaatatttgaggtgatggatatgtgaattagcctaattgatcattccactaagtatacatgtggaatcacactgtaatccgtaaatctgtaaatccaccctatactctataacatcacagtatactccataaatatacacaattgttatttgtcaattaaaaagaaaataaaacataagaaaaaaacacagagtcactgtcatttatacacctaaaaaaaaaaaaaaaggaagaaatcgggctgagatagtaaagtggcaatacagccaggatgccaaaaagtccaaattctgtcttggcccagtaagcattgtcctatatcctcaccaccatctgcacccctccacctgcctccaactttgtggttttctatggaatagatatagatatagatatatatatgggatatatctatgggatatatatatatctctatgggatatatatatatctctctatgggatatatatatctatgggatatatmtatgggatatatatatctatgggatatatctatgggatatatatctatgggatatatctatgggatatatatatatc

SEQ ID NO: 97914 - DNA, 606 bp, Homo sapiens
tgctaaaagagaattttatatgttctcaccaaaaacaaatgttaaatatttgaggtgatggatatgtgaattagcctaattgatcattccactaagtatacatgtggaatcacactgtaatccgtaaatctgtaaatccaccctatactctataacatcacagtatactccataaatatacacaattgttatttgtcaattaaaaagaaaataaaacataagaaaaaaacacagagtcactgtcatttatacacctaaaaaaaaaaaaaaaggaagaaatcgggctgagatagtaaagtggcaatacagccaggatgccaaaaagtccaaattctgtcttggcccagtaagcattgtcctatatcctcaccaccatctgcacccctccacctgcctccaactttgtggttttctatggaatagatatagatatagatatatatatgggatatatctatgggatatatatatatctctatgggatatatatatatctctctatgggatatatatatctatgggatatatctatgggatatatatatctatgggatatatmtatgggatatatatctatgggatatatctatgggatatatatatatc

SEQ ID NO: 97915 - DNA, 606 bp, Homo sapiens
tgctaaaagagaattttatatgttctcaccaaaaacaaatgttaaatatttgaggtgatggatatgtgaattagcctaattgatcattccactaagtatacatgtggaatcacactgtaatccgtaaatctgtaaatccaccctatactctataacatcacagtatactccataaatatacacaattgttatttgtcaattaaaaagaaaataaaacataagaaaaaaacacagagtcactgtcatttatacacctaaaaaaaaaaaaaaaggaagaaatcgggctgagatagtaaagtggcaatacagccaggatgccaaaaagtccaaattctgtcttggcccagtaagcattgtcctatatcctcaccaccatctgcacccctccacctgcctccaactttgtggttttctatggaatagatatagatatagatatatatatgggatatatctatgggatatatatatatctctatgggatatatatatatctctctatgggatatatatatctatgggatatatctatgggatatatatatctatgggatatatctatgggatatatatctatgggatatatmtatgggatatatatatatc

SEQ ID NO: 97916 - DNA, 592 bp, Homo sapiens
atgatgatttctgtggtgttttggacatgtcttgcgctcagtaagaactcattacaaatatttcctataagccctcatgacacattcctggttttacagataagaaaacaggattggaaaattcaaacacttacctgaggtacacagtaagtggcagaacyagcacggagagacagtttagtctggggaggcagtacagtactatgcggtagtcaataggatgggactttgggtccagtcaaaatagggtttggatctcagcactgctatttaatgttggatattagccacctctgcatcattttgaacaatattaactaacatgtttagaatcacaattaaggagcagaaattacccacaaggaatttccaaaactcaaaaagagaatatgttcagaccaatgtttttccgatatataaggaaatgtccgcaaaatatcacattcagcttttaatttttgtttttgtggtttttagtcagatctttatactttcaaaattgtgttttggattaaaatattttctttttttttctttgttaaaaacaaaagggagggaaatgcttattttttttgagaaaatggaaaaataa

SEQ ID NO: 97917 - DNA, 592 bp, Homo sapiens
atgatgatttctgtggtgttttggacatgtcttgcgctcagtaagaactcattacaaatatttcctataagccctcatgacacattcctggttttacagataagaaaacaggattggaaaattcaaacacttacctgaggtacacagtaagtggcagaactagcacggagagacagtttagtctggggaggcagtacagtactatgcggtagtcaataggatgggactttgggtccagtcaaaatagggtttggatctcagcactgctatttaatgttggatattagccacctctgcatcattttgaacaatattaactaacatgtttagaatcacaattaaggagcagaaattacccrcaaggaatttccaaaactcaaaaagagaatatgttcagaccaatgtttttccgatatataaggaaatgtccgcaaaatatcacattcagcttttaatttttgtttttgtggtttttagtcagatctttatactttcaaaattgtgttttggattaaaatattttctttttttttctttgttaaaaacaaaagggagggaaatgcttattttttttgagaaaatggaaaaataa

SEQ ID NO: 97918 - DNA, 571 bp, Homo sapiens
tgctcaacacatgcattttgctaagtcaaaatataaatgaatgaatgatttagtgaattataattaattaattaaagtaggtccagaactgggaaaaggagaggggaactcaaatctctgatttaaaaaaaaaaagaaaaaaagaaaaaaaaggccttccttgatccaatctccttctctaattgtcatctcctttctctcttccttatagtgctttggttcagatctggcatccatagaatttactagctgtaggttcatggcaagttacttaaatactctgcccttyatttcaccatctgtaaaaagagaataatgatagcacatacctcacggaacttttgcaaggattaactaaatacctacaaggaatgctgaactgatgagcagcactaagaggccatggcaagtctgggtctgcacatgtctgcaggacaggaatggccaccacattttgagaatgtttctcatcgatgtgggacacactgtgaagaagaaggtcctacagtaggaccttcaaggaaagaggctgatggtagcatgtagtttactgaagaaagactttaactca

SEQ ID NO: 97919 - DNA, 605 bp, Homo sapiens
tactgttgtaatagttgtactacgcccagtaattataatttatgaaacaagtaaatagaaatattttaataaaaagaatgcagagttactcaataagtaacagaaaaataaagtgagagaagtcagaacccaacaaggaaatttatttatttccagctcaataatattttttgctcaaggagtctaagttctagtagattttttgaatgttacygtgctattgtaaaaacaagagaatgtgtcttacatttgaatgtgtctcacaaaacatttattcattgtaacaataatcataaatatataagcattttatatgtgtttctgatatgcattaataaatgttttatacagaaatacattgtaattgtgttcacttgctccacaagcaaatttttaaaagttatggatatggccagcactggcaatgtaaatattttatatacaaaatatgcagatttttatggctacttttttatttagttaatctccaaaactatatttcttcatcttcagactctacatttctgaaagatcctagaggcatcaagtttaggaatctatatatactacaaaacagttgccaatgctacagatttggcataatt

SEQ ID NO: 97920 - DNA, 407 bp, Homo sapiens
gaattcataacttttaataataaaagctttaaggactcaggaaggacaaggtggccatcctgtttctccatgcttaattaacattagacttatatcctcttggataccagttgtttttgcaaattaggtgcataccactgagaaggaaatttggtcatttctgtggtttacaataatttagcatgataaatataatcgtgactggtagtatgtacttagacattaraattttagaaatcccatacaattttagaatatatattagtattagtcacaaaaatataaactaaagaagattgaacatcattgtggcaatcccacgtacctaaacaggtcaaataatcctgcttacctcttttctggatgattcaggggccctctgatccatctagaaagccaggcattag

SEQ ID NO: 97921 - DNA, 564 bp, Homo sapiens
ttagttttagtcatttgtgtttttaattctaatataatccatgggattaaactatatgaaatgttcttgcataaatataacaaataacttaccaatacagtttcttccagaggcatctggttcatagccactgttgcaattacaacggtaactaccacgtaagttttcacaaatcccattggcacatatatcaggatccaaagcacattcattgatatctgcattaaatattgaaagtttagtgctatcaacaaacatgttattgtttgttgataaatgcaggtctagtaaagaccattcaacatatgaagtgtttaactctgcaaactcacaatttgcctgcctttcagaaaggaaaaagaactgaaaacaaggagtaagaaaataaaactgaaagatataggacacttcactggtaaatcaaaagaaaaatgaaagacgctggcagaaattcaaagagttaaatcacgaaatatgccagcatttatgatgamattaataaagacaatttataggctgttggctccaaatccaaaggaaaactcgagttgatagatattgtaa

SEQ ID NO: 97922 - DNA, 399 bp, Homo sapiens
atggccatgaatggcgttggatgccgggcaacagcccgcattatgggcgttggcctcaacacgattttacgtcacttaaaaaactcaggccgcagtcggtaacctcgcgcatacagccgggcagtgacgtcatcgtctgcgcggaaatggacgaacagtggggmtacgtcggggctaaatcgcgccagcgctggctgttttacgcgtatgacaggctccggaagacggttgttgcgcacgtattcggtgaacgcactatggcgacgctggggcgtcttatgagcctgctgtcaccctttgacgtggtgatatggatgacggatggctggccgctgtatgaatcccgcctgaagggaaagctgcacgtaatcagcaagcgatatacgcagcgaattgagc

SEQ ID NO: 97923 - DNA, 399 bp, Homo sapiens
atggccatgaatggcgttggatgccgggcaacagcccgcattatgggcgttggcctcaacacgattttacgtcacttaaaaaactcaggccgcagtcggtaacctcgcgcatacagccgggcagtgacgtcatcgtctgcgcggaaatggacgaacagtggggataygtcggggctaaatcgcgccagcgctggctgttttacgcgtatgacaggctccggaagacggttgttgcgcacgtattcggtgaacgcactatggcgacgctggggcgtcttatgagcctgctgtcaccctttgacgtggtgatatggatgacggatggctggccgctgtatgaatcccgcctgaagggaaagctgcacgtaatcagcaagcgatatacgcagcgaattgagc

SEQ ID NO: 97924 - DNA, 554 bp, Homo sapiens
gcagttcacttacaccgcttctcaacccggtacgcaccagaaaatcattgatatggccatgaatggcgttggatgccgggcaacagcccgcattatgggcgttggcctcaacacgattttacgtcacttaaaaaactcaggccgcagtcggtaacctcgcgcatacagccgggcagtgacgtcatcgtctgcgcggaaatggacgaacagtggggatacgtcggggctaaatcgcgccagcgctggctgttttacgcgtatgacagkctccggaagacggttgttgcgcacgtattcggtgaacgcactatggcgacgctggggcgtcttatgagcctgctgtcaccctttgacgtggtgatatggatgacggatggctggccgctgtatgaatcccgcctgaagggaaagctgcacgtaatcagcaagcgatatacgcagcgaattgagcggcataacctgaatctgaggcagcacctggcacggctgggacggaagtcgctgtcgttctcaaaatcggtggagctgcatgacaaagtcatcgggcattatct

SEQ ID NO: 97925 - DNA, 560 bp, Homo sapiens
tctgccatcagatttcccgaacactcctaaagaagatgaaggaagttttgtttgttgttcaaatctttaatgtgtacaggagggcaggaggggctttgactcgaggttgccctacttcttagaggcaaatattccagaagttccaggagagtttttggacatctgatctagaggcaaatcctctaagggtttattttctatccctgattcctgaaggtttgagaggaaaagtaaagatgaaggggcgtgaaggacgaaaacaggaaattagcactctgaatccctctagaaaaactatcatctggagcttccaaatgttttcacatctgaaggaaggaaaattccatctcttttactttgaggggtcagaatcatgctttactttatcatgagaaatgatgggctgatgccgtgaagggaatgagtgtggatggaagcgtgtaaaaagtttcaggttccctgagtccccgagttcctccygagcaggattgggtggacatccgtgacgggcagcaggtgccctctcctgcagttctgcagtttgtcttccagaggaattc

SEQ ID NO: 97926 - DNA, 543 bp, Homo sapiens
gttttcagttatatttaccacaaacaatctttaacaactgggtatatcttggtaaatgtgttctgtaaataagcaaattatattgatatattaaccagcatatatattatcagcatatttataaggaactagactggaccaccttctcyctttcttgagacatatgcttcaataatgggaaaaaaaatgttccaccaatcttttttggtaacaataccttgctgctttaatagtagtggctttgcattacatttactagatggtatgtcaaatccacctcctgattctttgcataatttttttttaaattttacagctttaccttccttccctaagaaatgctcaggacaggaagtacacaaacaactatgagttctactctttctattatatagggagtaggcttataccacttcatattagagtggtctgggacataatgtcttagcacctaccattgtgttacataaagtctacggtcatctttgctattcatacagatgcaggtgttcttacccatataacagtctatcattcaagaag

SEQ ID NO: 97927 - DNA, 354 bp, Homo sapiens
aacttcagtaattataaaattgtagcttcctraaaatttagtgagttgttggctatggagctacctggactggtacatttaaatgtacatttttaattactttttctttggtcaattctgtacttatagatctattaaacttgtatggttttcttgagtcaatttaaattttgacagagattcagctatttcctctggattttaaaaattgttatggataatttttaatattttccatatctatgattatatctgttccttgcttcaaaatatttttggaggggtcatattttataaatctctacattttgttttcaattttactgatttcatattttatctctattacgcttt

SEQ ID NO: 97928 - DNA, 396 bp, Homo sapiens
tgattacagagttaaataaacaccaggaatgtgttttatagaaatgtgcaaaatggggttataataatgacatacttaaattttaaaaaacaatctcccgcagtgccaaagtccctgtaattacttgtgtgaaatttatttgtgtgaggcatctaataactaagaagatataattataaataaatgtatattttgaatgcatatttgacttttgaattttaaaatgaaagttttcrtttgctaatatttaacctaaaatgctttatatattacttgtaagaataccatatgtagttttgcttaaataccctttactagggttactatatcaacaaccatcacaaatgtgtgtgtcttccaataatgcatacatattgttagaatgcataccttcac

SEQ ID NO: 97929 - DNA, 554 bp, Homo sapiens
agccacagtgtctattacaaagggagtctgctgcccaagggctgagctagggaaggcctatggggccagacccatgagacggccagacctgtgaaagtcaggactctgagtttgcagtgaaaattccaagaggatgcaagcccgtgccccctgtgctcacagccacctggccccagagcccaaaggcatcttakgctgagttctctggaagcagctgaggtggagagtttggggcaggaggtttacactgatggctctcaggagagaccccctatagggaagcggggagggcgagggtgggcagagagggaaggcgaccccccagtgcagttacagctaggcctcagccaggcctgggggagccctggagctggacacgccttcagagttgccccaaactgaggtgaggggcagggctttgtactcccacatcagccagtcgctggatacaggatcaccccacaggaggcataaacttaggaaaggtgcttcccgggtgccaagggaattcccagggaagaaggcagggatattcccagctcccatggggataa

SEQ ID NO: 97930 - DNA, 554 bp, Homo sapiens
agccacagtgtctattacaaagggagtctgctgcccaagggctgagctagggaaggcctatggggccagacccatgagacggccagacctgtgaaagtcaggactctgagtttgcagtgaaaattccaagaggatgcaagcccgtgccccctgtgctcacagccacctggccccagagcccaaaggcatcttaggctgagttctctggaagcagctgaggtggagagtttggggcaggaggtttacactgatggctctcaggagagaccccctatagggaagcgggkagggcgagggtgggcagagagggaaggcgaccccccagtgcagttacagctaggcctcagccaggcctgggggagccctggagctggacacgccttcagagttgccccaaactgaggtgaggggcagggctttgtactcccacatcagccagtcgctggatacaggatcaccccacaggaggcataaacttaggaaaggtgcttcccgggtgccaagggaattcccagggaagaaggcagggatattcccagctcccatggggataa

SEQ ID NO: 97931 - DNA, 532 bp, Homo sapiens
ccatgtagaaataggatttgacaaaaagggtaagatctaatgctaatagatcaagtggagaaacccagacagaaatctgtctgtctagatttctcctggcctctctgagcagcattccttccttttgggtgtggggcaggaccctctctggcatggggatcttatgacctayggtcaaagtaggtcagataatttctttatggccagtttttacacagaaaggtagagggaaagttagagcaatatttctaggttttatagctccactttggggaaaaaggggttctggtttctatgacctgccttgggaatgagggattctacttgctatggctagctttgggggagaatgggactgagatataagagggcaggacaaggtcagagagaaacttttgcatctgaggccttcatttgggggcactgttttctgagccccagcactgtcagtaactggcagtgagtaccagatgcagcttgttataacccagcttcctctttgctggagctgggagattttcatccatgctaa

SEQ ID NO: 97932 - DNA, 520 bp, Homo sapiens
  misc_feature (1)...(520): n = A,T,C or G
ctantaggtaaagaaaattgcctgaaaagaccacacttaagaaatatttgtgttcaagagggagttgagcaagagcagaaggtagaaagtttattcaaagaaataataacagaaaatttcccaaaatttgagaaagagataacatgcaagtacaggaagattaaagaacacaagaagtatgtaacctaaataagattactccaaggcacataataatcaaactctcaaaggtcaaggacaaagaggattytacaagcaaaaagagaaaagaaggaaataacatttaaaggacatccaatttctctaggaacatacttctaaatggaaaccatacaagccaggagagagtgaggtgagattttcaaagtatgaaaaaaaaaccctgccattcatgaatacagcaaaattatctttcaaatatgaaggatagatagtcttttccagacaaacaaaagcagagataattcaccatcttataagaaaggctaaaaggaaatcttccatctgaaagaataaaaaa

SEQ ID NO: 97933 - DNA, 520 bp, Homo sapiens
  misc_feature (1)...(520): n = A,T,C or G
ctantaggtaaagaaaattgcctgaaaagaccacacttaagaaatatttgtgttcaagagggagttgagcaagagcagaaggtagaaagtttattcaaagaaataataacagaaaatttcccaaaatttgagaaagagataacatgcaagtacaggaagattaaagaacacaagaagtatgtaacctaaataagattactccaaggcacataataatcaaactctcaaaggtcaaggacaaagaggattctacaagcaaaaagagaaaagaaggaaataacatttaaaggacatccaatttctctaggaacatacttytaaatggaaaccatacaagccaggagagagtgaggtgagattttcaaagtatgaaaaaaaaaccctgccattcatgaatacagcaaaattatctttcaaatatgaaggatagatagtcttttccagacaaacaaaagcagagataattcaccatcttataagaaaggctaaaaggaaatcttccatctgaaagaataaaaaa

SEQ ID NO: 97934 - DNA, 575 bp, Homo sapiens
ttcttctctacttgttcaggcattaagagaagaatgtatttcctgaaatatttcacaagtggacacagttctttctattccgtgggtcttttggtctgcctatggggtctttttttcttccaaactattgaggtagtacttgatctcacagtaaatcccaaggcacctgccatctgtgtgtcaggatttctcagactgttgccagctgctgtcatccccaaggcagtgtatcccttagtgatttgctactgtggtctctaaagttgcatgccactctctcttgggcatctggtatgttttagattcgtacaatggaatactgttcagcaacaaaaaggaacaatatatccatggtgctatataggtgatccttaaaacattattttgtgaaggcagttttgtaattttcgctaatattagaagagttcccttcacatgtaaaagagtttttaaccagtttcccagatttgctggataccccagcaccaatatttctaaatraaactgttagtatttgtattatggttccaagatcctgagcatttgtgcaagaggaagttaaagaagatgtggtg

SEQ ID NO: 97935 - DNA, 524 bp, Homo sapiens
cagaaaaaggaactattgtaatagtgccaaaatataaaacaacaagaacatgcaaataatgaaaagtaagacaaaatttgacatgggtggaagaccacttatccccaaactatttacaaacctacatctctgaaccttcctattccaagtaagtttgacaaatgttcttaattatctttatcttggaaattgatataataaaattttgagcctaaggaaaaacaaacacaatattttgtaaagtaatgcattccttttgtatgcatatttcatagatgcatggtaggcaatcccaggaaagcataaactgtttttggattattgtcctatttgttatcattgccactaacagctgtgattctaatcagtaatcagggacctgagaaaagtacccatctacttcaagaagtaatatatttgatctgattaataaatakggaaacagttaacaggtaaacagaccaattaagtgtggtttcactgaatacatcttaactgcatatacggacatcttgccccaagat

SEQ ID NO: 97936 - DNA, 500 bp, Homo sapiens
aatgaaaaattctgaatttgcaactgtgttcaattcaagctaaaaaagaaacactacaaagatgatgtttctagacttctataatcagggttcaattgacccatacaataactgtactgtattattaaaaaagtaaactttgcctttattttttgcaaagtctttaaaaaagaataaagccatgaactattataatctttactracagttaaaatatttataaataaaagtcaaaaactaaatttgggtctctagtgttaagcttaagagttaagtcaagcaaagagtgcaacaatacaaacgaggaaagactatttcaagaagctacagtctaacattgggggcagacaagtaaggtgataatcacagaacagtggtttaacagagtgctctaataattgatttatacaagtgttatgaggaaaaaaaggtgaggagcctaaaaccagattgaagaagttcagagcaagtttcgaagttctttgcaaaaatatgcaaga

SEQ ID NO: 97937 - DNA, 615 bp, Homo sapiens
agaacaggatacattctgagaaatgcattgttgggcgattttgtcattgtgtgaacattatagagtatactggtacaaacatagatggcataacctacctaggctatatagtacagcctattgctcccaggctacaaacttgtacagtatgttactatactgaatactataggcaattgtaatacaatggtaaggctttatagatctaaaaatatctaaacacaaaaaaggcacagtcaaaatatggtataataatcttatggaaccaacaccttcgaatatgttgttggttgaaatgctgttatgtgacccgtgactgtatcagagcctgcagcacactagctgtgcaccaagtctgtggaagggagagcagctttcctccatgagggctgccaggtagaggctttgtaatcacctgcaatcagacagacctgaaaaaccacacgtaggtttttaaccaggagctggamtcctcaagaactaagtgaaacccaaagcctatcctacctctgaacttacatgaaccaaatatttcttaagccgaagctgttatttgagcctaaatcattttaatttatatgttcctctatccatccagtagctcaaatcagaaaa

SEQ ID NO: 97938 - DNA, 566 bp, Homo sapiens
ttacactaaatcagagtgttcagtatagaaaataacccaaatctaaagctgttagatcaattatttgtatataactttatttattgttttgttttgagacagagtcttgctctgtcacccaggctggagtgtggtggcacaatctcggctcaatgcaacctcagcctcctgggttcaagcaattctcctgtctcagcctcccgagtagctgggattacaggcacatgccaccatgcccaactaatttttgtatttttagtrgagacagggttttgccatgttggccaggctggtctcaaactcctgacctcaggtggtccaccggcctcagcctcccaaactgctgggattacaggcagaagccaccatgcctggcctatttgtatataactttaaaaggagtagaaggttgtttggagagttataatcacattcaaagtacactttttttcttgaaaaaaataacagatttttttgaaaagtaaatgatgtaattgaactcacaaattacttcatgctgttttttcatttctattgtattcacatgtgatagcatcaattgttgc

SEQ ID NO: 97939 - DNA, 650 bp, Homo sapiens
attactttctgctttctctctataacaaatgatgaacaaatttctatcttatgrgttccttcttactactatgtgtttattttacgtcatttttctgtgttttaaaaatgggtggctagctcattaattttctatcttttgccatcccaacagctacatttagagctctgatttcgccttcaagatactgttttaaatgcattccataacgtttatattatattgtaataattaagttccaaatattttctttagcatgtgatttttttctttgacctaagggttatgtagaaatgtgcttcttcatttccaaagacagaagaaaattttacttatcttatagttattattatttttgctgaatttcactgtgggtggagaaaaatttccatatgacatcagtgtttgaaatttgttaagacttgctctatgggtcaatatataatcaatcttcataaacactctatgttggcttaaaaaaatgtacataccaaaattgatatgtacaataccaattggtatgtacaaaattggtatgtacaataccaataccaagggtacagcattctatatgtatgtattaggtggtttcttaattatattcttcaatacttctatctcctcaaagcatttgccttctttttcataag

SEQ ID NO: 97940 - DNA, 559 bp, Homo sapiens
gcccaagggctggggcgctgtggctcacgcctgtaatcccagcactttgggaggccgaggtgggtggatcacgaggtcaagagatcgagacaatcctggccaacatggtgaaaccccgtctctactaaaaatataaaaaytagctgggcatggtggcacacacctgtagtcccagctactcaggaggctgaggcaagagaatcgcttgaacccgggaggcggaggttgcagtgagctgagatcgcagcactgcactccagcctgggcaacagaatgaaactccatctcaaaaagaaagaaagaaagaaagaaagacccagccttgggttcatgctctgactgttacttaccacttgtgaggcttgggacaagtcacattgcctctccaagcctcaatttcatttatctgtcaaatggacgttagaaagaaagcatctaccttatgggcctgttgtcagcataaatccaaaaagcctttgaaaactctaaggtgatatacaaaagcacgtaggattgttatcggtaatactggtagtcctagacctaatttcaggggtgg

SEQ ID NO: 97941 - DNA, 455 bp, Homo sapiens
ttaagacacttggattagttactgaggaaccggagacaggatccctttcccaagaattctgtaaccccaggatagagggctgtgtttttgaagtgccttaaatagaagctttgtcaaatctcccagccctcaccgatgggcatctgtcaagttcaagtctgccatttttgtatttttacagacgtgtgtgggtttcactgggaattggaagcataaagttgtggagtggagaattagtttactctttaaaatacttctctggatctccagagttattttaccccagactaaragcaattttctgtagtatatttagggtgaagaaggatgcccaaaaagggtattgctgatgatcttctgagaatgagtaggttctagcgtttcctctgctttgatttgtaggtcttcacctagtatcttgacattgacagccattcgccaccatgtccttggaa

SEQ ID NO: 97942 - DNA, 585 bp, Homo sapiens
aatgaatcaaaaaatttaagcagcacctccttggagtaacttttaaaaggaaataagcattataaagaaatcagcagagtgttgctatactkcaccatatagaagaatcagaatcatgtgagaggtaattgtgtggagtgatgaagtacagagtcaatatagtttcaactcctaggttaaacattcattagctttacatccctgacgaggttattgaatatctcaaagttcaggtttttgttgttgttttttgttttttgagacggagtctcgctctgtcacccaggccggagtgtagaggtgcaatctcggctcactgcaacctccgcctcccaggttcaagggattctcctgcctcagcctcctgagtagctgggactacaggcatgcaccaccacgcctagctaatttttgtatttttaatagagacagtgtttcaccatgttcaccatcagagttcagtttttccttagtatctacagcactggtggtgctaaagaatttagcaaatgctaagtaaatagtaagtgttaaataacatcaattattattattatcatcagcagaaagaggagaagggataaa

SEQ ID NO: 97943 - DNA, 585 bp, Homo sapiens
aatgaatcaaaaaatttaagcagcacctccttggagtaacttttaaaaggaaataagcattataaagaaatcagcagagtgttgctatactgcaccatatagaagaatcagaatcatgtgagaggtaattgtgtggagtgatgaagtacagagtcaatatagtttcaactcctaggttaaacattcattagctttacatccctgacgaggttattgaatatctcaaagttcaggtttttgttgttgttttttgttttttgagacggagtctcgctctgtcacccaggccggagtgtagaggtgcaatctcggctcactgcaacctcmgcctcccaggttcaagggattctcctgcctcagcctcctgagtagctgggactacaggcatgcaccaccacgcctagctaatttttgtatttttaatagagacagtgtttcaccatgttcaccatcagagttcagtttttccttagtatctacagcactggtggtgctaaagaatttagcaaatgctaagtaaatagtaagtgttaaataacatcaattattattattatcatcagcagaaagaggagaagggataaa

SEQ ID NO: 97944 - DNA, 567 bp, Homo sapiens
ccgtctctactaaaaatacaaaaactagctgggcatggtracaggtccctgtactcccagctactcgggaggctgaggcaggagaatcatttgaacccaggaggcagaggttgcagtgagtcgagatcgcaccattgcactccagtctgggtgacagggcaagactctgtcagaaaaaaaaaaaaaagaatcaaactatatgtaaaaagtttcactgtcaactatgaaactggtttaaattttgatagcattcttaggctaatattaggacatgctagtcaacatgtttggcttaaataatgagaagacaatttggacaaactttccaggtaaaatatgataatgcctgctacaaagattcactaaacttattcctagatgagtaggaagactgaagcagagtcagtaagatttcagtgtgtaacttcatgtttagtttacttagttgattaacattttttgtcatagaatcccagatacttttattagtacctatattcaatttcatctctttacagatataaaatataaaataagaaaaaagctctcagtttgaatataggtatt

SEQ ID NO: 97945 - DNA, 567 bp, Homo sapiens
ccgtctctactaaaaatacaaaaactagctgggcatggtarcaggtccctgtactcccagctactcgggaggctgaggcaggagaatcatttgaacccaggaggcagaggttgcagtgagtcgagatcgcaccattgcactccagtctgggtgacagggcaagactctgtcagaaaaaaaaaaaaaagaatcaaactatatgtaaaaagtttcactgtcaactatgaaactggtttaaattttgatagcattcttaggctaatattaggacatgctagtcaacatgtttggcttaaataatgagaagacaatttggacaaactttccaggtaaaatatgataatgcctgctacaaagattcactaaacttattcctagatgagtaggaagactgaagcagagtcagtaagatttcagtgtgtaacttcatgtttagtttacttagttgattaacattttttgtcatagaatcccagatacttttattagtacctatattcaatttcatctctttacagatataaaatataaaataagaaaaaagctctcagtttgaatataggtatt

SEQ ID NO: 97946 - DNA, 567 bp, Homo sapiens
ccgtctctactaaaaatacaaaaactagctgggcatggtaacaggtccctgtactcccagctactcgggaggctgaggcaggagaatcatttgaacccaggaggcagaggttgcartgagtcgagatcgcaccattgcactccagtctgggtgacagggcaagactctgtcagaaaaaaaaaaaaaagaatcaaactatatgtaaaaagtttcactgtcaactatgaaactggtttaaattttgatagcattcttaggctaatattaggacatgctagtcaacatgtttggcttaaataatgagaagacaatttggacaaactttccaggtaaaatatgataatgcctgctacaaagattcactaaacttattcctagatgagtaggaagactgaagcagagtcagtaagatttcagtgtgtaacttcatgtttagtttacttagttgattaacattttttgtcatagaatcccagatacttttattagtacctatattcaatttcatctctttacagatataaaatataaaataagaaaaaagctctcagtttgaatataggtatt

SEQ ID NO: 97947 - DNA, 567 bp, Homo sapiens
ccgtctctactaaaaatacaaaaactagctgggcatggtaacaggtccctgtactcccagctactcgggaggctgaggcaggagaatcatttgaacccaggaggcagaggttgcagtgagtcgagatcgcaccattgcactccagtctgggtgacagggcaagactctgtcagaaaaaaaaaaaaaagaatcaaactatatgtaaaaagtttcactgtcaactatgaaactggtttaaattttgatagcattcttaggctaatattaggacatsctagtcaacatgtttggcttaaataatgagaagacaatttggacaaactttccaggtaaaatatgataatgcctgctacaaagattcactaaacttattcctagatgagtaggaagactgaagcagagtcagtaagatttcagtgtgtaacttcatgtttagtttacttagttgattaacattttttgtcatagaatcccagatacttttattagtacctatattcaatttcatctctttacagatataaaatataaaataagaaaaaagctctcagtttgaatataggtatt

SEQ ID NO: 97948 - DNA, 465 bp, Homo sapiens
tgtcttttactcctaaagagctattacatttttagtaaagctattgttcttattcatacatttatgatttaagaagtattttcagtgcttactcttacataccagtcaccatgttggtacaatttgaactaacattaggactctataaattttcaactctttaggmatctccctcctcctagtagcccccatatttttaaatgtaatgttttactattttctcttctacttcagggcttagaaaaaaaattctgtaaagtgctagatatctagtcagtattttagatggtatgagtcagacagttctggtcacagctactcagtttggttgttgaagctcgaatgtgtggccatgttccaataaagcttgattcataaaaataggcgatggtccaggtttgacccaagggtcataatttcccttcagcatacaaacatgttcaagtctttcacatactaaaggtc

SEQ ID NO: 97949 - DNA, 628 bp, Homo sapiens
atcgctaattctaattctacttatagattgggctcaatactgagaagtagttgaggaccattgggaaaagacaagaaacttctgatcaaaccacatttacttatttgttgttgttgttgttsttgtttataaccattctgaaaggatataggaatgactccaggtagaactgttttggaaagtacttaaggcagcatcctgaggcatcatatctctggttgggaaagaaaactattgatgtgttcgtatatattgagaaccaaacccaccatgggtgctcaataaatatcaagcaatcaatcaattctccagtcacagagaagcttcctgttccaaacatgtagtcacggaagagagcttggcccaagacccatctccctcttccaaatgatgtgactccaaactccaagaaaagttctgggtaatttttttttcttcatcccacagcaactgatggcacaatccttggcagcactggaaacagcgatttccagatcaagacaccaaagcaatgagatcttgccgtacattggtcaagtttctacaacgcaatggaaacttaatggaaagagaatcttaaattatagccaggcagctgattggaagtggcggcacctgttttcagaaa

SEQ ID NO: 97950 - DNA, 576 bp, Homo sapiens
ttgtctgtttttggtttagttgtctgtgttatgggattttgcttaagaaagttttgcccagagcaatgccctggagagtttccctatgttttcttatagtagtttcatactttgaggtcttagatttaagtctttaatctgttttgatttgatttttgtatatggaaagagacaggggtgtagcttcattcttctgcacatggatatccrgttttcccagcataacttattgaatagattgtctgttccttggtgtatattcttaggacctttgttgaaaatgaattcactgtctgtggatttgtttctggtttctctattctgttccattgttctatgtgtctgtttttatgcaagtaccatgctgttttggttactatagctctgtggtataatttgaagccaggtaatgtgatttctccagttctttttgtttagggtagccttggctattctgtctcctttgtggtttcataaaattttatgattttcttttctatttctgtgaagaatgccattgacattttgatagggattgcattaagtctgtagattgctttgggtagtatggacatt

SEQ ID NO: 97951 - DNA, 576 bp, Homo sapiens
ttgtctgtttttggtttagttgtctgtgttatgggattttgcttaagaaagttttgcccagagcaatgccctggagagtttccctatgttttcttatagtagtttcatactttgaggtcttagatttaagtctttaatctgttttgatttgatttttgtatatggaaagagacaggggtgtagcttcattcttctgcacatggatatccggttttcccagcataacttattgaatagattgtctgttccttggtgtatattcttaggacctttgttgaaaatgaattcactgtctgtggatttgtttctggtttctctattctgttccattgttctatgtgtctgtttttatgcaagtaccatgctgttttggttactatagctctgtggtataatttgaagccaggtaatgtgatttctccagttctttttgtttagggtagccttggctattctgtctcctttgtggtttcataaaattttatgattttcttttctatttctgtgaagaatgccattgayattttgatagggattgcattaagtctgtagattgctttgggtagtatggacatt

SEQ ID NO: 97952 - DNA, 602 bp, Homo sapiens
cttactcagcagagtaaagatgagagtttttaccttttgaactaaatttttgaatccttctttgcattgggtcagtaccataacaattcagtttagtacagtattgactattacataataaacaatatattacattgctttatatatattattttgtatgttcctacatatttatatttccacagtgtaggcaataataaaaatgatgaaggtgcttagagaaatatagtttagtaaccaactctcccaatcaacacatcaattatttcgaagacagagagccaaagttccctgaggaatttattttttgttacactgctaaacatagggatgacttacagatatggcagtmagcaccaacccatcttctgtaacttggtaatagtttagaggtgtgtatatttgacagacacatgcacaccttacgtgtctctgggcagccttcgttaaaaaaaaaataacagcttgcttctttataccctttttatcttctggatgacagccctcataactgctaaataattgtacctcacagtcactttaattcaaatcttatatatgcatttagagcaagatagtcttttccttctatagtctacttc

SEQ ID NO: 97953 - DNA, 547 bp, Homo sapiens
gtaatgaacctttttttgccagaagaaacagcttccacattctcagtagtggcaacatcctctccctgacccatgctkccatcagcttttccaccattgtctgaagagataaaccgtacactgtctgaggcaacagtgatggcctcccccaaggcagttgccaggcaagacaatgttgattctcctcaggatccacccccacacccctgtttgcttttagacctataactagactaaagtcccagcaggcccttagagatgaggttcagagtgtaacccatgaggaggtcagctacactcaaaaagaactacttgaattttctaatttgtataagcataaatctggcgaacaggcatgggaatgaatattaagggtgtgcaataatggtgggaggaacagaggtggatcagcctgaatttattgatttgggcccactaagcagggattctgcatttaattttgcagcttggggagttaaaaaaaggttctaatagtttgcttacttgcttagctgaaatatggattaaaagatggcccattgtgagt

SEQ ID NO: 97954 - DNA, 529 bp, Homo sapiens
tctctctttggccttcctattgactaagaaattggcacaattagaagagctgcttgaacctgaaatggaagctactcgctgaagactaaagagctgtcccacagtcctggaccatgggcttctgggctgctacatgagagtgaaatcaatttctatctttttttttcagcctccgcattctgggattacaatttacaagtctgtactttaatagacatgagtatggtctcttgcaatgaatcagraattgggacatatgtcttgtacccctagatctgccacaaatgagcagtgtgcatttgagcaacctcttatgtcttggtttattcttctttaaaaggtgggtgttgaactagatctttcagcaccatgagaagtataataatgaccatcacatatttggtataatgctttatcgttgaaataaggcagagctttctccttgtaaagaatgtcacaaactcttgggacaagagacagggataagtttaggactgagtaactgctacttctatccagaccatctgta

SEQ ID NO: 97955 - DNA, 509 bp, Homo sapiens
tattaggattaagcaatataatggacgagattgtatctgcaagctgtaaagtgctacaaatgcaaaatgtcattgctggcaattggaagccctgcccccttctagggggtggggggtacccttccacttttcattttttattaaataaaccttagccatattactgaaattcacacttctgctttgacatgggactagatgtgcaaaatgttcagtattcatgccagagaactgatacgaagttttgctaagagcagcccactttytcagcaccccataatgtgtgtggtaaggacagttgttgtgatgcacaggaaaaaagagagtagttggctcatgaaatggttgttcatcatctttctcatcctgggaaacccctaggaatctgcatgagtttctttcatgttagtgtcctggcatttgatattttatccaatgtcaccctcatctgttttttttttttttcctcttgaaatccatcaatgaaaagtgcttctgatttcatggtt

SEQ ID NO: 97956 - DNA, 644 bp, Homo sapiens
atacattgaatcttcaatctgacatcttgataatattgagtcttgctattcatcaatttggaatatctctccatttagttctttgatttattttattcaagttttgttttcttcatgtagattttgctrgatttatccctaagtgttttttttttttttggtgctaatataaacaatattgtttttgatttccatgtgttatttgctagcacatagggaagtaatttacttttgtatattaaccctatatcctgcaaccctgctatattggcttatttgttccaaggccttttttgtttatttgttttgggattttctacaaagacaattatgtcatctgtgaacaacaatggtttcccctcacccttaagaatctgcatactttcatattttttattacattatctaggacttccatagtaatgttgcaaaggagtgatgagagaggacatcctttccttgttcctgatctcagtgggaaagcttctattaatagtttctcactatgaggtatgatgttagttgcagatttttgtagccattctttatgaagttgaggaagtttccctctattcttaagttcactggatttttataacatcatgagtagatgttgggttttgtcaatgctttttctgtgtcta

SEQ ID NO: 97957 - DNA, 523 bp, Homo sapiens
tgtttggaaagcatggagcactcccattttttcacactcagtgatcgagagcacaactgaaatgactttgaaggtttttctgaagtcagaagaggcatcaggaaggggctggagtgagctaggggagcatggctcatgrtgtgaaacacaaatgtggcaaggctgacaggtactcaacttggagtcagggtttatctgcctctgttgccactagtgctggctgaaaggcttaattaccagctctgatcagtaggtatttgttgagcatgccatgtcaactattacactgaaatgctgaggagggttacagtttagctgaagtttggacaaatcacacagcctctcagtctactcgtctgaaaaatgaaaattaagttattggagtcttcaggtagccgcagtcagaataaagtctgtaaatgtgctaaaacaataagatagataatgaaaaattattctataccaggttctgtgctaaatgccttattgactttatcttatttaattctaaagccatatataa

SEQ ID NO: 97958 - DNA, 557 bp, Homo sapiens
tttgtaaacctgtttcaaatgaaacaaaactacttttgatatgtgaatgcctagtctttgctgatattttccactttccttctgttttaaaakatttgaggcttgaagtttgtcatcaccactaactattgttctgtctcaggatttcggctgattcccctgagtcgtcaacaaccatggcttattctttgggacctgacagcctccccaggcccagagtcagatgggagggatgagcaggtggaggttaaattagcaggaagagccagctcattagtagggagggatgggggtctgctgggtctgccaggaagcaaaggaggtagcatctctttaaatggaagggcaaggggaattagtgaggaattggtattataatgcagacagaaaggctgtcgctagatctttatgctcattcccataatgagtgggcaataaatagaggtgtcccactggagagcccacaaatggagtgaaaagggccatttaaggaggaggtgtctgtagaaaacagtgactgtgcttcagggcttgaaagctgaatttgaggaagagac

SEQ ID NO: 97959 - DNA, 589 bp, Homo sapiens
acgaggcatgaccagctcgggtggctgctgttgcaaagccttctctactgcagaagtgttacctttctagagaggataaaattagttgattggtgcaaaagtaattgcggtttttgccattactttaaacagcaaaaaccgcaattacgtttgcatcaacctaatagatgtaaggcatggttagagcttacrtttcacagcttcttccctttcttcttctcttatcctctgttgtaccaaatgttttatttccttactttaaaagcaggtattatcctcaagcatagaaggttgaaagattagtgatcgcaagatccactgtaattaatactttcttggacttcgtggtaatttctttagcaacaagaatctcattatggtattctctctgtctacattgggacaccattgagttttcttgacttatttcttgaaacctgtcactacctaggggaagatgtgtgttcatccatgacatgtttatggcaagatttagaaatccaggataagggtgcttttaaaatgagacgcctttaattttctctatgtatgataaatgtgatgttcagaggaattgataacaggttta

SEQ ID NO: 97960 - DNA, 589 bp, Homo sapiens
acgaggcatgaccagctcgggtggctgctgttgcaaagccttctctactgcagaagtgttacctttctagagaggataaaattagttgattggtgcaaaagtaattgcggtttttgccattactttaaacagcaaaaaccgcaattacgtttgcatcaacctaatagatgtaaggcatggttagagcttacgtttcacagcttcttccctttcttcttctcttatcctctgttgtaccaaatgttttatttccttactttaaaagcaggtattatcctcaagcatagaaggttgaaagattagtgatcgcaagatccactgtaattmatactttcttggacttcgtggtaatttctttagcaacaagaatctcattatggtattctctctgtctacattgggacaccattgagttttcttgacttatttcttgaaacctgtcactacctaggggaagatgtgtgttcatccatgacatgtttatggcaagatttagaaatccaggataagggtgcttttaaaatgagacgcctttaattttctctatgtatgataaatgtgatgttcagaggaattgataacaggttta

SEQ ID NO: 97961 - DNA, 589 bp, Homo sapiens
acgaggcatgaccagctcgggtggctgctgttgcaaagccttctctactgcagaagtgttacctttctagagaggataaaattagttgattggtgcaaaagtaattgcggtttttgccattactttaaacagcaaaaaccgcaattacgtttgcatcaacctaatagatgtaaggcatggttagagcttacgtttcacagcttcttccctttcttcttctcttatcctctgttgtaccaaatgttttatttccttactttaaaagcaggtattatcctcaagcatagaaggttgaaagattagtgatcgcaagatccactgtaattaatactttcttggacwtcgtggtaatttctttagcaacaagaatctcattatggtattctctctgtctacattgggacaccattgagttttcttgacttatttcttgaaacctgtcactacctaggggaagatgtgtgttcatccatgacatgtttatggcaagatttagaaatccaggataagggtgcttttaaaatgagacgcctttaattttctctatgtatgataaatgtgatgttcagaggaattgataacaggttta

SEQ ID NO: 97962 - DNA, 412 bp, Homo sapiens
gaattccacaatcttgtagaatttttttgccaatcattaacaaagtttactgactgaacagaagagtgcaatgcaactcctgctacagcagccgtagctgtgactgcaattaatcccataatcactgctattaaagtaaaaatgaatcttttggatctatttaaaacaccttttaatacttcagtcaaagtatggayggatggtgaggcctcccacggtcggtccatggacacagggatccacacgccctctcttgctctcaccagcagaatacggtgttgccaattaaaagttgaatcaatgcaagtaagcaatctacaattttcacaggttatagtctgggagtctggtttaataactatatttcctacaactagcatataagggggctttatgcaactttgtaaaggaa

SEQ ID NO: 97963 - DNA, 619 bp, Homo sapiens
ggctctgctttcttggtggatggcaacttcatctgttcttctgacgtcaccattttgttcatcttgtgagtcaacggtgctcgattgcggtgtctccgtctccgcggaggtgcttttctttgcatctccgatgggttcattgtagaacttcaaatgtctagtgggtatccaaacaggaagctgattttctcctggtgaaacacaagcaaaacctctcccccacgttatcaccttccctatttcccatgtcttatttttattatctttccaccaaattagttttccttcatgtgggctgttctttttaccagtaagatgttgttctgcagaagtagtagtctgatttctataaatgtttaaaaaatttaaagtatagagtgctagattaagttgcatctgaggagtggtacactccttactgtctcccccttctttttgtttaactaattgagttttgagtgttctattwgttctttcaactatggcctgtccttgggaattataaggaattcctgttgtatgtgaaattttccactgacttaagaatttttggaaagctttactacaatatcctggtccattgtcagttttgattttttctggaactcccattacagca

SEQ ID NO: 97964 - DNA, 571 bp, Homo sapiens
aaaaaggctttctgcagatgctttgtgatgtgtacattcatctcacagagttaaaccactgttttgattgagccatttggaaacactttctgtacaatctaacaagggatacttgggagcacattgaggcctatggtgaaaaaggaagtatcttgagataaaaagtagaaagaggctttctaagaaactgctttgtgatgtgtgcattcttctcaaagagttaaatcttccttttgattaagcaatctggaaccactgttttaatagaatctacaaaaggaatatatgggagtcaattgaggctgattgtgtaaaaggaaatgtattcagataaaaactagaaaggagcattctgagaaactgatttgtgattagtgcattcatctaactgagttaaaactgtcttttgattgagtaatttggaaatactgttttggtagaatctgtgaagggatacrtgggagcacattgtgacctattgtaaaaaaggaaataacttcagataaaaattagaaagaatctttctgaggaaatgctttgtgatgagtgcattcatctcacagagttaaac

SEQ ID NO: 97965 - DNA, 586 bp, Homo sapiens
tatgcaggctgtacatatacaccatggaatactatgccgccattaaaaaatgatatcatgtcttttgctggaatgtggatggaccttctattatmcttagcaaactaatgcaggaacagaaaaccaaatacagcatactctcagttataagtgggagctaaatgatgagaactaatgaacacaaagaataaaacagaccctggggtctacttgagggtggagggtgagaaaaggaagagaagcagaaaagataactattgggtactaggtttaatacctgggtgatgaaataatctgtacaataaccccctgtgacaccagtttacctatgtaacaaatgcccctaaacttaaaataaaagttaaaaaaaaagaaaattaaaatctccttatcatctacctggtaatatgaaaaacacaaatctttcattcattcctttcaactgatgaggaaaatgaggcatcgggagttagtaaaagtccacattgagatatgagacccacgactggctggacgcagtggctcacacctgtaatcccagcactttgggaggccgatgctggtggaacacctaaggtcaggagtt

SEQ ID NO: 97966 - DNA, 586 bp, Homo sapiens
tatgcaggctgtacatatacaccatggaatactatgccgccattaaaaaatgatatcatgtcttttgctggaatgtggatggaccttctattatacttagcaaactaatgcaggaacagaaaaccaaatacagcatactctcagttataagtgggagctaaatgatgagaactaatgaacacaaagaataaaacagaccctggggtctacttgagggtggagggtgagaaaaggaagagaagcagaaaagataactattgggtactaggtttaatacctgggtgatgaaataatctgtacaataaccccctgtgacaccagtttacctatgtaacaaatgcccctaaacttaaaataaaagttaaaaaaaaagaaaattaaaatctccttatcatctacctggtaatatgaaaaacacaaatctttcattcattcctttcaactgatgaggaaaatgaggcatcgggagttagtaaaagtccacattgagatatgagacccacsactggctggacgcagtggctcacacctgtaatcccagcactttgggaggccgatgctggtggaacacctaaggtcaggagtt

SEQ ID NO: 97967 - DNA, 584 bp, Homo sapiens
  misc_feature (1)...(584): n = A,T,C or G
atggtgtataaacaactttagattctttgtttaagaaattctgccagtttgtaatatatgcttcattcaaagtagctaagggctgtacctggcyaatagtaggcacctaatatttgttgaaaaggaatactgagtagctgggacctcctgagtagctgggaccacacacatttaacctgtatttataaaattactgtttagagaataacatttgatggaatcatgcttttactttctgcttatgactcaattgtttgtactgacattaacatcccaaatccttagcatggcctacaaggccctgagcaatgtggcacctgctgaagcctgctgcctcatttaataactctttgtctctttcccagatccagccactctaacattttttagctcctggaccaagacaagctcttcccagaacctgacctttgtacctgttctttattcctggagtatttttccccctgacaaattacttatcatctatcataattcaggttaaatggcactaactcagggaaggcttccnctaacgtgcctcccttctccaaccaaattaggaacaattatatggccacatagta

SEQ ID NO: 97968 - DNA, 528 bp, Homo sapiens
tgaataaatggatattgtctcatttttagaacagagtactgaagggatcatgaacactatctggtatgtcacgtaggtaatttacaagggctacaatttcagctcagatttaccttttcctggatacaggtcttgataggtctcttgatgtcatttcacttcagattcttctttagaaaacttggacaatagcatttgctgtcttgtccaaattgttactaagaatcaagagagatatctgacatgaaatgacattggaaaacattaaacacgattgaaataatgctagccaatatggttattattagaaaccaattacattttcaacttaaaaayagtaatacttattgcagactcaaatgtgcttattctaaaacaagtaaatgtttgcctatggtctgagattctaatccacggagttcattctaatccacattcaacactatcatgtaccagtgggcctcataacccacctagccctgtgatttttcaggttcacttttctaaacttgtgaattaaatatttat

SEQ ID NO: 97969 - DNA, 498 bp, Homo sapiens
tagcagcaacatgggtagcgtattcaaacttgaaaagactttaaatatttgtattattagatgtagattatgaaacacatattttaatgtggttaatttttttaaggaatcaaaactatgagtaaagaccaagaaaattgtgctggatggccacttccaccatggctcccctcctatttaagtctgggtactgtgtcacccgaagtcttcaggcacattgttccaggtttgggtttgcctatgaaagaaactcatgagagctggaartgaggagtgaagaggaggtcttcacataaagcaggcttaaggattagacatagcaggtttgacagatgtgatggcttgcagaatcctttatgagctcccactgtccatctggataagatttacagacctttcagaaattcctataagcttgggttctgtgcccactctctagactgtcaggctaagatctctgatataaaacagacctcttctgattttgtctagctgctt

SEQ ID NO: 97970 - DNA, 498 bp, Homo sapiens
tagcagcaacatgggtagcgtattcaaacttgaaaagactttaaatatttgtattattagatgtagattatgaaacacatattttaatgtggttaatttttttaaggaatcaaaactatgagtaaagaccaagaaaattgtgctggatggccacttccaccatggctcccctcctatttaagtctgggtactgtgtcacccgaagtcttcaggcacattgttccaggtttgggtttgcctatgaaagaaactcatgagagctggaagtgaggagtgaagaggaggtcttcacataaagcargcttaaggattagacatagcaggtttgacagatgtgatggcttgcagaatcctttatgagctcccactgtccatctggataagatttacagacctttcagaaattcctataagcttgggttctgtgcccactctctagactgtcaggctaagatctctgatataaaacagacctcttctgattttgtctagctgctt

SEQ ID NO: 97971 - DNA, 573 bp, Homo sapiens
cagaaatatataaaaaaagaatcacacattgatcttctttaaatgaaaatataacaattgtatggacwaggatgattacagttgttcagttctgactgttatttgaagaaaaaagcaataagaagcctcagcaacttaacagaaggagctgccatttactaggagaaaagattgtggatgagagtgtagcaaaggtcagaattctgtgaagcttgagatgtttattataatgaattatcttttatactcactacaatttcctaacaattttggggtttatatttttgaaagagatatacctttaattttctttctttgtactattgttaggtaactttaatgtgcagattatactacagtgaaagttgccaatgacaaggcaaagtcacttacatcagacccaaagcaaagtggagccgggtcatgaaaaaggggatcttgtgtgtgtgtccacgataagcactatcacaaggactttctataaactcacaagaaatttctgcccacccagcacactctgtttgtccagctcatcctgtaggtgtctctataataggacctatcataaaaaat

SEQ ID NO: 97972 - DNA, 573 bp, Homo sapiens
cagaaatatataaaaaaagaatcacacattgatcttctttaaatgaaaatataacaattgtatggactaggatgattacagttgttcagttctgactgttatttgaagaaaaaagcaataagaagcctcagcaacttaacagaaggagctgccatttactaggagaaaagattgtggatgagagtgtagcaaaggtcagaattctgtgaagcttgagatgtttattataatgaattatcttttatactcactacaatttcctaacaattttggggtttatatttttgaaagagatatacctttaattttctttctttgtactattgttaggtaactttratgtgcagattatactacagtgaaagttgccaatgacaaggcaaagtcacttacatcagacccaaagcaaagtggagccgggtcatgaaaaaggggatcttgtgtgtgtgtccacgataagcactatcacaaggactttctataaactcacaagaaatttctgcccacccagcacactctgtttgtccagctcatcctgtaggtgtctctataataggacctatcataaaaaat

SEQ ID NO: 97973 - DNA, 573 bp, Homo sapiens
cagaaatatataaaaaaagaatcacacattgatcttctttaaatgaaaatataacaattgtatggactaggatgattacagttgttcagttctgactgttatttgaagaaaaaagcaataagaagcctcagcaacttaacagaaggagctgccatttactaggagaaaagattgtggatgagagtgtagcaaaggtcagaattctgtgaagcttgagatgtttattataatgaattatcttttatactcactacaatttcctaacaattttggggtttatatttttgaaagagatatacctttaattttctttctttgtactattgttaggtaactttaatgtgcagattatactacagtgaaagttgccaatgacaaggcaaagtcacttacatcagacccaaagcaaagtggagccgggtcatgaaaaaggggatcttgtgtgtstgtccacgataagcactatcacaaggactttctataaactcacaagaaatttctgcccacccagcacactctgtttgtccagctcatcctgtaggtgtctctataataggacctatcataaaaaat

SEQ ID NO: 97974 - DNA, 609 bp, Homo sapiens
gaccaatgatgtttgtttcaaaacagcttgcatggacttctttttgtctttayatattttccttacctcaacctcttgggatgcacctatgattgatcatagcacaaatatctcagattataatccttgtttatttccaaataaatttatttctttggagatccactttttctgttattatacattgacattgttattatgaaattggttgggtgatgtgtcttattttcttgtctccagaagaatttctgtaacagtgcaattaaacgttctttgcatgtttgctagaactcacctgtaaaattgtctgagcaaccaaagcctggtttttgtgtttagtttttcttttgtgattggggaggggggtttatcgtactgattcaaggtgtgaaggtaacatcattttgattttatacatcttcttcagtccatttaagcatgttacatagcgttgtttgttcttttcatgatattctttacagtagtctcctaaatgttccctctgcttctgccaggagcccctacaatcaactcagaagctatagagtttaaaacatgtaacatattatgccacctttcttaccgtaaaacatcccatggtttctcata

SEQ ID NO: 97975 - DNA, 609 bp, Homo sapiens
gaccaatgatgtttgtttcaaaacagcttgcatggacttctttttgtctttatatattttccttacctcaacctcttgggatgcacctatgattgatcatagcacaaatatctcagattataatccttgtttatttccaaataaatttatttctttggagatccactttttctgttattatacattgacattgttattatgaaattggttgggtgatgtgtcttattttcttgtctccagaagaatttctgtaacagtgcaattaaacgttctttgcatgtttgctagaactcacctgtaaaattgtctgagcaaccaaagcctggtttttgtgtttagtttttcttttgtgattggggaggggggtttatcgtactgattcaaggtgtgaaggtaacatcattttgattttatacatcttcttcagtccatttaagcatgttacatagcgttgtttgttcttttcatgatattctttacagtagtctcctaaatgttccctctgcttctgccakgagcccctacaatcaactcagaagctatagagtttaaaacatgtaacatattatgccacctttcttaccgtaaaacatcccatggtttctcata

SEQ ID NO: 97976 - DNA, 595 bp, Homo sapiens
tcatttccaacatattccatttgtacttatacatattcttataatttccttcccttcccagtttgcagccacaattctctgacagaaagtagacataagaggaaaacatgattaacagatggattatcacctgcagtaagaggtgcctgggacggacttagttgaggtaggctgtggattgagacagaatatagagactggggtatgtgaaatcggaaagcccacaactgtagcagaacagagtaagtggactttcacaagaaatagaatcaccaccattatctaccacattttctcmtgctcactgctatttaagtgcctcagtttctatacaatctttcacaattacgaagccctaaatggcttcccatcctgcagtgatttcataaggagcctatgccacctgtcatgtaaggctttttccatgcctaataaatatgttttggagggatttcaccagagtttttgctaagatgcataaaatggccacagaggttgtgagaaatctctgcagtttctctttgtctatacacatgaaagtattgaagaccagcacttggattagttaagataatgttttaattcatcactgtct

SEQ ID NO: 97977 - DNA, 614 bp, Homo sapiens
gcttcccatcctgcagtgatttcataaggagcctatgccacctgtcatgtaaggctttttccatgcctaataaatatgttttggagggatttcaccagagtttttgctaagatgcataaaatggccacagaggttgtgagaaatctctgcagtttctctttgtctatacacatgaaagtattgaagaccagcacttggattagttaagataatgttttaattcatcactgtctcctcctccccttggtaccagcttttatgttcattgcattccccayccttttaagtactcagtacctcctgcatggtaacctattctgatatttgatattatcatgcttaatttgactgaatccatttggatattttatctttaagaaatttgtagttttatacttttaatttatgataaaattagattaatatcaaacattaacaagtgacttttaggaaggtatatgagctttcttattgacttcaaactataaagtacaaactgtgacactagaaatttagtcctttaacacatgttgtatttatatgtgaagtggagggtgagcagaaaacagtgttatatttctctgtgtccagatggatactcacctcaatcattt

SEQ ID NO: 97978 - DNA, 612 bp, Homo sapiens
cagtggtcaaggttgagtttgattctgattgaattattaagtaattttaaaaaacactactgcttttcccaatcctaccaagtaaaggatgctagataaaagaaatcycaagtcaggccaggtacagtggctcacacctatagttccaacagtttgagaggcagagatgggagtatgttttaaggccatgagtttgagagcagcctgggcaacacagcaagacctcctctctacaaaaataaaaaaaataaatttaataaaataaaataaatatagccaggcatgatggtatgtacctatggccccagttactcatgtggctgagatgggcagatctcttgattctaggagtttgaggccagcttgggcaacatagcaagtcttctctctctacaaaaatgaaaaaaatgcctgacatggtggtacttgcctgtattcccaggtatgggggcagctgaggctggagcatctcttgagcccagttggtcaaggttgcagtgagctatgattataccactgcactccatcctgggtgacagagtgggaccctgtctcaaaatacaaatacaaatgaaatctcaagtcagaccagtcccttctaggctatgtagg

SEQ ID NO: 97979 - DNA, 596 bp, Homo sapiens
ctacctcctactctccccacctacctttgcccccagccttaggcaaccattgattaattttttgtcactatagatttgcctaatctggacaaatagaattgtacaatatgtgatcttttgtggctytttttccctcttagcacagtgttttcaaagttcctttatgtcatagtgtgtatcaatatttcattccttctatggcagtattccatggtagagacacactgcattttgtttatctgttcatcagttggtggatatttgggttgtttccatgtattccacgtattggtcattatgaataatgctgctatgaagattgttgtacaagtttttgtgtggacatatatttttatttttctgggatatatgcctaggagtgaaattgttgcattataggatgactgtacatttagccttttgagaaactgccagactgttttctaacgtggctataccagttgggtgcaatggctcacacctgtaatcccggctactcaggaggctcagctaggaggatggcttgagcccgtgaattcaagaccagcctgggcaagatagtgaaaccccgtcttgattttttaaaaatccaatta

SEQ ID NO: 97980 - DNA, 596 bp, Homo sapiens
ctacctcctactctccccacctacctttgcccccagccttaggcaaccattgattaattttttgtcactatagatttgcctaatctggacaaatagaattgtacaatatgtgatcttttgtggctttttttccctcttagcacagtgttttcaaagttcctttatgtcatagtgtgtatcaatatttcattccttctatggcagtattccatggtagagacacactgcattttgtttatctgttcatcagttggtggatatttgggttgtttccatgtattccacgtattggtcattatgaataatgctgctatgaagattgttgtacaagtttttgtgtggacatatatttttatttttctgggatatatgcctaggagtgaaattgttgcattataggatgactgtacatttagccttttgagaaactgccagactgttttctaacgtggctataccagttgggtgcaatggctcacacctgtaatcccrgctactcaggaggctcagctaggaggatggcttgagcccgtgaattcaagaccagcctgggcaagatagtgaaaccccgtcttgattttttaaaaatccaatta

SEQ ID NO: 97981 - DNA, 555 bp, Homo sapiens
tgaaaccccgtcttgattttttaaaaatccaattaaaatgacaagaaaagaaatacccaaacaaaatggttacacaattttatgttcccaccagtaatgtatgtgggttccaattcctccacatcttcactgacattttttttttctagataggggcttgctctgtctctcaggccgcagtgcaatgatgccatcacagttcactgcagccgtgacctcccaggcacaagtgattctctcatctcagcctcctgggtagctgaaaattacaggtgtacgccaccatgcctggctaatttttagatttttctgtagtggtgggattttaccatgttgcccaggctggtctcatactcctggcctcaagtgatctgcccacctcagcctccctaagttctggaattacaggctgccaccatgcccggccttcaccaacatttgycattatctgttttttttttcttcctttataccttaaagcagtataagaacaagtgtcttcaattataggaaacagtataatcccagggctttgggaggctaagacaggaagat

SEQ ID NO: 97982 - DNA, 602 bp, Homo sapiens
ggctttgggaggctaagacaggaagatgtcttgatgccaggagttttttttgttgttgttrtttttgtttttgttattgttgttgttgtttttgacagtctcgctctgtcacccagggtggagtgcagtgatggggtccactgcaacctccacctcccaggttcaagtgattctcctgcctcagcctcccgagtaggtgagactacaggtacacgccactactgcccagctgatttttgtatttttgatagagtcagagtttcaccgtgttggccaggctggtctcgaactccagacttcaggtgatttgcctgccttagcttcccaaagtgctgcgattacaagcatgagccaccatgcccagcctgatgccaggagttttagactagcctgggcaacctagcaagaccttgtctctacagaatatttaaaaattagccaaatgtggtggtgcctgtgtatagtctctctccctctcttttttttttttctaactttttgtgacatggtctggctctgtcacccaggctgaagtgcagtggtgtgatcatggctcactgcagcctgaaactcctgggatcaagtgatcaatcctcccacct

SEQ ID NO: 97983 - DNA, 601 bp, Homo sapiens
ccaaagtattggtattacaggcatgagccattgtgcccaccgtctctggttcttaaccttctgcctccctcttccagttttaaagaatgcttgtaattacatgggctctcctagatactccaggataatcttgttttaaggtcagctgatgagcaacattaattttatctgcactcttaattcccccttcctatgtaattgtgctgtgtaacataggacatgagcaattggtggcggtgggggttattactttggccaccacagtaactattttatgccaggtactcagctaagcactggtgaattaagcatgaataacacacactccytaatctccatccattcatgggaggagcacttcacctgccatgctcctgagaatctcgggagtcatagaagtcttctatgaggaggtgatgccaaagcggacaagtgacagaggagtcaaagctagctaggaagagagtagaggtttaaggggaagcatattataagcagaggatattacccacttcagagactcccagaggagaaagagtgtgcgttcaaggggcagatgaggctcagttggactccatagcagatgtaatggagaggggca

SEQ ID NO: 97984 - DNA, 545 bp, Homo sapiens
tacagatttggggtatatgctaaagttaccaaagttgtagaaaataaggccgggcattgtggctcacatctgtaattccagcactttgggaggccgaggtagatggatcatttgaggtcaggagttygagaccagcctggccaacatggtgaaactccgtctgtactaatagtacaaaaattagccaggcgtgatggtgtgcacctgtagtccttgctactcagaaagctgaggcaggagaatcgcttgtacccaggaggcagaggttgcagtgagcagagattgtgccactgcactccagcctgggtgacagagtgctatgagtcaccacacctggtatgagccaccgtgcctggcccacaatgacttttacacatgttgttaaaccatcttacagattttataatttgggggaagaaaagttttactaaattgtcttttaatggaaactctacaagaaccagaatctttgctttgttcacttatgtatccattcctaggcctagaaaaatgtctgacacatagcggcaattattcattgaata

SEQ ID NO: 97985 - DNA, 545 bp, Homo sapiens
tacagatttggggtatatgctaaagttaccaaagttgtagaaaataaggccgggcattgtggctcacatctgtaattccagcactttgggaggccgaggtagatggatcatttgaggtcaggagttcgagaccagcctggccaacatggtgaaactccgtctgtactaatagtacaaaaattagccaggcgtgatggtgtgcacctgtagtccttgctactcagaaagctgrggcaggagaatcgcttgtacccaggaggcagaggttgcagtgagcagagattgtgccactgcactccagcctgggtgacagagtgctatgagtcaccacacctggtatgagccaccgtgcctggcccacaatgacttttacacatgttgttaaaccatcttacagattttataatttgggggaagaaaagttttactaaattgtcttttaatggaaactctacaagaaccagaatctttgctttgttcacttatgtatccattcctaggcctagaaaaatgtctgacacatagcggcaattattcattgaata

SEQ ID NO: 97986 - DNA, 545 bp, Homo sapiens
tacagatttggggtatatgctaaagttaccaaagttgtagaaaataaggccgggcattgtggctcacatctgtaattccagcactttgggaggccgaggtagatggatcatttgaggtcaggagttcgagaccagcctggccaacatggtgaaactccgtctgtactaatagtacaaaaattagccaggcgtgatggtgtgcacctgtagtccttgctactcagaaagctgaggcaggagaatcgcttgtacccaggaggcagaggttgcagtgagcagagattgtgccactgcactccagcctgggtgacagagtgctatgagtcaccacacctggtatgagccaccgtgcctggcccacaatgacttttacacatgttgttaaaycatcttacagattttataatttgggggaagaaaagttttactaaattgtcttttaatggaaactctacaagaaccagaatctttgctttgttcacttatgtatccattcctaggcctagaaaaatgtctgacacatagcggcaattattcattgaata

SEQ ID NO: 97987 - DNA, 555 bp, Homo sapiens
gtcaaattcagggataaatggatttttttcagttttaaaaaaaaatccggaaatgtcttaatttctccttcatttttgaaggataagttttccagctatatatttctcaattgacaggtttcttcattattttaaatatataatccactgcctactggccttcaaggtttctgccragaaatcagctgctaatgttatctggatccctatctgtgagagttgctcttctctctgagttttcaacattctcccattatcttttttttgtttgtttttgagacaaataattgtacatattcatgggatacagagtgatattttgatacatgtatacaatgcccaatgatcaaataaggataattagcatatccatcacctcaaatatttgtcatttatttgtattgtgaacagtcaacattctttcttctagttttttaaatttataaacatttaaattttattacagaaatttaaattttttgattctgaaaaagtcatatatgtatgcaacattttttatcatttatttatatatttatgcatctttccttttag

SEQ ID NO: 97988 - DNA, 456 bp, Homo sapiens
ttaagcagttacctccatttttccagatttgtttcatctgcttcaatctccctaaaaatttatgtttgtacaggaaagactgaataaatagctaattctccaccctacctctcatcttaagtcacttttcagagtagtaagttagtgacctagtaaccttccctctaatgaccagtagtttttttttctgaataccattatgaactcatagattattgtttgcatttgatgtatttcaggccattgcagtctttattgttttggatgcttacattgtctcatctaggttaataattatctcttcaagttgactttcatgtctttttgacgtgatcctgttggactttgatgrctttcttgctttctggcaaaacagatgttccaggatcaatatactgcaccatacatggagtcagccgtttctctagggaaccttgattccttttagtagagaac

SEQ ID NO: 97989 - DNA, 570 bp, Homo sapiens
gggtgacaagcaagaccctgtctcaaaaatattttttttaaattctctggtttcctctcataaaaactaatgagcagacaattcacagttctcttctctgtgtgtctctttgagggtttgattgaaaggrgaagggatggaaggggatggaggggattttaaaaaacaaaaacagttgcgtttcaggatggggatgaagatgaggtgaggtttggattagaattggtgttgggatggggtgggatgggatggaaaatgggttggggacagggatggatgtgggtaaggtcatgatgtggttaggatgaagaacagagtccttgccaggtttgggaagggggaaggagtcgaggctgggctatagtagagagggtgatgaagttggattggagagtggatgctgggctgcatgtggatgtggggacaggactgtgcttttggagcagacgtggccctgaagaagggaatgggattggttggtcatatatgtagacccagggcttgagggtcacattaggaccataaattggaaatggggcagtgaaacaacacagcacaggtcacctccta

SEQ ID NO: 97990 - DNA, 570 bp, Homo sapiens
gggtgacaagcaagaccctgtctcaaaaatattttttttaaattctctggtttcctctcataaaaactaatgagcagacaattcacagttctcttctctgtgtgtctctttgagggtttgattgaaaggggaagggatggaaggggatggaggggattttaaaaaacaaaaacagttgcgtttcaggatggggatgaagatgaggtgrggtttggattagaattggtgttgggatggggtgggatgggatggaaaatgggttggggacagggatggatgtgggtaaggtcatgatgtggttaggatgaagaacagagtccttgccaggtttgggaagggggaaggagtcgaggctgggctatagtagagagggtgatgaagttggattggagagtggatgctgggctgcatgtggatgtggggacaggactgtgcttttggagcagacgtggccctgaagaagggaatgggattggttggtcatatatgtagacccagggcttgagggtcacattaggaccataaattggaaatggggcagtgaaacaacacagcacaggtcacctccta

SEQ ID NO: 97991 - DNA, 580 bp, Homo sapiens
agggcagcctgggtgacaagcaagaccctgtctcaaaaatattttttttaaattctctggtttcctctcataaaaactaatgagcagacaattcacagttctcttctctgtgtgtctctttgagggtttgattgaaaggagaagggatggaaggggatggaggggattttaaaaaacaaaaacagttgcgtttcaggatggggatgaagatgaggtggggtttggattagaattggtgttgggatggggtgggatgggatggaaaatgggttggggacagggatggatgtgggtaaggtcatgatgtggttaggatgaagaacagagtccttgccaggtttgggaakggggaaggagtcgaggctgggctatagtagagagggtgatgaagttggattggagagtggatgctgggctgcatgtggatgtggggacaggactgtgcttttggagcagacgtggccctgaagaagggaatgggattggttggtcatatatgtagacccagggcttgagggtcacattaggaccataaattggaaatggggcagtgaaacaacacagcacaggtcacctccta

SEQ ID NO: 97992 - DNA, 588 bp, Homo sapiens
ttgctgctcaccttgaggctctgataataaggtctggaattttagatacagattaccattaatttatatagttttgattcaagcattattcttggcatacatgacccattttatgaaaccttgagtacaagacctaattcaaagaaatgctcaataaatgtttgctgttatggtagggcgtatgccattgtaggacctgaaggcacacaccagtgttgacaagtactttataagacttmaagattattttgatggtggaacacagcataatgatactctgatagatgaagggcagaactctgctacttacaactactaacaagagaagacgccaggcaggaccacacatggggatgcaccagaggacagcataagggtaaactggagctgtaggaggcagcttctgtatgacaagcaggatagggctagctagctaggcttggtgggcttcctgtgaattggctaatctgaacaatttatctaggaggcactaggacacccctagttgtctggtacctgtcccagcaatgatgcttaacaaccgcaaagggtgagaacctaataaaggaagtggttggagtatggaca

SEQ ID NO: 97993 - DNA, 588 bp, Homo sapiens
ttgctgctcaccttgaggctctgataataaggtctggaattttagatacagattaccattaatttatatagttttgattcaagcattattcttggcatacatgacccattttatgaaaccttgagtacaagacctaattcaaagaaatgctcaataaatgtttgctgttatggtagggcgtatgccattgtaggacctgaaggcacacaccagtgttgacaagtactttataagacttcaagattattttgatggtggaacacagcataatgatactctgatagatgaaggkcagaactctgctacttacaactactaacaagagaagacgccaggcaggaccacacatggggatgcaccagaggacagcataagggtaaactggagctgtaggaggcagcttctgtatgacaagcaggatagggctagctagctaggcttggtgggcttcctgtgaattggctaatctgaacaatttatctaggaggcactaggacacccctagttgtctggtacctgtcccagcaatgatgcttaacaaccgcaaagggtgagaacctaataaaggaagtggttggagtatggaca

SEQ ID NO: 97994 - DNA, 588 bp, Homo sapiens
ttgctgctcaccttgaggctctgataataaggtctggaattttagatacagattaccattaatttatatagttttgattcaagcattattcttggcatacatgacccattttatgaaaccttgagtacaagacctaattcaaagaaatgctcaataaatgtttgctgttatggtagggcgtatgccattgtaggacctgaaggcacacaccagtgttgacaagtactttataagacttcaagattattttgatggtggaacacagcataatgatactctgatagatgaagggcagaactctgctacttacaactactaacaagagaagacgccaggcaggaccacacatggggatgcaccagaggacagcataagggtaaactggagctgtaggaggcagcttctgtatgacaagcaggrtagggctagctagctaggcttggtgggcttcctgtgaattggctaatctgaacaatttatctaggaggcactaggacacccctagttgtctggtacctgtcccagcaatgatgcttaacaaccgcaaagggtgagaacctaataaaggaagtggttggagtatggaca

SEQ ID NO: 97995 - DNA, 540 bp, Homo sapiens
aaaaagtgaagaaaaaatactcttagttggagctttaaaatatagataagaatcacctttatcccgtagtaatattaaaaatggcatgacagacattcctggtggtcatcagtaaaggcgacgtatcaactttattcaagtagagactgcagagacagaaggaattacatttcttcctcgagattttaaagtgtaaaaggacacagatgttcaaggacacaaaacacaagtgaacataattgaatgatggttctagccaccattaggacatctaaattcctagaaaataattggcttaattaaaattgtcataagaaagtttccctccaagataattacttttttttcaaatgygatttcatctagatttccccaagagtccaagtttgcccagatcattttcatcttgacataaaattataataatgtaaggaaatggaaagaacgtggtaccaatatttgtttggctcccttaaatggtgtgccgtgtccccaggccaccatttagagccttttaatagctttgtatttttaccagtg

SEQ ID NO: 97996 - DNA, 460 bp, Homo sapiens
gttcttttcaggaaagagggaccccccactgagcggcacttcacagtatacaaacatgagctcattcatgatgtcacttaacttcacagctccccataggaatagaataatgagtccccttgcacagtgacaaaaccaaagatattcayacacctcctcaatgtcaggagaggctcagcaactgagccctcagcagataacactatgtggaaaggagtcaaaaaaataatcaaagactttttttccttccatgaaggagctcactatttagttgacatgacaacacacatgtgggaagaaagatcattaataattcaaggtattattccacagaaatgaagggcatgagttttgggttttggaagtcctaagtacaacttcataatctgctacatataagctagatgatattggaaaagccacttaagttctttgagccttagcatatttatcttctaaa

SEQ ID NO: 97997 - DNA, 599 bp, Homo sapiens
actatggctgttaatggttatatttaggtggtccaatctttgtattttatttctattttctaggttttctaatgctctctaattaataggcattacttttccaaccacaaaaatatctattttaaaatggtccctttaagtttctctaatttcacctccactgaacactctgatttgatttttattagggctatgtggatatrtggaaaatatattactcaaaataatataatacaatgcccttcatatgaaacttgagctcatgcggtattagttatgagtggcctgtcagcaactgtctgtccaaatttagaaggtaccaagaatatccagcttctagtttttatctaattagcaccagaaacaacaccgaagtgaataaactgagttttccttagggaatcttatcaggtagcaggcagacaatatctctagtcaggcaattgtgttttattaaaggaaaacatcttaatacacttaactttcccaggaggcatagataatattttatcctctaacactagcatcaccctctactataaattcaccaagaaaatattcaataaatattgttgactaaatgctccatgaataaacat

SEQ ID NO: 97998 - DNA, 599 bp, Homo sapiens
actatggctgttaatggttatatttaggtggtccaatctttgtattttatttctattttctaggttttctaatgctctctaattaataggcattacttttccaaccacaaaaatatctattttaaaatggtccctttaagtttctctaatttcacctccactgaacactctgatttgatttttattagggctatgtggatatatggaaaatatattactcaaaataatataatacaatgcccttcrtatgaaacttgagctcatgcggtattagttatgagtggcctgtcagcaactgtctgtccaaatttagaaggtaccaagaatatccagcttctagtttttatctaattagcaccagaaacaacaccgaagtgaataaactgagttttccttagggaatcttatcaggtagcaggcagacaatatctctagtcaggcaattgtgttttattaaaggaaaacatcttaatacacttaactttcccaggaggcatagataatattttatcctctaacactagcatcaccctctactataaattcaccaagaaaatattcaataaatattgttgactaaatgctccatgaataaacat

SEQ ID NO: 97999 - DNA, 580 bp, Homo sapiens
cacatttgtctcttaaagtcacattattttttctctgcagatactgcttcacgtgctgggaaatatgatgattgacaattttttaagttttctgttgaatactttcaactatgagaggacaattcctgcaaagctttctcgactctcatgttaaaamaaatttttttaaaggcctgtggccaggagctcgattctagaccaataaaatcgaatgtaatatggggtggtaaagttacaccacattcacatgtgaatgaaggaaaagacaaaacaaatctcagaggtgtccacaaaagagtcagtttttactttgtaaagttatcatttattaagtaaaaagtggtgtggtgactttattaataccatgtcatagctttaaactacaatagtgagctacaagtatttctgttcccaagctaagctataattacctactgcagtctgtgagacttttagtcatcatttttcacccttggaaaattctaagattagtgtgatatgatagtacagttttttcagccatcaaaaagactttggttccatgtatttcttagtcactaagttggcagttttaccgtat

SEQ ID NO: 98000 - DNA, 644 bp, Homo sapiens
ctgctccaattttctactcacactggacctcctcaagttctttttcaccacatgattaaaagcaatgtctgactcatttgaacttgacattcatgttgtatttttcttgtattatgagtctttcttgaatctctgttgcttctccagagaaacagtaatctcctaaatagcagagataaccatacttaatgtatagctgggatctttgcaatatgttatagttttattttgtttctactcttttcctttgcttcgttgtctttaagttttacactcatgatgccttgagtttgaatccagactctcatgtttaccacttgtgtgagccatgagtagtttttctgatggctcagtgtttcagcttttctgtctgtaaaatgaaggttaccagtatagataattcttargtttttgtaagcatgaaatgagattatacctgtaaagtgctttaaagagtgtctagtacttgctaggcattgaaataatattgcaaattcatattaacttggtaacactctattattattatttgcaataatattacaaattcatattaacttgataacactctaattatcaagcatagcatacatgcatataataattataatcatacattgtggaatatctggaatatatattgg

SEQ ID NO: 98001 - DNA, 527 bp, Homo sapiens
cccctgctcctgaccctggtcctgccatggccctggccctgccaatgaccctgacagccctggccctcgccctgtcttggccctggccctgaactggccctgccctgaccctggccctgaagtggatttgcaggtgtgttgtccttgatttaacctggtcctaccatggccctgtccctcccttggctctgtcctggtcttgtgctgaccctgacccagaccttggcccttccctagccttgtcctagacctggccatggccctgcctctgccctggactggcgctggcactggcatggacccttgccctggccctttgctacttaaggccataccctggcccagccctggtcctgaccctgtcctggccctactttggcctggctctaccccggcatgctattctggccctagccctgaccctgtccctgtccctgtcctggccctagccccattgctggtcctgccattgcccttgtcctgacattgccctttcctggtcctggcmctggccttgtcccagccct

SEQ ID NO: 98002 - DNA, 413 bp, Homo sapiens
aaatcacatttttgaaccttgatgcttgaagtgtagcttgggtaacagatgggctttaagccaattttggcatgcaaggggttgagtttattaggcatcagcactgctgaaaatcgtggggatgcaggcttaatttcaacactattctaaatacttgaaagatattatataagtctttaataaactcctgtgtctacaaatggttcacattaactcaatatccatgattaaacatctacaaaatcaaggcactgttatttagtggagacttgctggctattctatgagaggaggtattgttattgtaatctcgtcatctcataaaattgtatcatattactcataaccagcccttcatatyctattcctattttggtattttaaaataagatatctttgaaactcttgaattc

SEQ ID NO: 98003 - DNA, 686 bp, Homo sapiens
tcatgtcatttcatcatttcatatcatttcatcatttcatcttttcattccatcatttcatcatttcacttcatcatttcatttcctcatttcatcatttcatttcatcctttcatcatttcatctcatcatttcatcctttcatttcattatttcatttcataatttcttctcatgttgcatttcgtcattccatcatttcatcatttcacttcatctcatcatttcatcatctcacgatttcatttcatctcatcatttcatctcatttcatcttttcatctcgtcatttcatttcatcatttcatttcatttcatcttttcatctcatttcatttgatcatttcatcaaattcatacatttcatcatttcatttcatatatttcatcatttaatcatttcacttcatttcatcacktcatttcatttcatcatttcatatcatttcttcaattacaccattggatcttaacattatacattgcatcattacatcatttcattgcatcatattcacttcatcattatcatcatttcatttcatttcctcattacatttacaccatttcatttcatcattccatatatcatacattatcatttcacttcatctcatcacttcatcatattcatctcatgatttcatttcatcgcatcatttcatcattacatttcattatttcat

SEQ ID NO: 98004 - DNA, 588 bp, Homo sapiens
ttttctacctaatattaataactttaatcattcattattccattactatgctctatagtgtatacaatttctgttctttgtcatgttattaactaaattatttattgggtccagtaacgtattccataaatattgtacacataaaaattgtgttatttttattcctgtatgctcagctgcccaataacagtctgaggattaacatatttgttaaatgcacaaatacattctttcacaaatattagtttaataattttatattaaactccctctatacttacaatatgaattagataattcagaataaacattccattggaaaaagctacacaatttgttataaaacatccttaaaagcatcagaaagttaatacagcaatgaagaattacaggaccarattaagaatggtatgaaagcctgtttgtgacgcttatgtttgggttatctctttatttgagtgactataaatctcaaaagagaactaaagggagaaataaccgtatctactaacatggtaagggtacttaaacatctcttagtaattgagaaaattgaaagaaaagaaaaaggagaaagggagaaagaga

SEQ ID NO: 98005 - DNA, 521 bp, Homo sapiens
caccctgtttatttccttcatagaaccaatcagtgattatttaatttggtttcctcacttgcttgcttctgtctacctccccaacaaatccatagtgtgctggaagcagcccatcttcctaactccattttgttgctgggtagcttgaagaggactgctgastatgggggcacccctttggttttacatccaaagcctcactcgcctcaccctcgtctcagccctgagagaggcacaataaattcaggtccgctccttatgccttgccagccccctccctgcccactgtctactctgcaggcacctcccttcaaagcccctttccctggtttttcagagctcagcgccccctgggcataacctcccttctttctagataagcttctccttcagcactgtgacggtgactctactatatcaaccccaaggtcaattttgtgtgttgggagaatcactggctgattcatgataggaatatttacaccatggcaactggcagatgctagaaatcagggcctcct

SEQ ID NO: 98006 - DNA, 615 bp, Homo sapiens
attatttcagtccaggcattatgaactgtgctacaatatatacaggacacttgtagaaactgtgtatccatggatgcattcatttttttttttttttttgaggtggagtcttgctctgttgcccaggctggagtgcagtggcgcaatctcagctcactgcaatcactgccgtccaggttcaagcgattctcccacctcagcctcccaagtagctgggattacaggtgcctgccaccatgcccagctaagttttgtagttttagtagagacagggtttcgccatgttggccaggctggtctcaaactcctgacctcaggtgatccgcctgcctyggccttccaaagtgttggggttacaggtgtgagccactgtgccaggccagatgtattaatttttaataacagcaaacttaactgcaatggtcataaaaacaaagggaactgcctgactcatagaactgaaatgtttagaggaagaacgagcttgaggtgcagagtgatcattcctatggcttaatttcccttgtaattttttttcagtgactcctctttattttgcaagtcagattcattctcaaactaactcctgtcatgaatgcagtatggttacaacaa

SEQ ID NO: 98007 - DNA, 592 bp, Homo sapiens
tctgtttccattcctttattttcagtctatatgtgtctttataggtgaagtatgtttcttgtaggcarcagttcgttggggccttttttcaatccattcagccactctatgcattttgattgcagaattaagtttatttacattcaatattataattgataagtaaggacatactcctgcctttttgctgtttgttttctgtttgttttgttgtctttcttttttttttctgtcctgtcttcttttttgggaagatgattttctctggtgatttgttttaatttcttgctttttattttttgtgtatctgttgtaggttttttgatttgaggtcaccatgaggcttgtaagtaacatcatgttatctattattttaaactgttgataacactgattgcaaaaaaaggacaaataaactaacaaaaagaaaactaataaaaactctacactttaattttacccctccactttttgtttttgctatttatatcttactctactgtctatgtctcgaaaagttgttgttattatttttgataggttcatcttttgtctttctactcaagaaataagtagtttacacatcacaatt

SEQ ID NO: 98008 - DNA, 528 bp, Homo sapiens
ttcaccatgttggccaggctggtctcgaactcctgccctaaggtgatcccyctgcctcagcctcccaaagtgctggaattttaggcgtgagccaccacggccggcctggattgctttctaggagacccatactgtcccaaatctaacacaattatttctacatgtagagtaaagaaaaaatagctttagaatctaagttagacatgggaaagaagaaaaatcaactgtgtagaaaggagaaactttgtgtatttattcctacataagtgaaatacactgtatacaaaagaagggcagagtcctcatttttccaagtttcccaagtacaaatataaaggatgttagacttcccacaggccatggctataatgttaaaatgctataattaatataacttttccactgcaaacattttcattatcattcagcagatgttatattaaaagaaagaaataactccatgctaaagggaatgctcttctttttgacaagtttaatggtttcttcttaactagatagttatgtagg

SEQ ID NO: 98009 - DNA, 296 bp, Homo sapiens
taagtgtgtttgtttatggactattcattgctttgtgtctggagacagctggtggtcatagaacaggtaagaaataagacctagttttaatttctggttactagctaggtgacatttttcagttayatatcctctccgagcttcagggatcttatttaaaagatgaaaaagacaatagctttatttgggggccggcatgaggattagttatttgtctagtacctggtacacagaaaaatgttagttattagtgttaatggagaagaaagttttcagggaaagcaaaaaaaactaaa

SEQ ID NO: 98010 - DNA, 566 bp, Homo sapiens
aatcttctacttaaagttatttttaaaagttatttacattctgcctaaatgtgggacttaaatttgctcgcagagttgaaatccccattagtgatctcggccaccgcttacaagtagattcagttttttccttctcaacctcaaatgctccaggccccacccagggatttgcaggagcctggaaaagccctctctatgttagaacctaacacacgtagaagggtgttccaggactatcgggataayagacattgctggcccctaggcctgcttccagaagaggacaggagtgctcagaggtggagggactggacatctgccagtggaatattcctttcactgggcaggaagcaagtgatgggtcatattttgtgctgcagcaggaaacttaggaaattgagtatctcattatataactaaagttctttgtatacctgtgtgtttgcaacggttctagaaggagaccgagtgtattagtcagcgttccgtagaaaaacagaacccataggacatacaattaggtaggtaggtagctagggaacttattatagggattggctcgtgcc

SEQ ID NO: 98011 - DNA, 332 bp, Homo sapiens
atttgcagtaacaggaatggaactgaaagtttttatgttaagtgaaataagtcaggcacagaaagacaaatgtcacatgttctcactyatttgtgggtgctaaaattcaaaacaattgatgtcatagagatagagagtataaggttggttaccagaggctgggaagggcagtgggggaacggggttagtggggatgtgaaatgggtacaaaaaattgttagaaagaatgaataagacagtatttggtagcacaacagggtgattatggtaaaaaaataatttaattatacattttataaaaactaaaatagtataattggattgtttataaa

SEQ ID NO: 98012 - DNA, 332 bp, Homo sapiens
atttgcagtaacaggaatggaactgaaagtttttatgttaagtgaaataagtcaggcacagaaagacaaatgtcacatgttctcacttrtttgtgggtgctaaaattcaaaacaattgatgtcatagagatagagagtataaggttggttaccagaggctgggaagggcagtgggggaacggggttagtggggatgtgaaatgggtacaaaaaattgttagaaagaatgaataagacagtatttggtagcacaacagggtgattatggtaaaaaaataatttaattatacattttataaaaactaaaatagtataattggattgtttataaa

SEQ ID NO: 98013 - DNA, 332 bp, Homo sapiens
atttgcagtaacaggaatggaactgaaagtttttatgttaagtgaaataagtcaggcacagaaagacaaatgtcacatgttctcacttatttgtgggygctaaaattcaaaacaattgatgtcatagagatagagagtataaggttggttaccagaggctgggaagggcagtgggggaacggggttagtggggatgtgaaatgggtacaaaaaattgttagaaagaatgaataagacagtatttggtagcacaacagggtgattatggtaaaaaaataatttaattatacattttataaaaactaaaatagtataattggattgtttataaa

SEQ ID NO: 98014 - DNA, 332 bp, Homo sapiens
atttgcagtaacaggaatggaactgaaagtttttatgttaagtgaaataagtcaggcacagaaagacaaatgtcacatgttctcacttatttgtgggtgctaaaattcaaaacaattgatgtcatagagatagagagtataaggttggttaccagaggctgggaagggcagtgggggaacggggttagtggggatgygaaatgggtacaaaaaattgttagaaagaatgaataagacagtatttggtagcacaacagggtgattatggtaaaaaaataatttaattatacattttataaaaactaaaatagtataattggattgtttataaa

SEQ ID NO: 98015 - DNA, 407 bp, Homo sapiens
gtaaacatggtcatatcattttccttatggtgtagttcactctctaagaaagctggtcatcttagaaccagggaaaaaaattcacattttggagactatttcaatttacggctggacgttttcaaagtatgactttgcgaaaaaaaaaaaagttcaaattgattcattgtgactggatcacttattctaatgawtgcttgcctttattttgtttcccagcattcctttcagctacgatacaacagaagcaaatatttgccactggaaaaaatattcaaagacactcttaggttaatctatagctgatgacagtcagtctagtctacatagcaagcagcttcaagatatgattacttagctaagcgggaaatgggacgtgactgctgcctcattcccacgcctctctg

SEQ ID NO: 98016 - DNA, 416 bp, Homo sapiens
gggtctcaggggctctgcctgaggactgcccttcaaccaggtattcgtaatttccccaagacccaggcttgctgagtcactcagttacctgaatgcctttttcacaaagggatgactgtgctgctccgtcttccttcttttttgtttgcgaggccacagggaaatctggatcctctggtgaaaaagcaaatccagttgctgctgctgctgctgctgctgctgctgcygctgccggttcttgtaaatgtcctcacttggtttctgggcagcaacttccttgacttgcctggggagcggatctgagctgcatttaccaggccatgcccaggggaagtgatcagtgtgggaccgtgaagctggatttccccaggagctccctccaagcttctgggatgatgataagactcgggatgaac

SEQ ID NO: 98017 - DNA, 516 bp, Homo sapiens
ggaggaaataacttgtggaatgctgaaaaaagtaaaaacaccttcgaataaagaagaggaacaggcaatgacctaaagcttgcttggactagtataagcatgccagggcaaatatttaggctaaattgtgggagctaagaacataaagtacattgatttctttattagggctagcagatatttaagaatgttagcacrggtctttgaataaattttgcttctaagagaagttactatttatttctaatgagatgggaaggaaagtctttgaagaggaaactctactttttacagaagtaggaacttagacttacagtttgcacattgacaaacttgttttccttccgtacacgaggggtttatgatcctctgttgcaactgatttgtcttatgtaacttcaagagttactcgtcaacctacttagtattctggacttttcgggaaatggcaatttgccttcctatttagtgggagggatactgagactgcactttttcttacgccaagaagtgcac

SEQ ID NO: 98018 - DNA, 516 bp, Homo sapiens
ggaggaaataacttgtggaatgctgaaaaaagtaaaaacaccttcgaataaagaagaggaacaggcaatgacctaaagcttgcttggactagtataagcatgccagggcaaatatttaggctaaattgtgggagctaagaacataaagtacattgatttctttattagggctagcagatatttaagaatgttagcacaggtctttgaataaattttgcttctaagagaagttactatttatttctaatgagatgggaaggaaagtctttgaagaggaaactctactttttacagaagtaggaacttagacttacagtttgcacattgacaaacttgttttccttccgtacacgaggggtttatgatcctctgttgcaactgatttgtcttatgtaacttcaagagttactcgtcaacctacttastattctggacttttcgggaaatggcaatttgccttcctatttagtgggagggatactgagactgcactttttcttacgccaagaagtgcac

SEQ ID NO: 98019 - DNA, 374 bp, Homo sapiens
agaatacaaagtcttaaccgtttttaaaaggatttctattttgctttcttatatatgtcaagaaaggtgccaactgattaacacatacatatcaattggaattctaaagctgaaaagccagcactatgggagactcctttttaagtgacttagcttsaggcaagagtcagaagtcatatccctttcatttcaaaacataaactgtatgaaacagtcctataaaattaacgtgtgctatttatcctccattcctcagtaaattattaaaatcaagcagtacaattctctcatcagttataaatggccctagaaggcagatttacatctatccaggggcaatttctgatgagtatttttattaatgatctaataaa

SEQ ID NO: 98020 - DNA, 636 bp, Homo sapiens
ttgactgtagttatgtgggtctatttttgggctctccattctgtcctgttggtctgtttttctmatcttttgtcaatactatactgtatggattactgttactttatagtaagtgaactctagtagtgtcaatcttccaactttattcttctctttccatattgtgttgactgttttgggttttttgcctttccacataaacttcaacattagtttgtcagtgtccacaaaataacttgctgggattttgattgggattgcgttgaatctgtagatcaagttgggaaaacctgacatcttaacagtgttgagtcttcctatccatgatcatggaatatcttttattcttctttgatttctttcatcagttttgtagtttttcacatatagaatgtatacatatttcattagatttatgcctgttttactttgggagatgtttatataaatggtatgggtttaatttgaaattcgacttgttcattgctgttacatatgaaagtgattgacttttgtatattaactttgtgttgtgcaaccttagtataatattattagtttaggaggttttgtcagtaccattgaatttccatgttgatgatcttgtatctgtgaacaaagacagtcttatttgtt

SEQ ID NO: 98021 - DNA, 439 bp, Homo sapiens
aaagataaattagattttatcaaaattgaaatattttttctttttgatactttatgttctgggatacatgtgcagaacatgcaggtttgttatgggtatacatgtgccatggtggtttgctgcacccatcaacccattatctacattaggtatttctcctaacgctatgcctccccttgccccccacccccaagttgtgtaattttttaaaaaaaattatagtacttggtgtcaaaaccttgtccctgatatcagcagtatgaattatyaatagataccatctgaaaccctggagggaagtaataagcttttaaagatgttcatcctgatgattagcctgtcatctttcatggggccctgaaatcaagaatccaccctttttcacatggatataatggatttaatacagtatttagcattatgcactgtatatatatgt

SEQ ID NO: 98022 - DNA, 527 bp, Homo sapiens
tgtttttaattcagagggtttacattaatgtccttactgataacagattcatctaggggtggaagggagggcaagggcaagggagaaaacataaatattggaaacaagggtaagttacttcacacacactttgtggaggatgagaacactcattcagaaactgcgtgatacccagacactactgtttgagctttgacaagggaagtagcctaaaagcaaatgtgtagggatgtagcatttgttcccaaagtgctaaaacctgtaatttatcagccacctcaactttttttatttctatagctaggctaaatactggaaaaaaaataaaaagaagtaagaaaatagacatgagggatttcaagaaggccagcatcaaagaatctttgcagtaatgaagtgttaaaagggatctggaggctcaggataataccaaaagatttgaccttggaaattaagttacagagaatagawtacaacattcttttggattctgaaagaatagaagatcatatttatcttgattttat

SEQ ID NO: 98023 - DNA, 532 bp, Homo sapiens
gaactaataattaaagggatcaaagaatccactcctaggatacaaagtatctcaaaggcattcgagattaaacaagaaaaagaggaaactccctctgcattccttaagaggctcagagatcaaatgagaaaatactccagattagatgtggaggacccagtagggcaaagccctttgaaggttaactttgtaactaatagttggcctgacattacaaaaaaattacaaaagatcaatggttggaatgaaaaaatcaattgaggaattaatgaaggaagctaaaaaggcccttctatgaagagaaaaggaaaaacagagacaaaaagtgaaaatcatggtttccactgtagaggaggtagccaggaggaagttagatsaagagccctcttggaggagatgagaaattgctagatttcagcaaaaactcagaagagaaatacaaggaaaaactcctaagactgtaagtggatgttacagtgtggaaaaccaggacattttaacagagaatgtccagaatggaaaaagaaagaga

SEQ ID NO: 98024 - DNA, 539 bp, Homo sapiens
tgtcacactgaccctctgcccttgtgaaaaggcagagggtcaattgagcttgttaaaacttaagccatctgtggacagcaaggctaaaacagcattgtaaaactggggctgcaggcatccacccctagacaatactgcaaggccagagcccaaagcactaaccccagcctgtcaggggtttgagcagtggtggccacccaacgggygagccacacccctgtcacatgtcctgcaagggggaccagtgaactctcccatttaattttcaatgaggcttatcctgaacactacattaaatgaggcaaactgccctttccccctacctccatacaaacattcccaattccctcatccttgtcctatatataaaaaaaatttctctagcacttatctgataatactcaatttatttagatattatcgtgtggtaaagaatttaacgttgcccaaagaaagctctggccattgccttcagccactgagaggtaatctctaaaccctttggagtattctgtttgataaaagtgtctttgtttacc

SEQ ID NO: 98025 - DNA, 539 bp, Homo sapiens
tgtcacactgaccctctgcccttgtgaaaaggcagagggtcaattgagcttgttaaaacttaagccatctgtggacagcaaggctaaaacagcattgtaaaactggggctgcaggcatccacccctagacaatactgcaaggccagagcccaaagcactaaccccagcctgtcaggggtttgagcagtggtggccacccaacgggtgagccacacccctgtcacaygtcctgcaagggggaccagtgaactctcccatttaattttcaatgaggcttatcctgaacactacattaaatgaggcaaactgccctttccccctacctccatacaaacattcccaattccctcatccttgtcctatatataaaaaaaatttctctagcacttatctgataatactcaatttatttagatattatcgtgtggtaaagaatttaacgttgcccaaagaaagctctggccattgccttcagccactgagaggtaatctctaaaccctttggagtattctgtttgataaaagtgtctttgtttacc

SEQ ID NO: 98026 - DNA, 539 bp, Homo sapiens
tgtcacactgaccctctgcccttgtgaaaaggcagagggtcaattgagcttgttaaaacttaagccatctgtggacagcaaggctaaaacagcattgtaaaactggggctgcaggcatccacccctagacaatactgcaaggccagagcccaaagcactaaccccagcctgtcaggggtttgagcagtggtggccacccaacgggtgagccacacccctgtcacatgtcctgcaagggggaccagtgaactctcccatttaattttcaatgaggcttatcctgaacactacattaaatgaggcaaactgccctttccccctacctccatacaaacattcccaattccctcatccttgtcctatatataaaaaaaatttctctagcacttatctgataatactcaatttatttagatattatcgtgtggtaaagaatttaackttgcccaaagaaagctctggccattgccttcagccactgagaggtaatctctaaaccctttggagtattctgtttgataaaagtgtctttgtttacc

SEQ ID NO: 98027 - DNA, 628 bp, Homo sapiens
tttggacttttcatagttctgaattgtctttctttgtgcagggatttagctaagcaggtctatagaatttgaaaagaggaaatgtgaacttaaagcccaaatcaaagatgaaactattcacttgccttggtctattgatttcgtatattcatagaaagcagatcttttaaagctgctaatctcattcttattacatcaatagtgtaaaggccgagagagcaccaggaatgtatagaggcccattctactacatctaagttactctacctaataaaatgtcataatgtatgtgtttatatgtgactcctgacctcaccactactaagtcaattaatctgtttcagctacattaaaacaatttccagacatctatgctttaatttataattctaatccgttatttcaatactgtatggagatagaartagtctaatttgcttatcactgccatgtatatatgatttggttcagaactaagcacagttgcatctctctggcctaagaaatgcctattctgcctcttgctttccatttatttgataataataccaatttataccttgtcactgaggctaaaataataaatacatacacaatttttgaaagtcaaccttttacctcatcattc

SEQ ID NO: 98028 - DNA, 581 bp, Homo sapiens
ccaggtgtggtggcatgcccctgtagtcctagctactcaggaggatcatttgagcccaggagtttgaggctgctgtgagccacattcataccactgcactccagtttgggtgacagagcaacaccctgtctttaaaacagacaaacaaacaaagatacatttcaggctgtgactttgctgcccattagttggtatgctgttcaataatttgtgtccataagawacagacacagttaactgattgtgagaattaaagaaactatcttttgttgcttgcatctttgtcttatgaattccaccaaccccccccccacttttttttaaggagaaagtacttgagaagcgaaaaatcaataattcacttagtttcagattattgagtactggactatgaaatgtgatatgctcataaggaatacttaacagctttggttgctaattaaaaccttacaaacacatttcaattagtattggctaatataatacagttcaactagaaaaatatttgtagaagacatgttttgcaacaaaaatatctaagtcagtttcaccttctacttatttgacataaattagcaata

SEQ ID NO: 98029 - DNA, 593 bp, Homo sapiens
gtattcatcagggttctctagagggacagaactaattaggatagacatatatataaaggggagtttattaaggagtattgactcacacaatccaagatgaggtcccacagtacgttgtctgcaagctgaggagcaagaaatccagtccgagtccccaaacctcaaaagtagggaagccaacagttcagccttcagtctgtggtcaaaggtccaagagtcccaaagctgaagaaattggagtccgatgtttgagggcaggaaacatccagyacaggagaaagttgtaggctggaagactaagccagcctacattcatctgcctgcttttatcctagccatactggcagctgattagatggtgcccacccagattgaggatgggtctgcctttcccagtctactgactcaaatattaatcttctttggcaacatcctcacagacacactcaggaacaatactttgcatccttcgattcaatcaggtttacactcaatattaaccatcacactagttgtggtggtgtgccctatagtctacttgaaggatcacttgagcccaggagttcaaggctgcaataaactatgattgtgct

SEQ ID NO: 98030 - DNA, 618 bp, Homo sapiens
ctgtttcttgccttcgaatcttggatatctgttctctttgccaaatccccttttgtccaactcctttcaagaagcctgtcttcaccactactagataagtagttcttcctatgtgtgtcctgaacgccctacatatcacctagtatcatagagcacctaatcctatatttcagttctctgcttgtttatcttcctcactgactgaaactccttgaaggcaggaatcatattttctcaatgtctatagccctgggttttggcacacacctatcaaatayaactatttcttgaattattttgttgggtgaggtagggcagcttttatcattgccatctttcagataagtgagtgaaaattcaaaaaggatgaaaagtcctaccaatagatatatacctaaaagcaagtaacagttgtagaacagaaaaatcaacaagggccatactactacaactactaatgatgataatgattatgataaattttactttttaagaaccatgagagttcttaaaagccatacatattaactcattaaatcctcagatcaactctttaatgtgaatgttcatactatcccctttaccattgaaggatttaagcttcagagaggttcatta

SEQ ID NO: 98031 - DNA, 618 bp, Homo sapiens
ctgtttcttgccttcgaatcttggatatctgttctctttgccaaatccccttttgtccaactcctttcaagaagcctgtcttcaccactactagataagtagttcttcctatgtgtgtcctgaacgccctacatatcacctagtatcatagagcacctaatcctatatttcagttctctgcttgtttatcttcctcactgactgaaactccttgaaggcaggaatcatattttctcaatgtctatagccctgggttttggcacacacctatcaaatacaactatttcttgaattattttgttgggtgaggtagggcagcttttatcattgccatctttcagataagtgagtgaaaattcaaaaaggatgaaaagtcctaccaatagatatatacctaaaagcaagtaacagwtgtagaacagaaaaatcaacaagggccatactactacaactactaatgatgataatgattatgataaattttactttttaagaaccatgagagttcttaaaagccatacatattaactcattaaatcctcagatcaactctttaatgtgaatgttcatactatcccctttaccattgaaggatttaagcttcagagaggttcatta

SEQ ID NO: 98032 - DNA, 586 bp, Homo sapiens
catgtgatagtctgaaatatggcctcgtaggaagggaaagacctgaccgtcccccagcccgacacctgtaaagggtctgtgctgaggaggattagtataagaggaaggcatgcctcttgcagttgagacaaggagaaggcatctgtctcctgcccgtccctgggcaatggaatgtctcggtataaaacccaattgtacattccatctactgagatagggaaaaactgccttagggctggaggtgggacatgcgggcagcaatactgctttataaagcattgagatgtttatgtgtatgcatatctaaaagcacagcacttaatcctttaccttgtgtatgatgcaaagacctttgttcacgtgtttgtccgctgaccctctccccactattgtcttgtgaccctgacacatccccctctcggagaaacacccacgaatgatcaataaatactaagggaactcagaggctggcgggatcctccatatgctgaacgctggttccccggstccccttatttctttctctatactttgtctctgtgtctttttcttttccaagtctctcgttccaccttacgagaaacac

SEQ ID NO: 98033 - DNA, 611 bp, Homo sapiens
taaatgctttgattttcttaatgctgattttatggtcctgggcaaagataatagaatgcaagatatatggttagtcccagtaagcaaatcagggcatatataacmtttgagagttcaaatacttaataatagacctcttttacattttggagtggtgatccaatcagggtcactgtgtactgctgtttgtgtagtgcactgcaggattccacggagtgatattctctgtactatctggtgaatgcgataaatcaggagaaattattaagtgttatggtggtgtactagaaagaacattgttctgagaactagaaaaatgtgattccttccctgactttgctaagattgagccatgattttgatggaaattgtaaagaataaatacataatctgggttatcttggtgattactttatatcaggaatggccgttctattttcgcacctgttttttcatttcatttaacatgatattgacaagaaatgtaaaatggaagcaattggcattttagaaataacagctttattgagatggactcacatagcatacaattcatctgtttaaagtatacagtttttcatatattcacaaaattgtgcaatcattgtcac

SEQ ID NO: 98034 - DNA, 558 bp, Homo sapiens
atgttgtcttttgtgactgacttgtttcatttagcataatgtttcaatgtttgtccatgttgcagcatgaatcagaacttcattcctttctattgttaaatatatttcattgtgtggatataccacatttactcaccaattcatcacttgattgatgcttgagttgttctcactttttggctattatgaagaatgctgctatgaatgtgtgttaacaagtttttgtatgaacatgttttttatttccttgggatatatacttaggagtggaatttctgggtaaatggtgaatatgtttaatattttgtggcgtgtctagattgtaaaatgctgtagcattttacagttctacaagcagtgatggatccattttctcctcaagaacagttgttattacctgtccttttcattatagccaacctaatgcatacgaagtagtaactcaatgtgcttttggtttgcatttccctggtkgctaatgatgtgcttattggccatttgtataccttctttggaaaactgtttattcagcaatcaatttttaattgagtgtttctc

SEQ ID NO: 98035 - DNA, 572 bp, Homo sapiens
tgccgatcccaacagctggccatgccgccttccttcgctgccattccacatgattcctgcctgtgacaaacttcccaaggaccttcaggagcttctgctggaatacactaagaagcctgcaagcccattcttataagaacctaacatgcrttatcagtatcagatagcggtcagcagaacagatcaatatgccccatgacctcactgggatcagtgatatctgacagaacctacgtggcccacctatgccactgttaattctgcagacctgttctttctgctgagtctactacttttgttttgcctatttgtaaatactaatttttctagccccagatatgtctttcctacatttaagggagtcctagacaaaacatgccttccactgggtaccccagacatgaaaataaccttgagatttaatcactgcctagtatgggatcgtatcgcactagaaaaagtccaaatattttataaggtcactgccagtccttggaaccggcaagccacctggccgtgagagcagtgataagctcttgagacatcaacttgtaagagaagaaatgaacaca

SEQ ID NO: 98036 - DNA, 609 bp, Homo sapiens
tgtgctctctattttggcatttttcttggagactgagtgaagtttctaattgcttaattactattaggatgattgtctattgtttattgcagcggttcccaacgtttttggcactagggaccagtttcatggaaggcagtttttccatggaccaaggttagggtgtggagaatggtttcaggatgagtcaagtacattaaatttattgtgtactttatttctattattattacattgtaatatataatgaaataattatacaactcaccaaaatgtaaaatcagttgttttcctgccactgtacagtcccatctgggggtgatgggagacagtgacagaccatcaggcattagattattataaggagcaygcaacctaaatccctcatatgcacagttcacaatggggttcacgctcatatgagaatctaatgccatgattgatctgacaggaagcaaagctcaggtggtaatgtgaggaaagaggatcttggtaaacatgctattgtaagttgaatgtctctactccccttccgagaaccccatgtctccttactgggaaacttcaagtcaaatggttttaggatttactgacagaggttacttgcta

SEQ ID NO: 98037 - DNA, 637 bp, Homo sapiens
tatgtgctctctattttggcatttttcttggagactgagtgaagtttctaattgcttaattactattaggatgattgtctattgtttattgcagcggttcccaacgtttttggcactagggaccagtttcatggaaggcagtttttccatggaccaaggttagggtgtggagaatggtttcaggatgagtcaagtacattaaatttattgtgtactttatttctattattattacattgtaatatataatgaaataattatacaactcaccaaaatgtaaaatcagttgttttcctgccactgtacagtcccatctgggggtgatgggagacagtgacagaccatcaggcattagattattataaggagcacgcaacctaaatccctcatatgcacagttcacaatggggttcacgctcatatgagaatctaatgccatgattgatctgacaggaagcaaagctcaggtggtaatgtgaggaaagaggatcttggtaaacatgctattgtaagttkaatgtctctactccccttccgagaaccccatgtctccttactgggaaacttcaagtcaaatggttttaggatttactgacagaggttacttgctagtatgaatttgagaaattcatgggag

SEQ ID NO: 98038 - DNA, 560 bp, Homo sapiens
gagcattatgctgagtcattcagacaccttgttgtctttgaaccccatctgaggaaacacagatgtgatttttatcacccaccatggtggcttaacctccctgacagcagcatataaaacaggagctggttacattattattgctagtcctgatttccattctcacctcaaaaagatggcgtggaggraaacaccatacaccaactaccataagtatattctttctttttcttttttttttttgagacaggcctcgctctgtcacccaggctggagtgcagtggtgcgatcatggctcactgcagccttgacctcccaggttcaactgatcctcctgccttagcctcctgagtagctgggactacaggcatgtgcccaccactccagctaatttttaaactttttatagagatagggactccttatgttgcccatgctgtcttgaattcctgggcttaagcaatcctgcctggcctcccaaaatgctggtattacatgtgtacaccattgcactggcctatatttacaatattacccttaaggaaaatcaggccacaagt

SEQ ID NO: 98039 - DNA, 488 bp, Homo sapiens
tttccttctttgtagttgtcgctatttgcatttattgtgtttctctccttagaacaaaaacacctgcaggacattgagcttgcccatcttgaatagctttacctgtccaccacctagtacagtccctggtatacaatgaccctcaagacatgcttatttaatgaaaaaacaagtaaagaaatagattaacccaccatcttagagtaatgagaaggtaggaaaagcatggtatagaaaaagaaagcaagagactctcttcatcctcccttgccttatttagttttgtcagattcagacaaacacagttattttactctgacaatggcataggcacagacatgaggctaacgtctgattattttttaagaaaaaggtatcccaagctygaatacaagccaaaaagtagtgtgtggactatgcttttaatgatcatacaaggcacagaccactcaataaaacacacttagttaaatcaacaattgtttacc

SEQ ID NO: 98040 - DNA, 592 bp, Homo sapiens
cgttcccattggcctaaagattaaaatttttgagtatctaaagggataatgaatgtgatgtttgaaacacgtggaatatataaatccatatgttcatagggatgaaaagaaagatggaaagaaagtcagttcaatggccaccactgaaggtaactagggcacaaactacttactctgaaattaatatttaaagggaaagaattaaacatttatcctgtctatcctaggtaaactccttttccaggtaaccaaatagccaagttgttaaggaaaaagtttttccttacagaaaaattccagctaatgaggtaagaatgacagagttagaaaagcacctatttgtaactcctagtaaaataatcaaggaagccagcatgcatggatgaaacaattagatamaaagataatgggaaacttaacaatgaaaggactgagctgtcaccacctgaacccactgctgaatcccaatgtcactaaagtgatagagccagacacggtgtgcctcctgatgtgatgcaatatgaaattcacagcaccataccgatgtagcattcttgcccaaaaagcagaacctaaatctaattggggcttt

SEQ ID NO: 98041 - DNA, 379 bp, Homo sapiens
agctgggtgtggtggcacacgcctgtagtcccagctacttgtgaggttgaggtgggaggatggtctggacccaggaggcggaggttgcrgtgagccaagatcctgccattgtactccaacctgggcgacagagccagacattgtctctaaaaaaaaaaaaaaaaaaaaaatggaaaaaagaaaagatttggaaaagaaattcaaagaatctggtgtgtttctggagttctggcacacttctctgtgagctgccagctatcacctgatagttacactctgtgggatatattaagttagtgatctggactctgagttgtatgtgacgttacactttaatatgacagttagacaacaaagataggaaactcttcagggaggg

SEQ ID NO: 98042 - DNA, 506 bp, Homo sapiens
atgtcaatttactttgccttggagattctgaatatgttttgatacaacaaaaattagacatatattagaagaactactccttgaattaacacaaagtctattatgaacacaatgaatcaattttagcatgcaagtgattttaagaagatagttgaaaaatcatcttgaacaaagtgatagatggaggctcacactgaagattaygccctgattcatgtaaaaatatttgtttaatttttatctttccaaagaaatatgccatttgcaatccctttatgtggatgtttctagagtctaccaacctcctgagctacttatggggtgtaaaatagtttgccttattccacacagcattatgactcacaaataacattagcgatacgcagccaatctgatacatgactggaatatttacaattttagaatatacagcaatgaaaaattttaagttgatcattgtcaagtctaacaagtggaaaggagattttcttcaaagtaagaacctg

SEQ ID NO: 98043 - DNA, 628 bp, Homo sapiens
gccatttgcaatccctttatgtggatgtttctagagtctaccaacctcctgagctacttatggggtgtaaaatagtttgccttattccacacrgcattatgactcacaaataacattagcgatacgcagccaatctgatacatgactggaatatttacaattttagaatatacagcaatgaaaaattttaagttgatcattgtcaagtctaacaagtggaaaggagattttcttcaaagtaagaacctgaaaacttcaatgatggctatatattataaaaatttagtttccttatttaaaaaaaagtcagctcttcaacaagaaattttaaatgtatcttttaaatattgaaaaattgagaatatgtaccagttggcctcttaaattgggtatcaaacttatatgctatgttggctcaaaccaataacttgaattattttttgaatgaatcattcatttattcattcaacaaatctttatggaatgcccaccatgtgttaggttagttagatgctgaacaacaagttaagaaagtcaggacaggcatggtctcagcctcttgaaacaaacagcctagcataaaaacacaatttccaatacagtaagaaaatggtatagtgacaaaatt

SEQ ID NO: 98044 - DNA, 356 bp, Homo sapiens
actgtggctcagccagcaccttaatttttgactctggcctctcagacaataggaaaattaatttctattgttttaagccactcaggttgtggtactttgccacagcagccctaagaaattaatgcaagggaaaaactattcaaggagacaaaggaggtcaccatataatgataaaagggtcaattcagcaaaaaaaaasaacaattttaaacatatgtgcacctaacatgggagcacccagatacataaagaaaatattattagagctaaagagagataggtccaaatacaaaaatagctgaattcaacaccccactttcagcataggacagctcttccagacagacagaaaatca

SEQ ID NO: 98045 - DNA, 622 bp, Homo sapiens
aattgtgaggtagtagccagagagacaagaagcgagccaggagctatttctcatggaaacaaacaaaggagactcaaagagggcaaaatggccaatactgtccagggccacaaagcaatcaagtgagatgcagtttgagagggtccagtggatttggtagctagtatttttaagaatastctcagggaagaagtggcaataggggaaagattgcagtcgggaaagaaatgcgtgagagaagaggaagtagagtcagtgaataaagacaattttttcttagcttggctggattaaggaagaatatcttgtggtaatgtgaagaattcacagaggtaagtgaagtgtttgtttcttatgaatggccagtaacttgggctgagcggagaaaacacaagaatgtaacagcattttacagggcccaagagtgaagtaaggagacatatacgtaataaagcaacacatggaagaaagggggtaatccatggattctccaggaaaatttactggagaattcagatcaaattcagaatacaggtgcagagagtagagagaaggtaaggatgagtataactgcagatgagtttgtgggttaagaaaatgtattttcttaagagagctcaca

SEQ ID NO: 98046 - DNA, 609 bp, Homo sapiens
cagttttccaccttaatttcaaaaataaatgaggccaatagcattttcaagaacacagaaattaatcactaactktgtgcactatttttgttttgtggctgtaacaaatgaccacaaatttgggagctaaagcaacatgtattgattgtgttactggtctagagatcagagtctggagtgggtcttgctggactaaaaccgaggtgtccacagggtagcattcctctccgggggcacttgaggagaacctgatttctggcctttctggcttctagaggtggctgcattccttggctcctggctccttcctccatccgcaaagtcagcagtgctgggttgagctcctctcagatcccatccctccatcctccccttctgcctcccatttccacttagaaagaccctgtgattatattggggccacctggattgtccaggataatctccccatctcaagctctttaatcatattggcaaagtctcttttcccttttaattcatagtcacaggttctgagaatctagacatctttggtggtcattactctgcccatcacattgtatttatgcaatactttattattttttttcattctttcaaagtgacacg

SEQ ID NO: 98047 - DNA, 609 bp, Homo sapiens
cagttttccaccttaatttcaaaaataaatgaggccaatagcattttcaagaacacagaaattaatcactaactgtgtgcactatttttgttttgtggctgtaacaaatgaccacaaatttgggagctaaagcaacatgtattgattgtgttactggtctagagatcagagtctggagtgggtcttgctggactaaaaccgaggtgtccacagggyagcattcctctccgggggcacttgaggagaacctgatttctggcctttctggcttctagaggtggctgcattccttggctcctggctccttcctccatccgcaaagtcagcagtgctgggttgagctcctctcagatcccatccctccatcctccccttctgcctcccatttccacttagaaagaccctgtgattatattggggccacctggattgtccaggataatctccccatctcaagctctttaatcatattggcaaagtctcttttcccttttaattcatagtcacaggttctgagaatctagacatctttggtggtcattactctgcccatcacattgtatttatgcaatactttattattttttttcattctttcaaagtgacacg

SEQ ID NO: 98048 - DNA, 579 bp, Homo sapiens
caaaagattgcatgtctttaaagctattgcagagggaaggtttgacataaatttatctcaacagaaacttctgtcttattccatgcttctgaaaactttgtccttaacatacagaagacagtaaaacaacagcatccagtaaaacaaagaaagctctttaaagagtgaaaactacttaacctggtccatttgaatattcaaacatatttattttttaaattaatcattttattttgagataaatgtagattcaaatgctgtagtaagaaataatatagataactatgattctttaccaggtttcccccagtgatagaatcttgaaacattatcatacaatatcaataaccagaatattgacattgaaatagttaaaatattagggcgtttccatcaccacaaagagagttcattttgtatttttatagtcacgacaaactttctcccaatctgctctcccttcygaaacatcagcaacaactaatttgctcttcagttttataattttcttatttcaagaacgtgacaaaaatcgaattggatgcgtgtaactcttagggacagtctgttttactcagc

SEQ ID NO: 98049 - DNA, 614 bp, Homo sapiens
atcaccgtgtttaattatatgtaaagttttgcttcaagcttaaagttgaacattctgggttataaatttctaggaacaattgactatgttttaaatgtacaagtggacatggttatgatgtcacattttaaaaaggctttaagttatgaacaaacagcaaaaaggagctctgacacactggtctggmctttttctattttcccctttgaggctggtttcaggttatttgtagcaaatagcaggtaaactggaaaaacttctaaatgtttaatcacactttccttcatcctttacagagaaactcatcctcctaccatgatagtttctttcaaatagggactcccatattacactaaagtaagtaatgtcagattatgatttaaaaatgaaaataaaaattttacacacaacctaaaattatgactactttgtttcatactaaccttacattgaaattctgattaatcctaaagaaaacctccacaatttttttccccttaggattgcatttagatggtctaaaatattagcaggcattattgcaatctgccctcagagttatcattatcttcattttgcattaaaagaagacatgactgtgcttttcttggaag

SEQ ID NO: 98050 - DNA, 589 bp, Homo sapiens
ctctctttctcctttaagacaaatgaaagggggagtaataggagataccccaaactttcaatataaacctgtaggaaaaccatgtcctaaaaattttgagggcccatctaaaattttaatttgggaagaytgtgttaactcacatgtagtagtactaaaaaatgacgcatatggtttagtaataggatgggcaccaaagggctatttaaaaaacaattgctcctctggtggaagggaatgcctggaggctacttattttatttcttattgggaggacgaggatcatcgttctactttacataggaagttcagctcattctttcccttaaaatgggaagataaaggcattacccctccgaggcctcatatgatattccccattctgagcctggaacactcagaactttggaaattggctattgccatgtctggactgtgagtatgggaagggtaaacttttctgtctgttatccccactactgccccttgcatccatgactctgaaccccatgataaatcccctttgaacccttttcctctttttgatgctgatcctcctttatgggactccaattggcattatgataat

SEQ ID NO: 98051 - DNA, 589 bp, Homo sapiens
ctctctttctcctttaagacaaatgaaagggggagtaataggagataccccaaactttcaatataaacctgtaggaaaaccatgtcctaaaaattttgagggcccatctaaaattttaatttgggaagattgtgttaactcacatgtagtagtactaaaaaatgacgcatatggtttagtaataggatgggcaccaaagggctatttaaaaaacaattgctcctctggtggaagggaatgcctggaggctacttattttatttcttattgggaggacgaggatcatcgttctactttacataggaagttcagctcattctttcccttaaaatgggaagataarggcattacccctccgaggcctcatatgatattccccattctgagcctggaacactcagaactttggaaattggctattgccatgtctggactgtgagtatgggaagggtaaacttttctgtctgttatccccactactgccccttgcatccatgactctgaaccccatgataaatcccctttgaacccttttcctctttttgatgctgatcctcctttatgggactccaattggcattatgataat

SEQ ID NO: 98052 - DNA, 575 bp, Homo sapiens
tgcaaccttatgatgtggttaagcatgtaaataggagtgcagtatccccgtgacccatcttgtgcccaggtagctggcccatagtrttgaattattctttcaggggacttccctatgtcttcccaatctcctattttttatatattttttatggctgcatctcttttgtttcttcttctaacttcatcatagacaggataccctaaagttttcccctgttgcagtgggagcaggaagaaagatggtctaattgttccaagcacacagccccctgtccatttagctggcaactgtcaatatgcttgaggcccacagatccagtaaagaccgggggtgcttgccaagtatttggagctgcaagttgataccaagtgtaatttagagaagagaaatgggagaacgaatttggatgatgtgctttgtagtcatctctgtcccaccacaaagttttccttaatggttcattataatattgctgtcctaagcaggtttgttcttctactgggtctgtaaaatcctttccccagcaagcaacacagtatctcccaataatagaagtttttaagagccagacg

SEQ ID NO: 98053 - DNA, 575 bp, Homo sapiens
tgcaaccttatgatgtggttaagcatgtaaataggagtgcagtatccccgtgacccatcttgtgcccaggtagctggcccatagtgttgaattattctttcaggggacttccctatgtcttcccaatctcctatkttttatatattttttatggctgcatctcttttgtttcttcttctaacttcatcatagacaggataccctaaagttttcccctgttgcagtgggagcaggaagaaagatggtctaattgttccaagcacacagccccctgtccatttagctggcaactgtcaatatgcttgaggcccacagatccagtaaagaccgggggtgcttgccaagtatttggagctgcaagttgataccaagtgtaatttagagaagagaaatgggagaacgaatttggatgatgtgctttgtagtcatctctgtcccaccacaaagttttccttaatggttcattataatattgctgtcctaagcaggtttgttcttctactgggtctgtaaaatcctttccccagcaagcaacacagtatctcccaataatagaagtttttaagagccagacg

SEQ ID NO: 98054 - DNA, 550 bp, Homo sapiens
ccatgcaaatgtaccccaaaagcaagcagtagtagccattcttacatcagacaaaacaggctttaaagcaaaaacaggtaaaaaataaaaaacacaaagagggacattatataatgataaaagtactagtcaacaggaaaatgtaacaatcctaaatatatatgcacctaacactggagctcccaaattcataaagcaattactgcaagacctaggaaacgagataaatggcaacacaataataatggggaacttcaatactctactgacagcactagacaagtcatcaagacaaagtcaacaataaaaacaaaaaaacacggtggccttaaactatactctagaacaaatggacttgacaaatatttacagaacattctacccaacacctgcagaatatacawtttattcatcagcacatggaacattctccaagatagacacatgataggccacaaaacaagtcacaataaatttaagacaatgcaaattatatcaactactctcagactgcagtggaataaaattgaaaatcaactctaaatgaact

SEQ ID NO: 98055 - DNA, 523 bp, Homo sapiens
tattcatgagggatccacccccatgatccaatcacctcccatcacactccacctccaacattggggattacagttcaacatgagatttgggtgaggtcacatatccaaattatatcaccagattaggatttttgttttgtyttaagcagtctttatattcaaggacaagtgaggaagacttcctcaaatagtttttgttttaagtaatctgacctattttggggaaagaaatgagaagttcttctacaaaagtgattgattctccactaaattgttatagtttcatgattcctaaaaatgggtttatgctatagagatttgatatctcctatacgccactctcaggttggccctctccattacaaggcaaggaaggggaggaaatggactcaaatctctcagcctcacctctatcctttctgactccaagaggtgatggagagaggaaagaaaggaaagagaaggcaagcatgacaaacttctctacctttgagtcatttttaaagccacaaaggtggaattc

SEQ ID NO: 98056 - DNA, 474 bp, Homo sapiens
gatccaatcacctcccatcacactccacctccaacattggggattacagttcaacatgagatttgggtgaggtcacatatccaaattatatcaccagattaggatttttgttttgtcttaagcagtctttatattcaaggacaagtgaggaagacttcctcaaatagtttttgttttaagtaatctgacctattttggggaaagaaatgagaagttcttctacaaaagtgattgattctccactaaattgttatagtttcatgattcctaaaaatgggtttatgctatagagatttgatatctcctatacrccactctcaggttggccctctccattacaaggcaaggaaggggaggaaatggactcaaatctctcagcctcacctctatcctttctgactccaagaggtgatggagagaggaaagaaaggaaagagaaggcaagcatgacaaacttctctacctttgagtcat

SEQ ID NO: 98057 - DNA, 585 bp, Homo sapiens
ttgttgctaagtatagtaagtgtctagatgggcattttagacttcaatggcrctttaaaaggagatatgctgaatatacttgtaaagaaaaatacaggtataaacactatcatatgagttcaacaaatgtaaagaacagtattcctaccccataatgtttttcattaagacaagcatattacaatataaatatactgctgcacttttggaaaagccttcctaccccacttgaaatatattataaatagagacaatttgacttctacctcttatgatatagcatgttatactgtctatacgggacagacacatgactcattgtctcaatcataagcccccatgataactatctttgtttttaattgatccattaatattaatgataatgacaataactgtcatcaacaactaacatttttataattctaaatctaaaatatgattttggatgcaaacaagatagaattaagaaaattaattattaattaagaaaattaagaattaagaaaattagcaacaacaggttacaatcataaactaagaaaaaaacaagacctaatacaacagcaggacctaataaaacag

SEQ ID NO: 98058 - DNA, 585 bp, Homo sapiens
ttgttgctaagtatagtaagtgtctagatgggcattttagacttcaatggcactttaaaaggagatatgctgaatatacttgtaaagaaaaatacaggtataaacactatcatatgagttcaacaaatgtaaagaacagtattcctaccccataatgtttttcattaagacaagcatattacaatataaatatactgctgcacttttggaaaagccttcctaccccacttgaaatatattataaatagagacaatttgacttctacctcttatgatatagcatgttatactgtctatacgggacagacacatgactcattgtctcaatcataagcccccatgataactatctttgtttttaattgatccattaatawtaatgataatgacaataactgtcatcaacaactaacatttttataattctaaatctaaaatatgattttggatgcaaacaagatagaattaagaaaattaattattaattaagaaaattaagaattaagaaaattagcaacaacaggttacaatcataaactaagaaaaaaacaagacctaatacaacagcaggacctaataaaacag

SEQ ID NO: 98059 - DNA, 585 bp, Homo sapiens
ttgttgctaagtatagtaagtgtctagatgggcattttagacttcaatggcactttaaaaggagatatgctgaatatacttgtaaagaaaaatacaggtataaacactatcatatgagttcaacaaatgtaaagaacagtattcctaccccataatgtttttcattaagacaagcatattacaatataaatatactgctgcacttttggaaaagccttcctaccccacttgaaatatattataaatagagacaatttgacttctacctcttatgatatagcatgttatactgtctatacgggacagacacatgactcattgtctcaatcataagcccccatgataactatctttgtttttaattgatccattaatattaatgataatgacaataactgtcatcaacaactaacatttttataattctaaatctaaaatatgattttggatgcaaacaagatakaattaagaaaattaattattaattaagaaaattaagaattaagaaaattagcaacaacaggttacaatcataaactaagaaaaaaacaagacctaatacaacagcaggacctaataaaacag

SEQ ID NO: 98060 - DNA, 574 bp, Homo sapiens
ggctgttgaatggagcagctatacatggtggctccatgtggtctgcacttcctcacggtatagtggctaggttccaaaggtgaacatcctgactcagaaagaaagccaaattgaagagaattatgttttacgagttgccttagagtttatattccatcacttctaccatactctaccagtcggtttagttacaagtctcaattcagtttaataaagagagagcttggaatccaggaaatatttggaggattgccaataaaattgcaagaagagcatgagaaatgagacattatcatgtgacaatacgtgaaaaatacagwccagcagatccgacaaaagagggaaaagatagagcaaagggcaagcagcgttcctttgaaaagatgcgatgtgaggttgtttgcctcatttctgtgcacatctctttggctgaagtgtagtgaaatctctaaacctagttgacacagaccagaaaaaaccctggaggaaggctagttattattaatagaaagacagacagcagtatcttttataatctgcacacccttcttcctcaagttagaacatgtctacc

SEQ ID NO: 98061 - DNA, 574 bp, Homo sapiens
ggctgttgaatggagcagctatacatggtggctccatgtggtctgcacttcctcacggtatagtggctaggttccaaaggtgaacatcctgactcagaaagaaagccaaattgaagagaattatgttttacgagttgccttagagtttatattccatcacttctaccatactctaccagtcggtttagttacaagtctcaattcagtttaataaagagagagcttggaatccaggaaatatttggaggattgccaataaaattgcaagaagagcatgagaaatgagacattatcatgtgacaatacgtgaaaaatacagtccagyagatccgacaaaagagggaaaagatagagcaaagggcaagcagcgttcctttgaaaagatgcgatgtgaggttgtttgcctcatttctgtgcacatctctttggctgaagtgtagtgaaatctctaaacctagttgacacagaccagaaaaaaccctggaggaaggctagttattattaatagaaagacagacagcagtatcttttataatctgcacacccttcttcctcaagttagaacatgtctacc

SEQ ID NO: 98062 - DNA, 619 bp, Homo sapiens
gctattggtaaccattaagtgatgccttgcttttgcttgtgaatataacctgcaagacctatttcaaaagcaagaattctagaagcaggataataaaacaggaattayatcattcagtggatgagtctttgttttgaaacattagccagataccatgtggtcaccaggcagattcggtgaacaagcatatcaaaatgacacattcaggcctataaagggctagtagaagattttgatactaaccactcctttctgtacatgaagatcaagtcagaatatgtttgtttttctctttgtctcatttttaaccttctattgtcactctactgcagatagcaacaatatatatatcagagaattatcagttaatgaaccagtaccaaaagcattctaactatttattaaaaatgatatgaccttattattaatacattgaaaaaaactaaaaaatatatttaatttttaaaatctggaaaatttctacattacatctttactctctctctatatatatgtatatgtattttaaaacatatatccatatagcaaacatatatttcacttcataaatctaggaatttggaacataacccaaaaagcactggcttattatacaaat

SEQ ID NO: 98063 - DNA, 619 bp, Homo sapiens
gctattggtaaccattaagtgatgccttgcttttgcttgtgaatataacctgcaagacctatttcaaaagcaagaattctagaagcaggataataaaacaggaattatatcattcagtggatgagtctttgttttgaaacattagccagataccatgtggtcaccaggcagattcggtgaacaagcatatcaaaatgacacattcaggcctataaagggctagtagaagattttgatactaaccactcctttctgtacatgaagatcaagtcagaatatgtttgtttttctctttgtctcatttttaaccttctattgtcactctactgcaratagcaacaatatatatatcagagaattatcagttaatgaaccagtaccaaaagcattctaactatttattaaaaatgatatgaccttattattaatacattgaaaaaaactaaaaaatatatttaatttttaaaatctggaaaatttctacattacatctttactctctctctatatatatgtatatgtattttaaaacatatatccatatagcaaacatatatttcacttcataaatctaggaatttggaacataacccaaaaagcactggcttattatacaaat

SEQ ID NO: 98064 - DNA, 619 bp, Homo sapiens
gctattggtaaccattaagtgatgccttgcttttgcttgtgaatataacctgcaagacctatttcaaaagcaagaattctagaagcaggataataaaacaggaattatatcattcagtggatgagtctttgttttgaaacattagccagataccatgtggtcaccaggcagattcggtgaacaagcatatcaaaatgacacattcaggcctataaagggctagtagaagattttgatactaaccactcctttctgtacatgaagatcaagtcagaatatgtttgtttttctctttgtctcatttttaaccttctattgtcactctactgcagatagcaacaatatatatatcagagaattatcagttaatgaaccagtaccaaaagcattctaactatttattaaaaatgatatgaccttattattaatacattgaaaaaaactaaaaaatatatttaatttttaaaatctggaaaatttctacattacatctttactctctctctatatatatgtatatgtattttaaaacatatatccatatagmaaacatatatttcacttcataaatctaggaatttggaacataacccaaaaagcactggcttattatacaaat

SEQ ID NO: 98065 - DNA, 569 bp, Homo sapiens
tgccaaatggaagttggaatggcttggttctttgctgctgccattgcaaagagatcatacaacctaccagggcacatttatggagcatgagcwgaaaggattaggggcttctctgccaccattgctgatgataaatcagaccatcctctgagtttggggtgagagtttgggattccctgctaggtccttgttgggattccctttttccaggcctttggcctagaaagcagataactccaaagataagatatatagacaccgtcacaaactgtgtgatcttacaaagattgctgattttcactaagatttagtttcagtgtctactaaacagtgaaataatagcaccttccttataaggccattatcaagattcaaaccagcattacaagaaatgccaaagagagttctaaatattgaaacaaaacctcaaaatacaccaaaggagaacctctttaaagcataaatttcacatggtgtataaaacaacacaatggaaaaaaacaaggtattcaggcaaaaactagcacaatgaatagaataatacctcacatctcaacactaacattgac

SEQ ID NO: 98066 - DNA, 569 bp, Homo sapiens
tgccaaatggaagttggaatggcttggttctttgctgctgccattgcaaagagatcatacaacctaccagggcacatttatggagcatgagctgaaaggattaggggcttctctgccaccattgctgatgataaatcagaccatcctctgagtttggggtgagagtttgggattccctgctaggtccttgttgggattccctttttccaggcctttggcctagaaagcagataactccaaagataagatatatagacaccgtcacaaactgtgtgatcttacaaagattgctgattttcactaagatttagtttcagtgtctactaaacagtgaaataatagcaccttccttataaggccattatcaagattcaaaccagcattayaagaaatgccaaagagagttctaaatattgaaacaaaacctcaaaatacaccaaaggagaacctctttaaagcataaatttcacatggtgtataaaacaacacaatggaaaaaaacaaggtattcaggcaaaaactagcacaatgaatagaataatacctcacatctcaacactaacattgac

SEQ ID NO: 98067 - DNA, 613 bp, Homo sapiens
taatattcatttttaaagaatttttaaaaatataaataaaaaattaatgaaataaaaatagaattgtggaaaatctctcaaaaattatcagatgtgataagattgctgattatatcagtgattacatgtaattgatatttaatgacattactaaacatgtaagatgtctggatgtattggcttatagatatatttggttggttggtgcaaaggtaattgcggcttttgtcattacttttaatgacaaaaaaacgcagttagtcttgtaccaacctaataaaaccataaccattagaatgcactgaagtcttgatataagtctggctaagataaaagtgaataatactaagatcatataaaaaacctgcagaagacactaacctatgaggagtactatttatgtcaaaataacagacattcagcagtaacttgataatttcaaagtcaaaggcatatttataaatttaaaaatttgcatactctctctaaaattaagggaaagttttattatttaagaaagattattttataaagtgatttctttggaytatgcctgtacattaataatattcagctttgtgaagtactgtacatatcaactacttggatgtca

SEQ ID NO: 98068 - DNA, 603 bp, Homo sapiens
agaagtttgtttgaacgtacacagtcaaaggagactaaagaagaaaagactgaaaaagaatgaaacacacctacatgatccagaaaataggcttaaaagggcaagcataagagttattggtctttaagaggaggtaaagagagagagagagagatctgggtagaaagtttattcaaatggataatcatggagaacttccccaaccgagggaaayatatcaatatttgagtacaacaaggttatagaataacaagtagattaaaccaaataagactacctcaaaactttaataatcaaatgcccaaagtccaaagataaagaaaggatcctacaaccagcaagagaaaagaaacaaataacgtacaagagagctccagtacatctgacagcagacttttcagtggaaaccttaaaggctagaagagagtggtatgacatatttaaaaatctgatggaaaaaaaaataaaactcttatcctagaatagtatatccagtgaaaatagccttcaaacgtgaaggagaaataaagactttcccaagcaagcaaaaactaagggatttcatcaacactagaactgtcctacaagaaatactaaacaaaa

SEQ ID NO: 98069 - DNA, 603 bp, Homo sapiens
agaagtttgtttgaacgtacacagtcaaaggagactaaagaagaaaagactgaaaaagaatgaaacacacctacatgatccagaaaataggcttaaaagggcaagcataagagttattggtctttaagaggaggtaaagagagagagagagagatctgggtagaaagtttattcaaatggataatcatggagaacttccccaaccgagggaaacatatcaatatttgagtacaacaaggttatagaataacaagtagattaaaccaaataagactacctcaaaactttaataatcaaatgcccaaagtccaargataaagaaaggatcctacaaccagcaagagaaaagaaacaaataacgtacaagagagctccagtacatctgacagcagacttttcagtggaaaccttaaaggctagaagagagtggtatgacatatttaaaaatctgatggaaaaaaaaataaaactcttatcctagaatagtatatccagtgaaaatagccttcaaacgtgaaggagaaataaagactttcccaagcaagcaaaaactaagggatttcatcaacactagaactgtcctacaagaaatactaaacaaaa

SEQ ID NO: 98070 - DNA, 564 bp, Homo sapiens
acagttctttggccagtctcccagcatccacccattgtctatttagtcatgagataaggtgcccatggaattggcatggaygggaacaaaagaactcctctccatttcaggagttgtgagacaaggaggggctgtggttctgtctttctggagatatggggcatcgtctccatggaagtagaagctcccagaaagtaaatcaccattcatgggagttaaaactagtgcaaatgacccatgcagcatattcacaaacactgacactcaaaagattggaatcgttttcaaaaacgtgcccgagctcagagttgacagatgcccatagaatggaattgaatcaagaccaaccatggaaatgaaactagcatttgccgaggacttgctacttgccaggcatttgacacataccctcactgaatcgcggcagtgcctagaaaatcaggcattatcctcacttacagataaggatcctggatttcagagaggttaggtggcctgcctatgtacactcagtcggaaagcagaagagtccggtctagaacccagggctccatgtgacagaaa

SEQ ID NO: 98071 - DNA, 564 bp, Homo sapiens
acagttctttggccagtctcccagcatccacccattgtctatttagtcatgagataaggtgcccatggaattggcatggatgggaacaaaagaactcctctccatttcaggagttgtgagacaaggaggggctgtggttctgtctttctggagatatggggcatcgtctccatggaagtagaagctcccagaaagtaaatcaccattcatgggagttaaaactagtgcaaatgacccatgcrgcatattcacaaacactgacactcaaaagattggaatcgttttcaaaaacgtgcccgagctcagagttgacagatgcccatagaatggaattgaatcaagaccaaccatggaaatgaaactagcatttgccgaggacttgctacttgccaggcatttgacacataccctcactgaatcgcggcagtgcctagaaaatcaggcattatcctcacttacagataaggatcctggatttcagagaggttaggtggcctgcctatgtacactcagtcggaaagcagaagagtccggtctagaacccagggctccatgtgacagaaa

SEQ ID NO: 98072 - DNA, 491 bp, Homo sapiens
caattttcttatttattttggtcacagaaaatgtggtcatattaaaatgtgcatctttttgagtgaatagaagatattcatacttwcaagctagaagagatttctgaaaaatgttgggctaattgttgttaagccaaacaaaaacgtttccttcaactgtggtttacttgataccttgatacatcaaacaaaaaaatattgggaagtaagataaagtgatgtcagtgatagtgatgatgaaagatctgtggcaacgtgtgctgatttttctcttcattcatgattgttagcctcaccaactgttagcatctgtggagtccagtttgagagcaagtttcttttacagaggatgacactaaacaggtcactgtaacttaaaggattacaatctaaggactgtgtcagataaatctttattttcctcaaagtactcaatcatttccgtgttcaataaacatgacaaataaatgcttacttggaattgagttact

SEQ ID NO: 98073 - DNA, 622 bp, Homo sapiens
agagtgaccatatgtcagatttaacagagttcaaagtagccattaacatatatttaaaaaggcataattaaatatgtaaatgaagatgccataacaacataacatcaagtagagaatatcaataaaaagacagaaattattaaaaaggaagcaaatggaaattgtgcagtaggaaattaccataaccaaaattttaaattcactagagagactcaaaagtagatttaaattggcagaagaaagaattactgaaagtgaagatcagtagagaatcaaagaacagcagttaaaaaaaaataaagaaaaatgagcagagcctcagtgaaatatgggacaccattaagtgtcatatatgyataatagtaatgagagaagaaaaggagacagagaatggagaaaaaaatgaacaaataattcctgtaaacttcccaaatttattgagaaacactagcctgtatatcctaaaacttccccaacaaactctaagtaggataaacacaaagagactcacagacatatcatatctaaaatgctaaaagccaaaaacaagaacattttgagaccagcgggaggtgaacaaacaaacaaacaaaaactaatcaccagggaaccccaataaaaa

SEQ ID NO: 98074 - DNA, 568 bp, Homo sapiens
ggtctattagtgcagggaggcaagggggaaagggctggaaaactactgtttgggtactatattcactcactacctgggtgtcaggatcatttttaccccaaaccttagtgtcatgcaatatactcctgtagcaaatctacacacgtacttcctgaacctaaaagttgaaattatttttcaaaagagttggaaaaattttttaaataaaaataaatttaaaacagctgtcacaatcaaatatcataaaccaatccatcaatcaagcaagcaagcaatcaagcaggtgtggccagagaacttaaagctaagaaactgccaagtgtcaktcactgcttctactaaaatgaagtgataattgcagataattttatagatcccggacctacaaggccatgaaacaatgcaccacggcttataattaaacaaggtggaggaaaggtcattttaagcagcagggagaatctatttgctaagaatacatagtacagtttccttcttctctatacggagacatctgaaataccgcttaaaaacaggagctagcctgagcctatttcctgctcctctc

SEQ ID NO: 98075 - DNA, 568 bp, Homo sapiens
ggtctattagtgcagggaggcaagggggaaagggctggaaaactactgtttgggtactatattcactcactacctgggtgtcaggatcatttttaccccaaaccttagtgtcatgcaatatactcctgtagcaaatctacacacgtacttcctgaacctaaaagttgaaattatttttcaaaagagttggaaaaattttttaaataaaaataaatttaaaacagctgtcacaatcaaatatcataaaccaatccatcaatcaagcaagcaagcaatcaagcaggtgtggccagagaacttaaagctaagaaactgccaagtgtcagtcactgcttctactaaaatgaagtgataattgcagataattttatagatcccggacctacaaggccatgaaacaatgcaccacggcttataattaaacaaggtggaggaaaggtcattttaagcagcagggagaatctatttgctaagaatacatagtacagtttccttcttctctatacggagacatctgaaataccrcttaaaaacaggagctagcctgagcctatttcctgctcctctc

SEQ ID NO: 98076 - DNA, 562 bp, Homo sapiens
aataaatcctatatttcaacagttgccatatatttttctaatcctccaagaggagagttgcaaaaacttatcttaaatactatttttttaaaggaggtgctccatctactaacttcttcaacttaaatcagacatcaaatgtaaatgtttccagaccagcccttacacagtactattggataacaaattcgaccttaattgagggtagttaattctgtcctcaattttattctgcaacttgctaayggaaaaaattatgatttatgcaaatatattattggccttaaaaataaaagaataaaacacactataaagaaatcaagtcaaagttcataaatccattattttaatacaaggtcattacatgaatcagttcaataagatctagatctaataatggaaagtttaactgattcaaagtctccaattcagattcaaaagtacataatttactccatgtaaaatccacagtataaagaaaaattatggatttcagaacataaagaacactaattcttgattcaaatcaatgtactctgtctcctaaccaaataatgttttt

SEQ ID NO: 98077 - DNA, 613 bp, Homo sapiens
ctgaaattttccaaaatttagcctagaataaatcctatatttcaacagttgccatatatttttctaatcctccaagaggagagttgcaaaaacttatcttaaatactatttttttaaaggaggtgctccatctactaacttcttcaacttaaatcagacatcaaatgtaaatgtttccagaccagcccttacacagtactattggataacaaattcgaccttaattgagggtagttaattctgtcctcaattttattctgcaacttgctaatggaaaaaattatgatttatgcaaatatattattggccttaaaaataaaagaataaaacacactataaagaaatcaagtcaaagttcataaatccattattttaatacaaggtcattacatgaatcagttcaataagatctagatctaataatggaaagtttaactgattcaaagtctccaattcagattcaaaagtacataatttactccatgtaaaatccayagtataaagaaaaattatggatttcagaacataaagaacactaattcttgattcaaatcaatgtactctgtctcctaaccaaataatgtttttgcttaattatataacagcattttaa

SEQ ID NO: 98078 - DNA, 561 bp, Homo sapiens
agtatttctggagagaatgaagaggtcactcctaggtggctccacagactcctccgcctaccctggccacccctagaatcactgatgaacacagcctgaatccttgacctgaccgtaggctgggtgagggcaggaatcctgtcttatccaactttgtaccctcaggcatggggcacataataggtccttagagagtgtacttgtcastgtaatatccaatgaagaaactgaaaatttctcccactagagtggaagcctgaggaatgagtcagtctattttcctcagcactacagcacctagtgctaccaggggtgggggaatagggagtgtcatcacctcaacaagggctggagatggggattccaggaagcaggcacacccatacgcagatgtcctttactttgctctctgtggtaggcagaataatggttccccaaagatgtccacatgctgaccccagtaacctgttacctagcaaaagggagtttgctattgggattaagttacaatcttgagatgaagagaccatcttgggttatccaggtggacccaatgcaatc

SEQ ID NO: 98079 - DNA, 554 bp, Homo sapiens
agagaccggcagtaatgactaagacaaataacttcttaagttgtttctcctgagttactgtggtatataacacctatgaagttctttgaaaactacagcaatgaacaaaagtagcttactgatttaatttatggctttgtagattaggtatttgaaacaggcaaaaataatgagtgtaaatttaattgctatttgacagtcaaataaaagaacttacacagctcagccacaattagtttttgttacyccccacgaatcatataactcaattaaattgttgaaaattaacgttatttaggcttctttataagaaagttttaatcaaatcaaagcaagactgttatcatgagtcaacttctaaaacataaaattagctttgatatatagagaaactaccataaatcattctattaccatattttatataatcttaaaaatctagaaaggatctaaaagtctactctagtagtttctaggcatttttagaacctaataaaaattaaagatatgccagaaaaacacatttattccataaatgaaaatgtatgtaattt

SEQ ID NO: 98080 - DNA, 554 bp, Homo sapiens
agagaccggcagtaatgactaagacaaataacttcttaagttgtttctcctgagttactgtggtatataacacctatgaagttctttgaaaactacagcaatgaacaaaagtagcttactgatttaatttatggctttgtagattaggtatttgaaacaggcaaaaataatgagtgtaaatttaattgctatttgacagtcaaataaaagaacttacacagctcagccacaattagtttttgttaccccccacgaatcatataactcaattaaattgttgaaaattaacgttatttaggcttctttataagaaagttttaatcaaatcaaagcaagactgttatcatgagtcaacttctaaaacataaaattagctttgatatatagagaaactaccataaatcattctattaccatattttatataatcttaaaaatctagaaaggatctaaaagtctactmtagtagtttctaggcatttttagaacctaataaaaattaaagatatgccagaaaaacacatttattccataaatgaaaatgtatgtaattt

SEQ ID NO: 98081 - DNA, 554 bp, Homo sapiens
agagaccggcagtaatgactaagacaaataacttcttaagttgtttctcctgagttactgtggtatataacacctatgaagttctttgaaaactacagcaatgaacaaaagtagcttactgatttaatttatggctttgtagattaggtatttgaaacaggcaaaaataatgagtgtaaatttaattgctatttgacagtcaaataaaagaacttacacagctcagccacaattagtttttgttaccccccacgaatcatataactcaattaaattgttgaaaattaacgttatttaggcttctttataagaaagttttaatcaaatcaaagcaagactgttatcatgagtcaacttctaaaacataaaattagctttgatatatagagaaactaccataaatcattctattaccatattttatataatcttaaaaatctagaaaggatctaaaagtctactctagtagtttctaggcatttttagaayctaataaaaattaaagatatgccagaaaaacacatttattccataaatgaaaatgtatgtaattt

SEQ ID NO: 98082 - DNA, 592 bp, Homo sapiens
gtttgaagtgcatgggctcaagaaccaaaacgcctgagtttgagtcctgatgacmacactactggctggctagcttaagtaaaataattcatcctgcctcgttttcctcatctttaaaatgaggattaagggtacctgtatcacatgtttgttgtaaggcttgagttactacatttacaagaactcagaacagtactgttttggtccattttgcattgctataaaggaatatctaaaatttgataatttataaagaaaatatgtttatttggctagcagttctgcaagctgtacaagcatggtgtcagcatccgcttggcttctgatgaggcctcaggaagctcacaatcatgatagaagacaaagggggagccaatgtatcacatggtgagagcgagcaaaagagagttaggaggaggtggcaggctcctttaaacaaccagctctcacatgaaccaacaatgagaactcacttattaccacaaggagggcactatgtcattcatgagggatccaccaccatgacccaaacacctcccaccaggtgccacctccaacattgggatcacattttgacatgagatttggagcg

SEQ ID NO: 98083 - DNA, 592 bp, Homo sapiens
gtttgaagtgcatgggctcaagaaccaaaacgcctgagtttgagtcctgatgacaacactactggctggctagcttaagtaaaataattcatcctgcctcgttttcctcatctttaaaatgaggattaagggtacctgtatcacatgtttgttgtaaggcttgagttastacatttacaagaactcagaacagtactgttttggtccattttgcattgctataaaggaatatctaaaatttgataatttataaagaaaatatgtttatttggctagcagttctgcaagctgtacaagcatggtgtcagcatccgcttggcttctgatgaggcctcaggaagctcacaatcatgatagaagacaaagggggagccaatgtatcacatggtgagagcgagcaaaagagagttaggaggaggtggcaggctcctttaaacaaccagctctcacatgaaccaacaatgagaactcacttattaccacaaggagggcactatgtcattcatgagggatccaccaccatgacccaaacacctcccaccaggtgccacctccaacattgggatcacattttgacatgagatttggagcg

SEQ ID NO: 98084 - DNA, 562 bp, Homo sapiens
atgtttccactctttccccttctctgtgccctatgtgtggaagagggcacatatatgggactaaacatgctggtggtgcatgtggagaaaaataccctgaaaatgttctcttttgaccaagctcctatctcttacgtggacagacaattcctcatgggtttctaacacaacttgctaatgcagggactgactgacttgttctggaccatcttttcaaggatatttgcatatagcacatagycaaagaagacagagtccccctccagaaaaatgagtgtttacttttgagtttaataaagataatgtctccctttagagaagaggtcaaagaagtgtactgcccatttttaaagaccttggtttcttaaatgcaaggttcctctcctgcagtgtaattcactacatgagtgggcatcacctagaccccctcatgttgctcaatgtgaactgaagctcaaggaaccagtacaaatgctgggtaataaactatctattgctgtggacattagttgctttcaaggaagaaatatttaatagttatgacagtaatactgaccaccaa

SEQ ID NO: 98085 - DNA, 562 bp, Homo sapiens
atgtttccactctttccccttctctgtgccctatgtgtggaagagggcacatatatgggactaaacatgctggtggtgcatgtggagaaaaataccctgaaaatgttctcttttgaccaagctcctatctcttacgtggacagacaattcctcatgggtttctaacacaacttgctaatgcagggactgactgacttgttctggaccatcttttcaaggatatttgcatatagcacatagtcaaagaagacagagtccccctccagaaaaatgagtgtttacttttgagtttaataaagataaygtctccctttagagaagaggtcaaagaagtgtactgcccatttttaaagaccttggtttcttaaatgcaaggttcctctcctgcagtgtaattcactacatgagtgggcatcacctagaccccctcatgttgctcaatgtgaactgaagctcaaggaaccagtacaaatgctgggtaataaactatctattgctgtggacattagttgctttcaaggaagaaatatttaatagttatgacagtaatactgaccaccaa

SEQ ID NO: 98086 - DNA, 619 bp, Homo sapiens
ggcctcttcagttcttaaaatggttctatttgggctacttgtgtgtgtgtgtgtttaayaaaagaggataaactactaatttgatacaaataagttctcttctactttaagaaacataggaaacagttctttactttcaaaagtaggtcactcttgtagcatattttagtacagtttgaataaattcctttcagttattatcaaagtatcctagtgttagaattcctgtgagatagcagactttctgaaataaattcatatgtgtcaaactggaactttctgtaataatatttttcagtcttttagaattaaatttaaaatgagtttctgtttcagtccctgaatgtagacatgtgccactgacgtgctgacaagttatctgatttacatggcattagaaagtttctttttaaaggcagtatattgttgaactttataggcatttcctattcttagaaatatgaagcaaagtgtcaactggtaaacagtaaaattcagttctcaaattgtgtggatggttcttctattaatgtgttagcaactctacagtaaaaatatcaaagtctttttataaggcttacacctttgaaacaaagttattcatttattacaacaaaat

SEQ ID NO: 98087 - DNA, 519 bp, Homo sapiens
tatgaattgagattgctttaacatgtatgattttccttgtccctgaaaaacttcttttaccatttcttgtaaagtaggtttactggtaaggaattcccccagtttttgttgctgtgagaaactctttatttcttcttcatgttcgaaggataattttgctggatttagaattctagattggtgatatttttcctctcaacacattaaatatttaaatcaactgtcttcaagtttgcatagtttctgatgagaagcccaacataattcttatccttgctccttgatagcgctgttctttttctctgtcttctttcaagatttaatctttgtctttggttttctgcaatttgaacatgataagcctatatgttgttgttgctgctrttttcatatttatcctgattgacattctctgagcttcctagatctgttgtttaatcaattttggaaaattctcagctattattacttcaaatatttctttattatacgttaagttctagggtacatgggcacaat

SEQ ID NO: 98088 - DNA, 481 bp, Homo sapiens
attgtacaacatgatgactatagttaataacaaagaaatgtattcttggaaattgctaagaaagcagattttaagtgttctcatcacaaaaaaatgacaagtatgtgaggtaatacatatgtcaattagctcaatttagtaatttcacgatgaatacatatctcaaaacatttggttgtacacaataaacatatataaattttagttgtatgcaataaacayatataatttttacctgacaattaaaaacaagtaaatgggagatttctgaacctattctggttcagggactgcctaataaaaataatgacaatgagtaaacaacaaagaaaaaaggttaagtgactcaagcttacaaagaattgaccttagaaatttcaattatacccatcgcccaaaagattaatcaaaggatgctgttgacaaatgattgtaatctgaattaaatatataagatggcaaaagtataactaatacctca

SEQ ID NO: 98089 - DNA, 481 bp, Homo sapiens
attgtacaacatgatgactatagttaataacaaagaaatgtattcttggaaattgctaagaaagcagattttaagtgttctcatcacaaaaaaatgacaagtatgtgaggtaatacatatgtcaattagctcaatttagtaatttcacgatgaatacatatctcaaaacatttggttgtacacaataaacatatataaattttagttgtatgcaataaacatatataatttttacctgacaattaaaaacaagtaaatgggagatttctgaacctattctggttcagggactgcctaataaaaataatgacaatgartaaacaacaaagaaaaaaggttaagtgactcaagcttacaaagaattgaccttagaaatttcaattatacccatcgcccaaaagattaatcaaaggatgctgttgacaaatgattgtaatctgaattaaatatataagatggcaaaagtataactaatacctca

SEQ ID NO: 98090 - DNA, 598 bp, Homo sapiens
gattgcaggactcattcaccattctttgcacagttttttgtttgtttgtttgttttctttttttttgagacggagtctcactctgtcgcccaggttggagtgcagtggcgcgattyggctcaccgcaagctccacccctcgggttcacgccattctcctgcctcagcgtctctagtagctgggactacaggcgcccgccaccacgcccggctaatttttctagttttttttaagtagagacggggtttcaccgtgttagttaggatggtctcgatctcctgaccttgtgatccccctgcctcggcctcccaaagtgctgggattacaggcgtgagccaccgcgcccggcctgcacacagtttgatggagcgggcactacacatcaggcactgactaggagctggatcctctgtagtgatgaacaaaacaaacaccactgccgccttgatggagcttgcaggattgcagtggagatggacagttactaagaaaaaaaaaaagtagaacatgggggtataatagagaaccccgagtgggagtgaggagatagagagcatgattatttatttagagtaatcaggtagggccagaagccccc

SEQ ID NO: 98091 - DNA, 598 bp, Homo sapiens
gattgcaggactcattcaccattctttgcacagttttttgtttgtttgtttgttttctttttttttgagacggagtctcactctgtcgcccaggttggagtgcagtggcgcgattcggctcaccgcaagctccacccctcgggttcacgccattctcctgcctcagcgtctctagtagctgggactacaggcgcccgccaccacgcccggctaatttttctagttttttttaagtagagacggggtttcaccgtgttagtyaggatggtctcgatctcctgaccttgtgatccccctgcctcggcctcccaaagtgctgggattacaggcgtgagccaccgcgcccggcctgcacacagtttgatggagcgggcactacacatcaggcactgactaggagctggatcctctgtagtgatgaacaaaacaaacaccactgccgccttgatggagcttgcaggattgcagtggagatggacagttactaagaaaaaaaaaaagtagaacatgggggtataatagagaaccccgagtgggagtgaggagatagagagcatgattatttatttagagtaatcaggtagggccagaagccccc

SEQ ID NO: 98092 - DNA, 595 bp, Homo sapiens
ttaattatgggtaaatagcagcacgaattatgagatctttgtacagttttagcatctatggtcttatatgctacaactagaaagccactgcacagaaagctagaaaacgtttgttaccattcaggcttaatcattgtcagccttaggtaaattgttcactcaaatatttatggtataactactatatatcaagcacttttctagtcttcacaaataataaaatgaaagtatcattcctgccctcaaggagytcagaatctaaatggagtaatttaaattttaatggaaaaacttatagtctgatgcaaaaatctacccagatctccagatctcaatttcctcaaggagaaaatgccatctagatgttttataaggctcttccagctccgtaaaagcttgctacccacagcaaacagcaaagtaaataaagcagatgcctcatccccatgcctttccatgcataactggttcagatttggcccatgctggaacgcagaccacttaccttcaaatgcaccttcattgcataggtctcaggaggctaggttttcaagccaccctgcaaggttatgacctagattttgaaccagataga

SEQ ID NO: 98093 - DNA, 595 bp, Homo sapiens
ttaattatgggtaaatagcagcacgaattatgagatctttgtacagttttagcatctatggtcttatatgctacaactagaaagccactgcacagaaagctagaaaacgtttgttaccattcaggcttaatcattgtcagccttaggtaaattgttcactcaaatatttatggtataactactatatatcaagcacttttctagtcttcacaaataataaaatgaaagtatcattcctgccctcaaggagttcagaatctaaayggagtaatttaaattttaatggaaaaacttatagtctgatgcaaaaatctacccagatctccagatctcaatttcctcaaggagaaaatgccatctagatgttttataaggctcttccagctccgtaaaagcttgctacccacagcaaacagcaaagtaaataaagcagatgcctcatccccatgcctttccatgcataactggttcagatttggcccatgctggaacgcagaccacttaccttcaaatgcaccttcattgcataggtctcaggaggctaggttttcaagccaccctgcaaggttatgacctagattttgaaccagataga

SEQ ID NO: 98094 - DNA, 597 bp, Homo sapiens
ctcttataatgaaaaatagcagatcctgacccacccaactctcaacttcactccctaccataaatcactgttaactcttttagctatattttctggaagttatctccttttttctgtagaattaattatatgrctagctctcaaataatcagttttgggcattaactattgacttgctattatgatagaataaaaccgagtcttcttataccactgatctctcgttcccatcctactaatatcactatatcattattttttgttaaattagtaatagtttgcaaaattgcctatgtaaatattattcactacaaaaccaagtaataccaaagtattttatgaaagaactacattttttcttgtactccttatagctcttttcctgaatttaagttgccttatttcttgatctttgtaacttcaatactcacatctttattttattctccaagttctccatcatagtctaccactgagttgttctcctcacctgctaaatcatatgttctatcaagtcccctttatttccagaccatctccttcctggagcccccaatcctgctgctccaacctgaactaatgcctgctgtagagggc

SEQ ID NO: 98095 - DNA, 592 bp, Homo sapiens
gagctgggatgaaaggtgctgggtaagtacagtattttattataaacagtaataataggtcttatgttcctgatgtctggggaacaaaccattccccttttggccttcattaagacttggacccaaaggtgctaattcgtacaaaatatatgtactgaatggcacctagagcctaaaggagttaattcatctccaaaaggtgacgaatttcccctctgcctttcccacactaggctgctgtccatygttactagtgtaggataactgcacccttctcacagggctagtgggccccatttgcttcctccaatttatttaatagacgacaaaggatccagaagtgctattggaataattacctttgattttaatatttcctcttgactcatttgtggaggaagtcccaaactaataatgattacctgagacagtttataattgctatctataagtaagtgttatttcctatatcattgtcaacatatatatttttttcacaatgcacagaataagtctattctccttaggttccattctttaaaaaaaatcttctttcttcttagaccctctccaataccttttgcattttgat

SEQ ID NO: 98096 - DNA, 592 bp, Homo sapiens
gagctgggatgaaaggtgctgggtaagtacagtattttattataaacagtaataataggtcttatgttcctgatgtctggggaacaaaccattccccttttggccttcattaagacttggacccaaaggtgctaattcgtacaaaatatatgtactgaatggcacctagagcctaaaggagttaattcatctccaaaaggtgacgaatttcccctctgcctttcccacactaggctgctgtccattgttactagtgtaggataactgcacccttctcacagggctagtgggccccatttgcttcctccaatttatttaatagacgayaaaggatccagaagtgctattggaataattacctttgattttaatatttcctcttgactcatttgtggaggaagtcccaaactaataatgattacctgagacagtttataattgctatctataagtaagtgttatttcctatatcattgtcaacatatatatttttttcacaatgcacagaataagtctattctccttaggttccattctttaaaaaaaatcttctttcttcttagaccctctccaataccttttgcattttgat

SEQ ID NO: 98097 - DNA, 556 bp, Homo sapiens
ggggaaccacaacaaccacatggtcagtctaamaacttagtgtctcagtttcctaaccatcttgcttacagtaactttctccaaagcctcacattacctcatatttcctgggttacaccttgaaccttatcatcatctggaagggttcctgtttcaaaagcaccagtttaagcaccccactctctggctataacctctcttctagtttgcttgagatggccatttgagctatccacaacttcattgcccattctactttgttccaatctgtcggccctttttactttttaactcccttcacatctctccttatcgaatttagattctatggtctgtcatatttcagtaacatttttagcaattccataattatgcattaccaatatacaaatatctccacaattatcctccttcttccttcctgtgacagtgacagaactgactttgggattgcataaagccaatccctccattatgctttgaatgctgtgcccatccaccttatcagcaatctcaagaactattgatgatatcttttctctctttagtgctcaat

SEQ ID NO: 98098 - DNA, 609 bp, Homo sapiens
tgctgacagatagatgtcctgcagagaatattcttgagcaaatgagctatgaggataacaaaatgaaatagatttgagatttcagaggtgatgcaatttctggatttaacaagatccaaggcatgtccacagaagcgtggacagcaccaaaaaaaatttaaaaagagagagtgaaaattaggaaaccatgctgttaaatgaaaaatgaaaactttgtataaggtatattgataatcttgtgactcttacatcagcagtgaccatgatgacacaaacgatcagctgtgtcctgttttgtccatttgacacaatcctgtaaccaaacagcaatctctctacagatcttcccagtaaccaccaccggaaaacaaatacagtcatgtaccacataacaaattttcagtccacgatggaccgcatatatgacagtggacccataaaattattatggagctgaagaattcctatcacctagtgacatcatagccatcctaatatagtacaacgcattactcacgtgtttgtgatgatgccggtgtaaacaaacctactgtgcygtcagtcatataaaagtgtagcacatgcaattatataccccatatagtactg

SEQ ID NO: 98099 - DNA, 631 bp, Homo sapiens
tgtgtctttgtttgggttgctacaacaaattaccatagactggtggcttaaacagtaaacatttatctatcacacctctggaggctaagaagtccaagatcaaggtgtcaacagacctggtgtctggtaagggcccattcctggtttgtagacggctatcttctcattacatcttctcacatgatagagaacagagacagatagcaaactcttgtgtctcttcttataagaatacaaatcccattcatgaggtctccaccctcatgacctaattacctcccaaaggccccaactactaatactgtcacattgagggttaggatttcaatatatgaattttgaggagacacaaataatttagtatttgtgaagtgtttaaaaatagtacctggcatataacaagtgctgtaaaggaaattgttcaagagattttttaaaatcatgatttcctgcatgcttcccatcaaaacatcctgaaaaataacattatatagaaacactccyagccagaatggaaaagaaaatgaaagaaaaatacttccacttctggaagaaagaaagaggaattcattaaagggatatagtcggtagattaaatatgagagtatgagactttcatgggatgtgggga

SEQ ID NO: 98100 - DNA, 489 bp, Homo sapiens
atatggtcaatgcttgataaatacttgtcaaattaatgttccagatcagtcggtctaagacacatgctgaggaatagtgggaaacaggctgggtaaagtaggatggagtcagattgtgaggggccagaagcttttctcttttycattcttttgggtttttttttgtttgtttgtttgtttttgtaggtatggggtctcaccatgttgcgtaggctaatctcaaacttctttcgggctcaaaatgtcctcctgcctcagcctctcaaagggctgggattacaggcgtaagccactgcacctggctcagaggattttctacccaattggttagacctgtgctgtacatacagaagccactggccccacatgcagctattgagcacttgaaatgtagctaaggactgaggaatggaattttacattttatttaattttaattaatttacatgttctaacttgggtatgtgaatctactttttcaactataat

SEQ ID NO: 98101 - DNA, 501 bp, Homo sapiens
accacccccatgatccagtcacctcctactaggtccctcccttgacacgtggggattcgagatgagatttgggtagcgacacagagccaaaccatatcagtggataaacaaaatgggtgaatatacaatggaatattattcagccttaaaaaggaatgcaattctgacacatgctgcaacatgatgaaccttgaaaacattgttaagtgaaataagccagatgctaaagatcacatattgtgattccacttacatgaaraacctagataagcaaatttatagaaccagaaagtatagtggttaccaggggctggagggaggagggaatgggtagttattttttaatgagtatagaatttctgttaggatgatgataaagttctggaaatgaatagtggtgacagttgcataacattgtgaatgtagttagtccactgaattatacactttaaaatggttaaaatggtaaattttatgttatatacattttaccacaatgaa

SEQ ID NO: 98102 - DNA, 543 bp, Homo sapiens
ccagatgtggtggctcacgcctgtaatcctagtgctttgggaggccagggtgggaggactgccagagcccaggaatttgagaccagcttgggcaacaaagtgagactccatctctacaaaaaataaaaatattagctgggcacagtggcatgctcctgcagtcccagctgcctgggaggctgaggcaggaagatcacttgtgcccaggagtttgaggttacaatgagctatgaccatgtcactgcacttcagcctgggcaacagagcaagaccatctttttttttttttaaaaaaaaaggtagaaataactcctgacaacagtaacatgaaagatgaggggtcacagctagaatcctctaaggtccctggtattgtttaggagaatagaaatactgactcaactgaaactgtcgtaagttaaaaatgcatggtaaacayctatgggtaaccactcaacagaatgaataacttttgaataagtacaataaaaaataatggttacaaaaattctacaaagcagtaaaggagaaaagaaggccaaa

SEQ ID NO: 98103 - DNA, 572 bp, Homo sapiens
aagtgtggtggcagaagcctataatctaagcactatgggaggccaaggcaggaggattgcttgagcccaggactttgagaccagcctgagcaacatagggaaaccacatctccacacacaaaaaaatcttaagttagccaggtgtgtatgcacacacctgtggtcccagctatttgggaggctgaggtgggagaactgcctaagcccagaaagtcaaggctgcagtgaaccgtgattgcactactgcactccagcctgggtgacagagtaagaccctgtctcaaaaaaaaagttgaaaaaggaagagataaaactcattcattatttattattgatgcaataatctmcctagaaaaacaaaaataagtcataaattcagaactgatcagaaatatcagcaaagatgatagaatcaagagaaattttaacttattaataatatttcactatattatcaataatctaacagaaaatataaataaaagctaacataccatgcacaacattaagaaagctataaaaatggctgggcatggtggctaatgtctgtaatgtcagcactttgggaaacc

SEQ ID NO: 98104 - DNA, 609 bp, Homo sapiens
cctgcctcagcctccccagtagctgggactacaggcgcccgccaccattcccggctaattttttgtattttttagtagagatggggtttcaccgtgttagccaggatggtctcgatctcctgacctcatggtctgcccaccttggcctcccaaagtgctgggattacaggcgtgagccactgtgcctggcccttttatattcttttaaaaagtatttactgtattttcctgtgatgtcatagtctttatagaaaatttatcattattttcagttgacatgattgtttacctaaaaatatccaaaggaaccaactgagaaaaacaatttttaagattagtggttaaaagttcttttatataaaaatcaatagccttccccartgttagctataatcacgtagaagatatagtgatgaagtattttttcaggtatttcagcaaaaattaaatacctaggaataaacttagatgtgcaggacttttatcaaggacaggacaaaattttgctgagtggaatgaaagatttgcattctatgttcctggatgagcagatttcatgttataaatatgttagttatcaccatgtcttcatattaatttgtaaatgta

SEQ ID NO: 98105 - DNA, 609 bp, Homo sapiens
cctgcctcagcctccccagtagctgggactacaggcgcccgccaccattcccggctaattttttgtattttttagtagagatggggtttcaccgtgttagccaggatggtctcgatctcctgacctcatggtctgcccaccttggcctcccaaagtgctgggattacaggcgtgagccactgtgcctggcccttttatattcttttaaaaagtatttactgtattttcctgtgatgtcatagtctttatagaaaatttatcattattttcagttgacatgattgtttacctaaaaatatccaaaggaaccaactgagaaaaacaatttttaagattagtggttaaaagttcttttatataaaaatcaatagccttccccagtgttagctataatcacrtagaagatatagtgatgaagtattttttcaggtatttcagcaaaaattaaatacctaggaataaacttagatgtgcaggacttttatcaaggacaggacaaaattttgctgagtggaatgaaagatttgcattctatgttcctggatgagcagatttcatgttataaatatgttagttatcaccatgtcttcatattaatttgtaaatgta

SEQ ID NO: 98106 - DNA, 609 bp, Homo sapiens
cctgcctcagcctccccagtagctgggactacaggcgcccgccaccattcccggctaattttttgtattttttagtagagatggggtttcaccgtgttagccaggatggtctcgatctcctgacctcatggtctgcccaccttggcctcccaaagtgctgggattacaggcgtgagccactgtgcctggcccttttatattcttttaaaaagtatttactgtattttcctgtgatgtcatagtctttatagaaaatttatcattattttcagttgacatgattgtttacctaaaaatatccaaaggaaccaactgagaaaaacaatttttaagattagtggttaaaagttcttttatataaaaatcaatagccttccccagtgttagctataatcacgtagaagatatagtgatgaagtattttttcaggtatttcagcaaaaattaaatrcctaggaataaacttagatgtgcaggacttttatcaaggacaggacaaaattttgctgagtggaatgaaagatttgcattctatgttcctggatgagcagatttcatgttataaatatgttagttatcaccatgtcttcatattaatttgtaaatgta

SEQ ID NO: 98107 - DNA, 434 bp, Homo sapiens
ggccctctagggcaatggtcacttgtagggtggcatctgtgtgcactggtcccacatccattgagaaggccagggtgttgcrggagctgaggctgccattgtggccatagggaacagccccaaccagcaggtcctgctgagagaaggctgtggctggctgagtggcttggagcaactgtccccagtgagggctgtctgtgacgtggtagtgggcctcatccctactgcagatgttgaggttggtgcccaggtggagctcggccatgttgatggtaccctggcctccttgaggaaccatgaggccggagccattggccacacagaggtaaggctccaaggcctgcacctccagcaccgtgatggcctggtgctgcccatcggacacctgcagcgggatccagccgtggtcagcctgagtgtgtgaacaggactcg

SEQ ID NO: 98108 - DNA, 434 bp, Homo sapiens
ggccctctagggcaatggtcacttgtagggtggcatctgtgtgcactggtcccacatccattgagaaggccagggtgttgcaggagctgaggctgccattgtggccatagrgaacagccccaaccagcaggtcctgctgagagaaggctgtggctggctgagtggcttggagcaactgtccccagtgagggctgtctgtgacgtggtagtgggcctcatccctactgcagatgttgaggttggtgcccaggtggagctcggccatgttgatggtaccctggcctccttgaggaaccatgaggccggagccattggccacacagaggtaaggctccaaggcctgcacctccagcaccgtgatggcctggtgctgcccatcggacacctgcagcgggatccagccgtggtcagcctgagtgtgtgaacaggactcg

SEQ ID NO: 98109 - DNA, 555 bp, Homo sapiens
caccactcagtctgaggctgaagacagggcctagaaggggctgagggtctgctgagcaggccaaagagggcctccccaggcagaaggccatgtctgggcttgcctgggattagtggttcttatgcagggcctgttctgtcccacastgggactcctcctcttttgagttgctgcttcctccaggcagtttccccaaattagcctccctgacttccaacccgatgccataatttctggtttatgccttttgcggtgataagagccaaatataactttaactttgcctgcagatgtccagggctggggggcagacaaacacaggttaaaaactgtgattcatccctgttgggtttccctcaaaccccaagaacaagcacaggctgatggccttgatggggtgatccagcaccgacctcacatgcactggtccctagccagcctgagccagctgccatctgctcgaggaagtagcttcagccattggaggagttggaggtttgtataccctcagggcagccagtcccacctggagggatatccaggaaagatcccgta

SEQ ID NO: 98110 - DNA, 555 bp, Homo sapiens
caccactcagtctgaggctgaagacagggcctagaaggggctgagggtctgctgagcaggccaaagagggcctccccaggcagaaggccatgtctgggcttgcctgggattagtggttcttatgcagggcctgttctgtcccacagtgggactcctcctcttttgagttgctgcttcctccaggcagtttccccaaattagcctccctgacttccaacccgatgccataatttctggtytatgccttttgcggtgataagagccaaatataactttaactttgcctgcagatgtccagggctggggggcagacaaacacaggttaaaaactgtgattcatccctgttgggtttccctcaaaccccaagaacaagcacaggctgatggccttgatggggtgatccagcaccgacctcacatgcactggtccctagccagcctgagccagctgccatctgctcgaggaagtagcttcagccattggaggagttggaggtttgtataccctcagggcagccagtcccacctggagggatatccaggaaagatcccgta

SEQ ID NO: 98111 - DNA, 587 bp, Homo sapiens
caacctctttacctgtcactgcttaagaaaaggattttttggtcttatttagaaataactttatctatttttctccataattccactgagaccaatgtgtgcctctatctcaagcaccagcaagcaaaactgcctgccagtatgttcagtttttgtatctttccaaatgtagggcacagctatcttttgatatcataattttttgaaaactgatgcacaaacttctycttgaaagttcagccaggtgcggtagctcacacctgtaatcccagcactttgggaggctgaggcaggcagatcacgaggtcaggaattcaagaccagcctggccaacatggtgaaacctgtctctactaaagctacaaaaattagccaggtgcggtggcaggtgcctgtaatcccagctactcaggaggctgaggcaggagaattgcttgaacctgggcagcagaggttccagtgagccaagattgcaccactgtactccagcttgggtgatagagtgagactccatctcaaaataaaaaataaaaaaaagaatttcagatatacagcagttgtaattcttctgaaggctgcttatggga

SEQ ID NO: 98112 - DNA, 587 bp, Homo sapiens
caacctctttacctgtcactgcttaagaaaaggattttttggtcttatttagaaataactttatctatttttctccataattccactgagaccaatgtgtgcctctatctcaagcaccagcaagcaaaactgcctgccagtatgttcagtttttgtatctttccaaatgtagggcacagctatcttttgatatcataattttttgaaaactgatgcacaaacttcttcttgaaagttcagccaggtgcggtagctcacacctgtaatcccagcactttgggaggctgaggcaggcagatcacgaggtcaggaattcaagaccagcctggccaacatggtgaaacctgtctctactaaagctacaaaaattagccaggtgyggtggcaggtgcctgtaatcccagctactcaggaggctgaggcaggagaattgcttgaacctgggcagcagaggttccagtgagccaagattgcaccactgtactccagcttgggtgatagagtgagactccatctcaaaataaaaaataaaaaaaagaatttcagatatacagcagttgtaattcttctgaaggctgcttatggga

SEQ ID NO: 98113 - DNA, 550 bp, Homo sapiens
tttggcatgagtgatgtgagttcctgtaaagctacttatgttcttccagtcttctcttttcagcagaattgaaastatgtggtcccatggcttggtggggcatggtgctttgccaaatttctaacttggtggactaaggagaggacactgtgactctatccccatcccattttttaagatatagaaaagttgcaagaacagtgaccccctaaatatacacacctagagtctaattcacattttgccatctttgcttaactacacacctcccccaaccatccagccatccctgtgtccatccataagtccagctgatggttttatgcactttaaagtaaattacagatgttggtacaggtcattcctaaacattttagtacacattttattattttgacttcaatatgtgcttatggtttccttaagataaaatttatatacatatagtgaaatgtgcaaagatggaaagtaccatttgcataatgttttgacagatgcatgcacctgtgtaaccctagtccttatcaagacagagaatattactgtcacc

SEQ ID NO: 98114 - DNA, 495 bp, Homo sapiens
taagaacttgtgtttgtacaatctataatttacaagctataggaaactgggagcagaatgaaaaatgtctgatttcaaccatcaatggcaatatgctataaaaatctctaggaagtgttaaaacacaggattgacatctgctctgtgacatgaacactccatatgaacatttataaagttaaaattaactgtgagagttactctgccaastagaatttacaggttcacatataacctacatactcaatgatacatatttggacatgttaatttagttttaattcactccatgtttgtcttgaagatcaagtgaatttaggacagatagtatgattgctaagcagcaggaaaattcactttatttctttggtcataaattaacttgaaacctttcagcttgagtttcttgttatttctttgtttgtttgttttctttttccagacctgttatttttgttataggtacagactaagtagagagttagattaagtaga

SEQ ID NO: 98115 - DNA, 469 bp, Homo sapiens
ttgtcaaagatcagttggctattagtatttggctttatttctgggttccctattctgttttaattgtctatgtgcctgtttttataccagtaccttgctgttttggtaactatagccttatagtatagtttgaagtcacataatgtcatgcctccagatttgttctttttacttagtcttgctgttgtcatacaggctttttttgttccatattaactttaggatttttttttttagttctgtgaagaatgctggtggtattttgatgggaactgcattgaatttgggkattacttttggcagtatgtttattttcacaatattgattgtacccatccatgagtgtgggatgtgtttctatttgtttgtgttgtctatgatttctttcagcagtgctttgtagttttcctcgtagaggtctttcccgcctgggttaggtatatttctaagtatttatttatttttttta

SEQ ID NO: 98116 - DNA, 469 bp, Homo sapiens
ttgtcaaagatcagttggctattagtatttggctttatttctgggttccctattctgttttaattgtctatgtgcctgtttttataccagtaccttgctgttttggtaactatagccttatagtatagtttgaagtcacataatgtcatgcctccagatttgttctttttacttagtcttgctgttgtcatacaggctttttttgttccatattaactttaggatttttttttttagttctgtgaagaatgctggtggtattttgatgggaactgcattgaatttggggattactttyggcagtatgtttattttcacaatattgattgtacccatccatgagtgtgggatgtgtttctatttgtttgtgttgtctatgatttctttcagcagtgctttgtagttttcctcgtagaggtctttcccgcctgggttaggtatatttctaagtatttatttatttttttta

SEQ ID NO: 98117 - DNA, 469 bp, Homo sapiens
ttgtcaaagatcagttggctattagtatttggctttatttctgggttccctattctgttttaattgtctatgtgcctgtttttataccagtaccttgctgttttggtaactatagccttatagtatagtttgaagtcacataatgtcatgcctccagatttgttctttttacttagtcttgctgttgtcatacaggctttttttgttccatattaactttaggatttttttttttagttctgtgaagaatgctggtggtattttgatgggaactgcattgaatttggggattacttttggcagtatgtttattttcacaatattgattgtacccatccatragtgtgggatgtgtttctatttgtttgtgttgtctatgatttctttcagcagtgctttgtagttttcctcgtagaggtctttcccgcctgggttaggtatatttctaagtatttatttatttttttta

SEQ ID NO: 98118 - DNA, 261 bp, Homo sapiens
tcacagggcgtggccgaggaggaaatggaagtgagtatagaagggcctgtttagtgccacatgcaattatcaaagggtagcaattgactttctgtgggacataccatataaatcyatagtcttgcttttattttctttccgttcatttctctgatcttcctaatacttcttttaactttgaaaaaaaaaaagttaacgtctaaacctcacctgatacactgactacgcacttggatgcctttggggatgaaaaaaaatgag

SEQ ID NO: 98119 - DNA, 588 bp, Homo sapiens
taatgccaggacacggtcaccttcaatttttctcatttttagataaagccctgaaaatcagagaggtgggatgatttgctggagacggcaccaccctggatggccagatgtggcatcgaaaacacaatctccatacacttggtttgatgttttgtccatcccagcagttggactttccacggacgtttttctgtgtcatttatgagccagctatcatgagatggccgcatgcatcagcaactcacttgtttctaaaatgaactcacactcaagttcacataaactgttaagccctacatccagataaatatttttgaaaagctgtacccttcttcatctgagtatatcctggtttttattattaacattagaggtttcaagggttttcttagacaccccgtcacctggcagtggaatgtcctggagtaaagcagtatggccattggaattggacccacttttaatgcatgatctttaacctcaaatgggcatggatagtgacccagcatttgccagggccattcactctcctctactagacaactrtttcatacccctcccgcagatttgaacatcctcctccatcct

SEQ ID NO: 98120 - DNA, 559 bp, Homo sapiens
ccccgccccagctcagcccaatgaactcacagaattgtgacaaataataaaggatttttactttaggcagctaagtttcagggtagtttgttacacagtaatacctaactgtgaaccccaaggaacgcctgctcctcacgtcggctttgaattctcacagctttctcttctgccttaatgtttgttaagctgttttacagtatattatttatcttatgcttctgtgtgagtggagtgtgttcctatcaggaggccagttggtgtatggtgtccacatttgctcaattcccaatttgggggaaattcaaacactcgttgcacatagaaagtcatgtaagcaccctgtcttggcttatatgtccctccatgaggcgatgcctgcctgatgcttgaacctcactgcttatatamccccacattctcacctctcaggcctcagccatgccaatacaccatggtcttttgtgctctgcagccaccaggcatcctgcctcacgaccaagatggtctcttcccagcacataacatactcattctttttcttttgtcagcttagttg

SEQ ID NO: 98121 - DNA, 559 bp, Homo sapiens
ccccgccccagctcagcccaatgaactcacagaattgtgacaaataataaaggatttttactttaggcagctaagtttcagggtagtttgttacacagtaatacctaactgtgaaccccaaggaacgcctgctcctcacgtcggctttgaattctcacagctttctcttctgccttaatgtttgttaagctgttttacagtatattatttatcttatgcttctgtgtgagtggagtgtgttcctatcaggaggccagttggtgtatggtgtccacatttgctcaattcccaatttgggggaaattcaaacactcgttgcacatagaaagtcatgtaagcaccctgtcttggcttatatgtccctccatgaggcgatgcctgcctgatgcttgaacctcactgcttatataaccccacattctcacctctcaggcctcagccatgccawtacaccatggtcttttgtgctctgcagccaccaggcatcctgcctcacgaccaagatggtctcttcccagcacataacatactcattctttttcttttgtcagcttagttg

SEQ ID NO: 98122 - DNA, 582 bp, Homo sapiens
cctatggaagtcactgctgacctgaccacattgaggttaaggaagccttctaaattcttctcactttacatactggcttgcatttttgtcatcgttggctttaacagcaacatytgaaaagcagatttatttgccctagtgagctatggctatggacagccagggtctagatccaaccttcaagtatgctccctggcctccagcaatcaccagctcttagtacaccagcgcctcctgaggctatgcctcacgtctctcctcatttatgtcttcctgttcagcaccttctgcagcaaaacccagcatctgtgtcatcgtctctgggaagcatctcagctcacagtagaaaggtggttgttcctcccgtgtgtccacaggacctgcacctgacgctttctaatgaacccatctccaattcaacccaatctttcaatcagcaatgctctgctaagtaataaatatcggaaacagctaaaggtagcataaagagtagcaagttaagaagcagagccctacttttcagatcatctattaccaatatcctgggttaccaagggcaaatcaattcctttctctgaccct

SEQ ID NO: 98123 - DNA, 582 bp, Homo sapiens
cctatggaagtcactgctgacctgaccacattgaggttaaggaagccttctaaattcttctcactttacatactggcttgcatttttgtcatcgttggctttaacagcaacatctgaaaagcagatttatttgccctagtgagctatggctatggacwgccagggtctagatccaaccttcaagtatgctccctggcctccagcaatcaccagctcttagtacaccagcgcctcctgaggctatgcctcacgtctctcctcatttatgtcttcctgttcagcaccttctgcagcaaaacccagcatctgtgtcatcgtctctgggaagcatctcagctcacagtagaaaggtggttgttcctcccgtgtgtccacaggacctgcacctgacgctttctaatgaacccatctccaattcaacccaatctttcaatcagcaatgctctgctaagtaataaatatcggaaacagctaaaggtagcataaagagtagcaagttaagaagcagagccctacttttcagatcatctattaccaatatcctgggttaccaagggcaaatcaattcctttctctgaccct

SEQ ID NO: 98124 - DNA, 582 bp, Homo sapiens
cctatggaagtcactgctgacctgaccacattgaggttaaggaagccttctaaattcttctcactttacatactggcttgcatttttgtcatcgttggctttaacagcaacatctgaaaagcagatttatttgccctagtgagctatggctatggacagccagggtctagatccaaccttcaagtatgctccctggcctccagcaatcaccagctcttagtacaccagcgcctcctgaggctatgcctcacgtctctcctcatttatgtcttcctgttcagcaccttctgcagcaaaacccagcatctgtgtcatcgtctctgggaagcatctcagctcacagtagaaaggtggttgttcctcccgtgtgtccacaggacctgcacctgacgctttctaatgaacccatctccaattcaacccaatctttcaatcagcaatgctctgctaartaataaatatcggaaacagctaaaggtagcataaagagtagcaagttaagaagcagagccctacttttcagatcatctattaccaatatcctgggttaccaagggcaaatcaattcctttctctgaccct

SEQ ID NO: 98125 - DNA, 493 bp, Homo sapiens
tcttcagtgacatttaaaaagtgtaaattcagttaataggtaataggcaacaaacagtaataagaacattcaggaattcagtcaggcggttagtttaaagaagagaagtgaataagccataggagctaagatatttattattttatttcatgattgacaaaattgygtatatcatgtacatgtttttatttgaaacatgcatatattttgacatggctaaatagagctcatttacatatacattatctcacacacttaacattttctgtggtgagaacacttaaaattgactctccccaatttccatgaatatattgttgttaactctagtcacaatgtcgcatgatagactccttgaacttatttcttcaatctaactgaaatcttgtatcctttgatcaacatttccctttcaccacccctagcctcttttaccattattctactctctacttcaagttcaacatttttagattcctcatgtgagatcatg

SEQ ID NO: 98126 - DNA, 493 bp, Homo sapiens
tcttcagtgacatttaaaaagtgtaaattcagttaataggtaataggcaacaaacagtaataagaacattcaggaattcagtcaggcggttagtttaaagaagagaagtgaataagccataggagctaagatatttattattttatttcatgattgacaaaattgcgtatatcatgtacatgtttttatttgaaacatgcatatattttgacatggctaaatagagctcatttacatatacattatctcacacacttaacattttctgtggtgagaacacttaaaattgactctccccaatttccatgaatatattgttsttaactctagtcacaatgtcgcatgatagactccttgaacttatttcttcaatctaactgaaatcttgtatcctttgatcaacatttccctttcaccacccctagcctcttttaccattattctactctctacttcaagttcaacatttttagattcctcatgtgagatcatg

SEQ ID NO: 98127 - DNA, 547 bp, Homo sapiens
atattatccagccattccactcctagatatttatctaagagggtattcacacacagacttttccaaaaatatttatagaagctttatttgtaatagcctcaaacaacccaaatgaccttcaacagaagaacagataagaaaattgtagtatagccatataaggaactaatagtttcttatatggctatgctacaatagtactaacccacaaaaacaaacacactattgatacagacaacattgtgaatgaattggccccaaatcatgccatgtgttaaaagccaagaaaagaaagagaatrtactatatgattctatttttacaaaatgctagaatatgcgaattaatcaacagtaacaaaaagtagattagtgcttgtctgggaagaaggttagacggtataggaggatgggattggtcaggagaaaatgaatgggtttgatggatgttaattatctttattgtggtgacggtttcttagataaatatttcaaaacatatcaaattgtacatttaagtttgtgtggtttattctgtgtaaattaga

SEQ ID NO: 98128 - DNA, 639 bp, Homo sapiens
aataatctcttaccaaaagtcacttgactaacttagaagactctattatttataatctcagcaccttaacacataaaggtttacttttgctctcactatgtgtccagtgtaggccactttgaagatttgctgtatagcatcacttgggtgcacacgccaatagaggctctaccatcttggagctgtgccatctggcacaggaagccttatagtggtagagacaactggtgagttgaactcccactcttctatacttttgctcagaagtgacacatttcacttattttccagccaaaactattcacatgggtctatctaactgcaaagaggtagggatatgtgaggctgaagatggaatgtttgatgagggcaactcactctgccatagagagggaacaaacattaaaacctgaaagacattttcacaaaatatcttaaagtacaaataaataataaaagaaactctgggaagactgatgaaaagagtgatttaaattagttgatgaattattatggctagaaactttcttgaaaaatgaggactactgaggcaagatgcaaagaatatgttgagtgtggatkagtgttcgtagatagtcagaccccctggtaaaagcaggaagttagaggttgatgatg

SEQ ID NO: 98129 - DNA, 598 bp, Homo sapiens
gagtgacatttaagtttgaaatgcttaaaagaaaaaaggcttaaaactaatgcactgtgcttccaccttaagaatctcaaaagaagagcaaagtaaacaaaattaattttaaaaggaaatgataaaaatcagaacataaatcaatgaagtagaaacaatagactaaatcaaagaaatygtgattctttgaaagatttctaaacatgataagtttcatgagttacaagttataaagagaaaaaaatttagcaacataaattatgaatgagaagatataaacaactttataacttaaatgattttccttgaataatagaaattataagaatttaataaaaactttaaaatgtaatagttctatatatatatttagaaattgaatttataggccaggcgcagtggctcacgccaataatcccaacactttgggaggccgaggccagaggatcacgaggtcaggagtttgagatcagcctggcaaacatggtgaaactccgtctctactaaaactacaaaaattagccttagccgggtgtggtggcagacacttgtaataccagctactcaggaggctgaggcaggagaatcacttgaaacc

SEQ ID NO: 98130 - DNA, 598 bp, Homo sapiens
gagtgacatttaagtttgaaatgcttaaaagaaaaaaggcttaaaactaatgcactgtgcttccaccttaagaatctcaaaagaagagcaaagtaaacaaaattaattttaaaaggaaatgataaaaatcagaacataaatcaatgaagtagaaacaatagactaaatcaaagaaatcgtgattctttgaaagatttctaaacatgataagtttcatgagttacaagttataaagagaaaaaaatttagcaacataaattatgaatgagaagatataaacaactttataacttaaatgattttccttgaataatagaaattataagaatttaataaaaactttaaaatgtaatagttctatatatatatttagaaattgaatttataggccaggcgcagtggctcacgccaataatcccaacactttgggaggccgaggccagaggatcacgaggtcaggagtttgagatcagcctggcaaacatggtgaaactccgtctctactaaaactacaaaaattagccttagccgggtgtggtggcagacacytgtaataccagctactcaggaggctgaggcaggagaatcacttgaaacc

SEQ ID NO: 98131 - DNA, 367 bp, Homo sapiens
tttctaggtagaaattcaatccagctgcagaaacttgcataagtaatgagcagctgaaggtcaatagccaaaacaatggggaaaatatctccagggtatttcagagattttcacccattatagtccragatacctaggagaataaaagtggttttgtgtactgggtctcagggccctctgctgtatgcagcctcaggacatggcacctgcatcccagccacttcagctctagccatggctaaaaggggcaaagatacagctcagaccatggcttcagagggagcaagccccaagccttggcagcttccatgtggtgttggagcttcaggtttgcagaaagcaagaactgagttttgggaacctctgg

SEQ ID NO: 98132 - DNA, 531 bp, Homo sapiens
taagatgggcaagacataacgtagataacagcttcctatggatcagatgctgttccaaagccctttacatggataatttcatttaaactgctaaactctatgaagcacttagcatacatgataaaagaaaagcacataaaattttaattaaattacacaaatcacctacgtaattaatgattgagtcagaacttcaacccaaaccaggtgattctaaagacagtactcttggcaattattccatgccagatctaaaaattatgccaattctatcattaaatattgtactcatagtatttctattatttgggttaataatttcaaccacacgcagcatgtattttaacataattcataagaagtaaatgtcactgataggatctttagttcctttgtcttggaggtrggaggtgattcctgtggaaatgaaattcatcagtctattcaacaaatagtgcctgttttacatataacacatcaggcatggagatacaatgggaaggaagagagatagacagaagacagagggta

SEQ ID NO: 98133 - DNA, 563 bp, Homo sapiens
aactatgatttcaaatgcccttgaggaagtttgtttaaaaagcaggaaagggggtgtggactttgggctatttttatgcctccctagaaattctctatggttttctcacaaagtgctgataacgatggcactactaatttctttctagtttatgaatttattcgtctctgcaggatgctatattgaatttttggagagaaagtgaaacatgtctgggtctaagcaagaagtgaatatctgcttggagattctgtacaagatggtggggctagagaagcaacctagaaagcaggtgggttgacttgttacctgaagtacttcatgattcctagcgaggggagggcattaacgaatgatacctgggaagtttgctactgmaaatatttgagtttataaagagagaaaaagagtacactaagaatttaccttccaactcagcatgctgaatcacctttttaaaaatgcagctatcgataaagagttacatgctttgtgcataggtaggaggaaattcagagcacacactgaaggtgaaaatcccattctaactcttactaactgga

SEQ ID NO: 98134 - DNA, 582 bp, Homo sapiens
accaggaccgggccccactttccagtgagtgtgggattcttcaggctgtgagtttagtgggcccgagcggggacttggcagaaggcggttgtagcggttgttagtgraggtattcccttcccccctttaaccaatacccaaccttggggataggggccgaggtggagctggggcgcttaccagtggggactttagtgtctcacagctgtttctgacccggcagctctaatcagcaacgtttttttcgggagctcctgggcgtctctctgggtctctgtgcttgaaagaaaggggggcggcttcctacctaccgcttctgttttcactttgacagaatggcttctctatctttaaagcgtagactttggtctgtagcagttgagagcggcatttgtccagccacggcatcgacagggagcaaagtctctccttaaaggtgttaacctctcgagaagttgctgaaagccggaaaggttttacgcaacaggaactcaagccccgtacactttgcattcttttccagcataactcagccagtgtttcggatcgagattggagaagcaactttaaagcaggagttct

SEQ ID NO: 98135 - DNA, 611 bp, Homo sapiens
gcagcagaacaaacactcacaaagggtctccttccctcctaggacttccttcgctgggcatctggctgggattcttgttggactaatgtacactcaagggcctctgaagaaaatcatggaagcatgtgcaggtacagaataaaacacctttggcatgacaacagcttggaagttcatgttaattttaatgtgaacagaagcaaccccaagtttccctgtggttcagctcaagaattccctaatatgcctgtttttctttttaaaccgaaaggtaaaacaaccagtgcagttccttacattgctccacaaaagaggctgcaaacttaaatttcgaatctgatactttcttaggggacaaatatcagtatatatttataccctcaaccttaatgctacccgcagaaaaccacgatttcctaaagaatgcagagaactaaagtgcctttaaaataatgcattcttctataatagtccatgaattaatatacgtgcaaggcaaaggtgaaaaagaaaacaaagccyggactgaagtgcatggccagtattttaaagaattcagactgatgaccgggtccttggtggatgagccatatattcatgcatggcgaaac

SEQ ID NO: 98136 - DNA, 599 bp, Homo sapiens
catcctcagtcaacgtcagctcttcatcacttggtggttgttattgtatgagggacgtattgcaattggaaagggagctgaagggaagttacagcctttcctcccaagaagtctctaaattcactgactgcattttctgttttctcgagtttggcttctgccccctctactccaccaaaagggcacttgcaaaggtcaccagcaacgtttctgtggtctaatccattgtgtggttttagatcctcatctttctcgtcctctcagaaactctgaacaccactgagcttgaatctcattccttggattccatgacttttcactgtcataattttcccttcacttttcttgtcactctctctcacttccacttgccagcggctattccttcccttagtctctaaaagtcagaatttagattctcaatgttcctcggtctccagtctctctccagaaaaatttacctatttctacggtgttattaccaatggcatgctaattaatccaaaatgttggtccaacacctcagacctctgctctgacctcctgacctscaatatgttgttctatgttctctgtgtttacttgaatgtcccaaaggc

SEQ ID NO: 98137 - DNA, 485 bp, Homo sapiens
tatactatgtattttatttaacatatacttatataccagaaatgaagctgcctgttttgacaattgctttctctataaatytctgccagaaaaaaaatcattatgaattcaacaaatcacatctcaattagttattctggtcaacttgagacttagatttatttatgaaataatgctttccagaaagaaaaacatctggccttttaaaatagttgttaatgtaaaattttaacccaagtaattgtattactgtaactcactagcaattaaaaaaaagtgtgtaggatatccaaaagaaaggaccatattaaattaaaataaagtgtttttttttttacagtaaaattcataccatctggcctaatttgtcttggtgttttgcccagtgtagtatcagctttttgagaactataaattattaggtaactcccctgaaaaaatatgagtgaagaaaaaatatgggttgatgacgacatcctgattat

SEQ ID NO: 98138 - DNA, 485 bp, Homo sapiens
tatactatgtattttatttaacatatacttatataccagaaatgaagctgcctgttttgacaattgctttctctataaatctctgccagaaaaaaaatcattatgaattcaacaaatcacatctcaattagttattctggtcaacttgagacttagatttatttatgaaataatgctttccagaaagaaaaacatctggcyttttaaaatagttgttaatgtaaaattttaacccaagtaattgtattactgtaactcactagcaattaaaaaaaagtgtgtaggatatccaaaagaaaggaccatattaaattaaaataaagtgtttttttttttacagtaaaattcataccatctggcctaatttgtcttggtgttttgcccagtgtagtatcagctttttgagaactataaattattaggtaactcccctgaaaaaatatgagtgaagaaaaaatatgggttgatgacgacatcctgattat

SEQ ID NO: 98139 - DNA, 517 bp, Homo sapiens
ctctttaagaaaaaaaaaagtttcagagaagagtttgcataatcccaaccctaactcttcagccactatataaagtatcttaaataamtatgacttagagatactggaaaaatatttggattcctctgatttatgatttttacatgcaatgttatagagaacacttcaaaaaatcagctgttgatgtatacgtgatgctctgaccccaagatacaatcaatattatttaatggagactaatttacccacacggcagacccttcttaaacagggtatatccagaagttattgggctaagtgcggcaagaatgcatgagtcagctggtggttagcacccaactgagcagccctgggccagattaggatggatacagcagatgaaagaacatgacaggttcatgctcagttttcatttgaaatgcatatgccacaaagatgtcgcttctttcacaatggtggagcaaactctccatgttggaaatgacaaagaagggacaaaagaaagataacatgagga

SEQ ID NO: 98140 - DNA, 376 bp, Homo sapiens
atgatttttacatgcaatgttatagagaacacttcaaaaaatcagctgttgatgtatacgtgatgctctgaccccaagatacaatcaatattatttaatggagactaatttacccacacggcagacccttcttaaacagggtatatccagaagttattgggctaagtgcggcaagaatgcatgagtcagctggtggttagcacccaactgagcagccctgggccagattaggatggatacagcagatgaaagaacatgacaggttcatgctcarttttcatttgaaatgcatatgccacaaagatgtcgcttctttcacaatggtggagcaaactctccatgttggaaatgacaaagaagggacaaaagaaagata

SEQ ID NO: 98141 - DNA, 524 bp, Homo sapiens
ggggtggatagtcccccttttccactttcacattttgggcactcacaatatttgggctgtctcccatgtcctgcaggagcaatccacttccttcaaagggtctgtggattccctcggctttcctggtttattcctgaagtacttcttagagcaaaagttcacagtgcaagtcttcccatggtgctctgtccatccaartgagagctgcaatttagtcccgcctcctatccacaacttttttcatctctcctacccctctctttctctgcctcctctttaaggccaataactcttagactggcccttttgaggctattttctagattctgtaggtgtgctttcttggtttttattcttttttttttctatctcctttgactgtgtattttcatgtagcctatattcaaactcactatttctttctcctgtctgatcagttctgccagcaattcacactcatgcattcttcagtatgccaatttccttttccagctccagaatttttgttgaatttttttaatgat

SEQ ID NO: 98142 - DNA, 524 bp, Homo sapiens
ggggtggatagtcccccttttccactttcacattttgggcactcacaatatttgggctgtctcccatgtcctgcaggagcaatccacttccttcaaagggtctgtggattccctcggctttcctggtttattcctgaagtacttcttagagcaaaagttcacagtgcaagtcttcccatggtgctctgtccatccaagtgagagctgcaatttagtcccgcctcctatccacaacttttttcatctctcctacccctctctttctctgyctcctctttaaggccaataactcttagactggcccttttgaggctattttctagattctgtaggtgtgctttcttggtttttattcttttttttttctatctcctttgactgtgtattttcatgtagcctatattcaaactcactatttctttctcctgtctgatcagttctgccagcaattcacactcatgcattcttcagtatgccaatttccttttccagctccagaatttttgttgaatttttttaatgat

SEQ ID NO: 98143 - DNA, 524 bp, Homo sapiens
ggggtggatagtcccccttttccactttcacattttgggcactcacaatatttgggctgtctcccatgtcctgcaggagcaatccacttccttcaaagggtctgtggattccctcggctttcctggtttattcctgaagtacttcttagagcaaaagttcacagtgcaagtcttcccatggtgctctgtccatccaagtgagagctgcaatttagtcccgcctcctatccacaacttttttcatctctcctacccctctctttctctgcctcctctttaaggccaataactcttagactggcccttttgaggctattttctagattctgtaggtgtgctttcttggtttttattcttttttttttctatctcctttgactgtgtattttcatgtagcctatattcaaactcactatttctttctyctgtctgatcagttctgccagcaattcacactcatgcattcttcagtatgccaatttccttttccagctccagaatttttgttgaatttttttaatgat

SEQ ID NO: 98144 - DNA, 524 bp, Homo sapiens
ggggtggatagtcccccttttccactttcacattttgggcactcacaatatttgggctgtctcccatgtcctgcaggagcaatccacttccttcaaagggtctgtggattccctcggctttcctggtttattcctgaagtacttcttagagcaaaagttcacagtgcaagtcttcccatggtgctctgtccatccaagtgagagctgcaatttagtcccgcctcctatccacaacttttttcatctctcctacccctctctttctctgcctcctctttaaggccaataactcttagactggcccttttgaggctattttctagattctgtaggtgtgctttcttggtttttattcttttttttttctatctcctttgactgtgtattttcatgtagcctatattcaaactcactatttctttctcctgyctgatcagttctgccagcaattcacactcatgcattcttcagtatgccaatttccttttccagctccagaatttttgttgaatttttttaatgat

SEQ ID NO: 98145 - DNA, 570 bp, Homo sapiens
gtttattatatgtatcttatcactccctagtatctcacatgcmgccagcttcattcataattgtaccttcttaacatttatttggctctgctgggatcgtatctttatggttctcaactaagacttaaatgtaagatatttcttatggaaagcataacagaagattgattaataagaataaaagaaccccaggggacaaaaatgtacatttttataaattctatttatttaaaaaaataacaaatttcacccacgtagccatttgggataaaaccaagaaatacacaggtcattttttgtttttattttggattttctttattatgttatatttatttttgggacagggatttggtcaatggactctaaatgactatgccccaacatgtgtgctatattttttactgaaattttatatttaaactgatgactgagtgacttaaacacatgttttaggacactaatagttgtatttcagatacttttctaataggaataagaattatttggggcatgaatgtaggctgcttttctttctaactctccttaatcttactgtgtaggcagatg

SEQ ID NO: 98146 - DNA, 570 bp, Homo sapiens
gtttattatatgtatcttatcactccctagtatctcacatgcagccagcttcattcataattgtaccttcttaacatttatttggctctgctgggatmgtatctttatggttctcaactaagacttaaatgtaagatatttcttatggaaagcataacagaagattgattaataagaataaaagaaccccaggggacaaaaatgtacatttttataaattctatttatttaaaaaaataacaaatttcacccacgtagccatttgggataaaaccaagaaatacacaggtcattttttgtttttattttggattttctttattatgttatatttatttttgggacagggatttggtcaatggactctaaatgactatgccccaacatgtgtgctatattttttactgaaattttatatttaaactgatgactgagtgacttaaacacatgttttaggacactaatagttgtatttcagatacttttctaataggaataagaattatttggggcatgaatgtaggctgcttttctttctaactctccttaatcttactgtgtaggcagatg

SEQ ID NO: 98147 - DNA, 570 bp, Homo sapiens
gtttattatatgtatcttatcactccctagtatctcacatgcagccagcttcattcataattgtaccttcttaacatttatttggctctgctgggatcgtatctttatggttctcaactaagacttaaatgtaagatatttcttatggaaagcataacagaagattgattaataagaataaaagaaccccaggggacaaaaatgtacatttttataaattctatktatttaaaaaaataacaaatttcacccacgtagccatttgggataaaaccaagaaatacacaggtcattttttgtttttattttggattttctttattatgttatatttatttttgggacagggatttggtcaatggactctaaatgactatgccccaacatgtgtgctatattttttactgaaattttatatttaaactgatgactgagtgacttaaacacatgttttaggacactaatagttgtatttcagatacttttctaataggaataagaattatttggggcatgaatgtaggctgcttttctttctaactctccttaatcttactgtgtaggcagatg

SEQ ID NO: 98148 - DNA, 570 bp, Homo sapiens
gtttattatatgtatcttatcactccctagtatctcacatgcagccagcttcattcataattgtaccttcttaacatttatttggctctgctgggatcgtatctttatggttctcaactaagacttaaatgtaagatatttcttatggaaagcataacagaagattgattaataagaataaaagaaccccaggggacaaaaatgtacatttttataaattctatttatttaaaaaaataacaaatttcacccacgtagccatttgggataaaaccaagaaatacacaggtcattttttgtttttattttggattttctttattatgttatatttatttttkggacagggatttggtcaatggactctaaatgactatgccccaacatgtgtgctatattttttactgaaattttatatttaaactgatgactgagtgacttaaacacatgttttaggacactaatagttgtatttcagatacttttctaataggaataagaattatttggggcatgaatgtaggctgcttttctttctaactctccttaatcttactgtgtaggcagatg

SEQ ID NO: 98149 - DNA, 570 bp, Homo sapiens
cgtttttgctttggttgcctgtggttgtggggtattgctcaagaaatgtttgtccagaccaatgtcctagagatttttctcaaagttttcttrtagtaatttcatagtttgaggtcttagacttaagtctttaatttattttgattcacgttttgtatatggcaagagataggggtctagtttcattctcctgcatgtggatatccagtttcccaacatcagctattgaagactgacttttccccaatattcttggcaactttgttgaaaatgagttcccattaagtgtgtggatacacacaaaataagctgatcttttatatttctttcccttgtctcacaaaaaaatccataaatgaagttgcaaaattaaattaacccttttttcttccatatatatcaggcctgagtagtccgtaaaggctacaagtaagttaaatgtagaagtggcttaaatgtccgtgattcctactcctgttacactgtacactgacttctttctcccagccttctctccaacctatagtgttatggggagtaccctataatatggtttggatgtgtatttcc

SEQ ID NO: 98150 - DNA, 570 bp, Homo sapiens
cgtttttgctttggttgcctgtggttgtggggtattgctcaagaaatgtttgtccagaccaatgtcctagagatttttctcaaagttttcttatagtartttcatagtttgaggtcttagacttaagtctttaatttattttgattcacgttttgtatatggcaagagataggggtctagtttcattctcctgcatgtggatatccagtttcccaacatcagctattgaagactgacttttccccaatattcttggcaactttgttgaaaatgagttcccattaagtgtgtggatacacacaaaataagctgatcttttatatttctttcccttgtctcacaaaaaaatccataaatgaagttgcaaaattaaattaacccttttttcttccatatatatcaggcctgagtagtccgtaaaggctacaagtaagttaaatgtagaagtggcttaaatgtccgtgattcctactcctgttacactgtacactgacttctttctcccagccttctctccaacctatagtgttatggggagtaccctataatatggtttggatgtgtatttcc

SEQ ID NO: 98151 - DNA, 570 bp, Homo sapiens
cgtttttgctttggttgcctgtggttgtggggtattgctcaagaaatgtttgtccagaccaatgtcctagagatttttctcaaagttttcttatagtaatttcatagtttgaggtcttagacttaagtctttaatttattttgattcacgttttgtatatggcaagagataggggtctagtttcattctcctgcatgtggatatccagtttcccaacatcagctattgaagactgacttttccccaatattcttggcamctttgttgaaaatgagttcccattaagtgtgtggatacacacaaaataagctgatcttttatatttctttcccttgtctcacaaaaaaatccataaatgaagttgcaaaattaaattaacccttttttcttccatatatatcaggcctgagtagtccgtaaaggctacaagtaagttaaatgtagaagtggcttaaatgtccgtgattcctactcctgttacactgtacactgacttctttctcccagccttctctccaacctatagtgttatggggagtaccctataatatggtttggatgtgtatttcc

SEQ ID NO: 98152 - DNA, 570 bp, Homo sapiens
cgtttttgctttggttgcctgtggttgtggggtattgctcaagaaatgtttgtccagaccaatgtcctagagatttttctcaaagttttcttatagtaatttcatagtttgaggtcttagacttaagtctttaatttattttgattcacgttttgtatatggcaagagataggggtctagtttcattctcctgcatgtggatatccagtttcccaacatcagctattgaagactgacttttccccaatattcttggcaactttgttgaaaatgagttcccwttaagtgtgtggatacacacaaaataagctgatcttttatatttctttcccttgtctcacaaaaaaatccataaatgaagttgcaaaattaaattaacccttttttcttccatatatatcaggcctgagtagtccgtaaaggctacaagtaagttaaatgtagaagtggcttaaatgtccgtgattcctactcctgttacactgtacactgacttctttctcccagccttctctccaacctatagtgttatggggagtaccctataatatggtttggatgtgtatttcc

SEQ ID NO: 98153 - DNA, 593 bp, Homo sapiens
aaagtttttgtatgcttttacggtttgtcttacatatcaacttagctaggcttttcaatcaaatgctaatccggggattgctatgaatgaattttatagacatggttatcatccacaaycacctgaatttaagtaaaggatatttttctctataatgtgggtagatatcatccaatcagtggaaataccttataagcaaaactgagatatctctgaagaataaattgtacctcaagactaaaaaatccaagagtttccaacctgttggcctgccctgtggattttacccttgtgagccaccacaatcatgtgggataattacttcaagtaaataaataaatatatatttacttattcaaaacctacacacagcacctttatttgtgtcttctggaattagaagtatgttcaagttctaacaggtcctaaagagtgaggtccaaagtgtggagcactaggagaagcactacacttcaaaacaactgcaagatttttttcaatgaatacacagaaatctcaagaaattgtatagaaaaggtgtagaaatataatattgtaaattaaatctgcaaaattataatttttaaattata

SEQ ID NO: 98154 - DNA, 593 bp, Homo sapiens
aaagtttttgtatgcttttacggtttgtcttacatatcaacttagctaggcttttcaatcaaatgctaatccggggattgctatgaatgaattttatagacatggttatcatccacaatcacctgaatttaagtaaaggatatttttctctataatgtgggtagatatcatccaatcagtggaaataccttataagcaaaactgagatatctctgaagaataarttgtacctcaagactaaaaaatccaagagtttccaacctgttggcctgccctgtggattttacccttgtgagccaccacaatcatgtgggataattacttcaagtaaataaataaatatatatttacttattcaaaacctacacacagcacctttatttgtgtcttctggaattagaagtatgttcaagttctaacaggtcctaaagagtgaggtccaaagtgtggagcactaggagaagcactacacttcaaaacaactgcaagatttttttcaatgaatacacagaaatctcaagaaattgtatagaaaaggtgtagaaatataatattgtaaattaaatctgcaaaattataatttttaaattata

SEQ ID NO: 98155 - DNA, 593 bp, Homo sapiens
aaagtttttgtatgcttttacggtttgtcttacatatcaacttagctaggcttttcaatcaaatgctaatccggggattgctatgaatgaattttatagacatggttatcatccacaatcacctgaatttaagtaaaggatatttttctctataatgtgggtagatatcatccaatcagtggaaataccttataagcaaaactgagatatctctgaagaataaattgtacctcaagactaaaaaatccaagagtttccaacctgttggcctgccctgtggattttacccttgtgagccaccacaatcatgtgggataattacttcaagtaaataaataaatatatatttacttattcaaaacctacacacagcacctttatttgtstcttctggaattagaagtatgttcaagttctaacaggtcctaaagagtgaggtccaaagtgtggagcactaggagaagcactacacttcaaaacaactgcaagatttttttcaatgaatacacagaaatctcaagaaattgtatagaaaaggtgtagaaatataatattgtaaattaaatctgcaaaattataatttttaaattata

SEQ ID NO: 98156 - DNA, 593 bp, Homo sapiens
aaagtttttgtatgcttttacggtttgtcttacatatcaacttagctaggcttttcaatcaaatgctaatccggggattgctatgaatgaattttatagacatggttatcatccacaatcacctgaatttaagtaaaggatatttttctctataatgtgggtagatatcatccaatcagtggaaataccttataagcaaaactgagatatctctgaagaataaattgtacctcaagactaaaaaatccaagagtttccaacctgttggcctgccctgtggattttacccttgtgagccaccacaatcatgtgggataattacttcaagtaaataaataaatatatatttacttattcaaaacctacacacagcacctttatttgtgtcttctggaattagaagtatgttcaagttctaacaggtcctaaagagtgaggtccaaagtgtggagcactaggagaagcactacacttcaaaacaactgcaagatttttttcaatgaatacacagaaatytcaagaaattgtatagaaaaggtgtagaaatataatattgtaaattaaatctgcaaaattataatttttaaattata

SEQ ID NO: 98157 - DNA, 616 bp, Homo sapiens
gaattacatggtggggtgaatattactactagatatcatgatcgaaatccacagaaatcaagaaagtgtagtcttggtgcaagtattgacaaatggactgatggaaccaataacacatatggatatttatgacagaggtgacatttcatggaagtgaaaaaagagcagtattttcaataaatagtgttaaggtggttgaatataattgtataattataaagaacaagaaaaacctggccttattatatcaaactacacactaaaattaatttaagatatattgtagatctaaatgtaaaaatcaaaaattaaagtttctagaagataatataatatttaaataatcttggagtaagtaagactgcttaaacaatacatawtataaactaatcgtaaagaaaatggttggtgtaatgtcttaccataaattaagaaaagcaattcattagaaagtatcattaagatagtgaaaatgatgtcagagggtggaacaagatatctgcaacacaaataatggaatagagggtttaggaatgtttgcgggacaattaccaagaagaaagacaagccagtagtcaaaaaaataagtacctagcataggtgtttacaaaagaaa

SEQ ID NO: 98158 - DNA, 616 bp, Homo sapiens
gaattacatggtggggtgaatattactactagatatcatgatcgaaatccacagaaatcaagaaagtgtagtcttggtgcaagtattgacaaatggactgatggaaccaataacacatatggatatttatgacagaggtgacatttcatggaagtgaaaaaagagcagtattttcaataaatagtgttaaggtggttgaatataattgtataattataaagaacaagaaaaacctggccttattatatcaaactacacactaaaattaatttaagatatattgtagatctaaatgtaaaaatcaaaaattaaagtttctagaagataatataatatttaaataatcttggagtaagtaagactgcttaaacaatacatattataaactawtcgtaaagaaaatggttggtgtaatgtcttaccataaattaagaaaagcaattcattagaaagtatcattaagatagtgaaaatgatgtcagagggtggaacaagatatctgcaacacaaataatggaatagagggtttaggaatgtttgcgggacaattaccaagaagaaagacaagccagtagtcaaaaaaataagtacctagcataggtgtttacaaaagaaa

SEQ ID NO: 98159 - DNA, 616 bp, Homo sapiens
gaattacatggtggggtgaatattactactagatatcatgatcgaaatccacagaaatcaagaaagtgtagtcttggtgcaagtattgacaaatggactgatggaaccaataacacatatggatatttatgacagaggtgacatttcatggaagtgaaaaaagagcagtattttcaataaatagtgttaaggtggttgaatataattgtataattataaagaacaagaaaaacctggccttattatatcaaactacacactaaaattaatttaagatatattgtagatctaaatgtaaaaatcaaaaattaaagtttctagaagataatataatatttaaataatcttggagtaagtaagactgcttaaacaatacatattataaactaatcgtaaagaaaatggttggtrtaatgtcttaccataaattaagaaaagcaattcattagaaagtatcattaagatagtgaaaatgatgtcagagggtggaacaagatatctgcaacacaaataatggaatagagggtttaggaatgtttgcgggacaattaccaagaagaaagacaagccagtagtcaaaaaaataagtacctagcataggtgtttacaaaagaaa

SEQ ID NO: 98160 - DNA, 616 bp, Homo sapiens
gaattacatggtggggtgaatattactactagatatcatgatcgaaatccacagaaatcaagaaagtgtagtcttggtgcaagtattgacaaatggactgatggaaccaataacacatatggatatttatgacagaggtgacatttcatggaagtgaaaaaagagcagtattttcaataaatagtgttaaggtggttgaatataattgtataattataaagaacaagaaaaacctggccttattatatcaaactacacactaaaattaatttaagatatattgtagatctaaatgtaaaaatcaaaaattaaagtttctagaagataatataatatttaaataatcttggagtaagtaagactgcttaaacaatacatattataaactaatcgtaaagaaaatggttggtgtaatgtcttaccataaattaagaaaagcaattcattagaaagtatcattaagatagtgaaaatgatgtcagagggtggaacaagatatctgcaacacaaataatggaatagagggtttaggaatgtttgcgggacaattaccaagaagaaagacaagccagtagtcaaaaaaataagtacctagmataggtgtttacaaaagaaa

SEQ ID NO: 98161 - DNA, 540 bp, Homo sapiens
gattacattaaaaattttctgcatagcaagtgaaataacagagtgragacacaacctatagaaagggggaatacatttgcaaaccacatatcaacaacttgaatgaaaactaggcaaagaaacttagtagacatttttttccaaagaacacattaaaagaacaaatatatgaaaaggtactcaacagcactaatcatcagggaaatttacattaaaatcataatgatatatcatctcatacctgtttggatggcaattgtcaaaatgtcaaaagaaaacaagtattggagaaggtatatagaaaagagaacccttgtatgctgttgctggaatgtaaatttttacagctattatggaaacagtatggaagtttatcaaattattaacaatagaaatgtaatatgacataggcattcctgttttgggtatacacccaaagaaaataaaatcaggactttgtagagatatctggactcccgtattcactgtagcactattcacaagcgccaagatatggaaacaaactaagcatctattgac

SEQ ID NO: 98162 - DNA, 605 bp, Homo sapiens
tatacacaacggaatgctattaagcctttcaaaaaaggaaatcttgtcatttgtgacagaatgaacctcctgggcattatattcagtgaaataagccaggcacagaaagataaataccaaataatctcacttatatatggaatctaaaaaagttgaacctgtagaaacacagtaaaatggtggttgccagagactggaggtgaggctttgtagacagttgtggtcaaaggaccaccaaaattttattttagataagaggaataagttcaagagatctatagtacatcatactgactataattaacaatatattgtatattttacaattgctgagagtagacttttgtgttctcaccacaaaaaaaatgcaagttagtgcatatgttaaatagctcatttaactattccagaatgtatacatatataaaaaatcatgttgtacaccacaaatatatatgattttacttgtcaattattagaagaaaagactttgastttaacaagcacaagttaggaaatgatgagtttccatatataccaaaaagacaaatacaccttgctatatttataatctgtttatttagctctgtctgtagtaggacata

SEQ ID NO: 98163 - DNA, 517 bp, Homo sapiens
attatgtaatgcccttctttgcccttttttactgttgctggtttaaagtctattttacttgatacaagaatagcaatccctgctgtttttcgttttccatttgtgtgatagatctttytccatcccttcactttgaacctatgtgtctcattacatgggagatggtctgttgaaagcaacagaaagttggttcttgttttgttttaaacccaattagtcactctgtcttttaagtgaagcatttagactatttacattcaaggttaatattgatataagagattttcgttctatcatggtgctattagcagtttgctttgtactcttgattatgtagttgcttcatagggcctgtgggctatatacatgtctttttgtagtggcaagtattattcttttattttcatgtttagaactcccttaaacatctgttataagaccagtccagtggtagtgaattcccttagctattgttactctggaaaaaaaatttatttctccttcatttatgaagctt

SEQ ID NO: 98164 - DNA, 578 bp, Homo sapiens
gaataaataaattattaataatttttaaattatattctccatccctccctcacagagatatctcataagtatgtgcttatgcacattctttccacaaaatgtttgacatcatttttaaagttcaaattaaatwatatcttttgttcagttttttcctagaaaatatttgctaccactaagcacactggtaaaccaaacagtaatttccaaatgtagcctatccacattgcaatttcttttacttaatatttgataactaacatatctgttaagttgattggttaatacaaacagtgaatgggaaacttgatttctcaattactttacatagccaattcagcggattaatacatctatccacttatatttagataatgtaagagttcatcattcttctgatacttatattttaaatgaaatgttcatggtgttctagatgtcaaaacataaaattttaattaactaaatcaatgttttatgtagattttgcttcgatagtactttaacttgggtgatacttagaactctacattgaaacttccgtttcgacttactctttgaatgtctgttttgaacac

SEQ ID NO: 98165 - DNA, 548 bp, Homo sapiens
atactcctctcttgacttcctcttgactagaacataatttaagttataagttttaaagttttaaaagytttaaattaaaagtacaagtaaagaaatgtactacacagctttatagaaaataatattatattgtgataacaataatgtaaacatgcttacctcatggtataattaaaagctgtgacactatattgagaaaatggaaaaaaaattgtgtggagtaccaaaaaatagtcaaatttctaatttttaataaagacattaggaagtgatatacaacaaaaattatttatgaaaatattgcttgtgttttagtaactctttctttttaaatatttgtgtgtggaagaatatatgtcaatcatttgtgttttccttatgttcagataaagggtgattttgattttatttcattgtggtaggagaaaaagtctgtgtgatattctttctttggaagctattgcgactgctttgtgacctaggaaatgattgcttttatggaattcctttgtgaacacaagaaaaatgtatatattttaaaatttgat

SEQ ID NO: 98166 - DNA, 548 bp, Homo sapiens
atactcctctcttgacttcctcttgactagaacataatttaagttataagttttaaagttttaaaagctttaaattaaaagtacaagtaaagaaatgtactacacagctttatagaaaataatattatattgtgataacaataatgtaaacatgcttacctcatggtataattaaaagctgtgacactatattgagaaaatggaaaaaaaattgtgtggagtaccaaaaaatagtcaaatttctaatttttaataaagacattaggaagtgatatacaacaaaaattatttatgaaaatattgcttgtgttttagtaactctttctttttaaatatttgtgtgtggaagaatatatgtcaatcatttgtgttttccttatgttcagataaagggtgattttgattttatttmattgtggtaggagaaaaagtctgtgtgatattctttctttggaagctattgcgactgctttgtgacctaggaaatgattgcttttatggaattcctttgtgaacacaagaaaaatgtatatattttaaaatttgat

SEQ ID NO: 98167 - DNA, 413 bp, Homo sapiens
agggacccagtgggaggtaattgaaacatgggggcaggtctttgccrtgctgttctcattataacgaataagtctcatgagatctgagggtatcattagggggagtttccctgcccaatctctctgtctcataccacccacctaagatatgacttgctcctccttgccttccatcatgattgtgaggcttctataaatccagttaaacctctttcttttgtaaattgtccagtctacggtatgtcttcaccagcagcgtgaaaatggactaatacatatgggaaggaaatttgtaaggataattgcttccaacttaaattaattttgcatatatagacattcttacgttacatagtgcacagatgataaaatcaaatacacatggtacaaggatcagcattaattgagaattt

SEQ ID NO: 98168 - DNA, 510 bp, Homo sapiens
ctgtgttttaggagctcttgggttcccaggatcatcatcctcatgtcctagggaaagacagtttcaacacaattggtttgtgcctgcctcgttttctcctggtctgcaatgcagaggcacggtaccaggcttgggagtgacacttctgtagaatttgacaaatgtacttccaaacccctgcttgaccacttccctgctgtgctaactccagccatgatactacatstttctgtatcttgctttcttcctaagagctgagtcctgtatatggacagcatatcccagtgtctggcatgtggtggggacacaatatacattcctttctgcaacagagttttgagagctttctgtgtacggggcaccatgtttatactaggggctctgtataaaaatggcaaatgtgatataatatccaccttcacaggattgtgtgtagaccagatgcagaaaaatataaagtaattgtagtgaatttgggatgctgtaggctctgggaggagagatgctgac

SEQ ID NO: 98169 - DNA, 555 bp, Homo sapiens
tacttgggtgctgtccatggggttctgatgcctttgctcttctgtgcagtggagatggccgtgttccctgcctccctagggtgcagtgcagcccctctgaataaggaggccagtgggcctgctgccttccttggttgaggggcctgagcacgtgtgggaatgaatggctctkcccacagctctgcccaggcatttcctagcaacccagcagactcctctccctgagttcattctccttaactcttgaccacccagtggggctgagtggaaccaagctcggctgtggagaggggggctgcggggcttgcacagtgatgctctccaagtatgatcgtctgcagaacaagatcgtgtatcctttgcctgctggctgaccacccacatgggggctgcgatgcaggaccagcttgtgagggagtgcatgagtgtatgtgtgtatgtgcatgtgcgcatgtgtgagcccctgtttttatggagaatctgtgcacaggaaaactgtagaatgatctcttagcaagtatcttctaggcttataatattgaccaggctccgaac

SEQ ID NO: 98170 - DNA, 555 bp, Homo sapiens
tacttgggtgctgtccatggggttctgatgcctttgctcttctgtgcagtggagatggccgtgttccctgcctccctagggtgcagtgcagcccctctgaataaggaggccagtgggcctgctgccttccttggttgaggggcctgagcacgtgtgggaatgaatggctcttcccacagctctgcccaggcatttcctagcaacccagcagactcctctcsctgagttcattctccttaactcttgaccacccagtggggctgagtggaaccaagctcggctgtggagaggggggctgcggggcttgcacagtgatgctctccaagtatgatcgtctgcagaacaagatcgtgtatcctttgcctgctggctgaccacccacatgggggctgcgatgcaggaccagcttgtgagggagtgcatgagtgtatgtgtgtatgtgcatgtgcgcatgtgtgagcccctgtttttatggagaatctgtgcacaggaaaactgtagaatgatctcttagcaagtatcttctaggcttataatattgaccaggctccgaac

SEQ ID NO: 98171 - DNA, 601 bp, Homo sapiens
tggatgtcatgtccagcttgagagccaatctgactgttctcagagcttgaatgccatgctgagagaaccactgctgtcttcagagctgtcacacagggatgtttaagtctgcagaagctgtctgctgccttttgttctgctatgccctgcccccggaggtggaatctagagaggcagtaggccttgctgtgctgcagtgagctcctcccagtttcagcttccaggatgctttgtttacactgtgagctactcaagcctcagcaatggctgatgcccctccccctgccaagctgcagcatcacaggttgatctcagactactgtattagcagtaagcaagctctgtgggtgtgggacctgcccggccaggcatgggagggtatctmctggtctgccggttgctaagactgtgggaatagcacagtatttggtcaggagtgtattgtttctccagttatagtctgtcccagcttcccttggctaggaaggggaaatccctccaccccttgtgcttcctgggtgaggagatgcccccccctgcttcagcttgccctccatgggctgcacccagtgtccaaccagtctgagtgagatgaaccagg

SEQ ID NO: 98172 - DNA, 577 bp, Homo sapiens
ttgaaccaagtgatgaccaggagaaatattaacataagtctctaagaattcctagcaatcatagtgaaagaagggtggagagagcttgtcatatgcatgacagagtcatttaatccacttttgtttaaatctcaaaggatagggcaattgggatggcctggaaaacttgggccagaatcaatgcagtcaaaaacttgggccagaataaatgcagttaacagagaaggaaggggttaagtagaagataatgtattgtaaagccttgtgtcttgcatgtagaacagatatttcaccttcttaatattcttcttatccacttgaaaattgtcaataacttgactttccagaagccagaggaaaagcttttcctctggcatttcttagactcttgtcatccaccccatgttgtctgactggccaatgtggttgccttttaatttctaaaagcatccctgcacactcttctcactgtacaygaggtcacgtcaattcgtgcttctctgacttaaaagaaagcacagtacctcctctttgttctttaattcttaaaagaattctgatggagagcaataaaatt

SEQ ID NO: 98173 - DNA, 507 bp, Homo sapiens
tctcatgaatatggatccaaaaatccttaacaaattttagcaaataaaatttggcaatatattaattataccatgaccaagctggattcattccaaggacagtggttggttcagtgtttaaaaaaatcaatgaatacaatccacaatattaacaagctaaagaagaaaaaatcacatgatcatatcagtcagtgcagaaaaagcatttgacaaaattcaacacccattcattataaagatgctcagaaaacactaatggaagaaaactttcttaatctgatcatgagtatctacaaaaaacaaacaaacaaacaaaaccctaccaataacatatttaatggtgaaagactggatgycttccccttaagaataaaaacaaaggaaggatatatgacctatagttctgcaaggtctggctagccatctcagtatgtaaagaaaaggagatgaaaacatgcagattggaaaggaagaaaaaaaccatccctatttgcagatgataatgat

SEQ ID NO: 98174 - DNA, 327 bp, Homo sapiens
tgtctgtctctgagattttgtcaaatgcaaaaaaaaggatgccttgactgtcttgttatagcaaagtctgaatcattgctgattcgttctcatttgtgtggtcttggtttatttccacaacttttgtactcatttgctgtgtagtcatgcagttacacctggcatttctttctctaagattgtcttataatagagaaatagaaaatccttcttgaaggtttaaatgttaaatgggcacttttttcatcctaagagaaggttcattgttcttattcttatttttttctttttatttwattagctatttcaggacaatcatgttttgtt

SEQ ID NO: 98175 - DNA, 327 bp, Homo sapiens
tgtctgtctctgagattttgtcaaatgcaaaaaaaaggatgccttgactgtcttgttatagcaaagtctgaatcattgctgattcgttctcatttgtgtggtcttggtttatttccacaacttttgtactcatttgctgtgtagtcatgcagttacacctggcatttctttctctaagattgtcttataatagagaaatagaaaatccttcttgaaggtttaaatgttaaatgggcacttttttcatcctaagagaaggttcattgttcttattcttatttttttctttttattttatwagctatttcaggacaatcatgttttgtt

SEQ ID NO: 98176 - DNA, 604 bp, Homo sapiens
gtcagtaaattctaatcttattttcctattaaacgctgagtagtttctagcttatttacatgtaaacaaagttatacactaactccaagaccaattattttataacattgtatagcaagatttaataatgacttctctatgaaaatacattttagaaataggtcagtacgtaaattttgacaggtgaatcagaagtataaaaagttgagtgatacttctatattaaaactcccttcattttaacttatgaaaagttttcttaatactcagctctataaaaataaaaagcagagtaacatccaaaaatggatggtaaccctatatcataaatacgtgtccrtggatatgtaaattaattttgaaaaacatctatttcattaaaagataaatgtccaataaaattttaatttgtattatcatttatatttaaacagttaaatatttgcattactttagtcattatttattatataatgtgcaatgatagcatgctaagatggtaagtctcagactaattgtttttcattgaaatctttttatatgtacacacacacgaacacatatgcatgtactgttctaaagaaaaataaaaacaaaaacagaa

SEQ ID NO: 98177 - DNA, 592 bp, Homo sapiens
gttccagtcccacgaattgctctctcagtttcagtaggaaatgattgtagctagttctattgctttcagaaaataaacactttaacaacttggaaacaccaaatccagtcttattaatgacaaaaggcaaggatgcaaatcaaagatacagtgaggactatttttttctgcattcatcaaaaaaatctatgaaatggatatattttctgaacacaattttccatttatttggagaaaaaaatactaacttctgtcaaggaatattccacatttggtctcaaaaggtttataagtgaaaatcaatcatacttgagaaattgagttttttcatagttactgggtgagaggcatactttatgaaagtaaatggagttctgtctcragataatgagaatatagttgccaagagaaactgtgaagtattccctacagatcttttttcctacttgatcctatatcatgtaattatttttggaaaactttcaaagtagtgatgattgtaatgccataaaatgaataaaggggagggcaacagttcccaattaagatcggaagagtaataaaaatgtaaagaatatgaaggccctgccag

SEQ ID NO: 98178 - DNA, 531 bp, Homo sapiens
gtgtttttaatatgaagatatatgtactatctcaattctaggaaattattttttataattttgaaattatacaatgggaggtcagtaactagcaagtcatgtattaatacatgggtcaacacaggagctgcagagaaatccagataaaggattagaaacagaaggctcaggttgactatcaaagaatgtgttaacatctgaaaaaaagctggccatataagctataattctgatagttagacctggatttatttaaggatgttccaatgtgggctgagcacagctgtggataatgagcacagaagcaggtcctgggaatgactgtcatcctataaggtgtatcagccattgggaaaaagagattgaaaaacaaacttgaattattgagaaaattcccagtggctgttgaacttatatgttcttagacaggtcagtgtatctttaattctgagaaatgggtaagaaaaaaaagacatcccaactagcatgcaarggtaaggacaaggctcagaaatgaaataagtaccagga

SEQ ID NO: 98179 - DNA, 636 bp, Homo sapiens
ctgttatttttgttggcaaatcctttttattacccaccaacattttgtaaaatgtcatgtgggtttctcactgaaagacaagaagttaacagaaatacatactttgcatgaattgaaaaacatatgtgtggtgactactaatggatgtgactggtgaatgatcacgatatacatgtgtcatttacactgtcatttgtgcacttaagagctagcattaaagtttgtgtttttcrcaattattcataattaatataccatggtaactaaaatttgagccatgtgttgggggattggtgttatttcacaaaatcatagtaatgtaaacttgtatgtatacaaaccatgtacagagaggatgaactgtatatatttattgggtaaagcaactaataatttagatgagagactacactggttaactcaatcaaattaggatgccccttaagagctggtttcttggtccctaaccttattgctgctacacatcctcaaaaagggctgcagaggatgaccctaaccactatgctcttttaattcctgattgtgaggtccttggaaagccaaaaagcttagacagttaatatgtcaaaaaccagtaacaatttgtacattaaagaacttgaaatttgtgatgta

SEQ ID NO: 98180 - DNA, 638 bp, Homo sapiens
atttccattcaaacaaaattaagagaaagttttctgccctatgaaaagataaaagatcacatattgtcctattttctggttatattttccctctttttaaactgtgcttttggttgtgaggatggttagcactgtaggtaattctcagtcgtaggtaattctcagttccatttcttttcaggggaagtatcaaggtgacatkaggggacaggaaatattgtccctaaatgttctaagagtggatctcccatgtattcaagcaatcgaggggtgtttaatgagctccatctacatagcaatgatacagcatagctctgctggggctctctgctctccccttctccacaaaagggaaggacaggtaagaacaggcacaataaaatagaaaccagacagaaagaattgggaacaaggagacaagacaagaatcatgctttacgtgatttaatcctaatatttttatgagaggatggctatcatcatttcattttaaagatgaggaaaatgaagccgggtgcggtggctcatgcctgtaatcccagcactttggaaggccgaggaagatggctcacctgaggtcaggagttcgagaccagcctggccagagagatggccagagatggctagagatggtgaaa

SEQ ID NO: 98181 - DNA, 606 bp, Homo sapiens
cttatgtgccacgtaggagacattcaattttcttctcaataaaatcatttgacttttatgaacaaattccacctctaaacaggtctttatactaagatattttttaaaaaaagatttttaaaaaatacacatgttggtgaagaatgtgatatcagttayggattttccatattacgctgcttactgtgaagaactttgttcccctctttactgctcctgatttgacaaattcattggcaatgaagtgcagaaatccaagaaagataacaacctcagtattttggcccaaagtttcactctcagatgtacatacttgatgctcatatgtggtcttttggatgcccacacatgaatgccatctgttaagttgataacatgttaaacaaaatggatttacattttggcagtttacatggaaccaagaataacgtttttgaaacaggctttacacccatttaaatggctgaagctattcttttaaactagaatgtatcttcagattctggaaaaaaggatgccttagagtgggggaaaaagaaagatgtgatttacgacatgatttggttgccaaaacaaattataaatatacataaaagtattaaaact

SEQ ID NO: 98182 - DNA, 606 bp, Homo sapiens
cttatgtgccacgtaggagacattcaattttcttctcaataaaatcatttgacttttatgaacaaattccacctctaaacaggtctttatactaagatattttttaaaaaaagatttttaaaaaatacacatgttggtgaagaatgtgatatcagttatggattttccatattacgctgcttactgtgaagaactttgttcccctctttactgctcctgatttgacaaattcattggcaatgaagtgcagaaatccaagaaagataacaacctcagtattttggcccaaagtttcactctcagatgtacatacttgatgctcatatgtggtcttttggatgcccacacatgaatgccatctgttaagttgataacatgttaaacaaaatggatttacattttggcagtttacatggaaccaagaataacgtttttgaaacaggctttacacccatttaaatggctgaagctattcttttaaactagaatgtatcttcagattctggaaaaaaggatgccttagagtgggggaaaaagaaagatgtgatttacgacatgatttggttgccaaaacaaattataaatawacataaaagtattaaaact

SEQ ID NO: 98183 - DNA, 600 bp, Homo sapiens
accactttctcttccctcaactgtttccaatgtttctttttatctaaaaaaaaaaatgatgtacagtaatctcttaatgaaaacaaagcgtcataggtagagagtgaaagtctgctgttttttagtgttgttgttattcaaccatttacacaagtattctggggttgctactgtgttgcttagttaccctgaacacattattttttcactttataatagcatgtcatatgttttactgttaagtacgtatgtgtaagtataagaaaatgattgtttatcagttgcgtataaattcagaatcaggaatgatggtgataccaaacaaccacagatcgtacagaagtggctgagatagtgacacctttgctttctgttggttcagtatattcaaactttgttgcatgcatataattgaaaatattatataaaatcaccttcaggccatgttaaggaatatatgaagracccagtgaattttgtatttagatttgggtcccatccccaagatatctcattatgtacatgcacatattccaaaatctgaaaaaattttaagtccaaaacactctagtctcaagcatatcagataagggatactca

SEQ ID NO: 98184 - DNA, 600 bp, Homo sapiens
acactgttgcaaatgtagattagtaaagtggaaaacaatatgcagattcctccaaagaataaaaaatataactaccatatgatccaggcaattccactactgggtacataccccccaaaaatgaaattaatatgtcaaatagatatatggactaccatgtttattgcagtgctatttacaatagccaagatatggaatcaactcaagtgttcatcaacagatgaatggaggaagaaaatatgtatatattgaatactattcagccataaaaaatgaatgaattattgtcatttgcaccaatgtagttgaacctagaagamattaaccgaagtgagctaggcacagaaagacaaatgctgcatgatatcactcatatgcagaatctaaaaaagtcgatctttttttaaattttattattattatactttaagttttagggtacatgtgcacaatgtgcaggttagttacatatgtatacatgtgccatgctagtgtgctgcacccaaaagtcgatcttatagaagtagagagtagaatagtgattaccagaggctggggaattgagtgcggagggggaagagggagacgttggctaatggt

SEQ ID NO: 98185 - DNA, 609 bp, Homo sapiens
tcatcaactataatatgatataaggcatgctaaaagacaagaaaaaacttgatccaaagacacaatgcaaacattagaacaagactcaaatataaaatttattttagaatgatcatataggcaatttaaaatcactacrattaacatgttacatgctaatgaaaaaagtagaaaggatgcatgaccaaataggtgatgtaatgtgagagattgaaattgtaagcaagaatcagaaagaagtgctagaaataaaaaaccctttaatcaaaattaaggatgattttgatgagtatattaacaaggtggttatcactaaggaaagtatcaatgagcttgaggacatgttaataaaaattatccaacctgaaaagcaaacagataagagatatattatttaaaaggaaaagaatagccaagaactgtgggacaattacaaaaggcataacattcatgtaatggaaatggtataaataaaagcaaaagatgcagaataaatatttaatataataatgtctattttcaaaataatgtctcagcatccagcaattaattaatgcaaacttgttgataacaggctaatgaagaaaaattagcttaaaaatttagaaa

SEQ ID NO: 98186 - DNA, 572 bp, Homo sapiens
gtcatctaattcattttattttagatgatttttcaaaatgtatggctgattttttttcttgcaccagaattaataytgaatttataagtgtaatttttgaaaaataacagctactccagtttattctattgcttcctctaccttcaaaaggaaagtatcacagtaacttagacatgttttataaagtacctttcttttattcttaatctccctttttttttttggatctgagcagaaaacaatacatttctaaaatggcagaattgggttaaatttccacggtgactcacctgcaatcccagcactttgagaggccaagctgggtggatctcttgatcccaggagtttgagaccagcctgggcaacatggtgaaaccatttctaccaaaaaaacaaaacaaaacaaaacaaaaaaattagctgggcgtagtggtgtgtacctgtaatcccaggtaccttggaggctgtggtgggacgatcacctgagccctggaggctgaggctgcagtgagctgtgatttcaccactgcactccagcctgggtggcagagttggcaaagtgagaccctatg

SEQ ID NO: 98187 - DNA, 511 bp, Homo sapiens
aatttaaagagacaaggcggacactgagttaatacaggctctctaacttttgaatatttcctgagtgtgtcacaggatgtagagcccaaactgagcactgagtgaaaaaggcaacaagatgggtctactgaagtaactgaaatttgcagagcagcattcttgaaaggagggagctattcagaagagggtcccagaagtctctgtgtgtatggtggggttccaagggcttatttggctaagagttgaacaacacatgtgcargttaggttcctattgacttctaaaaagataaaagtgggaagaactactgaatttctctgagtgctgaaattctggcctaaccagagtggatagacttcattaattccaacaaaactcagaggagacaccagagatacctcatcttaggaattgggataatgtaagaatataggaatagtgatactataaagtatgcagactctatgcctgcataacagacttagcctctggacctacccacccagggtga

SEQ ID NO: 98188 - DNA, 647 bp, Homo sapiens
caaattgatctacaaattcagggcaatctctatcaaaattcaaatgacacctttcacaaaaatagaaacaaaaattctaaagttcatggggaaccacaaaagaccacaaatagtcaaaacaatcatcagcaaaaataagaaagccgaaatcatcaaattatttgacttcaaaatacactatagtaactaaaacagcatgttatgggtatagaaacagatacatagaccagtggaacagaatagggaacccagaaataaatccatgcatttatggtcaattgattttctacaaatgtgtcaagaacatacaatggaataaggacagtctcttcaaaaatagttgggaaaactaaatattcacatgcagaaaatgaaattagacccttatctcacatcaaatacaaaagtcaactacgcctggtttaaagacttaaatataagacttaaaactatagaactrtggggagaaacatatggaaaactccataacatttgtctggacaatgattttttggacacaacctcaaaagcataggcaatgaaaaaaagaatagacaaatgggatttcctcaaacaaaaaagcttctgcacagcaaaggaaataatcaacagagtgaagagaaaatctacatataattgcaaactgg

SEQ ID NO: 98189 - DNA, 647 bp, Homo sapiens
caaattgatctacaaattcagggcaatctctatcaaaattcaaatgacacctttcacaaaaatagaaacaaaaattctaaagttcatggggaaccacaaaagaccacaaatagtcaaaacaatcatcagcaaaaataagaaagccgaaatcatcaaattatttgacttcaaaatacactatagtaactaaaacagcatgttatgggtatagaaacagatacatagaccagtggaacagaatagggaacccagaaataaatccatgcatttatggtcaattgattttctacaaatgtgtcaagaacatacaatggaataaggacagtctcttcaaaaatagttgggaaaactaaatattcacatgcagaaaatgaaattagacccttatctcacatcaaatacaaaagtcaactacgcctggtttaaagacttaaatataagacttaaaactatagaactgtggggagaaacatatggaaaactccataacatttstctggacaatgattttttggacacaacctcaaaagcataggcaatgaaaaaaagaatagacaaatgggatttcctcaaacaaaaaagcttctgcacagcaaaggaaataatcaacagagtgaagagaaaatctacatataattgcaaactgg

SEQ ID NO: 98190 - DNA, 594 bp, Homo sapiens
agtctctaaagaatttttgtttttcttgccaattttggcttctatagattgctcacattctttggatcatatccgtcttccatctttaaagcaaagaatggggccgagcgcggtggctcatacctgtaatcccaatactttgggaggcctaggcaggtagatcacctgaggtcaggagtttgagaccagcctggccaacatgttgaaaccctctgtgtattaaaaatacaaaaaaattagccgggcgtggtggtaggcacctgtaatcccagcaaactcaggaggctgaggcagtaaatcgcttgaacccgggaggcagaggttgcagtgagccgtgatcacctcattgcactccagcctgggcaacaagagcaaaattccgtcttaagaagaagaaaaaaaaaaaagcaaagaatrgttatttctcaatttacatactgtaactgactctcctgcgaccttctcccatttattattactccagtgattacattaaatcccagataactcagaatactcttctgatctcaaggtcagctgattactaactttaattatatttgcaaccttaattccctcctacagcataacata

SEQ ID NO: 98191 - DNA, 595 bp, Homo sapiens
tacataaattcccactggcctgctaatcagaaagttctgatctagaacactaaaaacttccagatctaatatccaaaggatatgagataaataacaaacacttaaattcaccccacrtattctgttccctggtatttactggggaagaatttacagtttatgaaatagaaatacttaggtatcttggacacttttgaagtatggatttattaggtggactctcttccttaaaataataacagacactttctttgcaaatattacatacaagtttaccaagtaacaattcctgtgctaagtagttgattcactcacaacctcccttttcaagtgacctatgtgtaagagttaaagaaagaggaaagaaacaagaaaagcagctcaacagtcaaagacaggtttagtttggagaataaacgtgagaggggcttcaggccgagttaggtcaggagcactctatcttacagacaagagtatttaagggttcagggcaggagagcttatcacaggctcagaatgtttctgtgtctttttgtcttgcttatctgggagggagagtttggggtctgttcccatacgtcttcctgcagctgta

SEQ ID NO: 98192 - DNA, 606 bp, Homo sapiens
atgcagaaatctcatcaacagatctgagaggtcggctctacaatcagtaacagagacaaagagcagattttttagggcagtcctgatttttcttgattatattaatttcagaaaatgtgaatcactgaatgtatagatgtaaattaaatgttctaccattagaaggcttttcatataaattcataatcagaagaattttttcgtgtcacactatgcactaagaattttagaaaataaggacattgtgacatttcggtgtatgtgatratgcaattgtcagaccatgacaactgtgcatgaatagaaggaggatgcgaagccagcctgccttgcctcgcgctgtctctcctctccagtggctgtgcttcctcctcttccctttggccacctctgagcacattaagcttgcaggattgtgatgggatttaaagacatttcagctactcatgtgcacagcgctcttctcctcattctacctggagaacaacactaagaaggtacagtcagtgagagctttcagaggagaacaagtctggatgagaatcctctcgaactgggcatcagaataggtttctcctcctcactcatctctctgtgacacacagc

SEQ ID NO: 98193 - DNA, 606 bp, Homo sapiens
atgcagaaatctcatcaacagatctgagaggtcggctctacaatcagtaacagagacaaagagcagattttttagggcagtcctgatttttcttgattatattaatttcagaaaatgtgaatcactgaatgtatagatgtaaattaaatgttctaccattagaaggcttttcatataaattcataatcagaagaattttttcgtgtcacactatgcactaagaattttagaaaataaggacattgtgacatttcggtgtatgtgatgatgcaattgtcagaccatgacaactgtgcatgaatagaaggaggatgcgaagccagcctgccttgcctygcgctgtctctcctctccagtggctgtgcttcctcctcttccctttggccacctctgagcacattaagcttgcaggattgtgatgggatttaaagacatttcagctactcatgtgcacagcgctcttctcctcattctacctggagaacaacactaagaaggtacagtcagtgagagctttcagaggagaacaagtctggatgagaatcctctcgaactgggcatcagaataggtttctcctcctcactcatctctctgtgacacacagc

SEQ ID NO: 98194 - DNA, 606 bp, Homo sapiens
atgcagaaatctcatcaacagatctgagaggtcggctctacaatcagtaacagagacaaagagcagattttttagggcagtcctgatttttcttgattatattaatttcagaaaatgtgaatcactgaatgtatagatgtaaattaaatgttctaccattagaaggcttttcatataaattcataatcagaagaattttttcgtgtcacactatgcactaagaattttagaaaataaggacattgtgacatttcggtgtatgtgatgatgcaattgtcagaccatgacaactgtgcatgaatagaaggaggatgcgaagccagcctgccttgcctcgcgctgtctctcctctccagtggctgtgcttcctcctcttccctttggccacctctgagcacattaagcttgcaggattgtgatgggatttaaagrcatttcagctactcatgtgcacagcgctcttctcctcattctacctggagaacaacactaagaaggtacagtcagtgagagctttcagaggagaacaagtctggatgagaatcctctcgaactgggcatcagaataggtttctcctcctcactcatctctctgtgacacacagc

SEQ ID NO: 98195 - DNA, 637 bp, Homo sapiens
aaatattcataatggtttcttgtttttagtcaagattttctttgattcagatattatagaatcaatttttgtgcttttgcaygatattggtgagagcagtgaccacgttcaagtgttgtaaaaagaaaagatgtgtgtgtgcctgtgtgtgcttttgtaaaaatggctttgaggagaggggcacattctgccaaatatccttcctttctttttaacaaaagaggataagtcataatcttttgcttccaaggttatcaatttccaggtaatgttcccagtattggtcatgttactctcagctggaaggcactgggggacatcaggtgtgttccaactgaagatgggtgactccagtagttcctgggtggtcttctctgtaggttaaagctcttcctccagatggagctgaacactgccagtcatcgctctctaagtcaagtcctccagtgcggagagctggagcatttgagcattccttttcttctccatgccaagatctgagtttcctgtgttcctgttctcacaccattcttctctgtttttccacctatttcaacaaaacttaaatctgtcaacacttggccatgccctctgccagtgtgcggtatttgggttttaaatgtagaggggatgttca

SEQ ID NO: 98196 - DNA, 637 bp, Homo sapiens
aaatattcataatggtttcttgtttttagtcaagattttctttgattcagatattatagaatcaatttttgtgcttttgcatgatattggtgagagcagtgaccacgttcaagtgttgtaaaaagaaaagatgtgtgtgtgcctgtgtgtgcttttgtaaaaatggctttgaggagaggggcacattctgccaaatatccttcctttctttttaacaaaagaggataagtcataatcttttgcttccaaggttatcaatttccaggtaatgttcccagtattggtcatgttactctcrgctggaaggcactgggggacatcaggtgtgttccaactgaagatgggtgactccagtagttcctgggtggtcttctctgtaggttaaagctcttcctccagatggagctgaacactgccagtcatcgctctctaagtcaagtcctccagtgcggagagctggagcatttgagcattccttttcttctccatgccaagatctgagtttcctgtgttcctgttctcacaccattcttctctgtttttccacctatttcaacaaaacttaaatctgtcaacacttggccatgccctctgccagtgtgcggtatttgggttttaaatgtagaggggatgttca

SEQ ID NO: 98197 - DNA, 637 bp, Homo sapiens
aaatattcataatggtttcttgtttttagtcaagattttctttgattcagatattatagaatcaatttttgtgcttttgcatgatattggtgagagcagtgaccacgttcaagtgttgtaaaaagaaaagatgtgtgtgtgcctgtgtgtgcttttgtaaaaatggctttgaggagaggggcacattctgccaaatatccttcctttctttttaacaaaagaggataagtcataatcttttgcttccaaggttatcaatttccaggtaatgttcccagtattggtcatgttactctcagctggaaggcactgggggacatcaggtgtgttccaactgaagatgggtgactccagtagytcctgggtggtcttctctgtaggttaaagctcttcctccagatggagctgaacactgccagtcatcgctctctaagtcaagtcctccagtgcggagagctggagcatttgagcattccttttcttctccatgccaagatctgagtttcctgtgttcctgttctcacaccattcttctctgtttttccacctatttcaacaaaacttaaatctgtcaacacttggccatgccctctgccagtgtgcggtatttgggttttaaatgtagaggggatgttca

SEQ ID NO: 98198 - DNA, 451 bp, Homo sapiens
ctcctaactccaggggttttgcaaagtgaccttagttgagwcgtttagcttctctgcctctcaccttttgcatctgaagagtgaaaacaataaaccctactttacagcagcctgtccaatagaagttcctgggatgatgatggaaatagcatatctgggctgcccagtacagtagtttctgtccacctctgactgttgagcacatggaatgtgtctactgaggctgagaaactaaggtgcgtcttctgaggtgatatggtttggctgtgtccccccacaaatctcatcttgaattgtaactcccatgattcccaggtatcatgggaggaacctggtgggaggtaattgaataatgagagtgggtctttcccatgctgttcttgcaatagtaaataagtctcatcagatctgatggttttaaaaaacgggagttaccctgcacaagctctct

SEQ ID NO: 98199 - DNA, 532 bp, Homo sapiens
tgccttcctagtgccatggatgaatctggcccactgaccaggcagcactaacaagcaatggggaaactgagtcatttttatggacgtgtctagtctccagtatgttatatgttcctggggcacttgataaaccccttcctcttttccttctctgcyattttgttctgttcctcagagtagtgggagagcgctctgcctgaacacttgatcgtgtgttgtggaccattccctgctgagtaatgacgtgcatcttttcgtgaacttgctgatcacttctgtatcttcttttctggagtgtctgttcaaattttttgctgatttttctttacttgaagacagagagaaacagggagattaagagagaccaaattttcctcccagtgtatgacttccttaataatttgatgatagcgtatcttgacgagcagtaacccctaattttttgaggttcatttgatcactttttattattacacctgcttttgtgctgcttaagatatcattgcttattccaattgtgtaagcaaatata

SEQ ID NO: 98200 - DNA, 489 bp, Homo sapiens
aggcagcactaacaagcaatggggaaactgagtcatttttatggacgtgtctagtctccagtatgttatatgttcctggggcacttgataaaccccttcctcttttccttctctgctattttgttctgttcctcagagtagtgggagagcgctctgcctgaacacttgatcgtgtgttgtggaccattccctgctgagtaatgacgtgcatcttttcgtgaacttgctgatcacttctgtatcttcttttctggagtgtctgttcaaattttttgctgatttttctttacttgaagacagagagaaacagggagattaagagagaccaaattttcctcccagtgtatgacttccttaataatttgatgatagcgtatcttgacgagcagtaacccctaattttttgaggttcattkgatcactttttattattacacctgcttttgtgctgcttaagatatcattgcttattccaattgtgtaagcaaa

SEQ ID NO: 98201 - DNA, 546 bp, Homo sapiens
ttcaagaccatcctggccaacatagcaaaaccccttctgtactaaatatacaaaaattactcgagcatggtggcatggacctgtaatcccagctactcaagaagctgaagcaggagaactgcttgaacccgggaggcgaagactttartgaaccgagatcgagccactgccctggagcctgggatacagagtgagactctgcttaaaaaaaaaaaagaaagaaagaaaaggaaaaaaaaaggaaagaaggaaggaaggaaaccagtgagatattatcctgactgcctttcccttgaagacgatctctgttttcaacgtctgcttagtagtctttatagtttaataagcctaatactagattaaatacagtagccccctcttacccacagtgttgctttctgtagtttctgttgtccatggtcaacttcagtccaaaaaatgttaaatggaacattccagcagcaaacaattcataagctttaaattatgccccattctaagtagcaggatgaaatctcaagctgtccttctccatccttccaggga

SEQ ID NO: 98202 - DNA, 546 bp, Homo sapiens
ttcaagaccatcctggccaacatagcaaaaccccttctgtactaaatatacaaaaattactcgagcatggtggcatggacctgtaatcccagctactcaagaagctgaagcaggagaactgcttgaacccgggaggcgaagactttaatgaaccgagatcgagccactgccctggagcctgggatacagagtgagactctgcttaaaaaaaaaaaagaaagaaagaaaaggaaaaaaaaaggaaagaaggaaggaaggaaaccagtgagatattatcctgactgcctttcccttgaagacgatctctgttttcaacgtctgcttagtwgtctttatagtttaataagcctaatactagattaaatacagtagccccctcttacccacagtgttgctttctgtagtttctgttgtccatggtcaacttcagtccaaaaaatgttaaatggaacattccagcagcaaacaattcataagctttaaattatgccccattctaagtagcaggatgaaatctcaagctgtccttctccatccttccaggga

SEQ ID NO: 98203 - DNA, 546 bp, Homo sapiens
ttcaagaccatcctggccaacatagcaaaaccccttctgtactaaatatacaaaaattactcgagcatggtggcatggacctgtaatcccagctactcaagaagctgaagcaggagaactgcttgaacccgggaggcgaagactttaatgaaccgagatcgagccactgccctggagcctgggatacagagtgagactctgcttaaaaaaaaaaaagaaagaaagaaaaggaaaaaaaaaggaaagaaggaaggaaggaaaccagtgagatattatcctgactgcctttcccttgaagacgatctctgttttcaacgtctgcttagtagtctttatagtttaataagcctaatactagattaaatacagtagccccctcttayccacagtgttgctttctgtagtttctgttgtccatggtcaacttcagtccaaaaaatgttaaatggaacattccagcagcaaacaattcataagctttaaattatgccccattctaagtagcaggatgaaatctcaagctgtccttctccatccttccaggga

SEQ ID NO: 98204 - DNA, 657 bp, Homo sapiens
gcatattaaggagagatttagaagctggcagaagtttttgttcaatcagctacctactaagcccaaaactcatayactgtatagccaagaaaaagtaaactatattctcttcctaattattcttttgaaaaatgacttcatgttcattgtcttctcttcattcttaaaaaaggaactcattttgtaaaacagtcctgactgataatgtgtctcttgaccttgcaggtcactggcccaatgaatgtctctgagccaaattccagctttgctttagtaaatgaatttatactccaagatttatcttttgagtggacaattcagatcttcctcttctcactcttcactacaacatatgcactgaccataacaggaaatggagccattgcttgcgccctgtggtgtgaccggcgacgtcacactcccatgtacatgttcctgggaaatttctcctttttagagatatggtatgtctcttctacagttcccaagatgttggtcaacttcctttcagagaaaaaaaccatctcctttgctggatgttttctccaattttatttcttcttctctttgggtacatctgaatgcttgattttgactgtgatggcctttgatcagtaccttgttatctgccatcccttgcactatcctaataaatca

SEQ ID NO: 98205 - DNA, 623 bp, Homo sapiens
tttttgttcaatcagctacctactaagcccaaaactcatatactgtatagccaagaaaaastaaactatattctcttcctaattattcttttgaaaaatgacttcatgttcattgtcttctcttcattcttaaaaaaggaactcattttgtaaaacagtcctgactgataatgtgtctcttgaccttgcaggtcactggcccaatgaatgtctctgagccaaattccagctttgctttagtaaatgaatttatactccaagatttatcttttgagtggacaattcagatcttcctcttctcactcttcactacaacatatgcactgaccataacaggaaatggagccattgcttgcgccctgtggtgtgaccggcgacgtcacactcccatgtacatgttcctgggaaatttctcctttttagagatatggtatgtctcttctacagttcccaagatgttggtcaacttcctttcagagaaaaaaaccatctcctttgctggatgttttctccaattttatttcttcttctctttgggtacatctgaatgcttgattttgactgtgatggcctttgatcagtaccttgttatctgccatcccttgcactatcctaataaatca

SEQ ID NO: 98206 - DNA, 657 bp, Homo sapiens
gcatattaaggagagatttagaagctggcagaagtttttgttcaatcagctacctactaagcccaaaactcatatactgtatagccaagaaaaagtaaactatattctcttcctaattattcttttgaaaaatgacttcatgttcattgtcttctcttcattcttaaaaaaggaactcattttgtaaaacagtcctgactgataatgtgtctcttgaccttgcaggtcactggcccaatgaatgtctctgagccaaattccagctttgctttagtaaatgaatttatactccaagatttatcttttgagtggacaattcagatcttcctcttctcactcttcactacaacawatgcactgaccataacaggaaatggagccattgcttgcgccctgtggtgtgaccggcgacgtcacactcccatgtacatgttcctgggaaatttctcctttttagagatatggtatgtctcttctacagttcccaagatgttggtcaacttcctttcagagaaaaaaaccatctcctttgctggatgttttctccaattttatttcttcttctctttgggtacatctgaatgcttgattttgactgtgatggcctttgatcagtaccttgttatctgccatcccttgcactatcctaataaatca

SEQ ID NO: 98207 - DNA, 657 bp, Homo sapiens
gcatattaaggagagatttagaagctggcagaagtttttgttcaatcagctacctactaagcccaaaactcatatactgtatagccaagaaaaagtaaactatattctcttcctaattattcttttgaaaaatgacttcatgttcattgtcttctcttcattcttaaaaaaggaactcattttgtaaaacagtcctgactgataatgtgtctcttgaccttgcaggtcactggcccaatgaatgtctctgagccaaattccagctttgctttagtaaatgaatttatactccaagatttatcttttgagtggacaattcagatcttcctcttctcactcttcactacaacatatgcactgaccataacaggaaatggagccattgcttgcgccctgtggtgtgaccggcgacgtcacactcccatgtacatgttcctgggaaatttctcctttttagagatatggtatgtctcttctacagttcccaagatgttggtcaacttcctttcagagaaaaaaamcatctcctttgctggatgttttctccaattttatttcttcttctctttgggtacatctgaatgcttgattttgactgtgatggcctttgatcagtaccttgttatctgccatcccttgcactatcctaataaatca

SEQ ID NO: 98208 - DNA, 523 bp, Homo sapiens
aatttatcaacatttttgtgggacaataaaatattctagcctaakgacatccaaacattacttccttctgagcccctaaagggcagattctaattccatctatagtaatatcagtcaaaatattcacaaatgcattcttctaaatgcctaatatttttacctaaataaggtatcaccaaaaacgtgatgggtcaatttattgagttttagataatagaatatctccccctaaaaattggacagggcaatggtgtacttgtggatacactgcttaagttcaaaaaataaaatcaatggcagttcattgtcatttgttgctaaaagaatgtgaaaataacatgaaggaaaatttttaaaggaaaaaagcatttatagttcaattgctctaatgtatctatttttgttaatatgtctgtttcatgtgatttaatgttgaacttgctcccatttatagcaagttttcataattatcattcttagaaagcataatattttattgaactaacatgccatgaattgtgaa

SEQ ID NO: 98209 - DNA, 648 bp, Homo sapiens
taggaatgcatttgtgaattggggcctggacattccaggtagaacaattatttgctccttggatgtaagacagtatcaagcttttagtcaatcttattagaactctgccatatctctcacttgtatagccgctgaggatctttcctgtttccatactcctttccagggtatatgacttttaagttacctgagttctgatcagcaaatggactcaggaagaacaggtagtcaaggcaggcaatatttccaccacagtttcagaactccctactttgtggtactaagttaatacatttgtgcagccactaccttttcaaaggtttcttcttacaacctcaaatactatgactggttcacaaccttttccatagtgctaaattatttgaccaaacaccgcatatataccatattttttcaaagccaaactgtatcccaaagagagagaaggagagagaaagaayagcagtaaaaatacagtgttatttcaggttgatatttaaaaacaattgtgctggttaatggtttcctcgggggaaatgacaattgaaagtcggtattttctactttcaaatacaagtcatggtgtttattcgctgcctttacaactgaatagatggaattcgctgaacaaactttgattctaccctc

SEQ ID NO: 98210 - DNA, 601 bp, Homo sapiens
aacaggcagaaaaggtaacttgcctagttggagatggcatctgatctcaggcaggctaacaatggagcccacagtttttactactattaggggaaaagaccaacactatcgaatgaaatagattggatcaaatctaagtcactgattgtgtgagcttatgcaaattatttgacctttctgcctagatttgtttagactataaaatagaactaatgataatacttttgtcagacagtggatttgatgattaaatgcggtaaatcaaggtaggatcttacacatagtatttatggaatctatttcagttaatattattaatgtctttcatttgtagggctcttcagcatttcccaaacacttttmtatagttgttcagttcatcctcacaaattctgtcatcacacagttaaggtagacattcccatactcatttcactgatgagattcaaagaaatcaagtatactgtccaaggtcacccatagtaagtgaaggaaccagttcttctgacttcaagttcagtaagaattctgctgtaccatacatcctattctgggaaatgtggctaagtcctgtgtagctaacttcagaactacatggcca

SEQ ID NO: 98211 - DNA, 533 bp, Homo sapiens
gaagaactaagggatttctttccagtagttttaaggtaataactagtcaaattatacaaatatttatgtaaaacgtatttcaygtgcaaaatatgtcactgagtgaaaatggcagatcatgaaacaatagtattatataatcttacacaaacatgaagtcatgggattatgggtaattaagattcgttgtttcctcttttatgctaatatctttatttcctaatttttccatgacaaatatgcattttttgttcaatttacaaacaacatggagttaacaaaaaattagtgtttacaaatggatgcataatttaaagcaatgcttttagacacaccacttacccacacttcccctccactttgtgtgtaagggaaaggataatgctactgtctttggtaagcttttaccatgtctttacagagcttctcaagtacttttccatgtggggtcactttgtggagaggagttaatttggcaccctagtccttctatttcactcagaaccagctttttctgcaaaggaaagagtggt

SEQ ID NO: 98212 - DNA, 609 bp, Homo sapiens
agattaaagatttaaatgtaaggccacaaactatgaaaatcctagaccaaaatctaggagatatttttcttgacattggccttgggaaaaaaattagctaagtccccccaaagaaattgcaacaaaaccaaaaattgacaagtgggacctgggtaaacgaaagtgcttctgtacagaaaaagaaactatcaagaggggaaacagacaacttaccgaatgggagaaaatatttgcaaactatgcatctgacaaaggtctaatatcccaaatgtaaatagaacttaaacaatacaacagacaaaaaacaaatagccctattaataatgggaaaaggacacgaatagatccttctcaataaaaagayatgcaaggagccaacaaatatacaaaaaaatgcttatcactaatcatcagagaaattcataccaaaaccacaataagataccatctcatgccaatcagagtggctgttatgaaaaagtcaaaaaacaacagatgctggtgagcctgtagaaaaaagggagtgcttgtacagagttgttgggaatgtaaattagttcagcctctgtgggccaaaattttggagacttctcaaatcacttagaacaa

SEQ ID NO: 98213 - DNA, 609 bp, Homo sapiens
agattaaagatttaaatgtaaggccacaaactatgaaaatcctagaccaaaatctaggagatatttttcttgacattggccttgggaaaaaaattagctaagtccccccaaagaaattgcaacaaaaccaaaaattgacaagtgggacctgggtaaacgaaagtgcttctgtacagaaaaagaaactatcaagaggggaaacagacaacttaccgaatgggagaaaatatttgcaaactatgcatctgacaaaggtctaatatcccaaatgtaaatagaacttaaacaatacaacagacaaaaaacaaatagccctattaataatgggaaaaggacacgaatagatccttctcaataaaaagatatgcaaggagccaacaaatatacaaaaaawtgcttatcactaatcatcagagaaattcataccaaaaccacaataagataccatctcatgccaatcagagtggctgttatgaaaaagtcaaaaaacaacagatgctggtgagcctgtagaaaaaagggagtgcttgtacagagttgttgggaatgtaaattagttcagcctctgtgggccaaaattttggagacttctcaaatcacttagaacaa

SEQ ID NO: 98214 - DNA, 611 bp, Homo sapiens
aatatatttatttcattaggatgctactaatgaaattaactttttttttaaaaaaaggtgaatcatctcatttttatcaggttcactacatatatatgaagtagttgataaatgactcagcgttggccaattgcaagaataccacttaaaagtaaatggttattactgaagagtgaattatayattttcattttgtagacttaacatttaaaatggaagatggtgggaagcacacacatttctcagtcttgttggaaaagcaaatgacaacgagattttctgtttcttgtttcgttttgtttttagatgcattagcaagacaggtgtgggtagaatggagtagccatgaacatagacaaaaagtggagagagtgaaaacatatcagagtgaaaaaacatagataaatgtaagggagaagaaagaaaaaaaaataaagaacaatatttaaagagaacaaaataaatagagccagaaagaaacagagaaggggaaaagaacaggcaacaaattaacagggaaaagaagtcacaaccagaaaaaaaaagaaaatgaactgcttattgatgaataaagaaagagagaaaaagaaaaataaggaaggaggcggagt

SEQ ID NO: 98215 - DNA, 611 bp, Homo sapiens
aatatatttatttcattaggatgctactaatgaaattaactttttttttaaaaaaaggtgaatcatctcatttttatcaggttcactacatatatatgaagtagttgataaatgactcagcgttggccaattgcaagaataccacttaaaagtaaatggttattactgaagagtgaattatacattttcattttgtagacttaacatttaaaatggaagatggtgggaagcacacacatttctcagtcttgttggaaaarcaaatgacaacgagattttctgtttcttgtttcgttttgtttttagatgcattagcaagacaggtgtgggtagaatggagtagccatgaacatagacaaaaagtggagagagtgaaaacatatcagagtgaaaaaacatagataaatgtaagggagaagaaagaaaaaaaaataaagaacaatatttaaagagaacaaaataaatagagccagaaagaaacagagaaggggaaaagaacaggcaacaaattaacagggaaaagaagtcacaaccagaaaaaaaaagaaaatgaactgcttattgatgaataaagaaagagagaaaaagaaaaataaggaaggaggcggagt

SEQ ID NO: 98216 - DNA, 597 bp, Homo sapiens
acttcggccagggccagaacaagttcctctctacctgtgcttctcacctgacagtggtcagcctgatcttcatgccatgtatattcatctatttgaggcctttctgcagcttctctgtggataagatattctccatgttttacacagtgatgacacctatgttgagccccctcatctacacactcagaaatgctgatatgaagacagctatgaagaagctgaggataaaaccatgtgacattccatttccttgttaaagaatgagcagaaraggtgatttgaaaaacatactctttcttggaagactcttaactcatcttgtacatgtctaaaaaccattttgatgactttggtataaaaaagaagatagcctaaagattataatagatcactcttgattacaatttaaaagcacaggtggcactctggaaagccacctatgccttttgaccataatcaagagaactcgggaactcagtagaatttactggccacaaatgataacaagcattaattgaaagatcaacttttctatcttcatgttctaagtactcttcatttattcaatttgttccactttttaatctattcaaatga

SEQ ID NO: 98217 - DNA, 542 bp, Homo sapiens
agtagaaaaaggaaagaaagaagaaaggagagagagagaagtacagaaaaagttacaataatcaaaataaaaaycaagagaaaagggaaaagaaagactagcagagacataaatggaaagatagtcgtatgacttaaaaacaaatggtgaagagacagagagatactagtccatgaggagagcaagaccatccagaggcaaaactccttatccaaggaattcagaagtaattagacatccctattatgtaaagctggcatctggtatgagatttcttttccaaaaatttgtgagtaaccagaatttctatgcatctctggaatgcatgtattctaaactcattgtgcaatccctgctgacatcaaggcaccaaaatgtctataaatgtaattgtttaccatgacctatgtggctaatatggaaaaaattacccttaagctcccactttaaggtccataaataccctaaggaaaaaactactgcagtggcgtcctcagtcctctcttgttgaggagccctgctgcactcctctgcagcgttct

SEQ ID NO: 98218 - DNA, 567 bp, Homo sapiens
tataattatataaataattataatactgttataattatataaataattataatactgttataattatataaataattataatactgtcataattatattagaaatatactattataattttataataattacatttatataaaatatctatatgtagtttcatgattatttagttccttttcatttttggaacctatgytaatatttcccctctattgctcctctttccctaaggtctcgagttcctctgagcctgatgatgagccaggacaggaaggggcctgggcctccaggcagcagcatctctccaggatgcccccagccacagcataaggaattcctacacttttgttatcttaaacaaaaccttctagaattccttctaactctaggagactgaaatgtatttttctttctttcaactgtctcctgtctgtccctgactccctcactccgttttttaatgtttggccatttatctcatgagcttactaaaaataaattgtatactcagcaatggataacatagaagaaatggataaattcctagatatgtacaatcttcca

SEQ ID NO: 98219 - DNA, 615 bp, Homo sapiens
cagtataaatgaatcaaaaagtttgatacattacactgatagaataaaagacaaaaagtgtatgatcatttcaatagatacaaaaacagcatctgataaaatttatcattgcttcatgataaaaattaaacaaatttaggcatagaaggagcatacctcaacataataaaggccatatatcagaaactcacagtgaaaatcatactgacgtaggacaaacagaaaatccttcttctaagaactgaaaaacgacaaggattctcactttcacaacacctatttcatatagtattggaagttttggccagagtatcagcaagagaaagaaataaaacgcattsaaattggaaaagaagaagtcaaattgtttctcatggcagatgacatgatcttatatagagaaaaacataaaaacgttatcaagacaactcttagaagtgataagtgaattcagtaacgttgcagaatacaaaatcagcatacaaaaatcagcagcacttttatgtggtaataatcaactgtctgaaaagaattcaagataacaatcttatttacaatagctccaaaataaaaaaatataattcttaggaattaatttaaccaaggatgtgaaag

SEQ ID NO: 98220 - DNA, 607 bp, Homo sapiens
tctaatgacagagttctttcttattaccactttaaaacactacaagtaaccgggagtagctgaaattgaaagtaaatattaatttgtgccctggcatggcactatattgasaaagagtatttttaaatatcttggttttgtattttatttttataccactaataataatgaatcaggtattcatagtactgttgaaagaactacatacccagataaatacagtatcaataatgcaggtaaacagaagaaagagtagacccattgtatataggtaatttattggaatcacaaaatttgcattcctggtttcaagtctagtgttcttagcaagaaaaaaaactctccacaattcatattttcccttctattgttgtgatttattaaaataaacatgtgtaggaattgagtcatgaaagtcacagttttgttgtttaaacaaaagtctaattgtttactactttataatatacatgatgaagaattttggttgtttccaagaagaaacagcacactccctttcatgtttcagttacctctgccatctccatgtcttccagactaatgaatgtgttcagcatggaaactatcaattttgttagctgcctta

SEQ ID NO: 98221 - DNA, 607 bp, Homo sapiens
tctaatgacagagttctttcttattaccactttaaaacactacaagtaaccgggagtagctgaaattgaaagtaaatattaatttgtgccctggcatggcactatattgagaaagagtatttttaaatatcttggttttgtattttatttttataccactaataataatgaatcaggtattcatagtactgttgaaagaactacatacccagataaatacagtatcaataatgcaggtaaacagaagaaagagtagacccattgtatataggtaatttattggaatcacaaaatttgcattmctggtttcaagtctagtgttcttagcaagaaaaaaaactctccacaattcatattttcccttctattgttgtgatttattaaaataaacatgtgtaggaattgagtcatgaaagtcacagttttgttgtttaaacaaaagtctaattgtttactactttataatatacatgatgaagaattttggttgtttccaagaagaaacagcacactccctttcatgtttcagttacctctgccatctccatgtcttccagactaatgaatgtgttcagcatggaaactatcaattttgttagctgcctta

SEQ ID NO: 98222 - DNA, 607 bp, Homo sapiens
tctaatgacagagttctttcttattaccactttaaaacactacaagtaaccgggagtagctgaaattgaaagtaaatattaatttgtgccctggcatggcactatattgagaaagagtatttttaaatatcttggttttgtattttatttttataccactaataataatgaatcaggtattcatagtactgttgaaagaactacatacccagataaatacagtatcaataatgcaggtaaacagaagaaagagtagacccattgtatataggtaatttattggaatcacaaaatttgcattcctggtttcaagtctagtgttcttagcaagaaaaaaaactctccacaattcatattttcccttctattgttgtgatttattaaaataaacatgtgtaggaattgagtcatgaaagtcacagttttgttgtttaaacaaaagtctaattgtttactactttataatatacatgatgaagaattttggttgtttccaagaagaaacagcacrctccctttcatgtttcagttacctctgccatctccatgtcttccagactaatgaatgtgttcagcatggaaactatcaattttgttagctgcctta

SEQ ID NO: 98223 - DNA, 609 bp, Homo sapiens
atcaattttgttagctgccttatcctcatgggctttccctcaagcccagaaatgcagctcctctacttcggtctcttctcagtagcctatactctcaccccgatgggaaatgcagccattgtctgtgctgtgtggtaggaccagcaccttcacactcccatgtacaccctcttgggaaatttctctctcctggaaatatgttatgttactgcaactaaactgctggccaacttcctctccacaagcaagtccatctcattcatgagttgttttgcacagttctacttcttytctttggggtatgatgagggcttcttcctttgcatcacggcctttgacaggtatcttgccatctgccgccctctacgttatccatgcatcatgactaaacaagtatgcactggcctcatcatttttgcatggtcatgtgtctttgtaatcttcctaactctggtgattctcatttcacagctatcctactgtggcccaaatattatcaaccattttatttgtgatcccgtcccattgaagatgctgtcctgttctgaagacatcatcatcacccagctcatttactccacattcaattctgtcttcataattggcacc

SEQ ID NO: 98224 - DNA, 604 bp, Homo sapiens
tggatcacaaatggattgtctgaatctacacttagacaagataaaaactgactaatgctgcagcttaacgcctctccagagtagccatagaatgtagtggtggaggaaatcctygtaagccaatgattcggtagcaatatacttagttgtccactttgaatgttggggagaaatagcttgctatgcaagataaggatatgtgtagtataatgattgttgtaaaaaagtttcactaagcaaaccccctcaaaatacagaaaaatcagatttaatgaaatttgaggtggaggcctatgtatgggcctatgagaataagcacaaagtatgcagatctttgtttctcaactctgtgcccattagagagtatcctccagagtggaggcactcaatagctaagtgaaaagaatgagtcatctaaaaatgtcagtcagctctgatttcattcacctcagagcttataaaagggaatataaagaaagctgtataaatggaaaatatgcacgtgccaaaaaatacaggcattatcttaccaaggttggtgacaaatcactgagccactgaagatgcagcctcgatgagaaaccaatgttaagccctcaatatg

SEQ ID NO: 98225 - DNA, 510 bp, Homo sapiens
gagaaaatttccagggaggatgaagaagtagaatattaaaactagcacaaagaccaggagctaaatatctcgaaactgggtcaaacgaaggaggatgaattctcttatcactgttctgttctcgctttccatttccctggcctgcagtacattaagaagcagaattaattgttattgctatgtcttccaactagatactagttctacagctaaaaaatatttggcacatatagtacttcagctaaaaacaacacttcccatccctctcctattctggggaaactccgttaccttaatttctccaaatttaaaatgaaaaatgaaaacaaaatatggttctcaaagctacagktttattcccattcaaccatgtgcttctacagaatcattttccatgttaggagtctggtatcctccacgttgggattcctacattcctaaatcatgtaagtttcctaatggagacacaacctaacttcaaatctgaaggtctttgagttttttggatat

SEQ ID NO: 98226 - DNA, 529 bp, Homo sapiens
  misc_feature (1)...(529): n = A,T,C or G
ttgaacttgaaactttgaaggaattagagtagataagacattaatggtagaagagaaaccacaggggtgaattatatcctacaaaagagaaatcttcatgatttaacctnttttttctgagtgacttttattttgccttattaacagaaacctgagagagtatgttgctttgtattaaatggttgagaccattatttgatataaaagctgaaaatttaatttttgtattttggagaattctgtggttccaagtaattgaaagaatgaytaaagctgtatgtcatagaccctgctaaaatgaaataacttgttgggaacattccatgcagatttccaaaatgtattttaccttattattagagaaagaaaataaacttttaaaataatctgataactagcattcatatatttaataagtattttggttacagaagggaaggtgatactgtacattgtaactgctgagacttttttttaaccaatgtctttggtagatagcgaggcacaattattttctcttagggaggat

SEQ ID NO: 98227 - DNA, 563 bp, Homo sapiens
ctaatcttattggtcataatatttcagtaaataaaacccttaggcactggtaatgaagtacatgactaaattaatggaagagaatggtgagtccagaaatagaaacaaatacttactagaatttagcatgtgataaatagtgcagcattgatctggtcttaaattctgagatgaaattccctttagaagaaaactggtagtgtttcaagattcagtggattttgagtgagcaataatttgcctgttggagaatattataattttgttccattctttacaacaggccaggatgggtagtatacttgtttcaatgcaactgttttttctaattgatatatatataattatatagctataagtagtctccacatttgtatttataaccagatacccagkgcacactgtatgtgtgacatttttgcttaatgcagtattcatgggtgcccagagaaacaaaaccattacattattatcttttaaaaaagggttgataggtgaggcatttaaaagttctggctaaaataaggtttggggattattaacggatttaatttctgcaagcc

SEQ ID NO: 98228 - DNA, 563 bp, Homo sapiens
ttattgtgcactttgtgcctactattattacattgtaatatataatgaaataattatacaactctccataaagtagaattagtgggagccctgagcttgttttcctgcaactagacagttccatatgggagtgatgggagacagtgacagatcatcaggcattagattctcataaggggtatgcagcctagatccctcatatgcacaatttacaacagggtttgccctcctgtgagaatctaatctaatgccactgctgatctgataggaggtggagctcaaacagtaatgtgagcaatggggagtggctgtaaaaaacagatgaaccttctctcccttgccccccagcccaactcccctgctgttgtgtggccctggtgtttggggacccctgatctagagcccaatcttgtaactaggaaggcacatgactctctccaaggtcaagaggctgaatagaaacacttaaatgaagacttcaaaattagattstcttgtgtacatgtatctacagtagagtgttaaacacacatctaccttcacagtattcaaatcgctcttta

SEQ ID NO: 98229 - DNA, 585 bp, Homo sapiens
tcattgcaaaaatatgaaacaggcacagaaactaaatctaatgctttattctttctctcttactttgatccctcctttcctyccttctttctttctctctttccttgtctctctctctctctctttcttcctttcttcagatttcaaattccttataacctgtcgtatggccaaaccacccctggagaaagtggcaagctgacatatttaaatttaaaagttgccttatttcctctgcattctggtcctggaaatggagtaagtttgctttgcacactcttggctacaggggtgatcagcattctgtctgtgcttcccaacatttctgcaagcatctcccatctgaggtgctgcattatttccaacctgccttagactcagacactccaccagacatgatgggccagttaagcttcgtaacaagcagagctaggacatgtagattttatttaaaaggacacatgactatccattcaagatgaaatgttgtcatcctggtcaggcctggatccaatctgtgttggagaacatgaaataacttctggctacaacaacgaatcatcatacgctaatatgacctagtca

SEQ ID NO: 98230 - DNA, 605 bp, Homo sapiens
tataatttttcaggtaggatgccaagtaatttaaaaagttatcacattwatccttaccccttatagtaagtcaaggaagtcaaggcattacatggcatctcacatttataaaatggtctttctttataattcatttaaattattacttcatttcatcttcacagttgttctgttgtgagaagggcatgattcacatttcagatcatgtgaaaaaactgagatccaaagaggctgatcaatacaaagagagttttgaaagagctaacacttgagcccagattagtatccattctaggaagctctgaaaggcctacttccatgtaagacccactctgaaggcatgcgaagaatgtagccttcagaatcatccagatgtggcaattcaagtcctggctctgccatgtcctagctctgtggccttggtcaagtcttttaacctcataccgctctggttactttatcttaactggttacttaaataattcctatctcataaaattgctgcatgatttaaatgagatacattttgccatgtgcctggagcttaatagtttttaaaaaacaaatgctcatttccttttctattcatcttctagagcaggtaa

SEQ ID NO: 98231 - DNA, 598 bp, Homo sapiens
tcctcacataggtatacaagggtatgtcacataggtaaacatgtgccacsgtggtttgctgcacctatcaacctgtcatctagtttttaagccccacatgcattaggtatttctatggtataggtatacataggtacaggtatacatatgacactctcatctctggtttctcttcctattcttataaggacagcattcctgttggattagatcgtatccatatgactctgcttgattttaattatttatttaaagttcctgcctcaagttaccttcataatctaaaatattggaggttaggacttcaatatgtgagttttaggggacacagtatagtccataacgtcatggcaaagggaaatatctaattcctttacttaaaggaaacgacttgtgtaatgtgtttagtaaatttccaacacataattaagactcaaccattggtagtggtagaagttacttttactgttgatgtgtggtggtgattattattataataaatcattactattatttagacaagaaaggccatgcaaataccagatacttctagggtaaaagtcttcttacaatcatagtgttgttaattttcagccaa

SEQ ID NO: 98232 - DNA, 625 bp, Homo sapiens
cacctaccctatcctccagtcaggatcagcagcagggaagaggtaagcaagaggaccccagcatccttcatccaccaccttggacacttacagttttcaagactggggaaccctgcagtcctcatgggcactaaacccaactgagggagcttcctagagtccacacagctgtgctctctccagagaaagagctgacactgtgcccactccctgtcccccatctagctattacactatgttatcttgaaactggaaatactgctgaagtgtgtcttggctctgtgaaatggaatagccacaacacccttttatccctaaggctaagctgccatggaaccacctctccccaacagtggtccagcatccccaaactgaactgtgagcagctgatggagttgctccacctactcctcccagttgcttctaagccttgcacctggggactggagctaaaactgagaattcctttctgaggaaacagtgctttctcagtgctgctccatctacctctttcagtcactcctgcaycctgcctcttgggacctgagctaaagctgcccactttctcatggggaaatggtgcactggcagagctgccccatctaccattcccactcactgctgt

SEQ ID NO: 98233 - DNA, 420 bp, Homo sapiens
ctgcagtccaccgtgccatctgcctcttcttatgattcacagacttcagactcaaaagatcagaggcattccgacaggagagtaagaaagtggcagtggcagggaagaggctttggggcctcaagaatgagggctcaggctggtgaggcctggtggagcagaggaggggaactcacggtggagagggcaccaaggtcaaagtwtgtctcctcatagctttgcagagggaggtcccgcaccatgctcccgggtgactcacatgaagtgcgttaccgggggaggatcaggctggggctggtagggagctgagctatccaggaggagccaggaatggacccacacctcggacattcatctgcctggccctttgctccctggagggcaaggatttctcctttgcctttgggggaaactgggcac

SEQ ID NO: 98234 - DNA, 596 bp, Homo sapiens
aacattgatgctatctcttgatggaagaattggtgaggtcacattgtaacaggagcatgtgggaagggcaatattgttatggcctcttgaaaaatataatctgccataggacttatgttaagtaagtccactatcagcagctgaggaaatccttgtagggtattggtagccaagggccttctgccttcagtatcatcccaccccagcagctgaaggatgtcttttatttttctttatctaggcttcagagcgcctaccatatgtattttcctattctgtgttatgcataatttttttgtccctatgtttaacaatattgagagtaagcaaaaataacttagttacttgctccagaacatccttttccctaaagataagacagtgaacaaattaaaatagcttgstcatcacagcgcacttcaagacccttggtccactggtccctccaatccaaaattataatatcaaaacctctacccaatcccaagcagttccctatcttgcaaagcctgcctcaaaaatcacctacctcagtccttaaaaccccataatatcctcctggaatttcttggttttgagacattcctaaagctctg

SEQ ID NO: 98235 - DNA, 641 bp, Homo sapiens
tttagacttatagagacctgtcactccttttttcttttctatttctcttttttgaaatgggactgtctagcctgtgcctgtttcaccattttattttgaaagtacataataggtttgatttcacaatttcatagttggagagcaatctgcctaaagaggaatcacaccttaagtcccactctacctgatttagctgtttgtgctgatttagctgatatttagatgaaaccttggactttagccttgtaagttgatgctggaacaagttaagactttgggggctattgggatggaatgaatgtattttgcatgtgaagaagacatgaactttggaggtcaggagtgaaatgctatggtctaaatatttgtgtcccccccgccacctcctcaaattcatatgttaaaatcctaacccccaaggtgatagtattagaatgtaggacatgtgggaggtgattaggtcatgagaacaaagccctcatgatgggattagtgccattgtaamagagacaccagagaggtcttgccctttccattatgtgaggacacagcaagaaagcaccatcaatgaaccaggaagtatgctctcacgagacagcaaacctgctggcaccttgatctttgacttctcagcctccaaa

SEQ ID NO: 98236 - DNA, 587 bp, Homo sapiens
taagcaccaggtggaaggttaaaaaaaaaaaaagccacactgtcatttttataacttcagaattctgttgacatttgactctgtgtttttgtctaaactaggccagatgggtaaataaactattctttccaagtataaacatttttttctgaaagactaaaagcatacatcaaactaaacaccttgtttactccattgtaaactcaactctaaactcagctaacaattcagtaagtaaaatgacaacactgagtttttacttcagaagtcacaaggacctttaggattaacatcatataaacgtaaaatttgagggcatagtcctatctatttcctactctcaacatatgctgaggtgaaaacaaaaaagttactgtataagtttagcaatggcatgggtgacagcactatgatgggaatcattaaccagataaatgcccataaacacccaggaaaggctacttgtgctatttggcagggaaatcactcacrtattagctttgatattcaaacaaaagaatgtgatttttttaaatgtgatcaaatgcaaatattgatatttttcatagactgtattataacacaat

SEQ ID NO: 98237 - DNA, 589 bp, Homo sapiens
cagacggtacaataagacataaagagaaacagaaaaagtttaaaagctrgaaaataaagataaagaatagggttatcattagttttattttgtgtttttgttatgcaatcagaattaatttctcatcagtttaaaataataggttatgagatagtatttggaaacctaatggttatctcaaatcagaaaatatacaatgaatacacaaaaataaaaaacaacaaatcaaagcatactgctagataaaattatcttcattaaaaggaagacaggaagagaagaaggaagagaaaggccacaaaacagtcaaaaaacgagtaataaaattgcaagagtgagtctttacttatcaataataacattgaatgcaaatgcactaaactctccaatcaaaagacagagaggggctgaatggataaaaaaaagtactcaatgatctgttgcctataagaaatacacttcatacataaagatacacgtagactgaaaataaagggatggaaaaagttcaacatcacttaatgataaaaaccttcaaaaacatgcatataaaagaaacacacttcaacgtaataaaggccatatatga

SEQ ID NO: 98238 - DNA, 253 bp, Homo sapiens
tggcaatggacagattaacaggagaaagacataaaaatttattaacttatataaacacaggagccatataaaatataagactcaatgaagggccagatggttgaggcttaaatagcayagaggagaaggaaataggagatgaaggcatttctgaggggtaggaaatgactttcaagagaaatgaatgagcccaaagaacagacaatggactgggacaaagctcctctgagttctgggagaagtagtgaaaaag

SEQ ID NO: 98239 - DNA, 602 bp, Homo sapiens
gtatgctcctgaacaatcacttggcaatgaagaaattaagacaggaatttaaaattctgaaacaaataaaaatgaaatcacagcataccaaaacctgtgtaatatagcaaaagcaatgctaagagaaaagtttatagcattaaatgcctacatcgaaaaaagtagaaagatcacaaattaacaattaacattataccttaggaaactagaaaaaaagagaacaaactaaacccaaagtgaacagaagaaaaaaattaatgatcaggaaagaactaaattcagtagagacaaagaacaataaaaataatcaacaaaacaaaaagtttattcttcaaagtgatttacaaaaatgataatcacaaactagagtaaccaaaaaagaagggaaaatttaaataaacacattcagaaataaaaaatgagacaytacaactgataccacagaaacacaaaagatcatcagagactattataaataacttatgctcaaatattagaaaccgagaggatataagtaaatttccagaaaaaaatacaacctcctgagattgaatctacaagaaataaaacttctgaacagattgacaatgagtagcaagatt

SEQ ID NO: 98240 - DNA, 684 bp, Homo sapiens
ttattgaagttttgaattgcatttttctgaatattaaatatgttgagcatcttttacctgttactatttgtatatcttctttggagaaatatctaagccctttgctcatttttaataggattgttagtattattttctgttaagttgtaggacatcttcatayagttcggaaataaatcgcttttcaaatatatgtgttacaaatattttctttgtttctgtaggttgtatttttattctgttgtttcctttgctgtccagagctttttagtttgacacattttcacttcttttttttatcttcaatgttcaggggtgtatgtggagactgtgcaggtttgttacataggtaatcatgtgtcatgggggtttgttgtagagattatttcaccacccaggtgttaagtctagtatccattagttatttttctggatcctctgcctccttccaccttccaccctcccataggccccagtgtgtggtgttcccctctatgtgtccgtgtgttctcatcatttagctcccacttgtaagtgagaacatggggtatttggatttctgttcctgcattagtttgccaaggataatggcctccagctccatccatgtcccccccaaaacatgatctcattcttttttatagctgcatagtattccatggtgtatatgtaccatatttcctt

SEQ ID NO: 98241 - DNA, 617 bp, Homo sapiens
atccatgggagaaacatcagtacctgggagtgttcactcacttaccacttccttgggctggggagrctcccctggctccacattgctcctgggtgggagatatcctgccattcttttctccattctttgtgggttgaattgtttttctgatgaaccctaatgagtgtacctggatgtttccactgaaggtgctgtatttactcacccctctatttctctccatgggagtggcacacactacctgcttctagtctgctgtctgttaaagactaacttgctgtagcttgtttagtatagggtcatatgtgacactatcatttcataaattttcataattagggttgtgtttttgctcaccactttagatcaaagttttaaaatctaagcaccgaaccattgctggaaataataaggtcttgcgaatgaagcatctgaaggacaatccaaaactgaagtcctgatttctgacaaataagaatcaattttctctttttttctgtaaactttgacatatgtgacaggactgtgtctataatctgagtatggatataagcatcactagaattaatagttcaacaaatagatatacagaaattaatagcatccactgtattatc

SEQ ID NO: 98242 - DNA, 622 bp, Homo sapiens
gatccctaagccacaaattatactctgcctcttggttgctcaggtgtatttcatttactttacctttctaatgttttcatcttaaaattttattgggatcaatatgaagacgattgatgctgaaaaagaactttggttacatcttcacgtacgaatacacaaatataaatgttatcagaacatttgtttctccgaatagtatcattttcttttattaatagttatgttcaaaacatgtcatcaaagtaggcctcagtagaaatgtagtgatgtaattattgctattaatttgcttactcgaaggcacataatttctccagctctagctaggaaacttctcctgatatctatctcataaacaaagactagaaaccaggtaagttatttctytgttttctgtgtgttttaaagaaacacaaattaggtattttgctacgcaccttcagtctgggctgaggtcagtagcgacggcttttctctgatctatatgggtttcccttggcagcttgactagggctggaggatctacttctaacatggtgcaccacatggctgactggctaatggcagcctatgtcataagacctgggcctggaaatcagagcagcatcacttctatcat

SEQ ID NO: 98243 - DNA, 589 bp, Homo sapiens
ttctgatttttatagtaatcaaatgtatatattttttatgtgcttttatctgctccacaaagaaatataggtaatatgcctaccctaagtaatcaaaaaatctaggtttatggtccaattatttatcacaggacatcagaaacacctaaagattttttgtaatggtcctgttctaaatattgataaacatgtggaggtgctgagattgcttttccaacaatgaagtaattagctggcttacttcatttccagttctttttttctttttttccccctcactgaatatgttcgggagacatgtggcctttggtacagggcccagaaaagtagattgttatttaccctacatggcatttatcttaaaaggaaaaggtctttctgatctcagattaggacagataagataaggagcagaaaaacataatggcttttcacygtatgtccaaagattaggttttaattctgcctccataatttaaatagccctatgaatttgacgttatgcaaccattataaagagaagttaagaaattcagctctgcccattacacagctcaaatgaaacaaaaaaatacagagagaactttgt

SEQ ID NO: 98244 - DNA, 630 bp, Homo sapiens
atatggtgatactgtgtgaacataactaaaggttgaagcacttttccagtaattcctcttcctgtatgattcagggttaggcttctccaaaagagaaatctacatgagatagaaaaggcagaaataaaatagcaaccattcttatgttcagaagtttggtgtaagaactaggtacttttgcaactcagccatactttcattgatgtggcttaccttggtgtggggaggcagcaaagattgcagttctttcagctcctgatggattttgtcttcaccttctctaagccctgagccaggagcatctgtacctacagtaaaaggcactagttcatcctgcaggtgtccctcatcatcaagattgaagtagatgatggaaaatacaggttttaggttgtcctcacaggctccagtgtagatatgttaccccctactccacatccaatttccctttctgactactggctctgctgactttacactctcactatattcataagcaacagccttayataaactgtttcctggatcttgttaggaagaaaacatttttccttcaattctcctaggttttccagctgggaccctgcgaattagactgacagaagacatattaacaagtgaaaaacagtt

SEQ ID NO: 98245 - DNA, 590 bp, Homo sapiens
caggtttggctgaagcatttaacaggtatttggtgagaggtggaaactaaggctgggaaggtgcagtaggtccacatgtggagaaggtcaggttaaggcatgtgaatgtcatcaggtagcaacagagagctgcttaacgttgcagagcaaggaataacattcttaggactgactgtggaaggggtctctagcagcaagtggcagagcccatagaccactcatggaagaccaatccaagcctggcaccacamcgtcaagttcatagcatataaccatatacatgttaacaagtttagtgactaatagatttacaagacctgagatggaattgagtctttggagatccagcttcagaggttagcctaacctattccgcacatatagactgggcctgaactatttccaagaaagctgcctgctattttagagtggggctcagcaaaccttttccataaagaaccagagagtaaatgttttaggttttgcagaccatatattcttttgcaactactcaacttgctgaagcaacaatagacaatacataaatggagcatggctgtattctaataaaacaggacttggctgtagtt

SEQ ID NO: 98246 - DNA, 590 bp, Homo sapiens
caggtttggctgaagcatttaacaggtatttggtgagaggtggaaactaaggctgggaaggtgcagtaggtccacatgtggagaaggtcaggttaaggcatgtgaatgtcatcaggtagcaacagagagctgcttaacgttgcagagcaaggaataacattcttaggactgactgtggaaggggtctctagcagcaagtggcagagcccatagaccactcatggaagaccaatccaagcctggcaccacaccgtcaagttcatagcatataaccatatacatgttaacaagtttagtgactaatagatttacaagacctgagatggaattgagtytttggagatccagcttcagaggttagcctaacctattccgcacatatagactgggcctgaactatttccaagaaagctgcctgctattttagagtggggctcagcaaaccttttccataaagaaccagagagtaaatgttttaggttttgcagaccatatattcttttgcaactactcaacttgctgaagcaacaatagacaatacataaatggagcatggctgtattctaataaaacaggacttggctgtagtt

SEQ ID NO: 98247 - DNA, 590 bp, Homo sapiens
caggtttggctgaagcatttaacaggtatttggtgagaggtggaaactaaggctgggaaggtgcagtaggtccacatgtggagaaggtcaggttaaggcatgtgaatgtcatcaggtagcaacagagagctgcttaacgttgcagagcaaggaataacattcttaggactgactgtggaaggggtctctagcagcaagtggcagagcccatagaccactcatggaagaccaatccaagcctggcaccacaccgtcaagttcatagcatataaccatatacatgttaacaagtttagtgactaatagatttacaagacctgagatggaattgagtctttggagatccagcttcagaggttagcctaacctattccgcacatatagactgggcctgaactrtttccaagaaagctgcctgctattttagagtggggctcagcaaaccttttccataaagaaccagagagtaaatgttttaggttttgcagaccatatattcttttgcaactactcaacttgctgaagcaacaatagacaatacataaatggagcatggctgtattctaataaaacaggacttggctgtagtt

SEQ ID NO: 98248 - DNA, 624 bp, Homo sapiens
tctttttttttttttgctgtatccttgtctggtttcaatatcagaaaattaatggcctcatagaatgagttgcagaaatattctttattcctctatttttcagaagagtttgagtaggattggtattagttcttcattaaatgtctggtaaaactcagcagtaaagtcattgggacctaggcttttttttgtttgtttgtttgctgggagacattttattatggctttgttctcattatttgttactggtctgttcaggttttggatttcttcctggttcaatctggtaggtcatwtgtatctagcaagtgatccatttcttctagattttccattttattggcatatagttgctcatagtagcctcaaatgatcctttgatttgtgtgacattggttttaatgtctcctttctcatctctgatttttttgtttttttttttcttaactagtctgactaaagatttgtcaatgtttacatttcaaaaaaaaacttttctgtttcattgatctttgaatcattttgtttcaattttactcatttctgttctgatctttattatttctttccttctaccgattattggtttggtatgctcttgctttcctagttctttaggatgct

SEQ ID NO: 98249 - DNA, 585 bp, Homo sapiens
tgtgttagatagtgtgtcagttatcaatttgatgcttctcaacttgaagtgtgctcttcatcaccctgtgatttttatatctgggccctgtaaatattttttgccacctggcatgatgttcgtctttgtcaatggaggacactggagggagattgcaggaggaaggggcttctttttatgcttccctgtgcttgcctttcttcttgctcctgttgcacttagaccataagcaagatacttagccaagctcattctggagcttttacatcagcacccaatgggtggattcctggcatgttttgtcagcacctccatgggtgctttcctgttttccagcctcagccagccacacgtgcttcagtgaactcctctgccatcggtggccctatagccktacttctccaatgaggtgtgaatctcagccttggatggagggctttcttccacattcgttcctgacttgggtgctctgcttcagcctaggggtagaaactgctgtctatttgccactgtgtctgtgatttctgtattctttagagttctcttaacaccttatagctagctacctgcctgttattagttaag

SEQ ID NO: 98250 - DNA, 483 bp, Homo sapiens
cttttacatcagcacccaatgggtggattcctggcatgttttgtcagcacctccatgggtgctttcctgttttccagcctcagccagccacacgtgcttcagtgaactcctctgccatcggtggccctatagccgtacttctccaatgargtgtgaatctcagccttggatggagggctttcttccacattcgttcctgacttgggtgctctgcttcagcctaggggtagaaactgctgtctatttgccactgtgtctgtgatttctgtattctttagagttctcttaacaccttatagctagctacctgcctgttattagttaagaattctttacattaacctttctctattcaaaataatgtgtagtgtctgttctctgactggaccctgatgatgcaggtatcttgtctgctgaatccaggagcaccctgtccttgcccccagaatagctctaattaagctgtatatggaagtgcctatg

SEQ ID NO: 98251 - DNA, 460 bp, Homo sapiens
gtcaaattgacacctatattaaccatcacaactcaaaagcacatttttttacctctgatagtaaataccattagttgttttccttaaagtgctggctaactttattcattttcaagagaagtctctgaaatccccatatcgaaaacaaacatagtttgttttccagtcattctttcaagtaaaaagggtattcgctgaagaaagcaggtagtttgcaacccaagccatcaaacaagtgcttttgtttgcaacaaccatcttgctttagtatgcagcataagtggtttatgtgcacatctcacttcactacataaaattctaagaaggaatttactcaaaaagtgaagtttcaataaaatcaatacttattactgcttcatcaagasttcaagtacctgactctgaagaaatacaatgagtgccagtgccttgatttgggcaaaaggcagttttacccacc

SEQ ID NO: 98252 - DNA, 588 bp, Homo sapiens
ttcatggctgttaaagagcattatctactttttcatatcattttcttcctatacgtgatgatggtgaggcattttatactttacaagtgtttcatgctttatgtacatcatatgattagaataccatagcaaccttaagaaacctatcttgcaggtaggtgtacagcaaataataacaattaaattattaaaagcattattctttaaaaagaagatctaatagagtttttaaattttaaacagtttggaaagcagatgaatagctacaaaaktgtcattcacttggctccattacctcccaattaagtttctctaaagaaaggacagagaaaagataaacaggctcaggtgattaggggaatctcttcctctgtttattatgtaaataaagttttattgaaacacaaaacacactcatccatctgtctatggctgctcttctgctacaacagggaagttgagtagttgttaacagagaccagttgggttgcaaaccttaaagtatttgctatctggcctttacagaaaagatttgcttactcctgatctaggtaactgaaaaacatctggtttgagtcaccacaatgg

SEQ ID NO: 98253 - DNA, 605 bp, Homo sapiens
ataagactccattaagggatgatctttggcagggtgggagggggaatagtgaaggaaaattgttcaagtgggcaaaattttgaccagtatgtttggttgcccagtttgccatactaagagatagctagaattaaatatctacatgactcatgagcagttgttaacagtttgtctggatggtgagggacttaaaaggaaccagacctaatgattggtgacaaagaactctgaagaaaaggtatgtggaaggaactctcrgagccagcacagagggtgaagatatttttgtcttacataaatgctcaccaaatcagacatccactaccaaagaagctcccaataaccaagtggacaaaatggtgtaccgtgttggtcagtcagctatgttcctcagccaccccattgattgctcaatgggacccatgaatacagtggccatggtgggagagatggaggctattcatgagctcaacaatatggatatccccaatgaactggacactgctcctgatgggttcctaatctactcacagaagacaccaacactgaggctcatagggaaccattccccaggggaccagccagccacctgatggcaggttgat

SEQ ID NO: 98254 - DNA, 612 bp, Homo sapiens
ctaaaattttaaaacacttcatcataaattatgttactgaattgatattttaattgaaaattaaaccaaagctaataaatgatgggcattaattcaaacattacctgtatcttttaagatgttccacagaccccagttcttaccattctctgcttgtgtagagggatgttcacatttcagataacaagcaaagagagggaggtttccccaactaccagtaggtatgttttaacacgaagtccttctatgaggaaattctcttttccttcactccagtattatgattttattacctgatttcatctaccatggtgccagtgaatactgtctttatacaatccatgttgacctgcccgaaatccagacatgttgatctgcttatctccagactataggtgagatcatgttttgaaaaatcctaggaagccatagatcaccctgtttttagtaagctcaaatttgttcctcaagttcttgatgaatattttgccgaaggaaatctttggagaatatatcacmtattttcaaacttctgtctggctaagaccctacatgatctctccccaccccctacagagtacatgtaggctcctccctccaaaagtaggtcat

SEQ ID NO: 98255 - DNA, 588 bp, Homo sapiens
cttcttgcatcttctttgccccataatattattcaaatatggcttctaactcctggttcatgctagatcttttgggtttgtttgtttgttttggcttctctggtcactgaaaagctttttttttttcccccggcccaaacagaccctgcatttaagttcagttatgtgttctttcacatcacctgaatttccagtccttgccttcttcttggctctgggctctgactctgaggtcaggcttttacttggaatcattatgtaacactacacctagacacaagagagagggaacatcttgcaacctacaatatgtttcaaagacatgacctgagaagaatctaagatcctagggataaatgagattgtgattcttctcagccctactgtaactcaacccttaattagctcattgtgaagagataaactctactattcaattgctcactttgtgctaaattcacattgcaaaggaagatagcataacacaaagaargatattcatagaaggttaatagctggcaaataaatcttactttttaagcaaagactaggaagaactcagtaagttgcaaagaagatggctatggg

SEQ ID NO: 98256 - DNA, 608 bp, Homo sapiens
ctgctattttgggattaaattgccctatgtaaactatgtgggaaactaagtgttacttgtcaagtctcaatagaggaagatgcattgtgtagcaagaagggactgcagttgatcaagaagaatgcccccatctgtggtgttgccagccagccatttggacaacagaaatatttctttactacctcccctccctttcccagctgtagtaactgctgtttcccagaaagcaatatgtctagtctcatgcctctggtggatccatatatcatgtataccatattatcttccktattttcataattacctggactctattctctggttgtttcatgcacattgttaaataaaaaaatgtatttagtgatacctgttaaagcaccgtatggcaaacattattcgagaccatcacaataggtttggtcaccatagagaccatggcagtgtgatttttcagaggggaaagagattgagctcaacttcaaatacagcaggagcaagtgagaatttatagccaaggtgcaaggtgggggtcagtggatggaaaattactgagaggaaacgtcaggcaccagggggattctggcctagactgacctgatagaattgtt

SEQ ID NO: 98257 - DNA, 586 bp, Homo sapiens
tactaatgcacataaaggcacagtaattctttaatttttattattattatttttctatttcagtaggatttgggggaacaggtggtgtttggttatacrgataaatttccttagtgatgatttctgagattttggtgcatccatcacctaagcagtgtgccctgtacccagtgtgtattcttttatgttatccccctcccacccttttcccctgagtccctagaatccgttgtatcattcttaagggcctagtaatctttaaattctgatggtggctgacaaagaaacagagatactagtagaatagaatagagagttcggaatcaaattcacatgacattaaacacatactggaggaggtatttaaaatcactgggggaaagggatgagcaaataaatgaagttgaaacatatggttaaccatctgaggatagatgcaagctaaatcttatatctctccttataccaaaataaattccagatggatcaaatatctaaatttgaaaagaaaaagaaatgagttttgaaagggagaagtgttatgaaagcaaaacgcaaactccagatgccataaagaaaaaaatta

SEQ ID NO: 98258 - DNA, 586 bp, Homo sapiens
tactaatgcacataaaggcacagtaattctttaatttttattattattatttttctatttcagtaggatttgggggaacaggtggtgtttggttatacagataaatttcyttagtgatgatttctgagattttggtgcatccatcacctaagcagtgtgccctgtacccagtgtgtattcttttatgttatccccctcccacccttttcccctgagtccctagaatccgttgtatcattcttaagggcctagtaatctttaaattctgatggtggctgacaaagaaacagagatactagtagaatagaatagagagttcggaatcaaattcacatgacattaaacacatactggaggaggtatttaaaatcactgggggaaagggatgagcaaataaatgaagttgaaacatatggttaaccatctgaggatagatgcaagctaaatcttatatctctccttataccaaaataaattccagatggatcaaatatctaaatttgaaaagaaaaagaaatgagttttgaaagggagaagtgttatgaaagcaaaacgcaaactccagatgccataaagaaaaaaatta

SEQ ID NO: 98259 - DNA, 586 bp, Homo sapiens
tactaatgcacataaaggcacagtaattctttaatttttattattattatttttctatttcagtaggatttgggggaacaggtggtgtttggttatacagataaatttccttagtgatgatttctgagattttggtgcatccatcacctaagcagtgtgccctgtacccagtgtgtattcttttatgttatccccctcccacccttttcccctgagtccctagaatccgttgtatcattcttaagggcctagtaatctttaaattctgatggtggctgacaaagaaacagagatactagtagaatagaatagagagttcggaatcaaattcacatgacattaaacacatactggaggaggtatttaaaatcactgggggaaagggatgagcaaataaatgaagttgaaacatatggttaaccatctgaggatagatgcaagctaaatcttatatctctccttataccaaaataaattccagatggatcaaatatctaaatttgaaaagaaaaagaaatgagttttgaaagggagaagtgytatgaaagcaaaacgcaaactccagatgccataaagaaaaaaatta

SEQ ID NO: 98260 - DNA, 556 bp, Homo sapiens
gaatttgcatagtctgcaggcattcttttagaggggaatgggaccacttttactagccgaggcaatctggtttcctgactttatcataggagccttgttagagctgccaattttgctttctttggaactctgttcttgtcacagttagatcctggactcrattttcagcacatttcgtttccaactgctggaaatgaaagaccctctgggtactgacatggaagcttccgggctttcatacatgcgctgagttgacagttgactaccacgattctgccattttcttcagtaaatgtttcattggtagttaacagctgatttcataattcttacatatttaccattttacctatgtctttcatgcaataggttgcattggtcagtccatccctttttatacgaccttcatcccaattcccttcaggtaattgggcagtcaggcattgttaccattcttaatcattcttagtaatagggtctttgttgccatctggcaggtgagtaaacagattgcaaaatttcattctgagggctctgttttttaggaccacttctt

SEQ ID NO: 98261 - DNA, 481 bp, Homo sapiens
ctactctctgcctccaggagattatctcttctagctcccacataatagtgagaacatccaatatttgtctttctttctgggtctggcttgtttcactttaacataatgacctccagttgtatccctgtgtctgcaaatgacataatttcatttttatggctaaatagtattccattgtgtattcattttctttacttatttctttattcatttaattttgaaatgtttgcctagacaagccagatgattgttgtaggaatcatacaatccagctctactctgccccgttgagattatccctaccatctggggattgtcacaatacatgacartcatggagaaatgttcatggagaaatgtttttgtttgaatttttaattccaaatacaaccagtgctggatgcgactgtgagttacacttgcgtgcatacagtcaggctgacatgttacctagttccattactaggactaatccagtggt

SEQ ID NO: 98262 - DNA, 548 bp, Homo sapiens
tgaccttgaactaacctttggaaattccaaaaggaaaccctggaagtccaagagaatcatattaggcttatttggcttataaaatatcatctgggaagcactgtcaaataaatgatgtttaactttctttgagttgtatttgtacatatgtgttattaatatgtgttccaaaattgtatgagcttcctaggattctgacatgtcttggtatatgttaatagtcataattattatgytaaattattgtatgccacaaaaatagataaattttcttctcaattacatctttaaccatggatattctatcttttgtaatccacaattattatttttatttatctcaaatagcagcttataatcagctatagtccaaaatctgctgcttcttcaaggacaagtacttttaaattcaggttcctgataacttttgacatcataccattagactaggtaaaaacttgcagaactctaatttaaaaactgataggttcatgaaaattgctaacctaacatgagaagaaaaagagttaattatgtgggactgaact

SEQ ID NO: 98263 - DNA, 585 bp, Homo sapiens
taaatatccttctttttgtactcatacttcattggtttcacactatttaattagattatgtaattgcagtgacatgtgcaactggaataaacaggttgggaaaaaatatgtccgatttgtggcaagcatacatctctcccctgggggacacagaagaatgtgtgcaccccagagagctgctgcagagctgatgatgttcagcttgtgagcattcgtgactgtcttccatgcaagtagtgttgctcgtaaacacaacacatgcatttctgtcgcactgtcggctttcatcagtttatgctgcagtgacatatagctccaaagcttcattggcttacaagaacaaagatttgcttctcctccacatcaggcacccttcccatttggctggagctccatgtctcccgctcgttgtttcagaatccaggtgaaaggatctgtccctatctggggcatgccagtatcatggtacaggaaaagggatgtggaaccattcaatggcccttaccacttccatgtggacctggcacatgccttaacytcaccttgtactagccagagcaagtcacatggttgagtctttcttca

SEQ ID NO: 98264 - DNA, 564 bp, Homo sapiens
tttaggcacgtgatccattttgagttaaatggatctgagtttgtgaacagtgtgaggtctgtgtctacattctttttttgcatgcgaatgctgtcccagcaccatttgttgaaaagatggtcttttctccattatattactgttgctcctttgtccaagatcagttaagtatatttacgtgagtcccttcctggactctctattctttccattgatccatttgtctattcttttgccaataccacaygtgtcttaatcactgtagcttcatagtaagccttgaagttgggtagtgtcagtcttccaacattgttcttctccctcaatattgtgttggctgttctgggtctgttgcatctccagatagactttagagtcagtttgccaatatccacagaataacttaatgggattttgattggaattgcactgaatctatggatcaagttgggagatgcccatctcttcatcaattcctactttctgtgtggtgatgatcacatcattaacctctctgagtctctgttttctcatctgtagaatgtagatgataatacttgatac

SEQ ID NO: 98265 - DNA, 231 bp, Homo sapiens
ggaaaccccttcctgttgtgggaaaacaggcttccatatgtgtcttattgggaaacacataggcaatttctatgtttttactgcatctatttcagggatatgrgaactgaatagtgaccatcaaagtctcacctgatgttggaaattgatctgagagcgcggaaggacagaattctttctttgttcctgggcagcggtggttgagggatcattttgtggcagctacagtgg

SEQ ID NO: 98266 - DNA, 231 bp, Homo sapiens
ggaaaccccttcctgttgtgggaaaacaggcttccatatgtgtcttattgggaaacacataggcaatttctatgtttttactgcatctatttcagggatatgagaactgaatagtgmccatcaaagtctcacctgatgttggaaattgatctgagagcgcggaaggacagaattctttctttgttcctgggcagcggtggttgagggatcattttgtggcagctacagtgg

SEQ ID NO: 98267 - DNA, 570 bp, Homo sapiens
ttttatgttttatgtatcttaccacaataaaaaaataaaataccttaggaacattttcctgaaagagtccacataaaattcattttaatgcatgtgtttatgcatagctttctatttttytcttttctctttacattccaaattagaatataatgctaatcaagtatagtggctgcgtttctttcttcctctagtctgcaggtagcatacaaatgtaataaagtactcattcatgtcacatctatttattttctgccttataccaagcttgtgggattctcttaaatacaacatttttatacttacacctatgcaatacccattagcatcgccttcctaaatcaggggaaattgagtctctgtaaggtgcagtaacttactaagatacaaaactcagcattaaagtctgtatacttcaatatcctgccctcttctcatttgtctttactgccttttatgtatgtgttagatgttcaataaattctcttttttaaactgaatttaagccgtggagcagtgttttgttgaacaataaatatgatattggacactcttcctccctttcattta

SEQ ID NO: 98268 - DNA, 561 bp, Homo sapiens
gttaaaaggtgtgagggtatcaatattgttgtggctattggggaggaaacattagtaaaaccatttagttaaagctattgctttaaactttggctttaatttaacaaatgttctatggagtgacagtatgtatgtaaccatgctatgcccattcacagatgcagtagagggaagaatttctcaaagacaactgttctaacactcaaattaaaccgtactgggtttgaaaagagaaagtccaggaattaccaaatattttagatatcagataaaagagaatgccagrtatgcgatgataatcagcaatggttgttcacacaatacatcaaatcagtatttgaattagcttttgaattacaaggacaaatggatcaagtctagactctttagtagataaatcttattaggctgagatgtgttttcccctgtttttccacaaggagattacaaatttgcaaacctcagctgctctcattttatgctctcaccaagccaaaagctgaagttcatcaatcagtgtgtctaagtgttcactggttatataccattttgtagtttcag

SEQ ID NO: 98269 - DNA, 542 bp, Homo sapiens
gcaacgggttaaagttgttgtcttaagacgatggtccaggtaaaagataataaagttttaarttaggatgttagtaggaatgaggaagagggatggatttcagaaatagtaaggaaatgtattagcaggacttgattagtgattgacttggggaaggaggggaagatagagttcaggatgactccgagactgtctggtgtcggtggctaatgactgaagctattaatagaggtaggaaatgcagaccaaaagcaggcccggggtgagagatgataaatttgaattttaacatgttgagtttggacatccaggatgaaataaccacaaaacatttaaatatacgaatctgaaaaggtaagcatcataagcatatgagctattggtaaaattctgatacttaatgaagtctcgcagggaggcagtacagaggcaagcaatgggctggggataaaacatagggaaatattatttaaataaagatgaaagaaaaggagcccacaaaggaagctgaaaaggcatagtcaaaaaaagaggcttgccaa

SEQ ID NO: 98270 - DNA, 600 bp, Homo sapiens
atctaggtctgtctgaccttaactatgttccttccacagagccacgttcattccatagaggaacccaccacctataaaaccaggaaagagacaaagccagaagtgcagggtggatttcttaacacaagctcactgcgacctctagtcctcatcacgctgacactaagcttaaacccagacccttctacagttttgtctacaaagcacaatttgcccaaagcctttacaaacaccaacagcctttctttcagatatggcagcagggtcacatcttayacggccctgaccacattttgtctcctctgccatccccatctctctgactcagtcctcgcttgcagccataaaaaaggatgagttcatgtcctttgtagggacatggatgaagctggaaaccatcattctcagcaaactatcacaaggacaaagaaaccaatcactgcatgttctcactcacaggtgggaattgaacaatgagaacacatggacacaggaaggggaacatcacacaccagggcctgtcgtggggtggggggagcggtgagggatagcattaggaggtacacctaatgtaaatgacgagttaatgggtgcagcaca

SEQ ID NO: 98271 - DNA, 640 bp, Homo sapiens
aggggtaattatgaccttactattgaaaatattttaagattatgtatgatctcaggagatgtgtgtgggttcaagttcacaaggggtgggcttgtgatggttaataatgagtgtcaacttgattggattgaaggatgtaaagtattcatcctgggtgtgtctgtgagggtgttgccaaaaaaarattaacatgtgagtcagtgggctgggaaaggcagacccacccttaatctgtgtgggcacaatccaatcagctgccaacccagccatattataagcaggcagaaaaatgtgaaaagagaggggcctcgcctcccagcctacatctttctcccatgctggatgcttcttgccctcgaacatggactccaagttcttcagttttggaactctggctggctctttttgctcctcatccagcagatggcctattgtgagacttggtgattgtgtgagttaatacttaataaacttcctgtataagccagtgacatctagagggacagaactaacaggatatatacatatatatatacatacacacacacatatatatatgcacacacacacacacacatatatatatttatttacaaaggggagtttattaacttacaggatcataagttacacaatgggc

SEQ ID NO: 98272 - DNA, 670 bp, Homo sapiens
gatgcctgcatgcctgctccaaaccggtgcctccccagcagtcctgagttgcatgcactagagcatttcacagtcgccacctcctttgccatagcaaaacttggttttgtttgtgcctcagtagaggctgagggccatcactgaagaaaatccacaataacaagcagacaggaaaccaatatatgaagcaaaataattctttattttataataaaattatctaccacaaaacygaaagtttattctgacttaagggaagtcaaatgagaatccgaaagttttgtggtgcatatagattcacagcaatgggaattagttagaggtcttatatgtaagttcactcagtgaatgtgtatggcccccaagcacaggcctggaaggaacttcactgacatgttttcttaaatgaccttcaacttgcatctctgattatgtcttcttgtaatccacgctggactcttttcttctaagtgacacattacttcttcaggtagatcaatatcatcaattaaaatgcaattttgtcttgtttttgcacggtctgtttttttaagtctaactttgcatacttacccacttacctacactttaactaaagtgtgtttattaaactttccaaactctgggatgccttgctttcatgcctacttataattactttatgtgtgct

SEQ ID NO: 98273 - DNA, 482 bp, Homo sapiens
ataaattctgatttaagagaaaggctgccttctgccatgaggacacattgatataaaagtttgagaggtactggtgcacttcttcacactaacagacgtgtgaggatgtatgactaaaccacatggcatacakttcctgcctacttaatgtttacttttctacctctgcctctggttttggtccctggcagctgctgattcttggcaaaacctcagagcttggagtcagaagactgagtctcaaagttccagtattgcctttttcttttttttttctagccatgatatcaatccttctcagtcactaaatgagtgtgacaacaccttgtacagttgttggtgtcattaaatcagatggtgtgtaagtgtattttgtaaaaactgtaaaggaggttgtggctgtaggggctgacggttctcatgaatattactgctcttctttccaacagttaaaagaatattggcagaaaaacagacctaga

SEQ ID NO: 98274 - DNA, 482 bp, Homo sapiens
ataaattctgatttaagagaaaggctgccttctgccatgaggacacattgatataaaagtttgagaggtactggtgcacttcttcacactaacagacgtgtgaggatgtatgactaaaccacatggcatacatttcctgcctacttaatgtttacttttctacctctgcctctggttttggtccctggcagctgctgattcttggcaaaacctcagagcttggagtcagaagactgagtctcaaagttccagtattgcctttttcttttttttttctagccatgatatcaatccttctcagtcactaaatgagtgtgacaacaccttgtacagttgttggtgtcattaaatcagatggtgtgtaagtgtattttgtaaaaactgtaaaggaggttgtggctgtaggggctgacggttctcatgartattactgctcttctttccaacagttaaaagaatattggcagaaaaacagacctaga

SEQ ID NO: 98275 - DNA, 425 bp, Homo sapiens
tcacccctcaggcaggaggttggaagagtctttgctggagaaccagagcagccccagaggaaagaccttaaagatcctacgtaacagggtgtctccaaaatggaccagcaaatcactccagagtaaagctcataaatgacaagtggcacccaccgaacagtgcttattaagtctccacactttttttttaaccttattttcctctgaaaattgcataacagtatagaatacatattataagtaaacagctgaaasaattataaaacaaacaattatcagaaagttgccagcattctaaagctccctgcgtgttccttcctaatcccaatacattcctttccactaaaggaaaccagtgattccaacttttatagtacttgcttatttgcttttctttgccaactaaatgaggatgcctaaatact

SEQ ID NO: 98276 - DNA, 599 bp, Homo sapiens
tctgtccctagctcacacatgtcaaaaagcaagcaactcatggatacatttttttggtttggatgaaaggcattttgtaaatagaggatagtatatcacttttcaatatccttaatataattttgttgaatataagaatcactcaacaactgcatctgtcaatttttttctcattttttctgcatatattctattctctaaaaattatgtaaagcaatgataagggaagtttcaaaaagaaaaagactaggaggaagttcactagacatttagtgacatcgttactgcatartaagtttataaataacctttctttatgctttccttgatttttccaaatttaaaacaatgaattcattttttataatcagaagaaattttaaattgtttaaatcatatactttctgcctcaagaagcacaataacaaacttttccatgcaatggaaacactgataacccaactttccacagtctcatctggtgacatcctcgccccctaccaacccatatggtcaggctggcccccaggatccttgaatgagcatttgatctctctcactgagtgcctgatacaaagacaaaaccaacgcttagagat

SEQ ID NO: 98277 - DNA, 599 bp, Homo sapiens
tctgtccctagctcacacatgtcaaaaagcaagcaactcatggatacatttttttggtttggatgaaaggcattttgtaaatagaggatagtatatcacttttcaatatccttaatataattttgttgaatataagaatcactcaacaactgcatctgtcaatttttttctcattttttctgcatatattctattctctaaaaattatgtaaagcaatgataagggaagtttcaaaaagaaaaagactaggaggaagttcactagacatttagtgacatcgttactgcataataagtttataaataacctttctttatgctttccttgatttttccaaatttaaaacaatgaattcattttttataatcagaagaaattttaaattgtttaaatcatatactttctgcctcaagaagcacaataacaaacttttccatgcaatggaaacactgataacccaactttccacagtctcatctgstgacatcctcgccccctaccaacccatatggtcaggctggcccccaggatccttgaatgagcatttgatctctctcactgagtgcctgatacaaagacaaaaccaacgcttagagat

SEQ ID NO: 98278 - DNA, 564 bp, Homo sapiens
tggggcagaaagaggcccgcgctgggaactgaaagcaggttgtggagcaaagggaaagaaggggagtgtggagcaagatgaagctggaggcatttcagagccatgagagatgctaatcattttgtcttcatgtaagagtgaaaagaagctaataaagaggtagtgattgcaagtggaccaaacatgagatgttggcaagttagtagatgatggccagatcccagatcacacagtgccctgcaggccacagaaagaatttaatgtggtttggttttggctttagttttggttaytgtgttttgttttgcttaagtgtgatgggagccaccaccgcaaggtcgcagtgaaatgatctgacttacattttaaaagcaacaatccagttgctggattgaatggcaaaagggaaggataaaaaaggggaagataattgagaggttatcaccctggtcctgtattacaggcagaggctggctgcatgggggtagcaacagaaatgaagacaagtaaatgcagtgaagagagggagggaggatttacagatgcctcttaagatttctgcat

SEQ ID NO: 98279 - DNA, 573 bp, Homo sapiens
tactctgggtcttttgtgatttcgtataaattttaagattgctttttgtatttctgtgaagaatgtcatttgtattttgatagggattgtatagatcctgtagatttctttgggcagtatgaacattttaacaataccgattcttccatttcatggacatggaatatattttctttctttgtgtgtgcactcttcaatttcttgcatcaatgttttatagttttcactgcagagatctttcacttctttggttaattcctaggtatttaatttcatttgcagctattataattgggattgctttcttgatttctttttcagattgctcattgttggcatatagaaatactactgatttttctatgtaaattttgtatcctgcaaccttactgaatttatcagttctaatagttatttttttttgaaagaatctttaggtttttccaaatgtaagatcatataatccrtaaatgaagataatttgatttctttctttccagtttggatgccctttatttcattctctagtctaattcctgtatcaagaacttcttgaagaatgcttttgatagg

SEQ ID NO: 98280 - DNA, 421 bp, Homo sapiens
agcggaagatggggaggcctgtatatgtgggtggcttaccacagtgcccaggtatgaagtcagtactggtagtacatttactgtgtgtgaggcacagccctctcctcgtactgcaccctgatcttataaactgaccctcatccctatcaggtttattgagatgagtcctcccttagctccactgaccattgctgttactgcttcgagtgataagcctgactttgagacaggaggtgggaacaatgtctgaggatgctgaatttgatacttctgcttctgtatttcctccaccacccccggaatacagccagaggaaggagcasaacagacattgaaaaggttcttcgggaaaggttatttttaggggccgtcttgccaagactgcttccggggaatttatttagacacagcaggcccctgc

SEQ ID NO: 98281 - DNA, 498 bp, Homo sapiens
gatgtaaggctgtttgttgggagccttaatatggttacttaccagaaagtcctcaaaggaattctccacgtagtttgtgccagcctgggggaggcaggtgtgaccccacacaacattcagctagtggctaagtcaggctcctggcttagaaaatcttgaagctcaaatgaccaggcaccaatagctttcatgcgttcctttgggcctactacctttttttttttttttttttttttgccttttaragcaaacatgtcttagactttgattctaaagataatttgatttggttagtttaacatatgcttctagccctaaaatagtttgggaagaatcttcatatttctagtcttaactcttgaatttaacagttaaaaggtgggggaagggtttcatcaggatcatttgctaaccctcatttaggagagataatgctctatctttttttttttttaataattaaaatcttccttcaagaattttaaaacgcccttggaa

SEQ ID NO: 98282 - DNA, 498 bp, Homo sapiens
gatgtaaggctgtttgttgggagccttaatatggttacttaccagaaagtcctcaaaggaattctccacgtagtttgtgccagcctgggggaggcaggtgtgaccccacacaacattcagctagtggctaagtcaggctcctggcttagaaaatcttgaagctcaaatgaccaggcaccaatagctttcatgcgttcctttgggcctactacctttttttttttttttttttttttgccttttagagcaaacatgtcttaractttgattctaaagataatttgatttggttagtttaacatatgcttctagccctaaaatagtttgggaagaatcttcatatttctagtcttaactcttgaatttaacagttaaaaggtgggggaagggtttcatcaggatcatttgctaaccctcatttaggagagataatgctctatctttttttttttttaataattaaaatcttccttcaagaattttaaaacgcccttggaa

SEQ ID NO: 98283 - DNA, 581 bp, Homo sapiens
tgttggctatacatagaggtaaagtaaatacaataacagattttgcactcaacaagcttatactttggtaaaacagacatctaaacagacaatgagtgaatacaagaaaacaaatagatttcaagagaaagaatttttgagttcagcatgagacatgttgagatttgagtgcctaggagacattgcaacaagtattgtaattcataaatgttgaacattatggattaatacgatcagagattcgtatagtcattcatatgtgtatttagcagcttaaatsattggaatgtacaaataacttagtgagggtttataaagtgaaaaaaaatgagactcaatgacagactctaaataatctcaacattttattgagttaagataccaacagtgtcttaacaatgtatcgatcaattcatctattaatcaaacatggttatttgcaggtttttttctgttcatattctttgcaagacagtaatatattctcttttagcagttcgcattccatttaaccttttcaattggcaaaactgaggcaattcagaagttgaaagatatttcagaagttactctcataatga

SEQ ID NO: 98284 - DNA, 598 bp, Homo sapiens
acaagatcttatttgataaaggtggcatttcagtggcgggaaagatgatttaataaatgctgttgacagaattagcttttcatttaatgtttcttattgcaaaatataacatacatacagaataatgcataaagtatataggtacagagtaggaaataattatggagtgaacacgcacatatcaccacccatgtcaagaagctggacgttgcccatcttcccatcctgttatgtttctcttggatgacaatctcctccctctccccaaaaggtaactcttagyctgacttagatgttaatcaatttcttgctttttaaacataatttttccatacacatatgcatctctaaacattgtgagatatcagtttccatctttttgaaacttagtaagtcacactgtatgtattttttgcttctttcacttaaaattatatttgtgagattgccccatgatgctttgtgaaactatggttcattcatttttctaaagtcaggtttattgaggtataatttacatttaaaaactcacctttttaaaaaggatgcataattctatgtgttttgacaaacatatgcaatcatgtatccatcacca

SEQ ID NO: 98285 - DNA, 462 bp, Homo sapiens
ccctgagcttccaccctgatggttgcacagggtatagggggacagagttggggaaaagtatcttcccaagatgggtaccttaaagcaaacccctatataaagatttggcctaacatgagataccctcagtgttagagtgaacaaaaagaaggaggcttgctcaaggcacagaaagaaaactttcatgttcagaccttggcaccagctagaaggaaaaaaaaatcttccttgaaaatccttaaagaatcctttcctgagacttcacctggcctttcctaggtgtagcagtctgattctgagcaatmtggtttgaaaatacttaagtaaataatgtcaaataattttcactatttccaaggaaaacaagcagctcatagccaaaagcgtgcattaagagacactgttcttaaaaaaaaaaaaaaaacacacacaataaaaaagagaccttgctcttgccataac

SEQ ID NO: 98286 - DNA, 548 bp, Homo sapiens
ctttacttgattgagagatttttgttaccagttcaaacactttacttattataagtctcttcagattttctaattcttcatgatccggtttcttcatgatccagtcctggttggttatgtgtttctaggaatttgtccatttcatctaggttatctaatttgccctcatataattattcatagtcttctattttaatcyttttaatttctgtaaggtcagtagtaatgaccctactttaaatatgacaacccattgctttttgttctccatggtttctgatgataaatttactgctaatctcatgaagaagtctttgtatttgacagtcatgtcttgctttctgctctcaagattctctttgcgtttatcttttgatggttttatcataacgtgtctcagtgtggatacctttgagtttatcttacttacagtttgctaaacttcttggatacatagattcatatatttcatcaaatgttaaaagttttaaccattattgttccaaattttctttccagtactttctatcttctccatctgagacacc

SEQ ID NO: 98287 - DNA, 585 bp, Homo sapiens
cctggttggttatgtgtttctaggaatttgtccatttcatctaggttatctaatttgccctcatataattattcatagtcttctattttaatctttttaatttctgtaaggtcagtagtaatgaccctactttaaatatgacaacccattgcyttttgttctccatggtttctgatgataaatttactgctaatctcatgaagaagtctttgtatttgacagtcatgtcttgctttctgctctcaagattctctttgcgtttatcttttgatggttttatcataacgtgtctcagtgtggatacctttgagtttatcttacttacagtttgctaaacttcttggatacatagattcatatatttcatcaaatgttaaaagttttaaccattattgttccaaattttctttccagtactttctatcttctccatctgagacacccccggtgcatacattagtctatttgataatgtcctacagatagatccctcaggccttgttcatttttctttattcatttttctttttgctccacagccttgttaatttcaatgatcttatctttaagttccattactcattc

SEQ ID NO: 98288 - DNA, 548 bp, Homo sapiens
ctttacttgattgagagatttttgttaccagttcaaacactttacttattataagtctcttcagattttctaattcttcatgatccggtttcttcatgatccagtcctggttggttatgtgtttctaggaatttgtccatttcatctaggttatctaatttgccctcatataattattcatagtcttctattttaatctttttaatttctgtaaggtcagtagtaatgaccctactttaaatatgacaacccattgctttttgktctccatggtttctgatgataaatttactgctaatctcatgaagaagtctttgtatttgacagtcatgtcttgctttctgctctcaagattctctttgcgtttatcttttgatggttttatcataacgtgtctcagtgtggatacctttgagtttatcttacttacagtttgctaaacttcttggatacatagattcatatatttcatcaaatgttaaaagttttaaccattattgttccaaattttctttccagtactttctatcttctccatctgagacacc

SEQ ID NO: 98289 - DNA, 585 bp, Homo sapiens
cctggttggttatgtgtttctaggaatttgtccatttcatctaggttatctaatttgccctcatataattattcatagtcttctattttaatctttttaatttctgtaaggtcagtagtaatgaccctactttaaatatgacaacccattgctttttgttctccatggtttctgatgataaatttactgctaatctcatgaagaagtcyttgtatttgacagtcatgtcttgctttctgctctcaagattctctttgcgtttatcttttgatggttttatcataacgtgtctcagtgtggatacctttgagtttatcttacttacagtttgctaaacttcttggatacatagattcatatatttcatcaaatgttaaaagttttaaccattattgttccaaattttctttccagtactttctatcttctccatctgagacacccccggtgcatacattagtctatttgataatgtcctacagatagatccctcaggccttgttcatttttctttattcatttttctttttgctccacagccttgttaatttcaatgatcttatctttaagttccattactcattc

SEQ ID NO: 98290 - DNA, 611 bp, Homo sapiens
ttatccatttttttaatatgttccccaggtaattcttaggtatagtcagattttggaaccatgtttctagccttttcctacatgaaaatcaaaatttacttttcttatgaccagtctttgggtccattttttctcctgacctacctgaaaaatgtatttgtgtttagagtctaygaatcattaactagcagcaacttcataagttttccctccaagatcttacataaaggacatgttatgccacaagccaaagtatgaaaaatattaagaaaacagaaggaatatttggaataccctcagtcaattctttataaatggcaatgactctaaagaatactgtgaactacagatctcctatcctcttctcactctcctggtagagaggtcatggtttccatgaaggacatacagagtatgaaagtttgaaggcagggtcaaagagctgccattgatatgcagagtaaataacaacaaccaccacaaatgtagactgagcactgaaggccaagcaccacctaagaactgctccagagagaagaatgtcaggaaacagagtaaaactcttagaaggaagaaacaaaaaactgcatagcaagaaaacagcagtatct

SEQ ID NO: 98291 - DNA, 514 bp, Homo sapiens
ttattgtctttttttccactataaacatgtgataatttgtaatccaaaaatgttattattttacttacaaagcatatattgtgcaacaaatttttaaaaaggaaataaggaagcaggttgttatttttcaaatctataaaatacctagctttaaaaaaatggattttactaaactgacatatttaatactttaaaatacttgaagaaaggacaggaattagccattgtgaatatggggtgtggagcatttttttaattgcatttttttatttttaaaagaaaatcctagaaaaccatattttcccatttttgaagttttccctagctctttctttcatttgtattaraaatatctttgtgcatatctctaaaatagagcctcaacttgctactacaaataggatgatgtcataccagaaagtagaggggagagagcctgtgatggccctgcagcctcctcatcctcactgctccacctgtctcttccgaaggggcctctggctgtccacatgct

SEQ ID NO: 98292 - DNA, 522 bp, Homo sapiens
tataatgaacttataaacgaacaagcaagaatcaaacaaccccgttaaaaaatgggcaaaggacatgaacagacacttttcaaaaggagacatacacatagccaagaaggatatgaaaaaatgctcaatatcactaatcatcagagaaatgcaaatgaaaaccacaatgagataccatcttacacaagccagaaaggctattattaaaaagtaaaaattaaaaaaaaaatgtttgtgaggttacagagaaaagggaacacttatacactgctgatgggaatttaagttcaaccactgtggaatgtggtttggagatttctcaatgaacataaaacagaactaccatttgattcagcaatcacatyactggctatatgaagggatataaattgttccatcataaagacatatgcacatgtatgttcatcacagaacttttcacaatagcaaagacatggaatcaacctacatgcctgtcaacagtggaatggataaagaaaatgtggtgcaaaaacaccatgg

SEQ ID NO: 98293 - DNA, 522 bp, Homo sapiens
tataatgaacttataaacgaacaagcaagaatcaaacaaccccgttaaaaaatgggcaaaggacatgaacagacacttttcaaaaggagacatacacatagccaagaaggatatgaaaaaatgctcaatatcactaatcatcagagaaatgcaaatgaaaaccacaatgagataccatcttacacaagccagaaaggctattattaaaaagtaaaaattaaaaaaaaaatgtttgtgaggttacagagaaaagggaacacttatacactgctgatgggaatttaagttcaaccactgtggaatgtggtttggagatttctcaatgaacataaaacagaactaccatttgattcagcaatcacattactggctatatgaagggatataaattgttccrtcataaagacatatgcacatgtatgttcatcacagaacttttcacaatagcaaagacatggaatcaacctacatgcctgtcaacagtggaatggataaagaaaatgtggtgcaaaaacaccatgg

SEQ ID NO: 98294 - DNA, 455 bp, Homo sapiens
gatttgctcccacaccaaggggcaaataacatcactccttccaaagtgatgtttcaagggtaatgagacttgatgtgattgttgccttctgcctacctttaggaactaaccttataaaaaacatgactccagccaagctttccctctgataggcacgtaatccaactctccttcataaaaatgtactgtactgctttattacaagatatttttataaagatctactactagacggtaaaatctctagatatagagtgtgagaaaagagaacagggaaagaaagtgaaatcgaatcttgtccatgaacactttggrtttgctgtggtgctggcagccatctggctgtaggaagttgccacctggcagatggtaagttccggcaatttgctgggaatttcaattgaagggacctgttctttagctggaaatagctcaggaaagggaaggaaaacaga

SEQ ID NO: 98295 - DNA, 375 bp, Homo sapiens
cctggaggaggaaagatgggtggtgagttytttgttgtgtttttcagggtggcattaacaccagtgtgccatatggtggtatctatgtgaaatccattgttcctggaggaccagctgccaaggaagggcagatcctacagggtgagagatggggatgggtcctcattgggaactctgtgctccatggtgtaaagagccctgcactgggaggggcagcctctaggccttgccctgctcccattctgaaaactcatgcaaatgattgcctccccaggtcatacttttctcacctggaaaggaggtgatagaacctgccctgcccatttgataggttggggggtctgcagtggcacactgggaagcataggtgataga

SEQ ID NO: 98296 - DNA, 583 bp, Homo sapiens
gccatgcaggcatttgcttctgtatgcaaatgaggaagctgtggctcaaaggggctaagtaacttccatccacctgacatggaaaacagagaacaggaagggcctaggggccaggctgttgggcttcacagtctgttctctttcatccagatctagaaagtaaaccaagggatgattacctttaacggcagaaaggaaagctgatgtctcagcctgggcactaagctctgcaccccagccatgtctagttcttcagtatttctgtcctggtcttgtgtgtgtgacaacaaacttccctggtacccgaagctcaggatgtctgtagaggagaccccagaattggctgtgcyattcttttcttcatctgggttatttccaccaacacctataaaaacaagccaagaaaaagtcaacagcttaaaaaggccggtttcttggtggcatctctatgtgggcacagcgttttcctccagtgacagagtgatcgtttatagctgctcgggtacaatatgaatttagctcctcctgaaagatgttacatttagattagagaaagggaagattctacatgggatttagaaac

SEQ ID NO: 98297 - DNA, 549 bp, Homo sapiens
gaaatcgtatattaggttatgtctttattagatttctttgccatatttgaacatgatatgttgatggagtcatctttttgggtaaaaattcctgagctatctttaggagcaatgagtgaattctaagccattttaacctttgtgtgaacacctgctaaataagaagtacagcaaattgacatttggataaaatattgctccagggtcagaattccataatggcacttcctacatttaaagcaatttctctatctcctgaaatgtttaattttcttcttgatattctatagtacataaacatagatatagatatacatacatcaatctaaagacttgaaaaattcaagattatctatctayctatctatctatctatctatctatctatctatctatctatctatctctatttatctacccaaagacctgaaatagccacaggctgaagttttgggtaattactcaagaggctgaagaacagacagtaggaattttgattgaatcaaagttatacactcacttgatttgcaatcaaaatgtttccttact

SEQ ID NO: 98298 - DNA, 637 bp, Homo sapiens
aataagggctgctttagacacatccttaaaaacttaagaaccagctttgaaagaatccaagatgacccacaastaccttaactgcctgcaaaacaaactaaaaactctttaaaagaggacagtgaaatccagaccctcaacaagtaaaatttacaatgcccagaattcaactgaaaattatacagacactggaaagcacgacgcagacccaggagaaaaatcagtcccacaaaaacagacccagaaatgacagaggtggggaaattagtagacaaggcttttagagcagctataataaacatagtcaaagatttaaggggaaactataaatcatgtatttaaaaagctgaaaaaaaattccaaggagaaaaaagaaaaagaccaatacaagaaaaattatactcaaattgctgtaaagcaatgataaagagaaaatcttaatgtagctatccacgcattatgaacagaacaaagataacagtgacagcacaattcttatcagaaattttaagccaaaagcaatagacaaacatgttcaaatactgataaaaaaatatgccacagaaaaatatattttaaaaacaagagtaaaataaagactttttcagacaaaatctgagagcattcattgccggca

SEQ ID NO: 98299 - DNA, 657 bp, Homo sapiens
tagcttagaaacttgaaactgcttgactgcatagtaaacacttccccctcccatacttgtaccctcactcaggtttcttcactaacctgtagactccatttgtctttgtattccccccatttttgctaacccaggattaaacaccatgctttcgtgtgtgtgtgtgtgtgtgtgtgtgtgtacactcatttatttttcataataatgtggatgccattattgctcctatttaaatatgaggaaactaaggcacagaggagataacttaatgaggtcacataggtaatgagtggaggagtcaggatttgaacccaggcagcccaactctagagccaaagctatttacwcacacacaaacaccaaggaccatgcaaacttgaagctgccaaggctatctagtgccaaatgagacaagctcccccaaaatgaagcctatataagaaaaggatagcggagaaaaggagggagagagggagaaagagagtgtatcagagaaatataattaaagattattttatttgacccgctggagagtatgaagccagaactaccctttggccttcccatttatacaagtgaatgaggtcttttgtcatttgtagccataggttcttaatgaggggtccactcacaattatacacacagctctgtttgtg

SEQ ID NO: 98300 - DNA, 597 bp, Homo sapiens
cagccgtggtttgggtggctacacttgcatggaggagtgggaggccatgatccacagtcatgacttgggtggctgtagcccgaacctcctgggtggggcttctgccagttccatggagcaggtggcccagatctacagcctgggtttgggtggctgcagctgcgcctggaggatggggctctcaccttctccttggccccaagagcacaaggatrcctgggtctgcaacagtggcttgcagcgacaccctggggtgctcccaccccaactcggaaggcgcagggctcccccttgtccctggttcctgccctggccacactgctaccgtcaatactggcaatatattcctaagtcagggaatatatacttgagactaatcagtagagatataattgaaaggtaatgctagtgtttaactagatttgaattcagaggattaaggttcagtttcttccatgccttgtattgcctgtgtgtactggagaaagcttttggcttctctgagcctccacatctgcaaaatgcgaatcactgtagtcttgcttaccttatacaaagaggtttttttaatatgatgaaaaacaaatcacataaatc

SEQ ID NO: 98301 - DNA, 597 bp, Homo sapiens
cagccgtggtttgggtggctacacttgcatggaggagtgggaggccatgatccacagtcatgacttgggtggctgtagcccgaacctcctgggtggggcttctgccagttccatggagcaggtggcccagatctacagcctgggtttgggtggctgcagctgcgcctggaggatggggctctcaccttctccttggccccaagagcacaaggatgcctgggtctgcaacagtggcttgcagcgacaccctggggtgctcccaccccaactcggaaggcgcaggsctcccccttgtccctggttcctgccctggccacactgctaccgtcaatactggcaatatattcctaagtcagggaatatatacttgagactaatcagtagagatataattgaaaggtaatgctagtgtttaactagatttgaattcagaggattaaggttcagtttcttccatgccttgtattgcctgtgtgtactggagaaagcttttggcttctctgagcctccacatctgcaaaatgcgaatcactgtagtcttgcttaccttatacaaagaggtttttttaatatgatgaaaaacaaatcacataaatc

SEQ ID NO: 98302 - DNA, 597 bp, Homo sapiens
cagccgtggtttgggtggctacacttgcatggaggagtgggaggccatgatccacagtcatgacttgggtggctgtagcccgaacctcctgggtggggcttctgccagttccatggagcaggtggcccagatctacagcctgggtttgggtggctgcagctgcgcctggaggatggggctctcaccttctccttggccccaagagcacaaggatgcctgggtctgcaacagtggcttgcagcgacaccctggggtgctcccaccccaactcggaaggcgcagggctcccccttgtccctggttcctgcccyggccacactgctaccgtcaatactggcaatatattcctaagtcagggaatatatacttgagactaatcagtagagatataattgaaaggtaatgctagtgtttaactagatttgaattcagaggattaaggttcagtttcttccatgccttgtattgcctgtgtgtactggagaaagcttttggcttctctgagcctccacatctgcaaaatgcgaatcactgtagtcttgcttaccttatacaaagaggtttttttaatatgatgaaaaacaaatcacataaatc

SEQ ID NO: 98303 - DNA, 602 bp, Homo sapiens
acgcctgtaatcccagcactttgggaggccaaggggggcggatcatgaggtcaggagatcaagaccatcctggctaacayggtgaaaccccatctctactaaaaatacaaaaaattagccgggcgatgtggcaggcacctgtagtcccagctactagggaggctgaggcaggggaatggtgtgaacccaggaggtagagcttgcagtgagccaagatcacgccactgcactccagcctgggcgacagagcaagactctgtctcaaaaaaaaaaaaagacaaaaattagccacatttttttctcctcatcaaagaggataatagattaggctcaatgtgcatacttgaaacattgttaaacaaactctttaataccacgttaccctttctaagcattaaagggaattttccactgatcatcactcatgagttaatgatattctgcatgctacagctattaaattgcattttaggtagcctgtaccagagatgtccgacttgttcacccttcacatccaactccctcatctaattggcccactgagaaaacacttcttttaacccttatcttttttttccattccctgcataatgctaatggat

SEQ ID NO: 98304 - DNA, 602 bp, Homo sapiens
acgcctgtaatcccagcactttgggaggccaaggggggcggatcatgaggtcaggagatcaagaccatcctggctaacacggtgaaaccccatctctactaaaaatacaaaaaattagccgggcgatgtggcaggcacctgtagtcccagctactagggaggctgaggcaggggaatggtgtgaacccaggaggtagagcttgcagtgagccaagatcacgccactgcactccagcctgggcgacagagcaagactctgtctcaaaaaaaaaaaaagacaaaaattagccacatttttttctcctcatcaaagaggataatagattaggctcaatgtgcatacttgaaacattgttaaacaaactctttaataccacgttaccctttctaagcattaaagggaattttccactgatcatcactcatgagttaatgatattctgcatgctacagctattaaattgcattktaggtagcctgtaccagagatgtccgacttgttcacccttcacatccaactccctcatctaattggcccactgagaaaacacttcttttaacccttatcttttttttccattccctgcataatgctaatggat

SEQ ID NO: 98305 - DNA, 602 bp, Homo sapiens
acgcctgtaatcccagcactttgggaggccaaggggggcggatcatgaggtcaggagatcaagaccatcctggctaacacggtgaaaccccatctctactaaaaatacaaaaaattagccgggcgatgtggcaggcacctgtagtcccagctactagggaggctgaggcaggggaatggtgtgaacccaggaggtagagcttgcagtgagccaagatcacgccactgcactccagcctgggcgacagagcaagactctgtctcaaaaaaaaaaaaagacaaaaattagccacatttttttctcctcatcaaagaggataatagattaggctcaatgtgcatacttgaaacattgttaaacaaactctttaataccacgttaccctttctaagcattaaagggaattttccactgatcatcactcatgagttaatgatattctgcatgctacagctattaaattgcattttaggtagcctgtaccagagatgtccgacttgttcacccttcacatccaactccctcatctaattggcccactragaaaacacttcttttaacccttatcttttttttccattccctgcataatgctaatggat

SEQ ID NO: 98306 - DNA, 596 bp, Homo sapiens
aagaaagaaagaaaaaaaagagagagagcccaagctgcatttatacaacccagccctaagggtaacgtgttacaaatgtggcatttaaaaaatggcttgaaatgctttatttcattttattgtattaacatggttaaacaaaccaacctaaaatgcatatttaaaaacttccttttaaatatacctttcagcaaataagttagcagacaggaggaaatattcaagaaactaacattctmatcagagtgaaggaatagtagggaaatcctggttgcaatccagcatgaacaaaatggttgggttttccatctacctcctgctggcctaaaacattaaccagaaccactgcacctgttagattctcagttgtccactgcttccttactgtactttatacagtagaggcatttctggaaataattcagaaaagtaacatgtaaattaaaccatattttcttattgatgaccatggtgtattttgaaatgtgttcatttaggaaaacaaaatgtttggctgcattaaatagtaagaactataaacaataaatcaaagtactttccaaaatagcacattaaagaaaatataggccaggtgt

SEQ ID NO: 98307 - DNA, 601 bp, Homo sapiens
gaacaactactaactgcgttgataattattcttaatatatcagagattatgtcaagtgctttggcatttgaayatatgacataatctttgcctttaaggcatttgcaatccaatacttataagatgtatttagatacatgggatggttcaagcacttttttaaattataatttaagttctggggtatatgtgcagaatgtgcaggtttgttacataggtatacacgtcccatggtggtttgctgcacccatcaacccgtcatctccattaggtattgctcctaatgctatccctcccctagcccccaaccccgcaacaggccccggcgtgtgatgcccctcccgccccccgccctgccttgtccacgtgttctcattgttcaactcccacttatgagtgagaacaggcggtgtttggttttctgttcttgtgttggtcaaacacatttttatgagaataaagacccatttgtttttccatggaaattagaaaggtttctatgatttgtcagtatttgagacgaactgtaaaggtttggaaggcttgctaaatagtacatgaggtatatatatttgacctatgaaaacatcataacttaaaa

SEQ ID NO: 98308 - DNA, 601 bp, Homo sapiens
gaacaactactaactgcgttgataattattcttaatatatcagagattatgtcaagtgctttggcatttgaatatatgacataatctttgcctttaaggcatttgcaatccaatacttataagatgtatttagatacatgggatggttcaagcacttttttaaattataatttaagttctggggtatatgtgcagaatgtgcaggtttgttacataggtatacacgtcccatggtggtttgctgcacccatcaacccgtcatctccattaggtattgctcctaatgctatccctcccctagcccccaaccccgcaacaggccccggcgtgtgatgcccctcccgccccccgccctgccttgtccacgtgttctcattgttcaactcccacttatgagtgagaacaggcggtgtttggttttctgttcttgtgttggtcaaacacatttttatgagaataaagacccatttgtttttccatggaaattagaaaggtttctatgatttgtcagtatttgagackaactgtaaaggtttggaaggcttgctaaatagtacatgaggtatatatatttgacctatgaaaacatcataacttaaaa

SEQ ID NO: 98309 - DNA, 601 bp, Homo sapiens
gaacaactactaactgcgttgataattattcttaatatatcagagattatgtcaagtgctttggcatttgaatatatgacataatctttgcctttaaggcatttgcaatccaatacttataagatgtatttagatacatgggatggttcaagcacttttttaaattataatttaagttctggggtatatgtgcagaatgtgcaggtttgttacataggtatacacgtcccatggtggtttgctgcacccatcaacccgtcatctccattaggtattgctcctaatgctatccctcccctagcccccaaccccgcaacaggccccggcgtgtgatgcccctcccgccccccgccctgccttgtccacgtgttctcattgttcaactcccacttatgagtgagaacaggcggtgtttggttttctgttcttgtgttggtcaaacacatttttatgagaataaagacccatttgtttttccatggaaattagaaaggtttctatgatttgtcagtatttgagacgaactgtaaargtttggaaggcttgctaaatagtacatgaggtatatatatttgacctatgaaaacatcataacttaaaa

SEQ ID NO: 98310 - DNA, 564 bp, Homo sapiens
attaaataagagcatctatatttggtgtactccctatgacgtagtgattcaacgggtgaagatggaaagagccagacactggaatgcttcataaggagagttttttgtaacrttttccactttcttaaagacaatgtagcaaatcaagtatctgactaaatctgctttgatgacacatcccaattaggccaaatgggactcagagctgggctcagaaaaacaaccagccaatcattcagtctattccatcccagacctttccagctcactcttgcttttactccaaactgattgggtagaaaaccattttggagttcaggacacttgctcggaaaaaaatcatgctgcttttcttgggatgttttctgggctctattgtcttgggttcctgtggcaatattgagtatccatggacaatccaaaaaactgagatgttttccacactttgttttagagaacatactatcagttagtaaataaaatgagattattaacatcatgttgcatattagatgacagagtgtgactatacaagagttcagtggactttatatccatgtaaga

SEQ ID NO: 98311 - DNA, 562 bp, Homo sapiens
atgtcttcttctggcccttcaaactattctaacttcttcccattaccttgttctaaatttacttcacatttttcaggttatctttatatcagtatcttactcctggtaccaattttctgtattttgtctattttcacactgctataaagaactatccaagactaggtaatttatgaagaaaaaaggtttaatkgactcacagttctgcatggctggggaagccccaggaaacttacagtcatggtagaagataaaggggaagcaaggaccttttctacatggtggcaggaggtggtggggttggtggtggggactgccaaacacttttaaaccatcaggtctcttgagaactcactcactgtcatgagaacagcatgggggaaactgcccccatgatccaatcacctcccatcaggtctctctctcaagacatgggaattacaatttgagatgagatttgggtgggaacacagagccaaaacatatcacactcctattgcatgagttctttcatcacctatgaaagaaatcaggggtgtttggaaaaatggctagtatataa

SEQ ID NO: 98312 - DNA, 562 bp, Homo sapiens
atgtcttcttctggcccttcaaactattctaacttcttcccattaccttgttctaaatttacttcacatttttcaggttatctttatatcagtatcttactcctggtaccaattttctgtattttgtctattttcacactgctataaagaactatccaagactaggtaatttatgaagaaaaaaggtttaattgactcacagttctgcatggctggggaagccccaggaaacttacagtcatggtagaagataaaggggaagcaaggaccttttctacatggtggcaggaggkggtggggttggtggtggggactgccaaacacttttaaaccatcaggtctcttgagaactcactcactgtcatgagaacagcatgggggaaactgcccccatgatccaatcacctcccatcaggtctctctctcaagacatgggaattacaatttgagatgagatttgggtgggaacacagagccaaaacatatcacactcctattgcatgagttctttcatcacctatgaaagaaatcaggggtgtttggaaaaatggctagtatataa

SEQ ID NO: 98313 - DNA, 562 bp, Homo sapiens
atgtcttcttctggcccttcaaactattctaacttcttcccattaccttgttctaaatttacttcacatttttcaggttatctttatatcagtatcttactcctggtaccaattttctgtattttgtctattttcacactgctataaagaactatccaagactaggtaatttatgaagaaaaaaggtttaattgactcacagttctgcatggctggggaagccccaggaaacttacagtcatggtagaagataaaggggaagcaaggaccttttctacatggtggcaggaggtgrtggggttggtggtggggactgccaaacacttttaaaccatcaggtctcttgagaactcactcactgtcatgagaacagcatgggggaaactgcccccatgatccaatcacctcccatcaggtctctctctcaagacatgggaattacaatttgagatgagatttgggtgggaacacagagccaaaacatatcacactcctattgcatgagttctttcatcacctatgaaagaaatcaggggtgtttggaaaaatggctagtatataa

SEQ ID NO: 98314 - DNA, 562 bp, Homo sapiens
atgtcttcttctggcccttcaaactattctaacttcttcccattaccttgttctaaatttacttcacatttttcaggttatctttatatcagtatcttactcctggtaccaattttctgtattttgtctattttcacactgctataaagaactatccaagactaggtaatttatgaagaaaaaaggtttaattgactcacagttctgcatggctggggaagccccaggaaacttacagtcatggtagaagataaaggggaagcaaggaccttttctacatggtggcaggaggtggtggggttggtggkggggactgccaaacacttttaaaccatcaggtctcttgagaactcactcactgtcatgagaacagcatgggggaaactgcccccatgatccaatcacctcccatcaggtctctctctcaagacatgggaattacaatttgagatgagatttgggtgggaacacagagccaaaacatatcacactcctattgcatgagttctttcatcacctatgaaagaaatcaggggtgtttggaaaaatggctagtatataa

SEQ ID NO: 98315 - DNA, 567 bp, Homo sapiens
ttagcaactataatgctgatctttggaaaatgcacgacagtcacatatttcctgtgtatacacatatacatgcacatatatagtgaagatggcaaaaaacaatagcacacttataaaaattatatttttcagagatgatagtctgctaatttcaataaagtgtaaatataagtgtgtcttatggtataataaattttaaaataacatcaacatttatgtcaacttctaaactttaaaaattaacttttggaagggaggcagagcagagcaagatagccaaatagaaacctccaccaatcattctccttgtagaaacaccaaattaaacaactatccttatagaaaagcaccatcataagaataaaaaatcaggtgagtgatcacagtacctggtwttaatttcatatccctgaaagaggcactgagaggagaggaaagacagttttgaattgcctataccaccccctccccaattccctgagagcaaccagctggtatgaagagagaatctgtgtgcttgggggaggtagagtgaagtgattgtgggacttggtgttggaactcagt

SEQ ID NO: 98316 - DNA, 623 bp, Homo sapiens
ttaagttttgtttcatatattttgatagtttattattaactatgtacatatttggtaattattcctaatgagttgatctttgtattattattaaatattacaccaatcattttttaaattaaatgtactaatttttcccaattgttgacttcccatatagttctttttagtaattttcatatatgtctttcaattgtccatctcttaagaaatctttttcatacatattttattatatatttatcagagttattttaatgtccttgcctgataattctaatattgagataatctgtcattctgttctactaacacttttttttggtatattaacaaatcttawaattgggcataataccttgaatatcttgtagatagtctggatttgtcattttcctctaataatttattgagttttattctgtcagccaattacattaccaatggatctcttaatatgtgaaggcttggttttatgtttgtaaagactgatccattttaatttttttccttagtcctagagtctctctaactgaataagattttctttcccctccaggaagcagccgctaaatttctgctcagtactttagttcaattaactaatgttttcccctggacta

SEQ ID NO: 98317 - DNA, 623 bp, Homo sapiens
ttaagttttgtttcatatattttgatagtttattattaactatgtacatatttggtaattattcctaatgagttgatctttgtattattattaaatattacaccaatcattttttaaattaaatgtactaatttttcccaattgttgacttcccatatagttctttttagtaattttcatatatgtctttcaattgtccatctcttaagaaatctttttcatacatattttattatatatttatcagagttattttaatgtccttgcctgataattctaatattgagataatctgtcattctgttctactaacacttttttttggtatattaacaaatcttataattgggcataataccttgaatatcttgtagatagtctggatttgtcattttcctctaataatttattgagttttattctgtcagccaattacattacyaatggatctcttaatatgtgaaggcttggttttatgtttgtaaagactgatccattttaatttttttccttagtcctagagtctctctaactgaataagattttctttcccctccaggaagcagccgctaaatttctgctcagtactttagttcaattaactaatgttttcccctggacta

SEQ ID NO: 98318 - DNA, 606 bp, Homo sapiens
agaatttctttccaaactgaagtcactcctctcaaacccttgtgcttctgtgtcaactaagtttatgcaacactttaaaatcttttgttgttggttgggagtggtggctcatgcctgtaatcccagcactttgaaaagccaaggtgggtggatcacttgaggtcaggagttcgaaaccagcctggccaatatggtgaaaccccgtctctagtaaaaatacaaaaattagccatgcatagtggcagacacctgtaatcccagatactagggaggccgaggcaggagaattgcttgaacctgggaggcggaggttgcagtgagccaagatcacaccaccacactccagtctgggcaacagggtgaggctccatctcaaaaaaaaaaaaaattaaaatcttttgttgttatttcarcaatgtgatgttcacagcatcttccctacaaaagtttctatctcaacaaataaaccatttattttttgctcatcaataagaagcaactcatttattcaagttttatcacgagattgcagcaagttagtcacatcatcaggctccatctctaactctagttctcttactgtttctaccacttctgcagtctgaa

SEQ ID NO: 98319 - DNA, 567 bp, Homo sapiens
gttatggagacatctttccttaaaccctgaaccaagctctgccagctgcaaacttttcttctgtagcttcttcacttatctcatctttcatagaattgaagagtcttgctgtggattaggttttggcttacgtaaatgttgtggctggtttgatcttttatccagaccactaaaactatctccacatcagcaaaaaggctgttttgttttcttatcattcatgtgttcactggagtaatacttttaattttcttcaagagcttttcctttggattcacaatttggctatttggcacaagcaggctagctttcagcctatcttggctttcaacatgtcttcctcacaagactaattatttctagcttttgatttaaaatgagatacaagttactttttttttttccttgaacacttagaggtcagtaggctcattmattggcctaatttcaatattgttgtgtctcagggattagggaggcccaagaagaggaagagacatgaagaaatggctggttgacggagcaatcacaacacctacaccatttattaagttagctgtgtgggca

SEQ ID NO: 98320 - DNA, 559 bp, Homo sapiens
agtacttactacattccaggaagtagrttaaccacttacatgtaatattttatttaatcttcaaacaataacccattgaggtagttattattctaattttgcttgtaaaaacatattaggcttggtgagattaagctatttgctgatagctgcacaagcaaatagcagtctgtttggctctacaggcatggctcttaaccattagactgtactgcctttttaagaggacacctaatccatgtgcattgagggttaaaaatacaaatgttaaagacaaaggcaagttagcatgactgaggacacacaggctataaatgattgcaaataaaatgatcctgactaatgaataacttacatgtttttcctatcacatccagactaaaaattaatcatcatttaaagtaaattataaaaaattaatttataaaaatgacattataagattcttaaggttctactatattgtttcttattacttacacattattcattttatgacttctactctaaacatttctattaacttcctaaaataccacctaatttattcacctaaaag

SEQ ID NO: 98321 - DNA, 559 bp, Homo sapiens
agtacttactacattccaggaagtaggttaaccacttacatgtaatattttatttaatcttcaaacaataacccattgaggkagttattattctaattttgcttgtaaaaacatattaggcttggtgagattaagctatttgctgatagctgcacaagcaaatagcagtctgtttggctctacaggcatggctcttaaccattagactgtactgcctttttaagaggacacctaatccatgtgcattgagggttaaaaatacaaatgttaaagacaaaggcaagttagcatgactgaggacacacaggctataaatgattgcaaataaaatgatcctgactaatgaataacttacatgtttttcctatcacatccagactaaaaattaatcatcatttaaagtaaattataaaaaattaatttataaaaatgacattataagattcttaaggttctactatattgtttcttattacttacacattattcattttatgacttctactctaaacatttctattaacttcctaaaataccacctaatttattcacctaaaag

SEQ ID NO: 98322 - DNA, 559 bp, Homo sapiens
agtacttactacattccaggaagtaggttaaccacttacatgtaatattttatttaatcttcaaacaataacccattgaggtagttattattctaattttgcttgtaaaaacatattaggcttggtgagattaagctatttgctgatagctgcacaagcaaatagcagtctgtttggctctacaggcatggctcttaaccattagactgyactgcctttttaagaggacacctaatccatgtgcattgagggttaaaaatacaaatgttaaagacaaaggcaagttagcatgactgaggacacacaggctataaatgattgcaaataaaatgatcctgactaatgaataacttacatgtttttcctatcacatccagactaaaaattaatcatcatttaaagtaaattataaaaaattaatttataaaaatgacattataagattcttaaggttctactatattgtttcttattacttacacattattcattttatgacttctactctaaacatttctattaacttcctaaaataccacctaatttattcacctaaaag

SEQ ID NO: 98323 - DNA, 559 bp, Homo sapiens
agtacttactacattccaggaagtaggttaaccacttacatgtaatattttatttaatcttcaaacaataacccattgaggtagttattattctaattttgcttgtaaaaacatattaggcttggtgagattaagctatttgctgatagctgcacaagcaaatagcagtctgtttggctctacaggcatggctcttaaccattagactgtactgcctttttaagaggacacctaatccatgtgcattgagsgttaaaaatacaaatgttaaagacaaaggcaagttagcatgactgaggacacacaggctataaatgattgcaaataaaatgatcctgactaatgaataacttacatgtttttcctatcacatccagactaaaaattaatcatcatttaaagtaaattataaaaaattaatttataaaaatgacattataagattcttaaggttctactatattgtttcttattacttacacattattcattttatgacttctactctaaacatttctattaacttcctaaaataccacctaatttattcacctaaaag

SEQ ID NO: 98324 - DNA, 570 bp, Homo sapiens
cccccttttatagctttttaatcactttcatgtcttttgggctcttgttcatatacttcttggtataacttttgcctaataattgtcttatgattctctggcccttaggtgcatattaactcagttgatttgtctttatttttgaaaactcatcttcattctttcagtcattaactatttgttttaaaatttattgtactctgctttggaccatttggtggatgcaaagccatatcaaatgtgattcttgttctcaggttattacagtttagttaggaaagtgcaaaaccatatacaaaaatatgactactaatacaaggcagcaaataaagcatacatgaatggctcaattttgtggaaccatcatattcttcctcattttttacattaaaaaaattttttagaagcagtatgctcaccttttccaatttaggaaaatatgcccactctatccatattctcctcttactaaatctttccaccragtcttgaaaaaaaaaaaaaggacctaactgaaatatccaagttaaacgtttcagtttgcagaacagcaatcaccctaaaactatg

SEQ ID NO: 98325 - DNA, 634 bp, Homo sapiens
tactttgatttcttcctttccaatttggatgccttctatttctttctcttttctgattgctctagcaaggacttctagtactatgttgaataacagtggtgaaactgggcatccttgttgtgttccagatctyagaggaaaggcttgcagtttttcctcattcagtatgatactagctataggtctctcatatatggcttttattatgttgagatatgttccttttataccaaattttttgagttttgtttccatgaaaagatgttgaatgttgtcaagtgctttttcagcatcaattgaaatgatcatatggtttttgtccttcattctgttcatatgatgtatcacattgattgatttgcatatagtgaaccatccttgcatccctgggatgaatttcacttggtcatgattaatgatcttttcaatatcttgttgaatttagtttgctagtattttgtttaagatttttacatcaatattcatccaatatactagcaggtagttttatttttcttttctttttgtgtgtatttgtctcgttttggtatcaggttaatactggccttgtaaaatgaattttgaagcattcccttcttgttctgtctttcagaataacccgagtatgattagt

SEQ ID NO: 98326 - DNA, 634 bp, Homo sapiens
tactttgatttcttcctttccaatttggatgccttctatttctttctcttttctgattgctctagcaaggacttctagtactatgttgaataacagtggtgaaactgggcatccttgttgtgttccagatctcagaggaaaggcttgcagtttttcctcattcagtatgatactagctataggtctctcatatayggcttttattatgttgagatatgttccttttataccaaattttttgagttttgtttccatgaaaagatgttgaatgttgtcaagtgctttttcagcatcaattgaaatgatcatatggtttttgtccttcattctgttcatatgatgtatcacattgattgatttgcatatagtgaaccatccttgcatccctgggatgaatttcacttggtcatgattaatgatcttttcaatatcttgttgaatttagtttgctagtattttgtttaagatttttacatcaatattcatccaatatactagcaggtagttttatttttcttttctttttgtgtgtatttgtctcgttttggtatcaggttaatactggccttgtaaaatgaattttgaagcattcccttcttgttctgtctttcagaataacccgagtatgattagt

SEQ ID NO: 98327 - DNA, 634 bp, Homo sapiens
tactttgatttcttcctttccaatttggatgccttctatttctttctcttttctgattgctctagcaaggacttctagtactatgttgaataacagtggtgaaactgggcatccttgttgtgttccagatctcagaggaaaggcttgcagtttttcctcattcagtatgatactagctataggtctctcatatatrgcttttattatgttgagatatgttccttttataccaaattttttgagttttgtttccatgaaaagatgttgaatgttgtcaagtgctttttcagcatcaattgaaatgatcatatggtttttgtccttcattctgttcatatgatgtatcacattgattgatttgcatatagtgaaccatccttgcatccctgggatgaatttcacttggtcatgattaatgatcttttcaatatcttgttgaatttagtttgctagtattttgtttaagatttttacatcaatattcatccaatatactagcaggtagttttatttttcttttctttttgtgtgtatttgtctcgttttggtatcaggttaatactggccttgtaaaatgaattttgaagcattcccttcttgttctgtctttcagaataacccgagtatgattagt

SEQ ID NO: 98328 - DNA, 634 bp, Homo sapiens
tactttgatttcttcctttccaatttggatgccttctatttctttctcttttctgattgctctagcaaggacttctagtactatgttgaataacagtggtgaaactgggcatccttgttgtgttccagatctcagaggaaaggcttgcagtttttcctcattcagtatgatactagctataggtctctcatatatggcttttattatgttgagatatgttccttttataccaaattttttgagttttgtttccatgaaaagatgttgaatgttgtcaagtgctttttcagcatcaattgaaatgatcatatggtttttgtccttcattctgttcatatgatgtatcacattgattgatttgcatatagtgaaccatccttgcatccctgggatgaatttcacttggtcatgattaatgatcttttcaatatcttgttgaatttagtttgctagtattttgtttaagatttttacatcaatattcatccaakatactagcaggtagttttatttttcttttctttttgtgtgtatttgtctcgttttggtatcaggttaatactggccttgtaaaatgaattttgaagcattcccttcttgttctgtctttcagaataacccgagtatgattagt

SEQ ID NO: 98329 - DNA, 685 bp, Homo sapiens
ttcatcagagcactgggcatgcaaagtgcccacagcattataccacaaagttagtgtgttgaacacaaacacacaaagggtcattgataagtgtgctgcttttagatgtatgtttagaaataggtttagactgtaatgtttttaagaattgctttgttttgtcaaagcaaaagtgctttgctttgttttgtccacgaagtctctggatcctatatcaaattgagggcatgatggtcagtatttaattcggaagtacaagcttccaactcagttgcttgcataactctgccaaagaaacatggaagagaaggcaaagaaaatagaatggactttgggggctcaagccagatgtagaaggaggtactgggtcaggatcagtgcactgggttgcattgcaggtgagcccagatagaccttataaaccagtttttaaactggaggcctgaartgctgtatgggtcttgtcctcactgacctttgtgacaataataatgtatacataggttttctgagggtgtaaaagttcatgtgattcacgtcttggaaagtggaggctgaagaatgctttcccattgggttagcagctgaattggtctgaagaggatagtcaagggaaaggcttgcatccatacaaaagaaaaagtaataaaccgagatcacaaagtatatgaggggcttcctgaca

SEQ ID NO: 98330 - DNA, 596 bp, Homo sapiens
gagggcatgatggtcagtatttaattcggaagtacaagcttccaactcagttgcttgcataactctgccaaagaaacatggaagagaaggcaaagaaaatagaatggactttgggggctcaagccagatgtagaaggaggtactgggtcaggatcagtgcactgggttgcattgcaggtgagcccagatagaccttataaaccagtttttaaactggaggcctgaagtgctgtatgggtcttgtcctcactgacctttgtgacaataataatgtatacataggytttctgagggtgtaaaagttcatgtgattcacgtcttggaaagtggaggctgaagaatgctttcccattgggttagcagctgaattggtctgaagaggatagtcaagggaaaggcttgcatccatacaaaagaaaaagtaataaaccgagatcacaaagtatatgaggggcttcctgacacctaatatttcttaatctaaaaccatgttcacagagttagctaatgaagatagtgtggcttccccaaaggagtatcagcagagagagaatgttctggccagaagactcaagtgcctggtccccttattgtaa

SEQ ID NO: 98331 - DNA, 596 bp, Homo sapiens
gagggcatgatggtcagtatttaattcggaagtacaagcttccaactcagttgcttgcataactctgccaaagaaacatggaagagaaggcaaagaaaatagaatggactttgggggctcaagccagatgtagaaggaggtactgggtcaggatcagtgcactgggttgcattgcaggtgagcccagatagaccttataaaccagtttttaaactggaggcctgaagtgctgtatgggtcttgtcctcactgacctttgtgacaataataatgtatacataggttttctgagggtgtaaaagttcatgtgattcacgtcttggaaagtggaggctgaagaatgctttcccattgggttagcagctgarttggtctgaagaggatagtcaagggaaaggcttgcatccatacaaaagaaaaagtaataaaccgagatcacaaagtatatgaggggcttcctgacacctaatatttcttaatctaaaaccatgttcacagagttagctaatgaagatagtgtggcttccccaaaggagtatcagcagagagagaatgttctggccagaagactcaagtgcctggtccccttattgtaa

SEQ ID NO: 98332 - DNA, 498 bp, Homo sapiens
cagaataacttaaaattctgtcctgaggaacttcttagaaggtcacttttcagtgggggcaatactttgcaggttacgattggtagttcttgggagtccttatgttcacagacaatggtattaatctatgacttcccatttttagaatataggtactatatatttgtagacaacagatttgaagaatgaatcatgaattttcctaacaagttagagtttaaggtgtcagtagatgaatcagtttcttaatgcctagaatttgctgagaaaattgaatgaaaattggtttcttaaagttaagtgaattaagaatgtgtgcgtaaagctttaacaaccttttcaatgacagcagttgacttatatatacaggatagtcagctggtttatcaaatcatttaaagtgcaacartgaaagcaaaaacaaaaggttaactaaaaattatgtcaggtgtgattaaaaaaatcagcatgactaagatacctttttttttttattaa

SEQ ID NO: 98333 - DNA, 389 bp, Homo sapiens
cctcaaagtacaggcagcaaaaacaaaaatagacaaatgggatttaatctaactaaaaagcttctacacagcaaaagaaaaaatcaacrgagtgaagagacaacttgtagaatgagagataatattattcatccaacagaggactagtatccagaaaacacaaaaacatcaatacaaagaacacaaatacaaagaacagcaaaacctcctgaaataatcccattaagaaataggcaaaagatctgaataagtacttatcaaaagaagacatacaaatggaccaggcatggtggctcacgcctgtaatctcagcactttgggaggccaaggtgggcggatcacctgaggctaggagttcgagaccagcctggccaacatggtgaaacccg

SEQ ID NO: 98334 - DNA, 616 bp, Homo sapiens
gcaattagtaatctcttctccctctctatcattttgtccttttgacaatgttttacaaatgaaatcacacagcatgtgaccttttaaatttattttcacccagcatattgcccttaygatggtagtgctttttaaatttcaagttccaattgttcgttgcaagtgtataggaatataactgatttttgtatattgatcatgtatctgtggccttattaaattttctcataagtactattaggttttctataaattctctgggatttactacataaatgatcatgttgtttgcaaataaaaggttttatttctactttcccaaactgcatgccttttatttattttcctgctttattgcatgggctatatattccaataaatgtattggtgagagtagagatccttgccttgttcctaatcttaaacatctgtgtttcagcataaagtgatattatttgtagattttctgcatggggtttcttacctcaatagttctttttctaaaggtcagggaattaatgtgagtgtcccaccaactactctacattgggaaccatggaaatgaccaccaggtgggccatagacacagtggagatggacatgaactatgaatcct

SEQ ID NO: 98335 - DNA, 558 bp, Homo sapiens
aattagcaataaaaccattttatgtaataggaaaattaaatggaaatttgttcaagataaatcctacaggccagcctaatatatcttacagcataagagtatgtgcataaaagtagggataaaattagaaaagtcagtctattcctgcaacaaacattcattgaacaagttgtgttagcagaatgcagagaggatagtgacaaagtctccaacgagaaagagcaagaaaacaaggaagaaagtcccagttaaacacagggtgtgtgggagtgggggagttggagggggtgcagtcccaggggacaaaaatatcctgatattgcctaaaactcatttggcaagagcagactaaagaattccaagagtgttgatgagagaaggaaaataagagtgaagaaaacatragaataggtaaaaaggcagaacaccaaggaagggatataagagagggacataagcaaaacatggcatcaataggcagagtgggccttactggactgcaaaaaagaggcaaaggctatggcgggaagaatacaagctaaaggactggtagggaat

SEQ ID NO: 98336 - DNA, 659 bp, Homo sapiens
actaacacaggatcagaaaaccaaatactgcatgttctcacttataagtgagtaataaacaatgagaacacatggctactgggagtagaaaaacagacactggggcctacttgagggtagagggtgggaggaaggacagtatcagaaaaagtacctattgggtaccaagtttgttacccatgtaataaagttatctgtacaccaaacccccttgacacagagtttacctttttaacaaacttatgcatgtacctctgaacctaaaataaaagattaaaaaaggacctaagacttattcaaaccaaaaaaaaaacacaacaaaaccctcccaagaaacacrtaatcacactatagattttggatttttaaagagtatacatttaaagagtgtacattttaaagagtgtacatttactcaaatgtaagtatagtgttggataagcagtgttctgttggctaagcagaacatctattcttaagttttatattttcctctgatctttgtaaacgatttaccattccactttatttgaaaaggatttaaatttaaaactattaataaacatccaaaaatctttaaaaaatacattcaactgaaagaacaaacaataaaaatgagaaatatgaaaatttctgaaataacagctaaagcggtctca

SEQ ID NO: 98337 - DNA, 659 bp, Homo sapiens
actaacacaggatcagaaaaccaaatactgcatgttctcacttataagtgagtaataaacaatgagaacacatggctactgggagtagaaaaacagacactggggcctacttgagggtagagggtgggaggaaggacagtatcagaaaaagtacctattgggtaccaagtttgttacccatgtaataaagttatctgtacaccaaacccccttgacacagagtttacctttttaacaaacttatgcatgtacctctgaacctaaaataaaagattaaaaaaggacctaagacttattcaaaccaaaaaaaaaacacaacaaaaccctcccaagaaacacataatcacactatagattttggatttttaaagagtatacatttaaagagtgtacattttaaagagtgtacatttactcaaatgtaagtatagtgttggataagcastgttctgttggctaagcagaacatctattcttaagttttatattttcctctgatctttgtaaacgatttaccattccactttatttgaaaaggatttaaatttaaaactattaataaacatccaaaaatctttaaaaaatacattcaactgaaagaacaaacaataaaaatgagaaatatgaaaatttctgaaataacagctaaagcggtctca

SEQ ID NO: 98338 - DNA, 639 bp, Homo sapiens
actgtatgtgcagctcctatgcctgagaggtgtcatcagccaattgtgggttctttacagcaatagtgtttcaggaacattagtttccagtttgtctctctagcaagctctgtgtatctagagagctgacctaagcaaggagtggcaggtagtttttcaggagacaaatattctgatattgcaaagtggattaactaacaatggatcaaggcagaagtctgccataggagtaagtttcaaagcactgcaaggcactcttagcttccaaaactggtacaggaggctgaggtctgcctttggcttggcagccctcttgccccagactgacacagtctcaggaaattcagggactgccaggaacttacatagcaccatcatttgagmcacgcaggttacctttaagctgagtacactttggtaaatcttcaaaggcttttgttctcagtgctacgagagttttcatctccaagattagttgagcaattggaaccaaatggataaatataaaaccatagaaaccatagactggctagaaatcaaatacttctctcctcttctagctgcttttctcagttgtttcagagagatttttgtgcatgtgcaatttgtccttcaggataaagtttttaaagtaaacca

SEQ ID NO: 98339 - DNA, 482 bp, Homo sapiens
  misc_feature (1)...(482): n = A,T,C or G
ctgaattctctgggaaggacgagatgcctggtgtcataaaaagacccatagtcttttttaagtgtgaggcatgcgcacacaggcacgcacacacacacgcgcacacacacrcacacacacattgcantgntgccctgtccttggcagacattcctgtggggtcatgttcgaaatatgcacttctgtggagtagcttgggttttcttggaagtctctttttctaaacttgtacctaagctgatggcctgtgcctgcttgggcatgaggggtcggagtggggatgggtcaagactgactcctgtgaagtagaggaaggcagtgatagccagacagggacgtgtgtttagggaagtcctctgtgttttcagttctgtttttgttttgtttttatgatgggagagatgagcaaatataaaggctgcttctaggagcaggagtgaggagaggttgcctatatgagagaaacgggatggtcaatactg

SEQ ID NO: 98340 - DNA, 635 bp, Homo sapiens
tacactctctagcccctaagcaccttgagtgcatttatttggaagaagaaatcgtactggtttctctaatggaggggcttctttgggagtgtaatgttgccagttgtgaaaaagctgagacctgtatgcttggggaggttctggacagcagaaaggaaccaggtgggatggaagcagccttttgggagaaggaaatgttagtaaaaagaggagaatgtggactggtgggtgagaagttgaaaacagaattagtagaaccatggacagggaagtgagctcaaatcaccttgacctccacggaaccaggattcaggcaggctagagatgctgcagtgagtgtgggggtggggtgggggtggcctggaactggtgtacgtgagcagcgacacaagcccagtggggacactgatgtccgagcactttacgtatgcaatctcttttayataggcttctctgtgtaccccattcacccagacccactttacaattagggacctcatcccactctctccccttccccaaatctgccaatccagccacttagagggtcaaagtgtgcagctcttttttttttgacatcttcctaaccagaggtggaagttccctctaattactgtcaatcacctggaacaatt

SEQ ID NO: 98341 - DNA, 635 bp, Homo sapiens
tacactctctagcccctaagcaccttgagtgcatttatttggaagaagaaatcgtactggtttctctaatggaggggcttctttgggagtgtaatgttgccagttgtgaaaaagctgagacctgtatgcttggggaggttctggacagcagaaaggaaccaggtgggatggaagcagccttttgggagaaggaaatgttagtaaaaagaggagaatgtggactggtgggtgagaagttgaaaacagaattagtagaaccatggacagggaagtgagctcaaatcaccttgacctccacggaaccaggattcaggcaggctagagatgctgcagtgagtgtgggggtggggtgggggtggcctggaactggtgtacgtgagcagcgacacaagcccagtggggacactgatgtccgagcactttacgtatgcaatctcttttacataggcttctctgtgtaccccattcacccagacccactttacaattagggacctcatcccactctctccccttccccaaatctgccaatccagccacttagagggtcaaagtgtgcagctcttttktttttgacatcttcctaaccagaggtggaagttccctctaattactgtcaatcacctggaacaatt

SEQ ID NO: 98342 - DNA, 633 bp, Homo sapiens
tattatattgacttccaaaagcggtatattaatttgcaatgtcaccaggagaatgtgtatgtgccagttttacaggaatatcaacatctaaccttttatttacttattcctagcttgtaaaatgcactcaagtttctatatggcttttatttgatcaattcattgatcaattcctttaattagtcagtcaagaaatatttatcaaatgaatgtcttgctaggagctggaaaatgagagctagaaggagtcctttgccctaaaaagacctcaatctaagcatcaaagttgatggcacaacacaggcatttatagtggaatattttaagaatgatgggagagttatacacrgggccctctgagagcactgagacaggcatttacctcgagatggaggtacaaaaagtgacttcagaaatgaattgacaaatggggaatgtaggaattccagagtgagaatcagaggaatgatgggcaaatgcatggaggtatgagaggaaaagtcagcttgaaagcctgtagcttgagggatctgcagaatcaggtatggttgaatgatggggaaagatatgggcatattagttaggaccactttggcttcaaatgtcataaatatcaagtagaaatagtttaag

SEQ ID NO: 98343 - DNA, 440 bp, Homo sapiens
ttcctgtttctctcattccaacagtctccctgcatttgcctatgatgtgatcacagatggtggacactagggtttctatttggcctgagggagggtagagaagggggcacagggtggggacgtgggaagttgaccaaatgtgkcatcgtaatgcatctcgttgccgtgatgggtcgtttggagactctcttaagtgctgggaatctgggagaggatctgcaggccactctgttgggagaagaaagggtggattgaggagtcatgagaatggaggcagggaaaccattcagagactcaaaaaaccaaggacagggatctcagctaagagggcaatccctgggaatagaagggaacgcccacttccacagatatttgggtggtaaatctgacaaggcttgagggctagcatggattagaggtattaatataagagaaaaaag

SEQ ID NO: 98344 - DNA, 597 bp, Homo sapiens
ctgcaatgtctaaccctggggtagttagccatgcaagaggctgaggcattgtgctggtcctggaggaagtgtcatttctgtttggggtaaagagaaccttccaacctttcgagtcacaatatagaggcatggcttggtctgcctaaggtcagaaacgttgtcctacaggtcctttatcagagcacgtatctttggatccagagtgagcatgataagctagggcagagcagcagcatcattgaaaagcaggtactgttactyccctataccaaatgcctgctgcatcaagtcatcagaaaaaaaaggttttccatatggcattaatttacagggaagaatacatccttctgcactttgtatctcttctagtgagttaagttccctgaaggtaaattgcagtagatgcttttgatctacttacatttaggaaatacatgcacatgcaggcacccacacactcatgctccctcattcacacctgcacatctgtgaacatgggtgctccatggggaccatagggcaatgagcacaagccactcaaactcggcaaattcagtaccagaccctccttttctgccgctggtaccttgcagtgag

SEQ ID NO: 98345 - DNA, 518 bp, Homo sapiens
tgcacatgcaggcacccacacactcatgctccctcattcacacctgcacatctgtgaacatgggtgctccatggggaccatagggcaatgagcacaagccactcaaactcggcaaattcagtaccagaccctccttttctgccgctggtaccttgcagtgagaatgcccagttcaggaggtaaaaagtgttcaacctttgcagaaggtttacaggcaaagcaaggctatcgattgtcccatgatgagaaaatgaagaaggatgtggcgcattttgtgatatcaatcygacctattagcaacagtggcaggtcactccatcctccccaaatcttcttcatgttctaagcaccatgggcaaaaaggaagtagagcttgggtgaaagattccttttttaggaagagcaatgtgtgtgtaacagagagaggagagagagacagacagagcaagaaaaagaaagaacaggagatagaaaaagagctagagagagacacagagagaagcatttctaatggggta

SEQ ID NO: 98346 - DNA, 525 bp, Homo sapiens
aagtgtttgatgaagaaataaatgctttctttcaccaagctttatcatgctctgtgattattcatccaagcccaatcacagtggaatctgtttgcttgttttcaatgtattcctctgtggctgggctattttggtttttcttttttgttttatttaagggagcaaataattataaatttaaacaaacaaaatatgcaggtgagtatataccattccatcaatgaacaagtatatattgaaccctcattttgaggctagctttgcactgggtcctggggagacatgtttcttgttaggcaagaaagagaaggagcatattgtctgagataaagctgaaaagatggatatgtayttattttggttaattaagattagtaaggtgaatatgattcacattgcatttcagtagtgcctgcctatacatgcattaattcagagataaacgatatcagtgtgcataggaataccaggagaaggccgaatgaagaaaatgagcagtagttgctccttgatgtgtcaagcttt

SEQ ID NO: 98347 - DNA, 505 bp, Homo sapiens
ccaaaatgttttgcttaaaaattcattcttcaattcatgtttctctttttgcattttattataagcagtcagaataaactaggcttctccttcaaacactttgcttagcaatctcctcagctaaatatccagtttcattgcttacaagttttacctcacacaaaacaccagaacrtagttcagccaagtactttgccactttataacaagaattgcgtttcttccagtttccaataacatgttccctatttccatgccagaaccacccttaatgtttatatttctagcatgcaactcaaaactcttctggcctcatctacactcccaccaacagggtaaaagcattcctgtttctccacatcctctccagcatctgttgttgcctgactttttaatgatcaccattctaattggtgtgagatggtatctcattgtggttttgatttgcatttctctaatgaccagcgatgatgagctttttttcatgtttattggccacataaat

SEQ ID NO: 98348 - DNA, 567 bp, Homo sapiens
cccttcttgctttgatgctctgccctccaccttcttgggatggtttattatcaagatcakagaccatgggttacttctttagattaaataaattaattccatagtgtataataattatttatttatcatgaaaatttcttttcctcagctctcctttggcccagtagcttatcattatgattaatacattttattttggaaaaagcatgatggtcatacactaggattggtcttgggaaaaacatttcagtagttgaacctagactttagatataatttgcttgatctgaacagtgtttaaaatctttttgaattattttccattatttcaccgtcgggaaattttacacaagacgtatgatttctgggttctgctgaaatgtttctacatggcagcacaggggcctcttttgcacatgttgactatcagcatgtgctcagtcatggttgtcctctttggaagggtgtcggctcttcaaattcccaccatcctccatactcattgatgttacctacctgatctcagtaggtattggattttgggttctgtgatctgaagaacaaatt

SEQ ID NO: 98349 - DNA, 569 bp, Homo sapiens
tgcacactctttttgctaaggctggaaagggataagaaagaaagataagttgggaayggaaagtgtgaaaggaaaggcaactagatcactttcaatgagaagtagttcaacagtgtttttcctctgtctttacttagctctctctgtgtagggttttatgatgacattttgtgctcccagctcatggtgatacttgggatgtgggaaatccaaccacagaatcattgggcaccatgtttcagatcttgattgctagtatctgtagcgtctctctcccccatgttttcctataagccattgccccaggtgatgggcagcaaggggttttattctttttaaatttctctttaaaatataagaagccctttcccaggcactggcttcaaataattagtctcaatgtggtctgctgtgatatgtaagcattgttagttttctttctgcctctgatggatttgtggttccttctgcctgtttccagtcatggaactgagaatgcttatggctttagccttactcgcgtctcctttatagagatatatctctttggttttctgtatatttatgta

SEQ ID NO: 98350 - DNA, 574 bp, Homo sapiens
ttttatgatgacattttgtgctcccagctcatggtgatacttgggatgtgggaaatccaaccacagaatcattgggcaccatgtttcagatcttgattgctagtatctgtagcgtctctctcccccatgttttcctataagccattgccccaggtgatgggcagcaaggggttttattctttttaaatttctctttaaaatataagaagccctttcccaggcactggcttcaaataattagtctcaatgtggtctgctgtgwtatgtaagcattgttagttttctttctgcctctgatggatttgtggttccttctgcctgtttccagtcatggaactgagaatgcttatggctttagccttactcgcgtctcctttatagagatatatctctttggttttctgtatatttatgtatgcatttttttgacttgaatattatttacatgtatgaagtgaagagtgggtacatcttgactaaaatttgagtgtatatatatatatggattttccagtatacatcagatcatatcacctttctaccctattcacacaccaccctactctcaccacaa

SEQ ID NO: 98351 - DNA, 574 bp, Homo sapiens
gtattttggttggcttagggtcttaggaagagggttccagccacaactattagaggtagaaaagctgtgcagagaggagtagatatttctgtgtttgactgtaagctttcattattgagcttcaacaaaaacaaatcaaactgatattaacctcttacaagggrcaaatcatttacgtttattttacttttcgtgataaaagatgtaaaagttatccagcaacgagccttggtgatttacaggaccgtgaaacccaagggtctgcttcctgcttggctccaggcatttccattaaaagttgatggtggctctgtgtttagataagctttgtgctgcatgacggagggagaggcatgtcctgtctttgctgcttagagaggaatggctacatagggaaacaacactatttttaaagtagtcattacagtttattttgccgcagattattttccttcctgggaaaaacattgtttcactgacaaattgccaaaatccacacagttcagtgaagtggccttgctgagttggcttcctcaagcaggcagcagatacttattaagtgctcaatatatgc

SEQ ID NO: 98352 - DNA, 574 bp, Homo sapiens
gtattttggttggcttagggtcttaggaagagggttccagccacaactattagaggtagaaaagctgtgcagagaggagtagatatttctgtgtttgactgtaagctttcattattgagcttcaacaaaaacaaatcaaactgatattaacctcttacaagggacaaatcatttacgtttattttacttttcgtgataaaaratgtaaaagttatccagcaacgagccttggtgatttacaggaccgtgaaacccaagggtctgcttcctgcttggctccaggcatttccattaaaagttgatggtggctctgtgtttagataagctttgtgctgcatgacggagggagaggcatgtcctgtctttgctgcttagagaggaatggctacatagggaaacaacactatttttaaagtagtcattacagtttattttgccgcagattattttccttcctgggaaaaacattgtttcactgacaaattgccaaaatccacacagttcagtgaagtggccttgctgagttggcttcctcaagcaggcagcagatacttattaagtgctcaatatatgc

SEQ ID NO: 98353 - DNA, 574 bp, Homo sapiens
gtattttggttggcttagggtcttaggaagagggttccagccacaactattagaggtagaaaagctgtgcagagaggagtagatatttctgtgtttgactgtaagctttcattattgagcttcaacaaaaacaaatcaaactgatattaacctcttacaagggacaaatcatttacgtttattttacttttcgtgataaaagatgtaaaagttatccagcaacgagccttggtgatttacaggaccgtgaaacccaagggtctgcttcctgcttggctccaggcatttccattaaaagttgatggtggctctgtgtttagataagctttgtgctgcatgacggagggagaggcatgtcctgtctttgctgcttagagaggaatggctacatagggaaacaacactatttttaaagtagtcattacagtttattttgccgcagattattttccttcctgggaaaaacawtgtttcactgacaaattgccaaaatccacacagttcagtgaagtggccttgctgagttggcttcctcaagcaggcagcagatacttattaagtgctcaatatatgc

SEQ ID NO: 98354 - DNA, 574 bp, Homo sapiens
gtattttggttggcttagggtcttaggaagagggttccagccacaactattagaggtagaaaagctgtgcagagaggagtagatatttctgtgtttgactgtaagctttcattattgagcttcaacaaaaacaaatcaaactgatattaacctcttacaagggacaaatcatttacgtttattttacttttcgtgataaaagatgtaaaagttatccagcaacgagccttggtgatttacaggaccgtgaaacccaagggtctgcttcctgcttggctccaggcatttccattaaaagttgatggtggctctgtgtttagataagctttgtgctgcatgacggagggagaggcatgtcctgtctttgctgcttagagaggaatggctacatagggaaacaacactatttttaaagtagtcattacagtttattttgccgcagattattttccttcctgggaaaaacattgtttcactgacaaattgccaaaatccacacagtkcagtgaagtggccttgctgagttggcttcctcaagcaggcagcagatacttattaagtgctcaatatatgc

SEQ ID NO: 98355 - DNA, 599 bp, Homo sapiens
tcttacctcttttcatcaactagaacatggaaatgcctgtgacccagcttggatgggcagagaatgatgatgtctttcccgaatatgaaagaaaggtgcctggctgaatggacacagggagcggagcctccagtctggaccactaactacatgatttcacataagagaggtctgagcttctatctttttaaaccactgtatttgggagcatctttgttacagctgcttagcctccaccttaaagaatagacttccagagaaaaaactctgggtattgataaatatagattatttgagggacccatactctaataaaaaagccagctctccacacaaaaatattttgacagtgaagcccaacarctgagtcatgtacatggaatgttgaatcagttttagtgcctcgcttttaataatgtgaaacactaaagagatagccaataattaatagacattagaagaaagctcactatgtcaggggccatgatcaaacacataaatgaaggaaacaggaaaaaatgactcagaggaagcagagaatgaaaggaaaaagattaaactgtccttaatatcctctgaatgaaaagtcactacatcta

SEQ ID NO: 98356 - DNA, 599 bp, Homo sapiens
tcttacctcttttcatcaactagaacatggaaatgcctgtgacccagcttggatgggcagagaatgatgatgtctttcccgaatatgaaagaaaggtgcctggctgaatggacacagggagcggagcctccagtctggaccactaactacatgatttcacataagagaggtctgagcttctatctttttaaaccactgtatttgggagcatctttgttacagctgcttagcctccaccttaaagaatagacttccagagaaaaaactctgggtattgataaatatagattatttgagggacccatactctaataaaaaagccagctctccacacaaaaatattttgacagtgaagcccaacagctgagtcatgtacatggaaygttgaatcagttttagtgcctcgcttttaataatgtgaaacactaaagagatagccaataattaatagacattagaagaaagctcactatgtcaggggccatgatcaaacacataaatgaaggaaacaggaaaaaatgactcagaggaagcagagaatgaaaggaaaaagattaaactgtccttaatatcctctgaatgaaaagtcactacatcta

SEQ ID NO: 98357 - DNA, 644 bp, Homo sapiens
ccaattggccaaaaggcttcaatgaagttctgtctccaggccatggacttcacctggaactggcagcctggcccccaaacctcaagcctttcctggcttgaaggaggggtttcactggtaagctaccccttcccacctaggaccctgtctgcctttaacatgccatccacagtgcccaggctgtctgcaccgagaggcacctgtaggcctgcaccaagctgccctcagctcccctggcctgcctcctgtgcttsttggcacccaaagtccagaaggagccgaagtggcagggggcttatgcgtcagtgctgccctggctgggttatgacagtacctgggctcagccacagctttgctctgccccagaatggttgccaggaggagggagaggccaaggagtgggagcaggccctttgaagcctgcaggggttgggggcttcctgggcccctgagagccccagggatgccagggtctggagctgaactcggcatcagcacccgggagtgcggccttctgcactgccaacttggtagaaggcggggctctcatctgctcctggctcccacaccagctctgcctagtgcgcaggcctggctgtgcctcccctgctgcagccagtgtccttacagcagccgctccagat

SEQ ID NO: 98358 - DNA, 644 bp, Homo sapiens
ccaattggccaaaaggcttcaatgaagttctgtctccaggccatggacttcacctggaactggcagcctggcccccaaacctcaagcctttcctggcttgaaggaggggtttcactggtaagctaccccttcccacctaggaccctgtctgcctttaacatgccatccacagtgcccaggctgtctgcaccgagaggcacctgtaggcctgcaccaagctgccctcagctcccctggcctgcctcctgtgcttcttggcacccaaagtccagaaggagccgaagtggcagggggcttatgcgtcagtgctgccctggctgggttatgacagtacctgggctcagccacarctttgctctgccccagaatggttgccaggaggagggagaggccaaggagtgggagcaggccctttgaagcctgcaggggttgggggcttcctgggcccctgagagccccagggatgccagggtctggagctgaactcggcatcagcacccgggagtgcggccttctgcactgccaacttggtagaaggcggggctctcatctgctcctggctcccacaccagctctgcctagtgcgcaggcctggctgtgcctcccctgctgcagccagtgtccttacagcagccgctccagat

SEQ ID NO: 98359 - DNA, 615 bp, Homo sapiens
gaatggactaccatgatgacagagtctcagacccasggtagacgttgggtaggcatccaacattatctgctgaatttgggataggaagtgctgaggggtagtgagagctatgttctcatccaccttggaagttagtagataacttcctaacatgatgaattaagatattaaaatataattatattatttagaaaagtggtggtcaataacagcagagataaaagcaaaagcagttgctctagcgaataggcagtaagtaaagaaacaaggattttgctttattttttaactttcatatggtcttttaatgttatttgatgtttaaacaatatgcatgtatgcgtgtatgtatttgataaaaatgttacatagaaaataaaaccacaaatattaagcctattttaagtaacatcattatattccattacaatttttcattacctttagtcaacttttgttgaaatgtatttaggttgttgaaaatttttactattgcaaatcaggaagggcgatcgttggttcatttaatatactttagacacacttataaacattaaataaactagggtttaagacaagttattaggaagacagtactaaaggattaaaatggtg

SEQ ID NO: 98360 - DNA, 351 bp, Homo sapiens
tgggaggattgaggaaaaaaaaattatcaaacttaagacttaatgtttgataaaatattaaggctttatcaaaaagagcttagggtccatcaacagatgatgggatttttaaaatgtggtatacatataccatggaatactattcagccacaaaaaagaatgaaattatgtcttttgtagcagcatggttggaagtagaggccattatcttaagtgaattagaaagtcaaataccacatgttctaacttataagtaggagctaaataatgtgtacacatggacttggggtgaagaataatagacactggagattaggaagkgttggagggtaggttggggggtgagggatg

SEQ ID NO: 98361 - DNA, 534 bp, Homo sapiens
aaaaaactgaggctcagaaaagtgtagtaattttcaccaccactgggaggtagtgaaatcagtgttcaaaagggtctcactcaaaagccaataacaaaggctcaaaagagagaaaaagtgttctgcataaatacaaatatgaaatgaaatttgaacacagaaaaaaaggtagttttatatctgaatyatttcttagaagtgtttgaatgctgttaagtctgaatatgaacctctaattgcctttgaatccatgatcctattctcataatcaaactcctcataaataccacagttttaccttggaagaatgtatcttttatattcaccttaattttgaaagtttcttaaattctccacatataatgcattataaattactattaatctgtctatttgctaaaattcttaaatgatttatgagataaaaatcttaatacaaatgatttagcacttttgtaaaataaactggtagaaattttaagataggtcaaaataattaaagttttaaatgcactcaaaagaaaaggtaaattg

SEQ ID NO: 98362 - DNA, 451 bp, Homo sapiens
gcattagcccaaacatggagcatgaacctccaccatcaccttgacaagaggcagtctcatgaagagaaaagagcactggtttggaaccaaacaaacttaaactttgattcttaatccaccttgtaagtagcaatttaaccttgaccagattactatattccctgagcaataatttcctcaattgtaaaattcggctagtgaggtttgcattctagggctgtactaacacakgcatgtatgtgtgcatgtatatatagctgcacatacacacatgtatatacatatttcccttcgacctacttgtcattgatctgacctttacaaccttctactttggggctacatttggggccactttggggcttcaatctcttcattcagtcccatgaggctgttaaaaattgtggcaaacatatccagtcttaaatatttatggcctcgtgactagaag

SEQ ID NO: 98363 - DNA, 665 bp, Homo sapiens
actctcaccactgctatccaacatactactggaagtcctagccagagcaagaacaagaaaaatgaatagaagacatgtaaatcgtaaaagaggaataaaattatttctgcttgtagatgacctcattgygtgtgtggaaaagcctaaagatttcacacacacacacaaaaactcttacagctaatatatgattttaacaaagttgcaggatacaaaatcaacatgcaaaattcagttgcatttctatttactaacaatggtcaattcaaaaatgaaattaagaaaacaatcccaaatactatggcatcaaaaaggataaaagacttaggaataaacaacaaaggaagtaaaagacttgtacaccaaaaactacaaaccattgctaaaagaaatcaagaagagacataaatggaaaggcatgccatgctcatagatggaaataagattgttaaaatgatcacgctttcccaagtgacttatcaattcattgcaatccttatgaaaactccaatgacactttgtgtagaaatagaaaacaaatcctaaaattcatgtagaatttcatgagaccatgcacagccaaaataatcttgaaaaaaaataaggccaaggcctcatacttcctgattccaaaacatactacaaaggtacagtaattaaaatag

SEQ ID NO: 98364 - DNA, 611 bp, Homo sapiens
acctacctggttagctgtattcttaggcattttattgttttgggggctattgtgaatgagattgtattgatttggttctsagcttggacgttgtcagtgtataggaatgctaccaattttcatatactgattttgtactctgaaactttgctgaagttgtttattagacctaggagttcttgggcaaaaactatgaggtttctaggtatagaatcctattgtctgcaaacatagatagtttgacttcttctctccctatttggatgccttttatttatttcttttgcctgattgttctgactaggtcttccaccactatattgaaaaggaacagtgagaatgggcattcttgtcttgttctgattttcaaggggaatgctcccagctttttcccattctgtatgatattggcttcaggtttctcattgatggctcttattattttgagatatgctcccccattgcctacattgttgagagcttttaacaacaagggatgttaaattttatcaaaagccttttctacatctattgaggtgatcatgtggttttttagtctttttatgtgatgaattgcatgtgttgatttgcatgtgttgaacaaacctggt

SEQ ID NO: 98365 - DNA, 611 bp, Homo sapiens
acctacctggttagctgtattcttaggcattttattgttttgggggctattgtgaatgagattgtattgatttggttctcagcttggacgttgtcagtgtataggaatgctaccaattttcatatactgattttgtactctgaaactttgctgaagttgtttattagacctaggagttcttgggcaaaaactatgaggtttctaggtatagaatcctattgtctgcaaacatagatagtttgacttcttctctccctatttggatgccttttatttatttcttttgcctgattgttctgactaggtcttccaccactatattgaaaaggaacagtgagaatgggcattcttgtcttgttctgattttcaaggggaatgctcccagctttttcccattctgtatgatrttggcttcaggtttctcattgatggctcttattattttgagatatgctcccccattgcctacattgttgagagcttttaacaacaagggatgttaaattttatcaaaagccttttctacatctattgaggtgatcatgtggttttttagtctttttatgtgatgaattgcatgtgttgatttgcatgtgttgaacaaacctggt

SEQ ID NO: 98366 - DNA, 583 bp, Homo sapiens
gaagttaaagttttattaatattttaaaggaataagggtatttgcaaaacatccaaagcagcattccctgtacacaactctacagaaaatataagcatatacttgtgttgaaaaatagttttgggtttgtcagaatattagaaatattacacatgattgattagaggcagggaagacacgtaaaagtctgctaatgaagatatataaaatgagggattgtaatatagaacattatacttgaagtaggaattcaagaaggtcctaaaaatgttgcctgaatgaataagtaaatgtactcaattaatttttgttcatacttttgatattttggatataataaatcaacctctactcaccaggaatatctgtgctctctctttagggatgagacaaaattatgtatggaaacaatatatgctagtgctcaattgtaaactgcagacaataaacgagatctctatttcacttgctaggtaaaagcatttttcagagtatctaggtaagttgtttttcgratttagccaagaactactagataaataataaattgagtcccaactggtcattagttgaggtatgttgc

SEQ ID NO: 98367 - DNA, 607 bp, Homo sapiens
gggcagttctaattccagtttctcatgaggtttcagtccaaacatcagctaggctatgttcaactgaaggcttggagctggaaaatctggttctaggatggctcacacacatggcagacaagtttattctggatgttgtcaggaagtcttgtatcatggacttctctatgggactgccttcctaacatggcagctggcttaccacagtgagtgacccaaaaaagagcaaggtggaagccgtaatgtcttttataacttaacctcagaggttatagtctgccatttcccccaatattcgattggtcaaacaggctgaccctactcagtgcaggaggggactaaacatgcrcgtgactttcaaaagagaagaatcagtgggggtcatcatggagactggctacagcatggtcatctagcagaagaatctgattgaacctggaggtagaaatgtggagatactcaacagtcacaaggcaagtcaaggacacctgacccagaaccattggctctggacaagtttaattctcgtacaaacaccacatttccacatggaatctcctatcagctaaagtttccatggcaaggagcaggataatcgtcagaattc

SEQ ID NO: 98368 - DNA, 554 bp, Homo sapiens
ctgaattgtagtcccaactctgccacttgttagatacctttactgaataaatcccttcccctccctcaggctcaattctctcatctctgcaatgagggggygacctggggtaatttctaattatctccccggtggccttaagactgcatgcatctctaagcatgtaactaacaaattagggatctctcacccttagaaagatacatactgccagaaaattgttttgctttttaatgaagtaggggtataaggaggctgtccaactctctcttgtggtcagggtatataggcacatatttggaggaggaagaggaatcagggggagggtggattttcaaaacaaacaatgaaaggtcagtttatcaatcccaaacctagtgtggtatattagtttattattcaagaatatttacttccccccatttccactccatggaaggaataatcctccttttgctttgtctttgcactggacctgctgacttgctttaaccaacgggttgtttgcagacataactgcaaaggagtggctggaaaacttcttgcgcagttgg

SEQ ID NO: 98369 - DNA, 554 bp, Homo sapiens
ctgaattgtagtcccaactctgccacttgttagatacctttactgaataaatcccttcccctccctcaggctcaattctctcatctctgcaatgagggggtgacctggggtaatttctaattatctccccggtggccttaagactgcatgcatctctaagcatgtaactaacaaattagggatctctcacccttagaaagatacatactgccagaaaattgttttgctttttaatgaastaggggtataaggaggctgtccaactctctcttgtggtcagggtatataggcacatatttggaggaggaagaggaatcagggggagggtggattttcaaaacaaacaatgaaaggtcagtttatcaatcccaaacctagtgtggtatattagtttattattcaagaatatttacttccccccatttccactccatggaaggaataatcctccttttgctttgtctttgcactggacctgctgacttgctttaaccaacgggttgtttgcagacataactgcaaaggagtggctggaaaacttcttgcgcagttgg

SEQ ID NO: 98370 - DNA, 554 bp, Homo sapiens
ctgaattgtagtcccaactctgccacttgttagatacctttactgaataaatcccttcccctccctcaggctcaattctctcatctctgcaatgagggggtgacctggggtaatttctaattatctccccggtggccttaagactgcatgcatctctaagcatgtaactaacaaattagggatctctcacccttagaaagatacatactgccagaaaattgttttgctttttaatgaagtaggggtataaggaggctgtccaactctctcttgtggtcagggtatataggcacatatttggaggaggaagaggaatcagggggagggtggattttcaaaacaaacaatgaaaggtcagtttatcaatcccaaacctagtgtggtatattagtttattattcaagaatatttacttccccccatttccactccatggaaggaatratcctccttttgctttgtctttgcactggacctgctgacttgctttaaccaacgggttgtttgcagacataactgcaaaggagtggctggaaaacttcttgcgcagttgg

SEQ ID NO: 98371 - DNA, 554 bp, Homo sapiens
ctgaattgtagtcccaactctgccacttgttagatacctttactgaataaatcccttcccctccctcaggctcaattctctcatctctgcaatgagggggtgacctggggtaatttctaattatctccccggtggccttaagactgcatgcatctctaagcatgtaactaacaaattagggatctctcacccttagaaagatacatactgccagaaaattgttttgctttttaatgaagtaggggtataaggaggctgtccaactctctcttgtggtcagggtatataggcacatatttggaggaggaagaggaatcagggggagggtggattttcaaaacaaacaatgaaaggtcagtttatcaatcccaaacctagtgtggtatattagtttattattcaagaatatttacttccccccatttccactccatggaaggaataatcctccttttgctttgtctttgcactggacctgctgacttgctttaaccaacggrttgtttgcagacataactgcaaaggagtggctggaaaacttcttgcgcagttgg

SEQ ID NO: 98372 - DNA, 589 bp, Homo sapiens
ggtgatgggcattgtttttcagttattgatttaaattaataacagatcatcctgtccaaacactggattgtgtacacaggtgaacaggctattcatctttaggtgtttaaatcctgactccttttgcatattggtatagacagatgatcaagctacaaaaatacgaggatcatctcccaatgagccctctcatacagcttctaaaaggttaacaaaataaaaaagaatccrgtttctatactgattagaatctatactctgattttttttaaagttgcaaatgttagggaatgaattgaattctatctttagagtaatcaaactcgttagcctctttggagagccctgactccactgctattattaattgtttattctttaatcagccccttcacttctctgaacctcagctcagcttcttcatctaaagatgagggtagggtgtaaaactatattacatcattttttaaaatgtagttattttaattctatgatgtaaggtcttttctcctctactgtctttggactatgggcaagaagtaccttttatttcatgttaccattaacatagtgccttggacatggtaaa

SEQ ID NO: 98373 - DNA, 589 bp, Homo sapiens
ggtgatgggcattgtttttcagttattgatttaaattaataacagatcatcctgtccaaacactggattgtgtacacaggtgaacaggctattcatctttaggtgtttaaatcctgactccttttgcatattggtatagacagatgatcaagctacaaaaatacgaggatcatctcccaatgagccctctcatacagcttctaaaaggttaacaaaataaaaaagaatccagtttctatactgattagaatctatactctgattttttttaaagttgcaaatgttagggaatgaattgaattctatctttagagtaatcaaactcgttagcctctttggagagccctgactccactgctattattaattgtttattctttaatcagccccttcacttctctgaacctcagctcagcttcttcatctaaagatgagggtaggktgtaaaactatattacatcattttttaaaatgtagttattttaattctatgatgtaaggtcttttctcctctactgtctttggactatgggcaagaagtaccttttatttcatgttaccattaacatagtgccttggacatggtaaa

SEQ ID NO: 98374 - DNA, 640 bp, Homo sapiens
tttaatttgaatctgggaggaaaggcacattaaatcccttgtgtgaactagttaatccttttaaaaaagttagaaagtctgaaaaaaaacaagaattggtaaggatgcagaggaatagccactcctatacagcaacttctactttttttgaacagtttggggccaggttcagtggctctcacttgtaatcccagtactttgggaggcctaggtgggaggatcactcgagcccaggagtttgagaacaatctgggaaacatrgtgagtccccacctctataaaaagaaaagaaaagaaaaattagccaggtgtgatgaagaacacctgtagtccctgctactcgggaggctgaggtaacaggatcactggagcccaggagtttaaggttgcagtgagctctggctatgccactgcacttcaacctaggtgacagagtaagaacttgtttcaaaaaaacagtttgagaaattccaattctggcctagatggagtaatagggactgaaattacctgcctgaaacaacctaagaaaaatctgataaattagatgaaattatatttttttaagacaaggaacatcacataatgaaggaccgagatccctgagggctgagaaacaaacaaggtgagccttacaatt

SEQ ID NO: 98375 - DNA, 640 bp, Homo sapiens
tttaatttgaatctgggaggaaaggcacattaaatcccttgtgtgaactagttaatccttttaaaaaagttagaaagtctgaaaaaaaacaagaattggtaaggatgcagaggaatagccactcctatacagcaacttctactttttttgaacagtttggggccaggttcagtggctctcacttgtaatcccagtactttgggaggcctaggtgggaggatcactcgagcccaggagtttgagaacaatctgggaaacatagtgagtccccacctctataaaaagaaaagaaaagaaaaattagccaggtgtgatgaagaacacctgtagtccctgctactcgggaggctgaggtaacaggatcactggagcccaggagtttaaggttgcagtgagctctggctatgccactgcacttcaacctaggtgacagagtaagaacttgtttcaaaaaaacagtttgagaaattccaattctggcctagatggagtaatagggactgaaattacctgcctgaaacaacctaagaaaaatctgataaattagatgaaattatrtttttttaagacaaggaacatcacataatgaaggaccgagatccctgagggctgagaaacaaacaaggtgagccttacaatt

SEQ ID NO: 98376 - DNA, 562 bp, Homo sapiens
ttaaatatccctatcacatacaaactggacctcagagtgggctgggtggtattagaacaatctcttccccctttttagaagctgtgaagatttttgaatttactcacaagatctacttcccaatgaactaagactttgtaggattttcctatttaagatctgggtttaaactcagctcttccatttaactggctatgtggtcttaagattactgtctctgtgcctctatttaattacttataaagtgagagcaattttcctgrtcttatagagtcactgagaagattaagtgaggtagtggcactgagaaagtttgaagcaaatattttttgaataaataaatgactaaaacaataatataaatgttaaaaatcatcaaccaattcagtgtgtataatgaggcttattatttactgagtgatccccgtgcataaagaatagctctaagttcttaaacccataccaccttgtagttaaggaattagaatgtaagcctacatcttgtgggtgggcacccaaggccacactcttaacttctacctgcactgcctcttcttatttg

SEQ ID NO: 98377 - DNA, 659 bp, Homo sapiens
atttcaaaaaatgtactttctatccatcctttcttaagaagtttctgtaaggtgtgctccatcataacaggggattaagccaaaaagaaaaggacatggggtacaggaaagagaagatccaacacagtataaaggccaaagatatgcccargatgatatggaagggtgagccaggacagcagttataataccagaccatataggaacaggccagaaggctccaggagattctctgagatgaaattgactgaccatcaatacgtttgaacatacgggcaggagattgggacaactggtgaagagtttgaagttactttaatgtaagtatatagaaaaccaagcaagcaaaaagaccaaaaataattattaactctagggaaaataaaaggttgttcaggaaaggaaaaatgtttacaacatggttcagctgtggaaaccactaacatagttataaaaatgtaacctctgaatagtgattcaaccaaaattataactgcaatggaaggatggggaaactgaaaaagtgtgtggtggttggtggggaggaggaatgaaagagaactaaattctctgtcttccatcatggtaggaaatcaataaataatgcctaaaaatgaaaaccccaaaagtagcaatacaagcatgtatggacggtcagt

SEQ ID NO: 98378 - DNA, 528 bp, Homo sapiens
caagagcatgggaacaaccatctcctggaatggcccttccacaggaagagaggaggacacatggcacagaggaaggatggggcacctggattcaaaatctgcttacaccatccacggagcctgggatgttgaagaattagttttttctcttggaacttgctttccttacttgtaaaataaagttaatcctacaaacactacaaggccattgtgagggtcaaatgagaccaggcatggtaaagtatcttgtaaacagcaaattacgaaaaacaaatacaaacaaaacagaaaacgtaaaacaacaacaaaggtcttggttctaaaggacatgaaactttcatttgacccaatttagagatcattcattccttcaacaaataataattgaagccctgcratgtgccataccttcacacattctaagaattattcctatttacacactttcaagaaacctatcatttccggttgggaaggacacccacagcatcccctctaccccggcccccattggaacccatggggatg

SEQ ID NO: 98379 - DNA, 538 bp, Homo sapiens
gtgcaccatggcaggttgttcaaaaagctaaattagttggaactgatttgatttattaaaagcatgtttcttgattctgaggtaataccagtctcacttttttgaaactccttattttgtgaaatgatagttattgataggygtgttttgtgctttaacgctcttatttggcaaatttaaaatttggcttgaccagggatcagtggctcttcttgctgaccgagccccccatcccctcttaatgaccatggagacctttctgcatctctggcatatctcccatcagacccgtgggctgggctgtctatcactagcctccactccagagtcatctcccctgtctccagggtgcctcccctacaggtccactggctcttgtctccacttctgtgtcacatagaagtgaatggagcctcagaaacatcaagaccttttctgcctgactgtatctatgtgtcctcagaattgggcgtggaacactccttgttctcagagatcaaaggtgagtggggaaagagcccctttgtccattatctca

SEQ ID NO: 98380 - DNA, 645 bp, Homo sapiens
aactcctattcatttgtcgatctccagcatctagcagagttcctggcacctagagaacatttgataaataattcaaaaaagtgagtgatttgttcttcattgtttaatccttattttagcttatgattttttctgataataaatatacttgcatgttgtgtgaagttcatgtgttaaaatgcaaagaaagctcacctgaaatcctcccactagaaagtaacctcgttaacattttcatgaccttcatttyacacatttattgtaaatatataccttttatattaaaatgtcacaaaaatgaaatattatacatgtttttcacaacttactttttcactgaaaatattatggataatttttccaaatgaaaaatagaaatctatgtgtgttttgtaatattttaaaaattcatttggatgtactgtgatttaaccatatttgtttcatggcagtataagttgttaccagcttgtttgggtattataatggatgctgtgctgaatattcccacatatacattttaataactttctttgattatatacttaagattaatttctagaagagaattcttagaatcaaaatataattgtatctttaattaaaatacatatgactaaactgcctagaaaaggtcactgatgt

SEQ ID NO: 98381 - DNA, 611 bp, Homo sapiens
atttatcatttctgatacttttcattcatttgtatagatccacatttctatctgataccattttcctactgcctaaacactgttacttccttcaacattttttaatagcgtgagtcagctgccaataattttttttcaatttttctttgtctggaaagttttcagtccatcattatttttaaaattcacttggtaagttctagatttacactttttcttttactgccttaaaagtatttcccattgtcttctgtttttcataacttttgtactaagtctgctgtaattttttgttcctctatatgacatggatttttttttttctctcagcttcaaaaagttttcttcatcactgttgtttagaaatgtcatggtgatgygctctggtgtgtttttcctcatgtttcttctgaatagattcattgaggttttctgaactgtgtgcttatagttttcagcaaatttagaaaaaatattcagctattatttcttcaaacatccttttcctccccacatctttgtcttctccttctgtgaactcacttacatgtatgttagtcaacttgatattgttccacaggtcactgatgctgtgttatttctttattttt

SEQ ID NO: 98382 - DNA, 609 bp, Homo sapiens
gaatacattcaatcaagtttgttaaattgagtagtgaatatagccactgatttaaaaggcaygttttcataggggaataagcacagaggattcagcatcaggagatctagaatgctggtgcctgggctttgccaccagctgtgttagttcaggcaaggcccatgcttgatctgcatcttcaattaaccaccaactcatcaataaaaaggacaaaagaaatcagttataaaagaccttccaactctgacatcctagaatcccataaaatattatctaggctttttttttttggcactggctaatgttaattattttagaaataccattgtatttgcaggtcttaagaaaattactctttaccacagtgatggccaaggtccttccaaatagctaacatgcaaaagcacagttagaggccattaatccacaggtccgtttcccagaaacctgactcattcaggaccttttgatcctgagctcatcaaaagagtcccctgagtgcccacattagctgttgaaagttctagcattaatggctatgtgcactgttgctcgtgcccttttgcaaagccttatgaaatctagattcttgttctccaacaattactc

SEQ ID NO: 98383 - DNA, 548 bp, Homo sapiens
acaagtagcctggttgcatggaatccatcaacatctctttgtcccatcaaccaaccacaacctgagactcaggcagcagtgtgtacagactgcattgcacagattaacaggctctggtcttcctcggtaggatcttgcttygaatatttcatctcagaaaggttcaactaatttatttcacagactgagaaactatgtgttagagaagcaaagtgatatagcactagtgatggagctgagatagaacccagatctcaataccctgactccaagtccaggattatcattatcttgtacatgccctttctcctctgtatttgcacataatctgttccattaaatattttatttatagcttgctttataccagcaggctttaaaggcaataatcacataagtacaagaagagtaaagagtttcaggaaggaaagatggagcatccaaggaccatcaagattggaaagttgatactatctgtaggcctgaaagcctaagaagaggagtggttacccctgcaatctgagcactgtggtgataggagagggccc

SEQ ID NO: 98384 - DNA, 469 bp, Homo sapiens
tttaatattcagaatacccctgtaataagtattgtcattctcatctctagttatggagactggagctcagaggcraagggtaaacagcttgctcaagccacacagctaggctgagctgtggctaaaactccacgtttgtggattctaagccttttctctttctactacatcagggatgactggggcatggtttatatcactgagggcatcggagtctagtgagctgcaagtggggacagacttgatggaaggctgtaacactcagagcacactcagagcttctggaaatggaaggaagaggagaaggaggaggaaaatctcaaggtgtttaaacagttgattctgaagaattttcttgctaccaacactgtgaaaaggcatggaggccatttgggaagtgttctgaggatctgggttttctcatctgccaggagtattagactaagtgttccccaaagtcctttccatc

SEQ ID NO: 98385 - DNA, 414 bp, Homo sapiens
ctcaagccacacagctaggctgagctgtggctaaaactccacgtttgtggattctaagccttttctctttctactacatcagggatgactggggcatggtttatatcactgagggcatcggagtctagtgagctgcaagtggggacagacttgatggaaggctgtaacactcagagcacactcagagcttctggaaatggaaggaagaggagaagraggaggaaaatctcaaggtgtttaaacagttgattctgaagaattttcttgctaccaacactgtgaaaaggcatggaggccatttgggaagtgttctgaggatctgggttttctcatctgccaggagtattagactaagtgttccccaaagtcctttccatctcgaatccagaggaaacacatggggaaaatgaattc

SEQ ID NO: 98386 - DNA, 505 bp, Homo sapiens
atttaaaacaacagaatatattacaagttaaaattcacagggaaacttcagtgtagaagggggaacagcatgcatctggccctgcgagctgtttttttttttttttttcctcaaaggttatcggcaatcactgctttcaaagccgttttcactgcatttcagatgccagaatatacttcatacagtattaataaagggttgcaccagaattaatgaaaagtttccatgttcacatataataaagaagtacctaattaaaggcatggttaagccaraagtacagatattgtcttttatattaatatctattatattttagcatttactgtgagcctcttcaactgactgatgcctgaagggagaactaagaaatcgctcagctggtggctggcactggtcttgaagaaagctagtaaggaacactttgcagcctttcagagtttctccaccagctgtcaccagctatgggtgctgaaaagaccctgtcacttcatccaaagggatt

SEQ ID NO: 98387 - DNA, 505 bp, Homo sapiens
atttaaaacaacagaatatattacaagttaaaattcacagggaaacttcagtgtagaagggggaacagcatgcatctggccctgcgagctgtttttttttttttttttcctcaaaggttatcggcaatcactgctttcaaagccgttttcactgcatttcagatgccagaatatacttcatacagtattaataaagggttgcaccagaattaatgaaaagtttccatgttcacatataataaagaagtacctaattaaaggcatggttaagccagaagtacagatattgtcttttatattaatatctattatattttagcatttactgtgagcctcttcaactgactgatgcctgaagggagaactaaraaatcgctcagctggtggctggcactggtcttgaagaaagctagtaaggaacactttgcagcctttcagagtttctccaccagctgtcaccagctatgggtgctgaaaagaccctgtcacttcatccaaagggatt

SEQ ID NO: 98388 - DNA, 505 bp, Homo sapiens
atttaaaacaacagaatatattacaagttaaaattcacagggaaacttcagtgtagaagggggaacagcatgcatctggccctgcgagctgtttttttttttttttttcctcaaaggttatcggcaatcactgctttcaaagccgttttcactgcatttcagatgccagaatatacttcatacagtattaataaagggttgcaccagaattaatgaaaagtttccatgttcacatataataaagaagtacctaattaaaggcatggttaagccagaagtacagatattgtcttttatattaatatctattatattttagcatttactgtgagcctcttcaactgactgatgcctgaagggagaactaagaaatcgctcagctggtggctggcactggtcttgaaraaagctagtaaggaacactttgcagcctttcagagtttctccaccagctgtcaccagctatgggtgctgaaaagaccctgtcacttcatccaaagggatt

SEQ ID NO: 98389 - DNA, 567 bp, Homo sapiens
atgtacttttaaaaaaacgagaatcacatgcatattatgccacttctaaagtgtattagcgtttattttgaccatctatgttttgacaatcacattttttttaaacatgctctccagaaaagtatagcaatggaaattttagtggtcgatagtgattttcatttaagagtttaatattctaaagttctaggaattctgattaattgattaaaaacgaacaccttagtatttaatgctacaagtaatacagagtcctggatattttgaaaatctggcattagattctgtttgacattaacgtctagttaagaaaatatcttcgggtaaagtagactgtataaaccttagaaaaattgtgttgaactgtgtaggcatgggtaggaaggagaatgtcttcaagaaaattaaaaattgatgtaaactgcacaatgaagcatgtgctatttttaccattttatgctcctctgataccattacatatctgraagttgacattagtttataaaatcagcgtttttcatttactcagtatacacgtattatgcttgcctaccactgtacaaatta

SEQ ID NO: 98390 - DNA, 382 bp, Homo sapiens
ccatggagttttatttgaaaataattttaattagccggaaactaggagtttaataaatggaaaacagagaactttccaaggccacagctgggaaacacttggttttttaaaaatwccgcctggcgtcccagaccagctaagcaccctgacacgagggccggaggaatccacaagaaaaacaaagcttatttttagagaaatattttaaacttggtttcagcgagctcaggagttttcttgtctgtctcgagtccttaatatctttccttctatttcagagctgcctctcgccccagagggcacaagagctgctatctgacaggagctatttctgcccagatgaaaataaaagggcccctcccccttcccacagagtgaattc

SEQ ID NO: 98391 - DNA, 590 bp, Homo sapiens
caaagattttgcctcaaactttgccaccactgagaacttggggatgtgaaaaccactgaggcagcaatggcaaagagaagagtgggaaaggcctttccaggatccatgtgcagaattagatttgtgtaccacctgtgataactgggaaagatcttttttttctgktttttttttttgttcctttttttttccacgttggaggcaggaataaagcaggtgagggttccatcagagtatctgccctaatttcctgtaacagcaacaggagttacccattactcctattgccaatagatatcatggcttcactcctaaaccatactcagagcattcacttgttgatgttagtaaggaaaagcaagttgtgcataagcagtattatacagcatgcttcagtacagtttgtagctatttgcttaactgaaatctaggtacaagcctcttcaaataacagatcttctttttctgtatgttccttaaagagaaagaggaaagagaaaagaaacatgcctggagtgagcatttatcaccaagacaatttccaatttcatctcacgatcaggtttacttcccaatattctacaaccgta

SEQ ID NO: 98392 - DNA, 590 bp, Homo sapiens
caaagattttgcctcaaactttgccaccactgagaacttggggatgtgaaaaccactgaggcagcaatggcaaagagaagagtgggaaaggcctttccaggatccatgtgcagaattagatttgtgtaccacctgtgataactgggaaagatcttttttttctggtttttttttttgttcctttttttttccacgttggaggcaggaataaagcaggtgagggttccatcagagtatctgccctaatttcctgtaacagcaacaggagttacccattactcctattgccaatagatatcatggcttcactcctaaaccatactcagagcattcacttgttgatgttagtaaggaaaagcaagttgtgcataagcagtaktatacagcatgcttcagtacagtttgtagctatttgcttaactgaaatctaggtacaagcctcttcaaataacagatcttctttttctgtatgttccttaaagagaaagaggaaagagaaaagaaacatgcctggagtgagcatttatcaccaagacaatttccaatttcatctcacgatcaggtttacttcccaatattctacaaccgta

SEQ ID NO: 98393 - DNA, 590 bp, Homo sapiens
caaagattttgcctcaaactttgccaccactgagaacttggggatgtgaaaaccactgaggcagcaatggcaaagagaagagtgggaaaggcctttccaggatccatgtgcagaattagatttgtgtaccacctgtgataactgggaaagatcttttttttctggtttttttttttgttcctttttttttccacgttggaggcaggaataaagcaggtgagggttccatcagagtatctgccctaatttcctgtaacagcaacaggagttacccattactcctattgccaatagatatcatggcttcactcctaaaccatactcagagcattcacttgttgatgttagtaaggaaaagcaagttgtgcataagcagtattatacagcatgcttcagtacagtttgtagctatttgcttaactgaaatctaggtacaagcctcttcaaataacagatcttctttttctgtatgttccttaaagagaaagaggaaagagaaaagaaacatgcctggagtgagcatttatcacyaagacaatttccaatttcatctcacgatcaggtttacttcccaatattctacaaccgta

SEQ ID NO: 98394 - DNA, 481 bp, Homo sapiens
ctatagaagcctttctccctctatgatattcagattcttcaagctgaccagattgcttcaagaacaaatagctgatgcacagaagcccctgcgccatgcatggcaaggcctccaggttcctcagagggtgaccactctttcagttcactgtcaaggctcagaatgcagatgacccatctcttagggtttgcagcccttctggaatatagcccctaccatgactttcaaaagtttcataggtacagctccccmttttgaacatctatccaatgccttataagtggaggacaaagctactcagtaatgggtgtgtttctcccccaaggtcaaagttgtgtcccagacatatgtacagtacttacctttagtttttcccaccttaggatgaccttcttcccttcacagcagggtatattctcactccaagtcagagggcagtactgattttccctctctctttaaaggatctgaattttggaat

SEQ ID NO: 98395 - DNA, 594 bp, Homo sapiens
tgacacccaggttgatcaggggatgagcgacagaccaagaactagaactcaagtatccaaattccactgccccctccaatttgccaatgtcccttttaaagagctcttggtcaaaaaggtcaaaaaagagcccttggtcatygcttgggaattgaatcctgctctgccctcaactggctgtggggcctagggggctttccatgacactctgcttcattcattccttcaataaacattatcaagctctcactatattccagacactgtttcaggcagagagtgtgcagatgaatgaaaatcctcatcattacagagacttcactccaggggaagggaacaaataaataaataaaagttattagaaaaaaaatgctgagtatatctgttggtgatatatgacactggaaaaaagaaataaagggaggtaaagtgacttccagggtggagaggttgcaaattttaaatagcatggtcagggaaacctcagtgtctgtctctatctgcaaatgggaataataacagcataaaccttacagaatcactatgaggatcaggcaggttaagccacataaaaggccaagcacagtgaacatc

SEQ ID NO: 98396 - DNA, 594 bp, Homo sapiens
tgacacccaggttgatcaggggatgagcgacagaccaagaactagaactcaagtatccaaattccactgccccctccaatttgccaatgtcccttttaaagagctcttggtcaaaaaggtcaaaaaagagcccttggtcatcgcttgggaattgaatcctgctctgccctcaactggctgtggggcctagggggctttccatgacactctgcttcattcattccttcaataaacattatcaagctctcactatattccagacactgtttcaggcagagagtgtgcagatgaatgaaaatcctcatcattacagagacttcactccaggggaagggaacaaataaataaataaaagttattagaaaaaaaatgctgagtatatctgttggtgatatatgacactggaaaaaagaaataaagggaggtaaagtgasttccagggtggagaggttgcaaattttaaatagcatggtcagggaaacctcagtgtctgtctctatctgcaaatgggaataataacagcataaaccttacagaatcactatgaggatcaggcaggttaagccacataaaaggccaagcacagtgaacatc

SEQ ID NO: 98397 - DNA, 589 bp, Homo sapiens
gttaagtaacatgcttagggatgcacagccactaagtgagtagggcaaggttcaagcccaggaagccttactccaaagcctatatctttagtcatgacccatctcaactgtgtcctttttctggacacagtttcccaacctctgtttctctgcctaagtgatgaggaactctttcctcctggtgtcccattcagtctgggccaccctgacaaggaacagattctcctacaggctggcacaaggattaacacatttggtctcttctccacttgaccccactacttgggtatattgcccctctttaaatgagtcttgccgaactgaacatactgactcsggaatcgtgtcccttccttgttatagacctggaaggttagatacaaagacatgaagcaagacttcttgaaagtcacatgcacaggccacaaacagatctcatctgctccatggggtccccccagtggccccacctcaactcctctacccctctagcagcttccacacctcatctgcctcctctttatggatgcattgggaggagaggggggcaggagagatgttttgcgggcccccatgagggcagccatgc

SEQ ID NO: 98398 - DNA, 589 bp, Homo sapiens
gttaagtaacatgcttagggatgcacagccactaagtgagtagggcaaggttcaagcccaggaagccttactccaaagcctatatctttagtcatgacccatctcaactgtgtcctttttctggacacagtttcccaacctctgtttctctgcctaagtgatgaggaactctttcctcctggtgtcccattcagtctgggccaccctgacaaggaacagattctcctacaggctggcacaaggattaacacatttggtctcttctccacttgaccccactacttgggtatattgcccctctttaaatgagtcttgccgaactgaacatactgactcgrgaatcgtgtcccttccttgttatagacctggaaggttagatacaaagacatgaagcaagacttcttgaaagtcacatgcacaggccacaaacagatctcatctgctccatggggtccccccagtggccccacctcaactcctctacccctctagcagcttccacacctcatctgcctcctctttatggatgcattgggaggagaggggggcaggagagatgttttgcgggcccccatgagggcagccatgc

SEQ ID NO: 98399 - DNA, 468 bp, Homo sapiens
ggtgcaaccttgttccccaggacttgagagagtcaggtcaaaccacatgaggrcattctgcttgctgacaaatggcatagacggtggtgtcagtggatgtgagtgacagtcgtcaactgtgccccacagagctccacactgagaggccggttgtcggatgctggggggacagtgcactcttccagggctgtgcttcctgctccatctccctagcagccctttgtatccccggcagttgggagtcggcacgagctctgtttctgtgctggttgcctcagcaggtctgctgttttccaggaggagtgcataggaaaaagaaagagccaaacccttcaaggcacacccagggtcacaattacaagatatactttggatgtgtgggatggggaggagtggaaggacagagcaacatagacagagcctgaaagtcagaattcctttttgacatcatcaaccaccattcattga

SEQ ID NO: 98400 - DNA, 581 bp, Homo sapiens
cttgcagttgcccagcccctcctaggacaaccacagggacaggaaaatcactatttccagaggcttcaaaattccatctctggacatttctgacttcctgggtgctggagcaatagaaatagaacttcagcactctcagatggagatcctgtgaatgccagtgaggccactgtaatagacacagtgggaatgccaaatgggccagccactttggaaaayagtttggcagtttcttataaagttaaatatatacttaccatatggtccagcagtcccattcctaggtatttacccagtgacaacatatttccatattaaaacctgtatacaaatacctttataatcattaaaaattggaaacaatccaaatgtccatcagctggggaattcacaaacagtggtatgtctatactgtggaataatactagtacagcaagaaaaagaacatgctactgacatatgcattagtgtagataaatctcacatgccttatcaaagcaaaagaaaccagactcaggtcaaaaggctatataggttttgatttaatttatatgacattctggaagaaatgacaaatgtgt

SEQ ID NO: 98401 - DNA, 508 bp, Homo sapiens
ggtccaaaataatcacaagtatccttaaaagtagaagagagaggcagaagaggaaattcagagaggaagatgtgcctatggaaaaatggtcagggagaggcaatgtcataggcyttgaacacgaagaagaggcaaaagccaagacacatgaacacaagctagaaaagacaagaaaatggattctcccctggggctcccaaaaagaaatacagccctgttcgcaccttgattttggcccaaggagacctgcattggacttctaacttccagaggttagtgacttgttttaagctactaacattgcagtgatttgttatagcagcaatgagaaatgaataaaggtcctggtcttctcaaagcaagctttgttttgctcagtttcaggcatttgtgattccaagtaagatttcacttacatgtggagttccagggctggaaatctgaaagtcaatgaaccaggtccatgcagtccctgccttcttaagagctgacagtccggtggggaaag

SEQ ID NO: 98402 - DNA, 508 bp, Homo sapiens
ggtccaaaataatcacaagtatccttaaaagtagaagagagaggcagaagaggaaattcagagaggaagatgtgcctatggaaaaatggtcagggagaggcaatgtcataggccttgaacacgaagaagaggcaaaagccaagacacatgaacacaagctagaaaagacaagaaaatggattctcccctggggctcccaaaaagaaatacagccctgttcgcaccttgattttggcccaaggagacctgcattggacttctaacttccagaggttagtgacttgttttaagctactaacattgcagtgatttgttatagcrgcaatgagaaatgaataaaggtcctggtcttctcaaagcaagctttgttttgctcagtttcaggcatttgtgattccaagtaagatttcacttacatgtggagttccagggctggaaatctgaaagtcaatgaaccaggtccatgcagtccctgccttcttaagagctgacagtccggtggggaaag

SEQ ID NO: 98403 - DNA, 508 bp, Homo sapiens
ggtccaaaataatcacaagtatccttaaaagtagaagagagaggcagaagaggaaattcagagaggaagatgtgcctatggaaaaatggtcagggagaggcaatgtcataggccttgaacacgaagaagaggcaaaagccaagacacatgaacacaagctagaaaagacaagaaaatggattctcccctggggctcccaaaaagaaatacagccctgttcgcaccttgattttggcccaaggagacctgcattggacttctaacttccagaggttagtgacttgttttaagctactaacattgcagtgatttgttatagcagcaatgagaaatgaataaaggtcctggtcttctcaaagcaagctttgttttgctcagtttcaggcatttgtgattccaagtaagatttcacttacatgtggagttccagggctggaaatctgaaagtcaatgaaccaggtccatgcagtccctgycttcttaagagctgacagtccggtggggaaag

SEQ ID NO: 98404 - DNA, 510 bp, Homo sapiens
tccctgtgactcttccgcagtcagggagctgctatctcaaaaatcacaatgccaatctgtgaayagggagttattttgacgaggaagtcatcatggctactgtctctggaatcatgcagagctgctctgaaatgaccagcaggatgggtgctccaatccctgcctcagcagtcctgaagcttgtggctagatacttggacctctgttaatgttgccacagaaaagccagcaattccacaggatgccagcaggaaacagcacaagcagtagaaacgtcacctccacctttgcctcacgttagacttcaaaaaccttgaatgaatctagttggcagcatataaattacatctaaaactctagctacaatggaatctggaaaatgtagttcttagttttctaggttcttccattcagaaaagcatactagagagaagatgggatggagactgagtgtcaacccaccataatgattaaactccattccttggactaaccatattcttttatcca

SEQ ID NO: 98405 - DNA, 571 bp, Homo sapiens
aatgaatctagttggcagcatataaattacatctaaaactctagctacaatggaatctggaaaatgtagttcttagttttctaggttcttccattcagaaaagcatactagagagaagatgggatggagactgagtgtcaacccaccataatgattaaactccattccttggactaaccatattcttttatccatgcttaaactgacaaacaacattgataacaacaaaaacattttcccttttaatataatacaatamtctcttatagagaaaaaacaaactcactatcttccccaaaacagatgagacacctgaagtcccatcagtaattacaactatcacttggtgatgagccttccctctctagtttctatataattccaactgatattttgtagctcatggattacattataaagttatccaccaaaacacattctatgaaaatggtggggaaatggaaaaaaaaaaaaacaaacagaaaagtaattttgttttgttttttaaaaataacgcaggttaagagtataggtggctgttacattcctcatttctctaactggtcacgag

SEQ ID NO: 98406 - DNA, 529 bp, Homo sapiens
ttaggtcaacatggcgaatattattattcagattcctgaataataccattatttttatagatctttactgatgtttctgtctagttgctctatcgcttgctgagagagaggtgttaaaaacctattgtgattatggaattttctatttctccttttaatcctgtcaattttcgtttcatgtattttgaggctctgttgatagatctatactcatttacggttattaagtctcattgataaattgatccttttgtcactataaartttccctcttcattttttggtactattctatcttgaattctattttatcagatatttatatacctaatctagctctcttatggtttgcataatatatctttttgcattcatttaatttgaacttattcctatctttatatttaaagtgtgttgggttatgttttttattgtttatttttaaatgcatttctctaacctctgtgtttccatttggatgttgagaccgttaataattaatataattattgatatgcttaaacttagg

SEQ ID NO: 98407 - DNA, 529 bp, Homo sapiens
ttaggtcaacatggcgaatattattattcagattcctgaataataccattatttttatagatctttactgatgtttctgtctagttgctctatcgcttgctgagagagaggtgttaaaaacctattgtgattatggaattttctatttctccttttaatcctgtcaattttcgtttcatgtattttgaggctctgttgatagatctatactcatttacggttattaagtctcattgataaattgatccttttgtcactataaaatttccstcttcattttttggtactattctatcttgaattctattttatcagatatttatatacctaatctagctctcttatggtttgcataatatatctttttgcattcatttaatttgaacttattcctatctttatatttaaagtgtgttgggttatgttttttattgtttatttttaaatgcatttctctaacctctgtgtttccatttggatgttgagaccgttaataattaatataattattgatatgcttaaacttagg

SEQ ID NO: 98408 - DNA, 635 bp, Homo sapiens
ttttgaggctctgttgatagatctatactcatttacggttattaagtctcattgataaattgatccttttgtcactataaaatttccctcttcattttttggtactattctatcttgaattctattttatcagatatttatatacctaatctagctctcttatggtttgcataatatatctttttgcattcatttaatttgaacttattcctatctttatatttaaagtgtgttgggttatgttttttattgtttatttttaaatgcatttctctaacctctgtgtttccatttggatgttgagaccgttaataattaatataattattgatatgcttaaacttaggtctgccattttgttatttgttttatgtttgtgtcacttattttttgtttctcttttcctgtttttctgctttcttctggattgctcaagcatttttaaattcattttatgtatttattagkttttaatctatacctctttgtttttttaaattttatttttgtcattgttctaagcattacaacatatccttaacttttctcagtctatttaagattgctattgtaccactttacataaaatataggcaccttgtgaccatatagattaatttataacctcacctgca

SEQ ID NO: 98409 - DNA, 635 bp, Homo sapiens
ttttgaggctctgttgatagatctatactcatttacggttattaagtctcattgataaattgatccttttgtcactataaaatttccctcttcattttttggtactattctatcttgaattctattttatcagatatttatatacctaatctagctctcttatggtttgcataatatatctttttgcattcatttaatttgaacttattcctatctttatatttaaagtgtgttgggttatgttttttattgtttatttttaaatgcatttctctaacctctgtgtttccatttggatgttgagaccgttaataattaatataattattgatatgcttaaacttaggtctgccattttgttatttgttttatgtttgtgtcacttattttttgtttctcttttcctgtttttctgctttcttctggattgctcaagcatttttaaattcattttatgtatttattagtttttaatctrtacctctttgtttttttaaattttatttttgtcattgttctaagcattacaacatatccttaacttttctcagtctatttaagattgctattgtaccactttacataaaatataggcaccttgtgaccatatagattaatttataacctcacctgca

SEQ ID NO: 98410 - DNA, 573 bp, Homo sapiens
aacaatttgatgctgccccttcccactgccctctcttttctttcatcctttctcccttgacagaaaccagaatgcctaatattttctatgtgagaacaacttgctgcatatccagaaaacaagtgtttatgccagttactatgctatcctgaggagttctacctacctctgtaaacaacattaggacattgaaggtcaccttagatctgtgagtttatatctgagcagatagtggccttaggactcctaggtagatgttgtttctgggttttcccttaaagaatgagactcctgggggggtctggaattccacatttaagactcagactagaatgcttaggtgatatcttcataacttattgagttacttgcagatgttcattctattcattctaaaataatttcctcttatctactccatctagttacaattcagtctcttccttccattcatttrtcttcaaaatgtagaccaggaatcgtcctctgcttccatgtcttcccattaacttcttctgtcctttgtgaatacacctcttctcttaatctcaactgtcttctgttaggtgatcc

SEQ ID NO: 98411 - DNA, 631 bp, Homo sapiens
aagggataactttcctgcccttacctttttcttcccactccacatccagtcaagcaaacatgaagcagccctgtaaataggtactagccaagaaaaaagaacagatggtgactgcacttgcacttttttattttgccatggacagtccgcacaaacagatccaagctgacctattagaaaacctttcaccttaaatgaagatagatactttatttcattcaactaggcatatcattactgagactattttttcatgtgaccagaagtgacttgacgtatttttatggcctaaaaatgatcagataaattatagtttctgctcaagttttcattgtccacctcagcaaagcatggtggtagcaagactcctcattagggtaattcctttgtttcggcactatcrttattagtcattcattatgaagctgatacggtgatgaaagagctcaaaaagctttttgggataccacttgatgcaggccattttttttctcagtcctggaaaaagtcaacaagacaactccatagccaaattggacacatgatgcccgatttggtctacttattttccaaaagaattgtgaacttcttcattaaaaaaaaaaatctgtgtgcaggaaattactttaac

SEQ ID NO: 98412 - DNA, 514 bp, Homo sapiens
gaattatctcctggcaaagaaacttctggcaaggatatgaagctggtaatgacgagggaagaactgcttctatgccagccccacttctcactctatctgttagataagtgaatgggtattcagagccacagtgatggctatgctactctatgaaagctctctcccccatcctgacctggtcacctataccaagccatgccaagaatctagaactcccaaaattttctatgttttctttaggctactgatrtcatggagattctacaattgttcacccgaaattctgagtagtgttaatgaaaaaattattcaatgacacgtgttaaagcatggtaagaaagactttacttaggaccattgtgacaggcatagggaccactgcaacagggtcttgcagtggggtataaggcaaataccctattccaaactccaaaaacagcagcgatgagtgaaaatttacagccaaaaagcagagtgcaggtcaatacatgagaaactagtaaaaaggaaatat

SEQ ID NO: 98413 - DNA, 584 bp, Homo sapiens
cacatgtttggcattttacagatcctcttggcagaacctcttgggaagcacaaagaaataagtccagagtagcccattagttttatgtcttaaatatctcttcaaacagttcacttccttccaatgcctccatactattgtaccctcaactctagcctggtctatagaactatcctcttctctgaattctgtgtttctggctggcctatctcttatctactttcagcaaccagggtaaacttaattatatttttttaaattttaaaataattttaggctcacaagaagttgtcaaatcatggcagagatttccstgtacctttcacatagctttccccatgataatattctacataaccacatgcataacattcaggaaatggatattagtccaatcctatcaactaaactcagagtgatcctataaaaatgcaaacctggctgggagtggtggttcatgcaaacctggctgggagtgatggttcatgcctatggttccagaactttgggagcctgaggtgagaggatcacctgagcccaggagtttgagataagtgtgggcaacatagtgagatcccatctct

SEQ ID NO: 98414 - DNA, 624 bp, Homo sapiens
gtacatgaaatccattgtttacttttcataaaggagattgttctttccacgacatgaaagggtaggaagttgacaaaaactaaaggaaaatgcttcaggagctcacctctgggaatttagggatgaattctcctagagacagatcagcttcatggtgactcatctttggagtctactaaaagagttaygttgcttcaaagatgaggctcattttcataaggagccaaattcttagtaaatcgaaagagcgggatcctgcttctaccttcaatagagatcttaagccactagctgagtggcttaagagccagtatggctgaatatagtgcagagtgatgaaattgagcttgacgtgatcctacaatatgtcttgaaagccctgagcagacaccaaaggttaatggaatttttatgaagagggggatgtacatgcagctccatgagagacagaatatacagggataaatgacaccaacaaaaacacagtgaatttaaggcacaaccccagtgactaaaatcaaacaaacagaaaatcttttctgaaggacaacaacaatatcatggtaaattttggggaaaacaatgaataccagcaacaggctaatataataattcctactttct

SEQ ID NO: 98415 - DNA, 373 bp, Homo sapiens
aaccaactcaccagttagacaacgggccctctcctgtgtttaaaacagtcyggtgcccacctgggtccacatgcagctggcaggtgtttgctagtgtgcccacccatgtctgttccccccacgtgagttatgtgcttacaacgagtcatttctttgcattttccaactttcttacatttatatttaattaaagatgatctaaactgagaaatgaatgtgaaaagaaacaaagctcttttttgtttggtttttaactaaattaaatgtttttaacaagttgaaacatgaatcatttaaaaaattgctatcaaatccacagagggcaatccactcatatagttgactataaagcttgaggaggaattcataaaaa

SEQ ID NO: 98416 - DNA, 373 bp, Homo sapiens
aaccaactcaccagttagacaacgggccctctcctgtgtttaaaacagtccggtgcccacctgggtccacatgcagctggcaggtgtttgctagtgtgcccacccatgtctgttccccccacgtgagttatgtgcttacaacgagtcatttctttgcattttccaactttcttacatttatatttaattaaagatgatctaaactgagaaatgaatgtgaaaagraacaaagctcttttttgtttggtttttaactaaattaaatgtttttaacaagttgaaacatgaatcatttaaaaaattgctatcaaatccacagagggcaatccactcatatagttgactataaagcttgaggaggaattcataaaaa

SEQ ID NO: 98417 - DNA, 373 bp, Homo sapiens
aaccaactcaccagttagacaacgggccctctcctgtgtttaaaacagtccggtgcccacctgggtccacatgcagctggcaggtgtttgctagtgtgcccacccatgtctgttccccccacgtgagttatgtgcttacaacgagtcatttctttgcattttccaactttcttacatttatatttaattaaagatgatctaaactgagaaatgaatgtgaaaagaaacaaagctcttttttgtttggtttttaactaaattaaatgtttttaacaagttgaaacrtgaatcatttaaaaaattgctatcaaatccacagagggcaatccactcatatagttgactataaagcttgaggaggaattcataaaaa

SEQ ID NO: 98418 - DNA, 644 bp, Homo sapiens
ctctgtggcacggtgtttatatgcaaagatgacagagcccggctgcctaggttcaaatccctgttctgccacttaatggttataaccttaagcagcttacttaaattctctattcctcagtttcctgatctgtgtaataggcttaatgatcaggattataccagattaatccatgtaaatwtactcaggaaatatccagtagtattacatgccaagcctattgtaagaactttatcaatatgatctccttaatccttgcagcaacgctctgacagatggtgttatcctgattttgcaagtgaagaaacggaagctcaatgagactaaacttgcctaaggttacgtagttgtcaaggggcaaaatcaggatttgaaatgaggtctgtcttttctctttctgttaaagggcttctttgatgccaacccagaccctcccaacctctgcctcctcctggactggcctggtgctgacccaccatccatctgcatgtctcccactgcctgccattgcagcaggaccacgtggcccacccttctgagatgttccagtccttcgcattctgtctgagccccaggtacagaacaaccagtctaaataatgagcagtgattagcttaagatagtgagctgagctcataagatcc

SEQ ID NO: 98419 - DNA, 644 bp, Homo sapiens
ctctgtggcacggtgtttatatgcaaagatgacagagcccggctgcctaggttcaaatccctgttctgccacttaatggttataaccttaagcagcttacttaaattctctattcctcagtttcctgatctgtgtaataggcttaatgatcaggattataccagattaatccatgtaaatttactcaggaaatatccagtagtattacatgccaagcctattgtaagaactttatcaatatgatctccttaatccttgcagcaacgctctgacagatggtgttatcctgattttgcaagtgaagaaacggaagctcaatgagactaaacttgcctaagrttacgtagttgtcaaggggcaaaatcaggatttgaaatgaggtctgtcttttctctttctgttaaagggcttctttgatgccaacccagaccctcccaacctctgcctcctcctggactggcctggtgctgacccaccatccatctgcatgtctcccactgcctgccattgcagcaggaccacgtggcccacccttctgagatgttccagtccttcgcattctgtctgagccccaggtacagaacaaccagtctaaataatgagcagtgattagcttaagatagtgagctgagctcataagatcc

SEQ ID NO: 98420 - DNA, 604 bp, Homo sapiens
attaaaaagacagtttgttacagctgccaaaaggagggggcacgccacaccacacagggaagcaccagggttggtcaggacacaagaatcctaattgtggtttccataggaagaaatgggtgaggcagagtatgaaggtttagaactggctagttagaaaaattacattgggttctggagaatagaggttttccccacgtgcctggtacctgggccctgggataattgtgcaagtggaaagaggtcctgagtgtgagtctgataaatgaggtggttagggtatgggctctgagtttgctaatctgcatatgaaaggtacactcaaaggcaagtcatttactatctctaggaaytggctagccctagaaggtacaggcacgggagcgccagtaaagtcccagttgtcaaagcatcaaaaatacagaaataaaaaggcatgattaataccttggatacagcttggatacagattcttcccaatagccgccaaaaaggaatgcagccctaccaacaccttgattttggctttgtgagattctgagcaaagaatccatgccacgccatgccatgccagacttctgttctacagatctgtgagaaaaca

SEQ ID NO: 98421 - DNA, 604 bp, Homo sapiens
attaaaaagacagtttgttacagctgccaaaaggagggggcacgccacaccacacagggaagcaccagggttggtcaggacacaagaatcctaattgtggtttccataggaagaaatgggtgaggcagagtatgaaggtttagaactggctagttagaaaaattacattgggttctggagaatagaggttttccccacgtgcctggtacctgggccctgggataattgtgcaagtggaaagaggtcctgagtgtgagtctgataaatgaggtggttagggtatgggctctgagtttgctaatctgcatatgaaaggtacactcaaaggcaagtcatttactatctctaggaattggctagccctagaaggtacaggcacgggagcgccagtaaagtcccagttrtcaaagcatcaaaaatacagaaataaaaaggcatgattaataccttggatacagcttggatacagattcttcccaatagccgccaaaaaggaatgcagccctaccaacaccttgattttggctttgtgagattctgagcaaagaatccatgccacgccatgccatgccagacttctgttctacagatctgtgagaaaaca

SEQ ID NO: 98422 - DNA, 600 bp, Homo sapiens
gacacaagaatcctaattgtggtttccataggaagaaatgggtgaggcagagtatgaaggtttagaactggctagttagaaaaattacattgggttctggagaatagaggttttccccacgtgcctggtacctgggccctgggataattgtgcaagtggaaagaggtcctgagtgtgagtctgataaatgaggtggttagggtatgggctctgagtttgctaatctgcatatgaaaggtacactcaaaggcaagtcatttactatctctaggaattggctagccctagaaggtacaggcacgggagcgccagtaaagtcccagttgtcaaagcatcaaaaatacagaaataaaaaggcatgattaataccttggatacagcttggatacagattcttcccaatagcckccaaaaaggaatgcagccctaccaacaccttgattttggctttgtgagattctgagcaaagaatccatgccacgccatgccatgccagacttctgttctacagatctgtgagaaaacaaatggatattgttttaagctgttaaattggtggcaatttgttatggcagcaagagaaaactaacacatatgcca

SEQ ID NO: 98423 - DNA, 620 bp, Homo sapiens
tttaaaatagttttatctaattctgtgaagaatgtcagtggtagtttaatgggaatagcatttaatctataaactacattgggcagtatggccattttcatgatattgattcttcctatccaatgagtgtggaatgtttctccatttgtttgtgtcctctctgatttctttgagcagtggtttgtagttctctttgaagaggtccttcgcttcccttgttaactgtattcttaggtattttattctttttgtagcaattgtgaatgggacttcataatttttaagggctctaggatttagggaatggtaaatgagcactggcttcaacttaccttaaagtcaccagctgcatcagcctttaacaagtgagtcagcctgttctttgaagctttgaagccaggcattaacttcttctctctaactgtgcaagtcctcatggcatcttcttccaatagaagggtgttttgtctacatggaaaatctgttgtttatatggccacttgcattaattrtcttagctagatcttctggataccttgctgcagcttctctatcaacacttgctgcgtcatcttgcactttatatgttaaggagatggcttctttccttaaacctcatg

SEQ ID NO: 98424 - DNA, 620 bp, Homo sapiens
tttaaaatagttttatctaattctgtgaagaatgtcagtggtagtttaatgggaatagcatttaatctataaactacattgggcagtatggccattttcatgatattgattcttcctatccaatgagtgtggaatgtttctccatttgtttgtgtcctctctgatttctttgagcagtggtttgtagttctctttgaagaggtccttcgcttcccttgttaactgtattcttaggtattttattctttttgtagcaattgtgaatgggacttcataatttttaagggctctaggatttagggaatggtaaatgagcactggcttcaacttaccttaaagtcaccagctgcatcagcctttaacaagtgagtcagcctgttctttgaagctttgaagccaggcattaacttcttctctctaactgtgcaagtcctcatggcatcttcttccaatagaagggtgttttgtctacatggaaaatctgttgtttatatggccacttgcattaattgtcttagctagatcttctggataccttgctgcagcttctctatcaacacttgctgcgtcatsttgcactttatatgttaaggagatggcttctttccttaaacctcatg

SEQ ID NO: 98425 - DNA, 584 bp, Homo sapiens
tgttaagtctgatatgaatgagatgatcaagatattttttgagaaggacaggggaagaagaaaacatgaggatattggactcctgtgagaaataaagatgagcaagttgggctatgtacagaaaggaagaggggtaactcaaaaaatcctgttactaaactcaccccagttatcagtgactgtttactagacttgcaaatgaagccctgattggaagataaagccatattgcttctctgcaaatgtagtcgctttcctgcagcatttgcatctggtcccaaygcggcattcagttgcccgggccgaatatgcaaagctttgaggtaagcagaagagatgagcagcacaggcactggataccttggagccttgtaatcttgcttgcacaacctccagattgcatggttcttggctttggtgcagttgggcacaatttcaatgcacatctatggagaccatgtcacaacaacaaaacaaaccaatgtagctgcgagttacattaacagcttgaaaaaacaagtcaacagacttgaagactgctctgggagcccctccctgggagtcagcctctggcagaagggagt

SEQ ID NO: 98426 - DNA, 584 bp, Homo sapiens
tgttaagtctgatatgaatgagatgatcaagatattttttgagaaggacaggggaagaagaaaacatgaggatattggactcctgtgagaaataaagatgagcaagttgggctatgtacagaaaggaagaggggtaactcaaaaaatcctgttactaaactcaccccagttatcagtgactgtttactagacttgcaaatgaagccctgattggaagataaagccatattgcttctctgcaaatgtagtcgctttcctgcagcatttgcatctggtcccaacgcggcattcagttgcccsggccgaatatgcaaagctttgaggtaagcagaagagatgagcagcacaggcactggataccttggagccttgtaatcttgcttgcacaacctccagattgcatggttcttggctttggtgcagttgggcacaatttcaatgcacatctatggagaccatgtcacaacaacaaaacaaaccaatgtagctgcgagttacattaacagcttgaaaaaacaagtcaacagacttgaagactgctctgggagcccctccctgggagtcagcctctggcagaagggagt

SEQ ID NO: 98427 - DNA, 633 bp, Homo sapiens
gaacttagtatagagttattcctaaaactgaaatggttgctaagttatgatagagaagataataatgagagtttcttctttttctctttcaagggggtcttgcaaatgagatatcatgtgtaaatgaaacaggatattttgatctcaatttttgatcttgctgttttgattttgttattttgactccatcatgtttacattgaggacattttgacccccccatctactcttttctctaccactaataacaatattaagaattataatagctattaagtacttactacacaccagattctgttctaggtgctctgcatgtatttttttcttgtaatacttttgataargcatatactattactggcctgattttatagataagaaaactcagtcacagtcaggtagttaggttaagcaacttggccaaaataattcagtcagtaacatagtcagttcacaggatacaaaagtgattagaagtattcaaaccacccaactggctaaccattaatgacgggtcaatcctggattagttgagagaaatttctcacaatattatcatgaatcaacagttatttctaatcaataatgaatattacagaaatacataatgaataagaaataattataata

SEQ ID NO: 98428 - DNA, 588 bp, Homo sapiens
atagtaaacaaattttacaaattcatagccctcgtggagctattagaaagtataataccattcatacaaattagctatcaatactagcacctgatgatagtactgaggactaggaagcactatgctaaaattgctcttaattagtgtgaagtttcgatttattcgaataatgtttattgaacacctactactatgccaggccctattccagatctaacaatgaacagacaaaaaaccctctacctccacctcaaggggagaatgtcatgcactatagtgagggaacacacaagaagcaaataaacacataacacaatgtcgagtactgttaaggactacraagaagtctaaagcaaggtaagggaatagatagggcagaagaacctatttgatattggtgggaaaggtggccaccctgaggaggtgacatttgaatggacacctgaaccaaagtaaggggaaaagccatgtgaatatcttcttactatttatttcagtattcaagttaaatcaaatatatcttgcagcttattagctcccatttatgtttacttgctttgtgccagtaactttgcctacattatgtct

SEQ ID NO: 98429 - DNA, 588 bp, Homo sapiens
atagtaaacaaattttacaaattcatagccctcgtggagctattagaaagtataataccattcatacaaattagctatcaatactagcacctgatgatagtactgaggactaggaagcactatgctaaaattgctcttaattagtgtgaagtttcgatttattcgaataatgtttattgaacacctactactatgccaggccctattccagatctaacaatgaacagacaaaaaaccctctacctccacctcaaggggagaatgtcatgcactatagtgagggaacacacaagaagcaaataaacacataacacaatgtcgagtactgttaaggactacaaagaagtctaaagcaaggtaagggaatagatagggcagaagaacctatttgatattggtgggaaaggtggccaccctgaggaggtgacatttgaatggacacctgaaccaaagtaaggggaaaagccatgtgaatatcttcttactrtttatttcagtattcaagttaaatcaaatatatcttgcagcttattagctcccatttatgtttacttgctttgtgccagtaactttgcctacattatgtct

SEQ ID NO: 98430 - DNA, 596 bp, Homo sapiens
tagggcctagtatcatctccacagtacaagtgaacatagtgagacacaggatttaagtaacttgctcaaggtctcaaagygagctggggttggtgcttggaatgcaactccaccatttgctctatgtgctgtgctatgctatgctctgcagcagtgaatggtgaatgaagcccacagtaccagtgtgttagcgcgatggcccccaaaacagcaaatttaaatttttttgtggttgtttttattgtcccattcataccccaaatttctgctcttgcttcgtctaacatttaaccaacactttgttatccagaatagctcaacctttaaggttgtttcttgttattgtggaaaatggattggtagtctataaaaaaataaggaattattggctaccactctccaaagaaacatgaatgctttgattggaatgcttgaggttgaaacagttaaggtactcaagacaggaccgtgctcactgcactgtggtacttacctacgcactgctcccctcgcttctgatatccaggagggcactgacatgcaaaggatccccgtaaattgatgcacacttggtctgctctacagttgtgcgtccc

SEQ ID NO: 98431 - DNA, 593 bp, Homo sapiens
gcagaaattgccaaaaagaaagttcagcaaaagcccaaggaacaaaacacaaactccttctgtgagagtaggggatgggctcttaaaggttaaaggggcacagaaacagtggagagagaacagatctgaccaagggacagcacagaagcagagtcaacaaccagccacaacacagcaagactgttgagttcattcctcttaccctgtctacatgrttgcttacagtcaagataaattacagcttgatctaaatgtttccatttttaatcaatctagtgattttcctacatacaaaaacagctctcaagtgagagctgggaatagcaacagttaaagaaaaaaagcctaagaccttcttccaacacatttttccctcttaaacaagaaacccggtcttgtctatggctccccagggaattgtagagaacaggaatctctgacatgtttatgctcagccctggccctcaatctctacctccaaatatatatatatatatatattttctgggcctgcggaagccattaactgcagacaagatgtttgcccttttatcccaaagcctagtcctacccacaaattacagacacaagga

SEQ ID NO: 98432 - DNA, 593 bp, Homo sapiens
gcagaaattgccaaaaagaaagttcagcaaaagcccaaggaacaaaacacaaactccttctgtgagagtaggggatgggctcttaaaggttaaaggggcacagaaacagtggagagagaacagatctgaccaagggacagcacagaagcagagtcaacaaccagccacaacacagcaagactgttgagttcattcctcttaccctgtctacatggttgcttacagtcaagataaattacagcttgatctaaatgtttccatttttaatcartctagtgattttcctacatacaaaaacagctctcaagtgagagctgggaatagcaacagttaaagaaaaaaagcctaagaccttcttccaacacatttttccctcttaaacaagaaacccggtcttgtctatggctccccagggaattgtagagaacaggaatctctgacatgtttatgctcagccctggccctcaatctctacctccaaatatatatatatatatatattttctgggcctgcggaagccattaactgcagacaagatgtttgcccttttatcccaaagcctagtcctacccacaaattacagacacaagga

SEQ ID NO: 98433 - DNA, 599 bp, Homo sapiens
tttgcccttttatcccaaagcctagtcctacccacaaattacagacacaaggaagagggttgatactgaagtttcactgaggcaatttctttgttctgttgtgataaaatttaccattttagacattttaaagtgtacagttcagtggcatggagtacactcagagtgttgagcaaatatcgtcactatctagttcaggggcccccaaccactcccccaacaactgggctgcrgactggtacctgtccatggcctgttaggaaccgggccgcacagcaggaggtgagtggtgggcgagcattaccacctgagctctgccttctggcagatcatcccagcattagattctcatagaagcatgaaccctattgtgcatgcaagggatctaggttgtgtgctccttatgagaatctgatgcctggtaatctgaggtctgaggtggaacagtttcatccccaaaccatcccctcacccctccccaccctcatcccccactatccccacccatggaaaaattgtcttccaccaaacctggtgccaaaaaggctggggaccactgatctagttccataacatttcatcactcaaaaataaacccc

SEQ ID NO: 98434 - DNA, 599 bp, Homo sapiens
tttgcccttttatcccaaagcctagtcctacccacaaattacagacacaaggaagagggttgatactgaagtttcactgaggcaatttctttgttctgttgtgataaaatttaccattttagacattttaaagtgtacagttcagtggcatggagtacactcagagtgttgagcaaatatcgtcactatctagttcaggggcccccaaccactcccccaacaactgggctgcagactggtacctgtccatggcctgttaggaaccgggccgcacagcaggaggtgagtggtgggcgagcattaccacctgagctctgccttctggcagatcatcccagcattagattctcatagaagcatgaaccctattgtgcatgcaagggatctaggttgtgtgctccttatgagaatctratgcctggtaatctgaggtctgaggtggaacagtttcatccccaaaccatcccctcacccctccccaccctcatcccccactatccccacccatggaaaaattgtcttccaccaaacctggtgccaaaaaggctggggaccactgatctagttccataacatttcatcactcaaaaataaacccc

SEQ ID NO: 98435 - DNA, 588 bp, Homo sapiens
ctgattgttcagtagaccattgaagggcctatttaactccaaattggttatttcatgaagtgtggggggtgaaattacaccatcttgttaatttgtaattgatgcttatctttgtaatacctacgaataaatatattgctcaataatattagaaacaaactgttcaccctacttagagtcaaacttgtttagaatcactgtttcacacagcagaagctgctctgtggcaaaataatgaattatctattataaataattttaaactaattattatgatccagaaaatagtccttacgtagcacactctctttttatgcctcttactagcatactttatgtacagtacttgaaagttaatgcaattctttctttaaaaactcactcccttttccataaatcagactgacataggcccttaccacyaatgctccccacctcagtcccattaagatgatttaacacatttaaccatatgtgtaaatgtatttttttcctcctcatcctacacctgtctggagatagggttttcattatgtcactcttcgctcaaaatctgtcactaattgtgacagtaataaatctaaatgg

SEQ ID NO: 98436 - DNA, 511 bp, Homo sapiens
agaattacaggccatctctgatattttagaatctttgaaatctataattactctctctcatatttctcacactggccttctcaagcgttttgtgttttcctcaacactttttcaatgtgatacttactgcagatgacttcaactgtgagagcaacatgaatgctacatcttgaaccacaaaaaagacaaaccgaaacaaaacaaaaagcaagaacactttgtctaacataagccctgaaatagtgaagmcttgtttgagtcctttctgtaaagttcctatttggaagcaattttaccttgacttctgccatctacagataggtggcaatccttgctgatatgctaaccatgtgagaaaatggcgctcttgccataaataggcatactgttatcttggtaactttgcatctctccccttaatatctgctgtttgctttgtttatggagccaattcttttagactagactagacttcattacaagacattagacgtaaaaatacttttctatt

SEQ ID NO: 98437 - DNA, 511 bp, Homo sapiens
agaattacaggccatctctgatattttagaatctttgaaatctataattactctctctcatatttctcacactggccttctcaagcgttttgtgttttcctcaacactttttcaatgtgatacttactgcagatgacttcaactgtgagagcaacatgaatgctacatcttgaaccacaaaaaagacaaaccgaaacaaaacaaaaagcaagaacactttgtctaacataagccctgaaatagtgaagacttgtttgagtcctttctgtaaagttcctatttggaagcaattttacctygacttctgccatctacagataggtggcaatccttgctgatatgctaaccatgtgagaaaatggcgctcttgccataaataggcatactgttatcttggtaactttgcatctctccccttaatatctgctgtttgctttgtttatggagccaattcttttagactagactagacttcattacaagacattagacgtaaaaatacttttctatt

SEQ ID NO: 98438 - DNA, 615 bp, Homo sapiens
gagaatttgagtttgtgacaaacttgatcagcagtacaagggcgttggtgggaagcaaggcctggaaataaggatggatgcatgaaatctagggcagtctgtagccatatgtcctgaacctgtgagctcacaacttctccaggctcacaatcctttatccacaattcagaaacccaaaaagctctaaaaacccaggcttaaaaaaaatttttgttgtcaaaatctgacctaaatggttgtgagaccacttaaagtctttattctacttagttttaaaattcacacattttgtggtataaataacaatgtgattgattttacattgttgctcctggccttastggagggtattgtgtaatatatggtatatgtatctcttaacctttctggaataaaaaagttgtaaattctgaaacatatctgctctcaagggtttttcctaagaaattgtagacttgtaataaatatcttacctgaaggcccaggcacaaatagttcccttcttgcctctttatggtttctgatttgactttctaacattatttttaatgattctgatgcatatgcatttttagtatgagctctcaatttttttggcaatagaggtcccctaaa

SEQ ID NO: 98439 - DNA, 469 bp, Homo sapiens
tatgattatcaatctttaacatttttgaggtccgttttatgggccagcttatggwcagcttttgtaagtgttctgtatgtaataaaaaagtatgtgtggccaggcgcagtggctcacacctgtaatcactttaggaggccgaggcgggtggatcacctgaggtcaggagttcaagaccagcctgaccaacatggcgaaaccctgtctctactaaaaacacaaaaattagctgggcggggtggcacgcacctgtaatcccagctactcaggaggctgagtcaggagaatggcttgaacccaggggcagaggttgcagtgagccgagattgcaccacttcactccagcctgggtgaaagagcaaaacttcatctcaaaaacaaacagacaaaaaagtatatgtattctgagctgagcacagtggtgtgtacccgtaatcccagctacttgggaggcggaggtgggagagtc

SEQ ID NO: 98440 - DNA, 469 bp, Homo sapiens
tatgattatcaatctttaacatttttgaggtccgttttatgggccagcttatggacagcttttgtaagtgttctgtatgtaataaaaaagtatgtgtggccaggcgcagtggctcacacctgtaatcactttaggaggccgaggcgggtggatcacctgaggtcaggagttcaagaccagcctgaccaacatggcgaaaccctgtctctactaaaaacacaaaaattagctgggcggggtggcacgcacctgtaatcccagctactcaggaggctgagtcaggagaatggcttgaacccagrggcagaggttgcagtgagccgagattgcaccacttcactccagcctgggtgaaagagcaaaacttcatctcaaaaacaaacagacaaaaaagtatatgtattctgagctgagcacagtggtgtgtacccgtaatcccagctacttgggaggcggaggtgggagagtc

SEQ ID NO: 98441 - DNA, 499 bp, Homo sapiens
agtggccaacatagagctctactacctaagactttcactttttccttgacatgtataactaaggctatgtggcctgtttgaccagaactctaatggaagctggctctatttttttttaaatcagacactgttgtctataagtctagaaaacaagatatacaaataggaaacaatatgtaaaattgcaattgaacacaggtcgggatgctcactgcttgcagagtctaacaagagcgaagtctggtagaaagaaaatgatttgattaaccaaaactggtaaagggaaagtggccagatttctatccaaaggaatcgtttcaatttttgaagggaaagcagaggtttaaaacgggaaaacttgayaaggaaggcatgtgagaattgtgctgagtacaatgtgggtcttgttctggtggctctcttgggtcctaatccacctggaatgcgggctgatgtcatctcaacaatggccaggttgttaactagctgccttgaattc

SEQ ID NO: 98442 - DNA, 588 bp, Homo sapiens
gcaggacaaacaacgcccttgcctttgtggagtttacctctggtagggggtatctagacagttaaagggagtcaaatgataggcaacataatttcagatacgtgttataaaggaagcaaaagagagaattgtaggcttcaggccaggaactattttggataggatgggcaggaaaggcctctcggaaggaagtgacattacacagagacataggagatttatgacttggagcatgtccctcaaatataatattgggactctttgctcagggaggtgaatytcctaagagttcttcaaacaaaaacataaacaaatattgcagagtcatctctaccaaggttaggaatattgggaaaattcaacagatgtttgaaatgctcctagagacatacatttttcaatagcagttgtgatcatctttttgatgatgttctcaactttgaacttgccaaatacaattatttttagggaataatgccttacattatgaacatttgttcacatctacaaattagcttgaattttgtcttggatactttctatgtgaataagtactaaaaaaaaaataagacagacacaatgttggtt

SEQ ID NO: 98443 - DNA, 588 bp, Homo sapiens
ccggtttaagccttcccacaggacaaaacttctctttatatgtcaccaagagagcagggatagctcttggagttcttacttagatttgtggaayaatcccccaaccagtggcatacctaagtaaggaaatggatgtagtagcaaaaggctggcctcactgtttatgggtagctgtagcagtggctgtcttagtgtcagaggctatcaaaataatacaaggaaaggatctcactgtctggactactcatgatgtaaatggcatactaggtgccaaaggaagtttatggctatcagacaaccacttgcttagataccaggtgctactccttgaggcactggtgcttcaaatatgtacatgcgtggccctcaaccctgccgcttttctcccagaggatggggatccaatcaagcatgactgccaacaaattatcgtccagacttatgccgcacaagataatctcttagaagtccccttaggtaatcctgaccttagcctatatactgatggaagttcatttgtgaagaatgggatacaaagggcaggttatgccatagttagtgatgtaactatacttaaaagtaagtgtt

SEQ ID NO: 98444 - DNA, 588 bp, Homo sapiens
ccggtttaagccttcccacaggacaaaacttctctttatatgtcaccaagagagcagggatagctcttggagttcttacttagatttgtggaacaatcccccaaccagtggcatacctaagtaaggaaatggatgtagtagcaaaaggctggcctcactgtttatgggtagctgtagcagtggctgtcttagtgtcagaggctatcaaaataatacaaggaaaggatctcactgtctggactactcatgatgtaaatggcatactaggtgccaaaggaagtttatggctatcagacaaccacttgcttagataccaggtgctactccttgaggcactggtgcttcaaatatgtacatgcrtggccctcaaccctgccgcttttctcccagaggatggggatccaatcaagcatgactgccaacaaattatcgtccagacttatgccgcacaagataatctcttagaagtccccttaggtaatcctgaccttagcctatatactgatggaagttcatttgtgaagaatgggatacaaagggcaggttatgccatagttagtgatgtaactatacttaaaagtaagtgtt

SEQ ID NO: 98445 - DNA, 588 bp, Homo sapiens
ccggtttaagccttcccacaggacaaaacttctctttatatgtcaccaagagagcagggatagctcttggagttcttacttagatttgtggaacaatcccccaaccagtggcatacctaagtaaggaaatggatgtagtagcaaaaggctggcctcactgtttatgggtagctgtagcagtggctgtcttagtgtcagaggctatcaaaataatacaaggaaaggatctcactgtctggactactcatgatgtaaatggcatactaggtgccaaaggaagtttatggctatcagacaaccacttgcttagataccaggtgctactccttgaggcactggtgcttcaaatatgtacatgcgtggccctcaaccctgccgcttttctcccagaggatggggatccaatcaagcatgactgccaacaaattatcgtccagacttatgccrcacaagataatctcttagaagtccccttaggtaatcctgaccttagcctatatactgatggaagttcatttgtgaagaatgggatacaaagggcaggttatgccatagttagtgatgtaactatacttaaaagtaagtgtt

SEQ ID NO: 98446 - DNA, 554 bp, Homo sapiens
taccccctctgaaagtatccttttgtagccatgaacagtggacagaaaatttaagaagcatacactgtgtttacagccttcattgtacactccaatacagaacagtcaactaattcaggtgcggctccaaggggctggtaatatatttaagaaacccttatattatgtaaagatgtattgtttggggagaaatatcaatgagagccctttctatctcactgtaaactcttcaaggattcaccttaactgtacgtgtttgttggagggtagcattttctctttccctccacttctttttcctctacctatttcagaaaacacaaaaataatttccattaacttccaataacttcctccatagtgtgcaggagctttcctccagtgtctttcttagatatcatgctgtggaactatttctaggtaagatgcaattctaataaactcctccagtatttaggaatggactaaatactgacttctttgggtggagccagttatgctgaatttcwcacttcagcaaattgagttcatgagagaggcccctgtgacatgct

SEQ ID NO: 98447 - DNA, 561 bp, Homo sapiens
tgtatacatgtttctgttcttagctggatactttaaacccttacacgacagattttctcaagtgaaaaaaatatcttggcacactttgtcacttacccaagtatctagtttgccatacttgattattaattctcacataatctgaagagccaagtatttcttcaatctcaagtctggtatccaaataacraggtgatagtatcttcttacgttgctcttttttgatctaaagtatttggagagtttcagactagaagaatccaacactgactacactgcattctttctgtctcacctcaggtcaaagcagcacatctttcctttattttctctgcatttctctcttttacatagacacttcttacagactttgaaaattgaagtttggtctttttatattcttaaaatgctaaatgctctgtagagaacttcatataaaaaacaagtcacatttctctagaaacgtggataatcattttctattcagacggctgtctcaaaagaccttgctattacataccttgtaagttgaagaaataacatttctctgaaaataaatga

SEQ ID NO: 98448 - DNA, 485 bp, Homo sapiens
aattacaaatgtttcccttcagaaacttacagtctttttaaaggtcaccagcctcaattaacttctggaagcctmagcagacactgcttctccagtagctgttcccaatgtccttctcactcttcatctttcgctatagagtattcatcttttctgcttcccatgtagacaaaagcgaccatgtgacattgttctgaccaatgagatatagtagaaatctattatagaatttccatatcctgataaaaggcatacaagtggctgtcatttccccttcctactttcttactgtcacgaaaagttgagacattgggctctcaggcaaccatctcgaaatcataaagtgataaacaggaaggaaaagccaagagaatcacaaagatgcagactgatctaacactgaactgacactgttaactattacttccagacttcctgttatttgcttaaatcctgtaagccaggtgaggcttgaggggctgtgt

SEQ ID NO: 98449 - DNA, 485 bp, Homo sapiens
aattacaaatgtttcccttcagaaacttacagtctttttaaaggtcaccagcctcaattaacttctggaagcctcagcagacactgcttcyccagtagctgttcccaatgtccttctcactcttcatctttcgctatagagtattcatcttttctgcttcccatgtagacaaaagcgaccatgtgacattgttctgaccaatgagatatagtagaaatctattatagaatttccatatcctgataaaaggcatacaagtggctgtcatttccccttcctactttcttactgtcacgaaaagttgagacattgggctctcaggcaaccatctcgaaatcataaagtgataaacaggaaggaaaagccaagagaatcacaaagatgcagactgatctaacactgaactgacactgttaactattacttccagacttcctgttatttgcttaaatcctgtaagccaggtgaggcttgaggggctgtgt

SEQ ID NO: 98450 - DNA, 394 bp, Homo sapiens
tccatggaaagtccaggtaccctatgtactctacctcacacccaaagtcagagaaaatgcatttctttattcttacaggaagcaactgaaacttcagtaaaagatgaaaacctgctatgataattgcgttttgaaatgggtttggcagaaatgggttctgccaaagggcttaaatatatgtggatatacggtgtaacgtgccatataaacctaaaagttctatttctcgtaacgactggaattaaagtgccaacagaatgcaaaactgtggamaaaagtaagtcaactttaaaactcacattgttagcaaaattttgcacatgcaactcaaaataccttggagctggtagttctgcttggaattctcactcccggccctttgactgactgactt

SEQ ID NO: 98451 - DNA, 623 bp, Homo sapiens
accatagcactccagcctgggtggcagagtaagaccctgtcaaaaaaaaaaaaaaaaaaaaaatagacatatgctgctaagtgaattttaaaaagcaatgctaaaataatatcttttcttaaatctacctggttttctaagaactttctacttaattacctttttggggagatcatacgcagatttgctggctctgccaaaactctagaagataatctacagtattctaagccattactggctactgttacttgacytagagttattttattatttattctattatagcaatattagatcaaggacaatgtaaaagaaaagtccaagggaataaagtgggaacaagcagtcagactatgaggaagggcatgctacacagatggtactaaaatgtgcggcccacaaccagcgaaataaagatagggagagggaagagagtattgcaaaatatattttcccagaaatttccattttcccattggaaggagaccataacgcacaacaatataaaatatctaattcctttttgacatctcccagagaacatttgagctttttgtaaaatttaattggagcaacaaaaacaacaaaaatactcaaccagaaagataacacgcttgtgc

SEQ ID NO: 98452 - DNA, 587 bp, Homo sapiens
gaatgggtgttgaaatatatgaaaaaaaactttctaaattctactcattcaaagttttatataaaaatattttccacagtttatgttgataatcaggtgtatgttactatcagctaaacgaaaaatttcaatattgcaaaatatatattcttggctttcttctaaaatttgtcatctgtgccacctattcatttacaaatgttaaattgtttaagtcarctaaatccttgtactatttactgagaatatttaagctagaaacacggtctctgaccttgagaagagtatgaaaataaaattaaatgatacatatgcagcaaaagtgcacaattaagaagtagactatttgatgcatatctggatacattagcagtagatacacttacaggatgcaataattgtcaatgtttccaggaagcaagtccaattcatggtggtcattaaaggatgaactgttaatttgacaagtcgaaatgtgggatacacttttaagacacttatggattcagtaaaaatgtatgtgttgtgtattaaagccacatcacatccaggcatgaaagatgctgtttggcccaacacacccatca

SEQ ID NO: 98453 - DNA, 617 bp, Homo sapiens
aaattatatttttaaaggaagctttataactttaatggcttcaaaggtcaagttatttcttttcttcaatttaaggacatgttcttgagtcaatcaatattaattcaacataagaccttagtccccaatttcacctcttatgttagctaacataattaaacctgtgttgctgagcaaaatgtcaaatacctttttcttargacaaagtactctatctgggttttctttttcaattttcattaatttaaacaagcaaatttatttttattgtattgagcatcaaataaaagcaattactcagcatgcttctggatttggtaatgaatatttttttctgaatttgagaatgaggctttccatgtgccccctccccatctgtcaggcatagaattggttggactgtggtgagcagcagtcacttgggatagtgtttgcttagtcttaggttccaaaccctcagtaaaactcatttaaaaactgactgagacagagctcaatgcactaaaaagtcttcttgactctttctcaatctctcttttaataccatgagcactgacctgaattagactgactattctttcttggtatttaatttctgcataatactttccatataa

SEQ ID NO: 98454 - DNA, 617 bp, Homo sapiens
aaattatatttttaaaggaagctttataactttaatggcttcaaaggtcaagttatttcttttcttcaatttaaggacatgttcttgagtcaatcaatattaattcaacataagaccttagtccccaatttcacctcttatgttagctaacataattaaacctgtgttgctgagcaaaatgtcaaatacctttttcttaggacaaagtactctatctgggttttctttttcaattttcattaatttaaacaagcaaatttatttttattgtattgagcatcaaataaaagcaattactcagcatgcttctggatttggtaatgaatatttttttctgaatttgagaatgaggctttccatgtgccccctccccatctgtcaggcataraattggttggactgtggtgagcagcagtcacttgggatagtgtttgcttagtcttaggttccaaaccctcagtaaaactcatttaaaaactgactgagacagagctcaatgcactaaaaagtcttcttgactctttctcaatctctcttttaataccatgagcactgacctgaattagactgactattctttcttggtatttaatttctgcataatactttccatataa

SEQ ID NO: 98455 - DNA, 577 bp, Homo sapiens
gtgattatataacccaaggatatttactttgtatttgaactgttctaatcaaaagtcaacatcatgagaaagcaaaaatggcacagcaactttaaaaggcagtttggcagtttcttataaaactaaacatattcttactgtataatcagccaattttgctcctttgactttwctctattgatgtaaaaacttagttcccgtcacaaacctgcatgtggatatttatatcagctctattcataattgttaaaacttgaaagcaaccaagatgtccttcagtaggagaatttataaataaattgtggtatacccagaaaatgaaatattatttggcacttaaatgacatgggctatcaagccgtagaaagacctggtggaaccttaaatacatatggtaaatgcaagaagtgagtctgaaaatggtacctactatcttttccaactacatgacattctggaaaagaaaggactatgaagacgatgaaaacattagtcaggggttacaggagagggagggatgaaaaggcagaacacagaagaattttggggcaatgacactcttctgtatgatactaga

SEQ ID NO: 98456 - DNA, 478 bp, Homo sapiens
taaattttatgttacatgactgttaagtagaaaaaggcagaatatgtagttttaaaatttatgtttttgactttttttcattgaatcttttagaacaaagagattttctatggctgactaatctatatgatttttcaacctgttggtgaactataagattgctttgtgccgtggacttgaattctacttttcttgggcaagactgatttcagaattaatttaattaaagaaaccaagcagctatgtttagaaacatttaaagatataaaattgtcttragaaaccaaggaatataggtgggtagaaacccagttccttccagtaaacccttgcttctaaggtgccttacctggcccattgagaatccattccacaagcagagctggctgggcatctcctctctgctgagattcgaagatgtaaacagaaattataaattctccttgctgtccaggaacgtgtggctacagcatatcaa

SEQ ID NO: 98457 - DNA, 688 bp, Homo sapiens
tatctaggaatggctttgtgcctctcctacgtgccctcatggatttcatcaggatgtgtcatgttacgagtgatgtcagtgaagatgaatatacaggaatgaactgaaagtgagacactgaaggccagrtgaccagtttggaagctgcagtgacccatgtccaggggtggcgtggttctggactagagcagtgttatcagttagggttgtttgggttgcaagcaacatatactaaaactagataacttaagcaaaaggggacgtgagggaaagatattgactagctcaataaatctacagaacagctggagaactaggcgtgaaataatgaagagccagggaatgcctagagccctgtaaaccacagcaaccctctcatgtgagcactgctggattcaagtactgctcacggtggtcattctgtcttctacttgggtcagactttaaagtctaggatgggaccacagcactggcctgtgtggagttgcatgtctgatccttttgggagagaagagaaagacactgtttaaaaacagtgtcacttgttgactgttgcttccaataaagacaagtggttcaatgaagaaatgaagtgattcccttagggaaaagaaagcaggcctcgtatgagaaacatgattctcagaaggagtaatcaagagataggaaggcttgtgtcaaaaggagg

SEQ ID NO: 98458 - DNA, 688 bp, Homo sapiens
tatctaggaatggctttgtgcctctcctacgtgccctcatggatttcatcaggatgtgtcatgttacgagtgatgtcagtgaagatgaatatacaggaatgaactgaaagtgagacactgaaggccaggtgaccagtttggaagctgcagtgayccatgtccaggggtggcgtggttctggactagagcagtgttatcagttagggttgtttgggttgcaagcaacatatactaaaactagataacttaagcaaaaggggacgtgagggaaagatattgactagctcaataaatctacagaacagctggagaactaggcgtgaaataatgaagagccagggaatgcctagagccctgtaaaccacagcaaccctctcatgtgagcactgctggattcaagtactgctcacggtggtcattctgtcttctacttgggtcagactttaaagtctaggatgggaccacagcactggcctgtgtggagttgcatgtctgatccttttgggagagaagagaaagacactgtttaaaaacagtgtcacttgttgactgttgcttccaataaagacaagtggttcaatgaagaaatgaagtgattcccttagggaaaagaaagcaggcctcgtatgagaaacatgattctcagaaggagtaatcaagagataggaaggcttgtgtcaaaaggagg

SEQ ID NO: 98459 - DNA, 557 bp, Homo sapiens
gttcctctaagattatagatgtatatttataaaactggtaacatatactacacttgatttcagccaaaatgctgagaaatgattttatatatatgtatatatgtatgtatatgtatgtacacacacaaatacatatatgcatatataggattgccagcatatatataaatatagtattttgagacatagtgaaataatattggataacaaagacytaagtggaaatacaatgtatgtttagattatttaaaataatttaataatagtaaataattatccccaaattaatttatcatcctgaactatttgaatcatttagcacttaggaaattttttaatttcccagtgtttcgggaacttttcccaagagtattgattccagtgtactttgattgtgaggaaatgctgtgaaacaagtcttgttatctccatattcagaggcatccaatgttgtgattgttcttagaaagattataaaagtcataaaacttaccacagtgaagagaattaataaaatacttttataatatctattgtctgtgtctgaaagagttaat

SEQ ID NO: 98460 - DNA, 652 bp, Homo sapiens
actcattcaggacagttctctgagtgccctttcactgacccaattctccctccctttcttatttacaatctcaagaataactgtagaatgtgctgggaawttaaccacctgagataagtgggtactggccagaaaagcctgtgttatttttatctacctcccctgctccttgaaaaagatgtttttcaatactttagccaaatgtgtcatgttaccccagggtataaaactcagattaggctgatttctggggttctccacctgtggtgcaagtaaggcatgtgcagatgagacaccatccgccccagccagcttttctaagccttgagggattgactctcaatgaatcctaggcttctgttgtcccttgctgtctatctttaggtaataaacccatctcatgtaacaccttgtatgtgtgtgtgtgtgttctgtctcactggacccaggcaagtttgtaaccagtacacagtgaacctgcttcacaactcgtgttgggtcctccctatcatcccagaccatgggagaattacacttctttactcccatgtaactaactttggccaataggctatgaccagaggtgataatgcattatttgggatgaaagtatgtaattgttgatgagaagtcttcagtagtcatgtctcct

SEQ ID NO: 98461 - DNA, 652 bp, Homo sapiens
actcattcaggacagttctctgagtgccctttcactgacccaattctccctccctttcttatttacaatctcaagaataactgtagaatgtgctgggaatttaaccacctgagataagtgggtactggccagaaaagcctgtgttatttttatctacctcccctgctccttgaaaaagatgtttttcaatactttagccaaatgtgtcatgttaccccagggtataaaactcagattaggctgatttctggggttctccacctgtggtgcaagtaaggcatgtgcagatgagacaccatccgccccagccagcttttctaagccttgagggattgactctcaatgaatcctaggcttctgttgtcccttgctgtctatctttaggtaataaacccatctcatgtaacaccttgtatgtgtgtgtgtgtgttctgtctcactggacccaggcaagtttgtaaccagtacacagtgaacctgcttcacaactcgtgttgggtcctccctatcatcccagaccatgggagaattacacttctttactcccatgtaactaactttggccaataggstatgaccagaggtgataatgcattatttgggatgaaagtatgtaattgttgatgagaagtcttcagtagtcatgtctcct

SEQ ID NO: 98462 - DNA, 306 bp, Homo sapiens
aaaaaattttttttaaagtaactaggcatggtggcgagcccctgtgggcccagatactcaagagactgagacaggaggatcacttgaccccaggagttcaaggctgcagtgagccatgatcacaccattgcactccagcctgggcaatagaatgagacccwggctccaaaaacaaacagtaacaaaaatgaagtctttccacattgtcttagggatacatttttctctaaattaaatattgttgtgccaaataattattgtcttcatgactgctcatataaatatttgatattataattaatattt

SEQ ID NO: 98463 - DNA, 594 bp, Homo sapiens
agagaggacatgatagatacctggctatttcagcatctcaaccttctctactgaggcacctgacatccagacatgtgaatgagccatctagggtgttccagtccagaagagctctcaaatgactgccatcccagccaacataatatagaacagaagaagaacccagaaaaactcaatcaacacacataattataagaaatttttttgtcaatgtcactgtgttttggggttggtcgcakcaacatatacccaaaacagatggcctctttcatgtgtctaacacatagctagctgtcaaaacagtggtgcaacagaaatgactgggacacatgtctctcatcctccaccaaggtagtccagatttgttcccatagttgaagcagagatccaagagggtaagcagaaggatgcaggtccttttaagatttgggctcagaacgggcacaaagtgtcttttcctgaattctattgtctaacaagtcaaaggccaaccagaatcccaaggcagagatagactccacctcttaatagaaggtgctgcaaaatagcattgcaaaaataccatgaatacagagagggatggaaaaccgcaat

SEQ ID NO: 98464 - DNA, 594 bp, Homo sapiens
agagaggacatgatagatacctggctatttcagcatctcaaccttctctactgaggcacctgacatccagacatgtgaatgagccatctagggtgttccagtccagaagagctctcaaatgactgccatcccagccaacataatatagaacagaagaagaacccagaaaaactcaatcaacacacataattataagaaatttttttgtcaatgtcactgtgttttggggttggtcgcagcaacatatacccaaaacagatggcctctttcatgtgtstaacacatagctagctgtcaaaacagtggtgcaacagaaatgactgggacacatgtctctcatcctccaccaaggtagtccagatttgttcccatagttgaagcagagatccaagagggtaagcagaaggatgcaggtccttttaagatttgggctcagaacgggcacaaagtgtcttttcctgaattctattgtctaacaagtcaaaggccaaccagaatcccaaggcagagatagactccacctcttaatagaaggtgctgcaaaatagcattgcaaaaataccatgaatacagagagggatggaaaaccgcaat

SEQ ID NO: 98465 - DNA, 598 bp, Homo sapiens
tgttttgtacctttagcttatataaatataccacatagaacataccttgtgtttagcactcttccaagcactttacaaatgttaatttacttcatcttcataatgactctttgaggtggttactgttattactgcagttttatagatggggaaaccaaggcacagaaagatttttattgttgttgttgttgctttggttgtaacttgcctgaggtcacatagctagtcggtgaaggaatcactataaacctcctgaagcttgactgggactcccctgagcatttgaccatgctyctattgaattagtctaattttcccactaagtggcagatgaagaaacctcatctggtgggcggagacttgggatctgcagaggggaactaaagatcctgcaggaacagaacctttctcccaggcaccacaatcaggtacctactcccactctccaagggctgagtgtgtcagattggtgagaatacagtgtcaattcgtatagttctgtcctgcagggaggaatgggagtcctctctcctcactccaagcttgaggcatttgagtaagggcttccctctatgggaagcagtacttgcttctagag

SEQ ID NO: 98466 - DNA, 560 bp, Homo sapiens
atgagttaggataaggtggttgcagaggtacctgagaaagaatgacctcagaggcaagaagaaaaccaagtatttgtgtcacagatgtcaagggaagactgtgtttcctttagctttccctggactgattccatgtgttctcgttgtcatttctatggatgatattaggttctgcttttcacagatgatccaagaagggtccagagtcactatcactggaagtcagtggcctcctctccactcaccttggcctgatctgcagtcagatccatgcataccctacaagggtacctctccrtagattttcaaaggatgaataaataaatcagagagctgattttcacaagtcatatgtacccatggattcatttcctacggctgccataacaaaacaaaaaaacaaaaaaaactgagtgatccaaatgacagaaatttattctggagtttagaagtctgagagcaaggtgtcttcagtgccacgttccctctgaagtttcaaaggaagaatctatcctaggcctctctcttacattctggtagttccttggcttatggcacca

SEQ ID NO: 98467 - DNA, 583 bp, Homo sapiens
cactcattacacaaggaggtaatgcaaaacagaattagaacccaagggatgggatttccaggcttgttgtctttaatctataccaggctatgtggctgataagattaaattcaaatataaagatttgaatttcaaaaatctttcaattgaccatgacatgaagaaaatgcttaagtatggtcaaactttaagcagagagaatamcatgacagtattacgatttatagatgtgtgccatctcattttttctttggaaatccaatttgctgttttaggttctgtggtagttctactacatttgtctctaatatgttattcctgaaatctttagaaggggaaagattgaaaatcatgtagattgctcaggccttctgaaaattatggaaggaaagagtgatggcattatgttagcctctgaaaatcacccagaaatgaaatgacaccttattttaaaacctttctaaggctttcaacatggaccacatgagtaactaattttgaaattgctttgcatttacaattagaactcctgtggtgtccgaggaatccaattatggctgggaagtcatataatagtatggaa

SEQ ID NO: 98468 - DNA, 528 bp, Homo sapiens
caactatatcactatcatatgcagtaaagtttgctgaattatgaataaacaaatgtaaactaaattcagtgagggttaaattacagaataaaaaacattttcaatagtgagatttctaaggtgtcatgtaagatatttcaacatacagcaggactccgtaatacagatagactctgctaagtaatgttacatattcatccaaatatgtagatcatgacaaaaatctaatgatctcccaaatgatgacttgaattwgtcaatatgaatatatagacggatatatgactcgggttaaatcttactaaggacaagcacagatttgtaagccaccactaaattgataccatttgattctagcaattgaagtgtgtgggtgattactcagttaatgaaacattcccattattggctctcaagaattaacattagtcagatgtttaatccaatataaagaaagtgattaacctttgccaaaatattagaccttagaattattcctttaatagtagcaatttctttttgtgtgta

SEQ ID NO: 98469 - DNA, 528 bp, Homo sapiens
caactatatcactatcatatgcagtaaagtttgctgaattatgaataaacaaatgtaaactaaattcagtgagggttaaattacagaataaaaaacattttcaatagtgagatttctaaggtgtcatgtaagatatttcaacatacagcaggactccgtaatacagatagactctgctaagtaatgttacatattcatccaaatatgtagatcatgacaaaaatctaatgatctcccaaatgatgacttgaattagtcaatatgaatatatagacggatatatgactcgggttaaatcttactaaggacaagcacagatttgtaagccaccactaaattgataccatttgattctagcaattgaagtgtgtgggtgatwactcagttaatgaaacattcccattattggctctcaagaattaacattagtcagatgtttaatccaatataaagaaagtgattaacctttgccaaaatattagaccttagaattattcctttaatagtagcaatttctttttgtgtgta

SEQ ID NO: 98470 - DNA, 563 bp, Homo sapiens
aggagtagagaatttaccatgtgccttcttccattttctgctcytggtttacattacaggcataattttttttaactgaacccaattgaaacccaatatttctttttaaaacatgctcaaggtagccataaccagaccagaatccatgccagacatgaacttgtcatctgttctctatagaattttataaggactacagctaatgcatatgaagtctcaatatatatcagatgttcactgcctggtattggtatcataataatttctggtttatgtgaaccaggcttgagattaataaccagtgggtcactgaagagttgcccaggcattggtcttaataacaatatcttcagcactcctttgtgccaagcttaccaaatctggaaataatgcagtagtgccataatctccagagggtgaagtgtagagctaatcttccacctagtcagcccagttagcttcttggagccaatttttctcatgtataaaatcggagtgatcatagcatctacctcataggattactgggagagtaattgagatgctagacatagcacactgaa

SEQ ID NO: 98471 - DNA, 557 bp, Homo sapiens
tgtcaatttgtttacttatattttggtgagaacattgtcttaggactagactccattaattgcaattggagctagaaatatggttgttgagtgcagagaatcaggattgtcatggatggcatcgttgctcctgttatgattcagtgcctgggctcatgacagccttgaacaaaacttgggttctatggttggaaaygatggttttatagtcaaataagactactggccatacagcacactagtggcaaaaaatcagccctgaaaggaatgtctcctgatttctatctccacaaacttcacttcttgtcatgaatttactgcttctttgaattctgctgggctaaatgtgtgttcccacgactcctctgtgaatgctgttgcgtgtgtccttcctgggagaaagtggacattacagttgccctgctcttaccctcgagagatacagtccaagatccccagtggatgccccaaacctaggatagtatggaacctgatggtcatcaattggagggcatttctgtgcatgtcttccacccacaaatttaatgccttttttc

SEQ ID NO: 98472 - DNA, 503 bp, Homo sapiens
aaatcttggttgccatttttgctgaaattgacaagcttattctaaaattaatatggaaatgcaaaggatctggaatagtgaaaatgatcttggaaaataacaaaactggaggactcacactttytgatttcaaaacttactacaaagctacagtaatcaaaacaatgtggtattggcataaggatagacatacaggccaatggactagaatttagagctcagacctcacatgtaaggtctacttatttttggccaaggcaattcagtgggaaaagatatttaatacagtgttggtaaggatgtggagaaaccagatacctcatacatttctgatgagaatgtaaaatgggctaggcacagtggcttatgcttgtaatcccagcactttgggaggctgaggtgggtggatcacttgaggtcaggagtttgagaccagcctggcccacatggtgaaaccatgtctctactaaaaatacaaaaaaattagccgggtgtgggggcgc

SEQ ID NO: 98473 - DNA, 503 bp, Homo sapiens
aaatcttggttgccatttttgctgaaattgacaagcttattctaaaattaatatggaaatgcaaaggatctggaatagtgaaaatgatcttggaaaataacaaaactggaggactcacactttctgatttcaaaacttactacaaagctacagtaatcaaaacaatgtggtattggcataaggatagacatacaggccaatggactagaatttagagctcagacctcacatgtaaggtctacttatttttggccaaggcaattcagtgggaaaagatatttaatacagtgttggtaaggatgtggagaaaccagatacctcatacatttmtgatgagaatgtaaaatgggctaggcacagtggcttatgcttgtaatcccagcactttgggaggctgaggtgggtggatcacttgaggtcaggagtttgagaccagcctggcccacatggtgaaaccatgtctctactaaaaatacaaaaaaattagccgggtgtgggggcgc

SEQ ID NO: 98474 - DNA, 625 bp, Homo sapiens
gccaccacaaaatcctccaaaatagagctagtaacctaaacaagaaagatcagaccamtgtgatctgtgaaactgtacaggacacatgatccatttcttcaataaacagcacagaggagaaaaatttcttaaaagagacttaagaactttagcaaccaaattcagcgtgtgcatatttttcagatcttaaaccaactccaaagagacatttgagacaattgggggaatttgaacaatgatggggtattggagggtgtgaagaatcattgttaatttttttaggtgtgataaatagtgattatgctttaaaaaaaatttaaaaagtctatattgacatctgtaattccagcactttgggaggccaaggcaggcagatcacttgaggtcaggagttcaagaccagcccggccaacatggtgaagccccatctctactaaaaacacaaaaattagctgggcatggtggcacgtgcctgtaattccagctactcaggaggccgaggcaggagaaccacttgaacctaaggcggaggttgcagtgagctgaggttgcgccactgcactccagcctgggcaacagagacagagtaaaaaaaaaaaaaaaaaaccacagtctatattggata

SEQ ID NO: 98475 - DNA, 625 bp, Homo sapiens
gccaccacaaaatcctccaaaatagagctagtaacctaaacaagaaagatcagaccactgtgrtctgtgaaactgtacaggacacatgatccatttcttcaataaacagcacagaggagaaaaatttcttaaaagagacttaagaactttagcaaccaaattcagcgtgtgcatatttttcagatcttaaaccaactccaaagagacatttgagacaattgggggaatttgaacaatgatggggtattggagggtgtgaagaatcattgttaatttttttaggtgtgataaatagtgattatgctttaaaaaaaatttaaaaagtctatattgacatctgtaattccagcactttgggaggccaaggcaggcagatcacttgaggtcaggagttcaagaccagcccggccaacatggtgaagccccatctctactaaaaacacaaaaattagctgggcatggtggcacgtgcctgtaattccagctactcaggaggccgaggcaggagaaccacttgaacctaaggcggaggttgcagtgagctgaggttgcgccactgcactccagcctgggcaacagagacagagtaaaaaaaaaaaaaaaaaaccacagtctatattggata

SEQ ID NO: 98476 - DNA, 577 bp, Homo sapiens
ttaataccactgaactgtgcacttgaaaatggttaagatggtaaatatcatctgtgtactttaccagaataaatttttttaaaaaaagaagagagactcaatgctctggggaaaaaaaaatgtaccaytccaaaagagctggatgttggataaattactacacagaaagttaaaaacattgctgagatcacaaacagggagctaaggaaattcccagtggcaaaaacaaacaaacacaaaaacaaacaacaatacaagggaggtaaataaagtcagggtgattaacaatccaatgtctttatcaataatccagcaatttggaattaatggtgggccacgaaggaaactggaaactaaggtttcccaaatttgaagtggaatctaaggacctgagatgtcctcctttcacaatacagagagagagagagagagagagagagagagagcccgccttgaaagagagatgacaaggaaatctgcccatctgtgtcacaactctgctagaacctttgtaaacaagtgttatggactgaatgtatcccacccaagttggtatactgaagccctaaccccctaa

SEQ ID NO: 98477 - DNA, 535 bp, Homo sapiens
taggttcacagcaaaattgagcagaagttagagattttccatataccccctgccccatacatgcctcccccattgtcaacattccctaccagagtggcacatatgttacaactgatgaactgacattgacaaatcattatcacacaaagtcaataattcaccttaagactcactcctggtgttgtacattttatgagtttggacgaatttataatgacaggtatccaccattatggaatcatacataaaatttttctgccctaaaaatactctgtgttctgcttattcattcctgcttctccctttaattcctgacaaccactggtcttttytactgtctccatagttttatcttttccagaacgtcatatagttggaatgattcagtatgcagccttttaagactggcttctttcactgagtgttaatatgcataaaagttccctctattcttttcaaggcttgataaaccatttcattttagtaccaaataatatttcattgtctagatataccactgtgtatccattccccc

SEQ ID NO: 98478 - DNA, 535 bp, Homo sapiens
taggttcacagcaaaattgagcagaagttagagattttccatataccccctgccccatacatgcctcccccattgtcaacattccctaccagagtggcacatatgttacaactgatgaactgacattgacaaatcattatcacacaaagtcaataattcaccttaagactcactcctggtgttgtacattttatgagtttggacgaatttataatgacaggtatccaccattatggaatcatacataaaatttttctgccctaaaaatactctgtgttctgcttattcattcctgcttctccctttaattcctgacaaccactggtcttttctactgtctccatagttttatcttttccagaacgtcatatagttggaatgattcagtatgyagccttttaagactggcttctttcactgagtgttaatatgcataaaagttccctctattcttttcaaggcttgataaaccatttcattttagtaccaaataatatttcattgtctagatataccactgtgtatccattccccc

SEQ ID NO: 98479 - DNA, 457 bp, Homo sapiens
aataatttcatatctatagtgagatagatatatagatagagatacatgtcaggttcctagagacattaagtgtttttctatgcttacagctaatatggtagggtagaarcatttttctttcttttttcttttcttttttttttttttgagatagggtctgcctctattgcccagactgggcggtagtggcgtgactgcaactgactgccgccttgacctcccaggcttaagcgatcctccaacctcagccttccaagtaggtgggactacatgcacaagacaccatgctggactgctttgtaaaatttttttataaagacaaggtctcactatgttgcccagtctgctcttaaactcctgagctcaagtgatcctcctacctcagcctcccaaagtattaggattacaggtatgagccaccacacctggtatgagaattcttgaatttaaaatctgc

SEQ ID NO: 98480 - DNA, 559 bp, Homo sapiens
caggccagcactttacttttaagaaagacagtgtgacttccattgctctggtgaaagacttgatacttataacttctgctactctgagaaacccctgtcaatcaatgactggcatggtgttcatgaaaatgtgagagatctgaagttgactgaatgacaaaattatctaagaggctggaaattttcagcatawactgggctgaccagagcactagttacagataactgacttgatgtttaggccaggttcaaatacacatcagctatgagattctagatcagtaagtgacttaacagttacgttggcaaaatggatgtaagcgtacttatttcattgggtcatgaattataagagcttgcattaattgagcattgactctacaccaggtgctacactaaatggattacatggattgtctgacagggctctgaggaaaccccagcttggaaatgttaaatgactcgtccagggtgacctagctagcaagtggcaaggcatacattcaaagtcactctgtttgatttctctctcttaaccactgttatttagagatgatga

SEQ ID NO: 98481 - DNA, 403 bp, Homo sapiens
ccttctgtggcaaaagtgcccccagaaagttacagacttgagttgtaggcaacctaattaatgagaatggtctctaactgcaacccgaaagcatgaataatgcctatctacttacttcacagtttatggtaatgagattaataagctacttccctggaatactagagagagtcagaagcaacaatatatcctctactgtgagccaccttacatttgtgtcatggactgaggtttaaatgggaagagtggaagtctaaggatttgagaagctcttttcataactagtaaagtccatcaaatcatccaaagatacacagacaaatctgccrttgtaaagagattcagttctgttaaagaatctacactacatttcaaatacgtcctgtaatagaaacagagggta

SEQ ID NO: 98482 - DNA, 589 bp, Homo sapiens
actgtcagcagaaatgaaggctcaagcgctaagctgagattggtgatagataaatttttacaaatcaattttgcaaattttatagactctcatgactatcaaacattctatcacttattttattatctcattcagcaaatgaggaaattgaggcttagaggtattgaatcactcacgcaaagacacttgactaataaatggtggcagtgttttcaaagccaagtctagcctttgctctcaacccttacccaaatggattatatatgcttcttaaacttttccaccaaatgcatacccctccctcaggtgggagctgaggtgggagrgtgagctgggtagaggttacactggacactgcagggaacttggaatttctctgagtgttttttttttttccaaaaatcatttttgctatgaggaaatcatgcattttgtattctgctacatattatgtattttctctacttttaaaatgttttaaattttgtaacatttagataaatgagccattttaatctttgggcacccaccatccctcagcaaacctggcaaaccctcccgggcacacacatcccagtatgagagccag

SEQ ID NO: 98483 - DNA, 561 bp, Homo sapiens
gactaatgtaagttctgttctgctactttgggagaaaccaccttttgaatttcattcaaataaattttgtctcatctaatcaccgttgctatgctccttcccttctgattaatgaaaatgcctccctctcatttggcagctgggaagctcagacaaaaggttctgctccccaaccacaatagcatcgccccttacagctggcctccttgctttctcttcattctcaggctacacgataggttatgaacctgatttactaatctcattgtacataccaaattcyctttgggaaagtgagagcgtagtcaataaataattttggtgaacctctagatccaaatttcattggcctctaccttcggtcaggtattttttatgaaggaaactagtggacaacatttggcttgtcttttcctactctctttccgttccatctataggtttttcctctatactagaactgaataatgtgaaaagttatgatttgaaaatgtcccaccaccttacagcatctgaagcatcaccatgttctcttacaattatttttaactgtaggctcaa

SEQ ID NO: 98484 - DNA, 581 bp, Homo sapiens
tactaatctcattgtacataccaaattctctttgggaaagtgagagcgtagtcaataaataattttggtgaacctctagatccaaatttcattggcctctaccttcrgtcaggtattttttatgaaggaaactagtggacaacatttggcttgtcttttcctactctctttccgttccatctataggtttttcctctatactagaactgaataatgtgaaaagttatgatttgaaaatgtcccaccaccttacagcatctgaagcatcaccatgttctcttacaattatttttaactgtaggctcaacaggcagatatactggcttatctcctcctgcccaggttccttcagcaattactgttaaagcaaagaattacaaaaatcatgcatctttaatgaaagacacaggaatagaaatattatctagctcagatggttcccagtttgaccctctcatgagcctgtcctgccagtaattctagggggagtagaaagagctttgcactgggcagtcaagatcctggggttccagtcctgaacctgcatttaagcacctacatgaccttgggaagtcagttat

SEQ ID NO: 98485 - DNA, 435 bp, Homo sapiens
gaagcccaatccaaggaaaacagtaaaatgatccaagagttgaaagacgacacaatcattttaagaaagaaagaaatggaacctctggaaatgaaaaattcactacaggaatttcaaaatgcagttgtaagtattaactacagaataaaccaagctaaggaaaggatctcagcgcttgaagaccactcctttgaagcaacacaggcagagaaaaatttaaaaaattcaaaatgaacaaaacctctcagaaagatgagattatataaagggaccaagtctatgactcattgacattccagacactgaaggarggagagcaagtagcttgaaaagcatgtttaaggatatagtccacaaaaattttcccaatcttgctagagaggtcaaccacatgcaaatttgggaaattcagagaacacctttgtgtcactacac

SEQ ID NO: 98486 - DNA, 533 bp, Homo sapiens
taataggaacaactttttgagcacttactatggctcaggcacgtttctaaccatttcatatgtattattcaatcctcataacatacagttagttaggatgtaggcactactattgttaacaggaatagcaataaatggtagattttggatttataggtagatcagattaaatccaagggccactgcaaattaatagtttaaaatattaagttctaaaattctctttaataaaaatattgagccaaacctccactcaaacacgtcattcttaagtgtcttttagttttctgggaaatgtagtaggggaaaggaagtacaaacyatggttcctgaaatcaaagtaattacccatagctatatgtagaaaatataaggtagctagaaaatgatgtatgactacattttgtacttttgattatcataagcttgtagtattgtttccaggtttaatgagatttttcttaaataaaatgaactattttcctttccaaatattgcatttgttaagactatagcaagattaacttggttta

SEQ ID NO: 98487 - DNA, 533 bp, Homo sapiens
taataggaacaactttttgagcacttactatggctcaggcacgtttctaaccatttcatatgtattattcaatcctcataacatacagttagttaggatgtaggcactactattgttaacaggaatagcaataaatggtagattttggatttataggtagatcagattaaatccaagggccactgcaaattaatagtttaaaatattaagttctaaaattctctttaataaaaatattgagccaaacctccactcaaacacgtcattcttaagtgtcttttagttttctgggaaatgtagtaggggaaaggaagtacaaactatggttcctgaaatcaaagtaattacccayagctatatgtagaaaatataaggtagctagaaaatgatgtatgactacattttgtacttttgattatcataagcttgtagtattgtttccaggtttaatgagatttttcttaaataaaatgaactattttcctttccaaatattgcatttgttaagactatagcaagattaacttggttta

SEQ ID NO: 98488 - DNA, 618 bp, Homo sapiens
ggctgggcttccagtcccaaggactggagtgggaactcatggtacctcttctggacccacttatggctgcccatggatcaatctgcacacacttcctcccttctgaggtgcataaaggccctgggctcagccagagcagggcagaggatggccagaggataaggagagcagaggatagagagactgttggagtaccctctcccctgatagctggaggagatggaatgtgcagctgcagagaatagtaccctctctgctgasagcagcagctgcagtggagagcttcagagacctgcagcgacatctgaattacttgcctgtagagaggagccaccctctccagggcctcctccctgctgagagctgaacactcaagaggagaacctgcctacagagaggagctacccactcctctgagccattctaagactaaataaaactcttcttcttcacccttcacttgtctgtgtacgtcattcttcctggacacaggacaagaactcaggcaaaggcactgtggccacagaggtttccagctagaaaaattgacaccctagtgatcctataacaatgagtagaaaaatgaaagctatatggatcaactgaaatttttggaag

SEQ ID NO: 98489 - DNA, 618 bp, Homo sapiens
ggctgggcttccagtcccaaggactggagtgggaactcatggtacctcttctggacccacttatggctgcccatggatcaatctgcacacacttcctcccttctgaggtgcataaaggccctgggctcagccagagcagggcagaggatggccagaggataaggagagcagaggatagagagactgttggagtaccctctcccctgatagctggaggagatggaatgtgcagctgcagagaatagtaccctctctgctgacagcagcagctgcagtggagagcttcagagacctgcagcgacatctgaattacttgcctgtagagaggagccaccctctccagggcctcctccctgctgagagctgaacactcaagaggagaacctgcctacagagaggagctacccactcctctgagccattctaagactaaataaaactcttcttcttcacccttcacttgtctgtgtacgtcattcttccyggacacaggacaagaactcaggcaaaggcactgtggccacagaggtttccagctagaaaaattgacaccctagtgatcctataacaatgagtagaaaaatgaaagctatatggatcaactgaaatttttggaag

SEQ ID NO: 98490 - DNA, 618 bp, Homo sapiens
ggctgggcttccagtcccaaggactggagtgggaactcatggtacctcttctggacccacttatggctgcccatggatcaatctgcacacacttcctcccttctgaggtgcataaaggccctgggctcagccagagcagggcagaggatggccagaggataaggagagcagaggatagagagactgttggagtaccctctcccctgatagctggaggagatggaatgtgcagctgcagagaatagtaccctctctgctgacagcagcagctgcagtggagagcttcagagacctgcagcgacatctgaattacttgcctgtagagaggagccaccctctccagggcctcctccctgctgagagctgaacactcaagaggagaacctgcctacagagaggagctacccactcctctgagccattctaagactaaataaaactcttcttcttcacccttcacttgtctgtgtacgtcattcttcctggacacaggacaagaactcaggcaaaggcactgtggccacagaggtttccagctagaaaaatygacaccctagtgatcctataacaatgagtagaaaaatgaaagctatatggatcaactgaaatttttggaag

SEQ ID NO: 98491 - DNA, 620 bp, Homo sapiens
gcttcaaaacctagttaattgttygttcttataaaagcacaagtaagtgctcccaaaaacagaactggtcattctctctctgtgcccttatgtatactgtatatttaatttgtccagtgaaatctctgcatcaagatacaacttacttcaagactgttttgaaaaggaaatcttttcattctgatagaggcaatttaagtcttaattaggtgtcatttataaagtatttcacactgagacctttccaaacaaacaaaaaaatcatttaaaatttactttgtagactaaactctcaaggactttgcaaaaaaacccactgttctttgtagttttgatttctcatatatgcaaatagttgtacaattatgtagcatttgttgttgttgcccggttgattgctttagactccaattatcattctatattcgtatcctctcctctcagaatctggaatctattgctgctgtgccttatggtatttatcttggatgtgtattgtgtttttccaaaatgcttatagctaagtacatatatttcttttatttgaagactttgttttgtaaaacatttctctcagatatcacctatgttccctaggtctttgcattcttttaagattt

SEQ ID NO: 98492 - DNA, 620 bp, Homo sapiens
gcttcaaaacctagttaattgtttgttcttataaaagcacaagtaagtgctcccaaaaacagaactggtcattctctctctgtgcccttatgtatactgtatatttaatttgtccagtgaaatctctgcatcaagatacaacttacttcaagactgttttgaaaaggaaatcttttcattctgatagaggcaatttaagtcttaattaggtgtcatttataaagtatttcacactgagacctttccaaacaaacaaaaaaatcatttaaaatttactttgtagactaaactctcaaggactttgcaaaaaaacccactgttctttgtagttttgatttctcatatatgcaaatagttgtacaattatgtagcatttgttgttgttgcccggttgattgctttagactccaattatcattctatattcgtatcctctcctctcagaatctggaatctattgctgctgtgccttatggtatttatcttggatgtgtattgtgtttttccaaaatgcttatagctaagtamatatatttcttttatttgaagactttgttttgtaaaacatttctctcagatatcacctatgttccctaggtctttgcattcttttaagattt

SEQ ID NO: 98493 - DNA, 620 bp, Homo sapiens
gcttcaaaacctagttaattgtttgttcttataaaagcacaagtaagtgctcccaaaaacagaactggtcattctctctctgtgcccttatgtatactgtatatttaatttgtccagtgaaatctctgcatcaagatacaacttacttcaagactgttttgaaaaggaaatcttttcattctgatagaggcaatttaagtcttaattaggtgtcatttataaagtatttcacactgagacctttccaaacaaacaaaaaaatcatttaaaatttactttgtagactaaactctcaaggactttgcaaaaaaacccactgttctttgtagttttgatttctcatatatgcaaatagttgtacaattatgtagcatttgttgttgttgcccggttgattgctttagactccaattatcattctatattcgtatcctctcctctcagaatctggaatctattgctgctgtgccttatggtatttatcttggatgtgtattgtgtttttccaaaatgcttatagctaagtacatrtatttcttttatttgaagactttgttttgtaaaacatttctctcagatatcacctatgttccctaggtctttgcattcttttaagattt

SEQ ID NO: 98494 - DNA, 539 bp, Homo sapiens
agcccccgcatacctagttggtttaaattttttcttttgtagagatgagtctccctaaattgcccaggttggtcttgaaatcctgggctmtagtgatccctccacctcagcctcccaaagtgttgggattacaggcctgaatcactgcacctggccttcactgagttttggtgacagtgagaaataaacctctgttttgttaagctactgagattttcggggtgtgttgcagtggctaaatttattagcctgactaaaaaggaaagttttgacatgtgtctaagattcacaagctcctataaatatatgtgctgtttttgacgtgtttctttccccttttaatttttggaagagaaaaaacaaaaccattggctggcatgttctttgatctaactagacctatcttttcccattcttctagagagaacctagcgaaagaattgcatctatttacgcaattctgacaacccaattctggcttacttgtgaaagatgattgaatgaactctctatggatactcgttgtcacacttgaatag

SEQ ID NO: 98495 - DNA, 565 bp, Homo sapiens
tccgtctctctctgttattatcttaatatttgcttattgctctgcttttaagtgaaaactaaacttttctttgtttttaatactacgcacaatctgacagtttaacttcgtctctgaaataagctttgatagctgacttaagttcccttccatcctttgtctatgtgaatgacactcagtcatctaagccagaaaccttgaaattcatcttgaaagcctgacattcgtcatcatgctgatcaattctttcccttgaagcttttggaaatggaaacactcctatctacactacagctatgccttcagtgaagtccttttcattctctcctgaattatgagaacattctatttactaatatyctcctatcttcaatcatacttccctcgaatcaattatctttcaacttgagtgatctttctcaaatacaaaactgatgctaccattatttgtttaaaatagttgacgtcatggtcatggcatggatgaatggaagtttgaaggaatttgtaaaccaaaatatggggaagatgataacatagatatgaaaatcctcaagaattatga

SEQ ID NO: 98496 - DNA, 565 bp, Homo sapiens
tccgtctctctctgttattatcttaatatttgcttattgctctgcttttaagtgaaaactaaacttttctttgtttttaatactacgcacaatctgacagtttaacttcgtctctgaaataagctttgatagctgacttaagttcccttccatcctttgtctatgtgaatgacactcagtcatctaagccagaaaccttgaaattcatcttgaaagcctgacattcgtcatcatgctgatcaattctttcccttgaagcttttggaaatggaaacactcctatctacactacagctatgccttcagtgaagtccttttcattctctcctgaattatgagaacattctatttactaatattctcctatcttcaatcatacttccctcgaatcaattatctttcaacttgagtgatctttctcaaatrcaaaactgatgctaccattatttgtttaaaatagttgacgtcatggtcatggcatggatgaatggaagtttgaaggaatttgtaaaccaaaatatggggaagatgataacatagatatgaaaatcctcaagaattatga

SEQ ID NO: 98497 - DNA, 584 bp, Homo sapiens
catgacaagttctatcatacttggggtatgacctgaagtacattacagcatttagtcccactgtcagcagtagtcatgggtaggccacttcctggtgaaggggttatctccaaacaggatggaagggaacatacactggagaatgcatattataaaaatgagacaagcccaacaattgaatctcttattcaaagccaatgtcacatttccctgtcacacaaatgtttctttcccatcactaagacttaaagtggaaayaaaatacactaccgtcaaccccttttgagtctgcaggttttcacggaaaaaagcaaagattgggagacacttgagagaggaggcattattgtgattttatgttcttaacaggtggctaagaacctctgctctgaaatcaaagacagagatggatctgaaacagtatctgtcagaccagacatgttgtataatgtaaacctcagtttcctcttgaaatgaaactaatggcagccccttacagatattttataaggatgtgataacgtaaaatgcttctctagtgcctggcacacaaagaataaaaacatgcctcttaatacttacca

SEQ ID NO: 98498 - DNA, 515 bp, Homo sapiens
tgaattcagattaaggagtggaggcaagtatgacaaatatttctttttcaggctaaattgctacttcaactctttttcctattgccattagatcattttgcttccagagaaatggacatgtaggttggtcacagacctgaactccagatgccaagaatggactagaatatgttaaggacacgtgatctcttttctcaaaccctcatggttctaatttgtatctctcaaggcctcagcctagtagttcaccacatcaattgtgtgatttgtgttgaygtaacagtagtcatatatagcccaagaactgtcttaggtgttcaggcactcttaaatgatgtgtgcttatttgccaagcctcaagactagcttgctttgtctatttcttcctgtgcctctcctgaataaagggtttccatagtaagaagctgccatatccctacccttgtatactgtctctagtttcccctttttaagttctcatcggggcatcacttctacctgagtgatgaaataga

SEQ ID NO: 98499 - DNA, 574 bp, Homo sapiens
ttagaattgaaacaaattcccactgccatgtgaaagtctgattatcctactgttcccaaggcaccagccttttagtgggatgyttgctgtagtagattgtatcttccaaaaatggccacaaaatgtttctgagtccacatgctcatccagaaactttctactccctcattaagagatagaatctatttcccttccccttgaaattgggctgcctttgtgacttcttcaataaaaagagctgcttggaacccccacccacagcccttacctcccctgcatccatgagcacacccctctgggactatactgtctaccattgcctccctgacttgggactttggctctggagttcactccctaccccaaggccataaaaaacccccactgcactctttagtccctgggctccagccactgccctctccccagatttctctgttttctgccatctctgtgggatccgcataatctgcctccagcagtttctgggagtgaacccagctatcttgctgaaggtagggtaggggtggatgcaacaatgggctgattgttatcaatatgtatggcaagatat

SEQ ID NO: 98500 - DNA, 622 bp, Homo sapiens
aaaatagatactgatggaagaaagaggagaaaagaatatcttcagtgaggggatcatagaagatcctggaaggcacccatgaaaagcaaatagattcaaaaggcttgcctgaagttaccaactttccttaatgtatggtgccctcactgaagctgcagctgtagagatgggcacatcctgttggactgctgaccctggagtgccctgactggtgattcagatacacgtggctgcagtggcagtgtattagtccgttctcacactactataaagaactgcctgagagggggtaatttataaaggaaagaggtttaattgactcacagttccacatggctggggaggccttaggaaatttacaatcatggcagaagggaaagcaaacacatccttcttaacatggcggaaggagagagaagtgaagtgctgagcaaaggggaaaagccacttataaaaccatcagatcttgtgagaactcacctactatcatgagaacagcatgggggtaactgccaccatgattcaattacatcccacggggtccctcccaggacacatggggaatataggagstgaaatataagatgagatttgggtggggatactgccaaaccatatcatt

SEQ ID NO: 98501 - DNA, 604 bp, Homo sapiens
tttatctccttaacatgtcaggttggtcccttaaaaagatttattgaaattaatatgttctgtagagttgagcgccagtgtatatttttacatatggagaagtaaatttaaaattgtacagtacataaaaggttttgaaaacagttataaagacttatttaggcagtgatttaaatttaaattaacagcaacactgacaattttctatttgtttagctattaacgaagctatttaacaaaatgttttgtagactccagttcttagactttttttcttttttaaaaaaatacaacattcctttttgattctggcgagtcaggaggaattcctactctgaagacagagccagagtacagagttaatgtgcagcagtggccttcttccttggaccctaagatgctggagccrctcactgcacttttcaagcagctgccaacattgtcagcactgatctgtcagtaaggatttctcctggcaaaactctgaagctactttctgacatcttcaacaaactaattgttgtctcctgcctctgcgagccctctgaagtcccaacgagttagtgtcttctcaagagatgagaaaaaggactcacaaaatcaa

SEQ ID NO: 98502 - DNA, 469 bp, Homo sapiens
gcttctccacacaaacgccaaaataatcatttaaaaacagaatcattgtaatcccagtactgaggtggaaggatcacttgaacccaggaatttgagaccagcctgaacaataaggtgagactctgcctctaccaaaaattagctgggtrtggtggcatgtgcctgtggtcccggctacttgggaggctgagaggattgcttgagcccagaaggtcaacactgcagcaagccatgatcatgccactgcactcccatctgagcaacagggcaaggcctcatctcaaaagaataaataaataaaaataaatgcagcatcatgttaagatacatccttacttataagtgtaaatggcctcctgttaaatttttaaaatttaaagctattaataggtaacacattcaaatgtttctaaataaacaaatagtataaaaagataaacagtgaaaagcctccctaccatccttgttt

SEQ ID NO: 98503 - DNA, 563 bp, Homo sapiens
atattatcagctacatgcaaataactcttcagtttatatcctcacaagtaaattgaaaaatgttagaacgatctgctgtgtaaaaagcaacctcaagacttagcacgttgaaacaaaaatgcccatgacartttcagtggtcagcaatctggacttgactcagctgtacagattctgctggtctttccttggacactcatgcagctgcagacccatggtgtcccacagggtcgcattgcccccaaaaccctgggactcacttacccactcacaagtttaggattgatgcttggtgttgactaggtctctcttttaatgtgctttctgctcaaggagactatctcagtattcttcatgggagcctcagggttctaagacatctgaaaagaagctctcggcagaagctggtggacatacccagatgagaacagaggctattgactcaggtttgccagaacaagcaaggcagctgccatgatttgagcttagcagccgctcaaactcaggggagagggaaagccctatggtggaagaggggaaggcttcaggcacattgcacttgg

SEQ ID NO: 98504 - DNA, 585 bp, Homo sapiens
tgtattgaaatggatatagcatttgtgatgtatttatatttttctgtatcatatacatgctcatacaaaatgttaatatccaactaatttcatccagtattcataataatagaaacaaatatttttattccaatattcatgaaaatactggagaaggaatcttaacacaaagatgtaagaattggcagcaatgagcatttagatatggctcaaggttccaaggttaatatgtgactcaamatttttgtaaggtcaaaatctgtctataggtgtatttccatagctagaggcaggtatatcttggcaataacaacaaagaccttagtattggccatcatttgcaattactctgggagtcacagatgatacatctttatattttaatcattcatcaacaataaagttgtgtccttcgactatttttaattttttatttcttttctttttaaaattttattttaggtttgtgggtacatgggcaggtttgttacatgggtaaattgcatgtcgctaaggtttgggctatgaatgatcctgttatccaggtagtgaacatagtacctgataagtagttttccagccctc

SEQ ID NO: 98505 - DNA, 451 bp, Homo sapiens
gtccagtccatttattcttctgcatatggcaatctgattttccaagtacattttattgaaaagattgttcttttcccggtgtatgtttttgttgacattgtcaaagattaattggctgtaaaatgtggctttatttctaggtgctcagttctgtgtcattgatctatgtgtctatttttatrctagtacctttctgtttagttactattgccttgcattataatttgaggttaggtagggatgttttcagctttcttttgcttaggattgctttcaatatttgggctcttttatttggtaccatgagaattttagaattgtttttcctaattctgtggaaaataacattggtaatttgatagcaatagtattgaatatgtaagttgctttgggcaatatggtcatttaaatgatattaattcttttgatccgtgagcatgggatgtttttc

SEQ ID NO: 98506 - DNA, 451 bp, Homo sapiens
gtccagtccatttattcttctgcatatggcaatctgattttccaagtacattttattgaaaagattgttcttttcccggtgtatgtttttgttgacattgtcaaagattaattggctgtaaaatgtggctttatttctaggtgctcagttctgtgtcattgatctatgtgtctatttttatactagtacctttctgtttagttactattgccttgcattataatttgaggttaggtagggatgttttcagctttcttttgcttaggattgctttcaatatttgggctctttkatttggtaccatgagaattttagaattgtttttcctaattctgtggaaaataacattggtaatttgatagcaatagtattgaatatgtaagttgctttgggcaatatggtcatttaaatgatattaattcttttgatccgtgagcatgggatgtttttc

SEQ ID NO: 98507 - DNA, 451 bp, Homo sapiens
gtccagtccatttattcttctgcatatggcaatctgattttccaagtacattttattgaaaagattgttcttttcccggtgtatgtttttgttgacattgtcaaagattaattggctgtaaaatgtggctttatttctaggtgctcagttctgtgtcattgatctatgtgtctatttttatactagtacctttctgtttagttactattgccttgcattataatttgaggttaggtagggatgttttcagctttcttttgcttaggattgctttcaatatttgggctcttttatttggtaccatgagaattttagaattgtttttcctaattctgtggaaaataacattggtaatttgatagcaatagtattgaatmtgtaagttgctttgggcaatatggtcatttaaatgatattaattcttttgatccgtgagcatgggatgtttttc

SEQ ID NO: 98508 - DNA, 451 bp, Homo sapiens
gtccagtccatttattcttctgcatatggcaatctgattttccaagtacattttattgaaaagattgttcttttcccggtgtatgtttttgttgacattgtcaaagattaattggctgtaaaatgtggctttatttctaggtgctcagttctgtgtcattgatctatgtgtctatttttatactagtacctttctgtttagttactattgccttgcattataatttgaggttaggtagggatgttttcagctttcttttgcttaggattgctttcaatatttgggctcttttatttggtaccatgagaattttagaattgtttttcctaattctgtggaaaataacattggtaatttgatagcaatagtattgaatatstaagttgctttgggcaatatggtcatttaaatgatattaattcttttgatccgtgagcatgggatgtttttc

SEQ ID NO: 98509 - DNA, 577 bp, Homo sapiens
tacctgtttgttactaatttgaagaagaaggggggttattataaaagtttgcttcttaattggtgacatttatttctgtccctaaattcaccaatctatcatctatctgtctatcaccaatctatctatcatctatctatctatctatctatctgtctatcagtcgtctatctaactgtctacggagtgtgatttcctacttttttgttgtttctctgatgtaacattgaccaatacaagtttgttatactattccactgtaagtatcaccaaaatattcataaatgattcataaggcctcataactttcttgtgaaggagtgtgtattaactatacatttatgttgctttcacatggtgargtcttgatatccatggaaagacagcccctcctaggggtaggcaattcctagagatatgaaagggctcacatggaagagtgtcttttatttaatccagagggtataccactaaacccttcctctgtcagattctcacactcagagccactatttccctgtccaaatcaccccaggtctagcatcatagtccatttgtgctgctacaacaaaacctg

SEQ ID NO: 98510 - DNA, 591 bp, Homo sapiens
ctagacaaaaatatgaaattctattttacttacctggtaggtatttatatataacctaaactgcaaaaaaggactttatctatgtatatgctaccaacctgagcatctgaaaattgggatcagtaattattcttattttcaatgctgtttgcatgtttgtttttatatgctaattctagcttgactgtcatcttagtccactcattgttgctgtaacagaatacctgagactggtgagactgggtcatttataatgaacagaaatttattagctcacagtttaggaggctgggaagcccaagattgagaggccagcagcttgcaagtgccttcttgcagtgtcagctaatggtagaaggcagaagggcaagagagggtgtgagagagagagagagamaaaagggggctaaactcattcatttgtaaggaactcattcccacaatatagacccactcctgtgtaacaacattcattcattcatggggacagaaccctcatggtctaatctcctctcagtaagccccacctcccaaggctgttgcattggagatacatgtttctaacacatgctttggaggacacactcaaac

SEQ ID NO: 98511 - DNA, 596 bp, Homo sapiens
gaacagagttttcatataccttgtgaaataaaatgttcatacaattatataatcttctgttcatcatgtgaatagggtaaagaatgtaggtataaattccaattctacaactttctaatgaaataacatgggcaggtcctttctataakatttgtttttttatctgtaaacaagagaatgcttctactaagaagaaaaaaagaataaaagattgaacatgcagagaatatatgcacttgggcaagttacgagcctcgttgtgatttggctttctgacctgtgaaacatgggtagtagtatctactttgtagagttgtcatgagggctaaattaattaattatgtgaagcactggtagctgcacctggcatggagtaaggtgtttattatgggccaagcactgtgccagccacttcacatatagcatgtcatctatttgtctcccacacaccaggtactgtcagtctagaaggaagaagctgaggcaaaattaatataagcagagaatgtatctgaacccaacttgaggattgcaaaccagaaggaagaatagattcaagttgccctgaatatttactctgattagcaacagctacc

SEQ ID NO: 98512 - DNA, 569 bp, Homo sapiens
tttgtcatcctaatcaccatcagcaagacacgctcattatgtgatctgtttttaaaatatgatgtataaaattgaacatcatttaagcaatatttaaaacacaaggagaattaagagagaactactttgtttttagagtattgacagctattctagtagctttaagtgatagttttcacataacccataatttgtgcaatcagacacatttgtgttttatcaagggtttccatagttaggcaggatgtgaaacacatttagaaggtggatttgttactcaacggattttatagttcctttgcaaccattaatccctactgtgtgattatgtgttttggcaaactatgatgacaatgaatagggcatatacattatcaaggtcttcgtgaaactacttaagaaactaattatgtgtatataacaatagtggmaccaacacaacaaaagatgatctggacatatatttgtcctttaaataacagatcacagtgttttaatttaattaagctccaaaacaaagtttagatttggaacaatgattcttaaaagagagtggaaaaaagagctgt

SEQ ID NO: 98513 - DNA, 569 bp, Homo sapiens
tttgtcatcctaatcaccatcagcaagacacgctcattatgtgatctgtttttaaaatatgatgtataaaattgaacatcatttaagcaatatttaaaacacaaggagaattaagagagaactactttgtttttagagtattgacagctattctagtagctttaagtgatagttttcacataacccataatttgtgcaatcagacacatttgtgttttatcaagggtttccatagttaggcaggatgtgaaacacatttagaaggtggatttgttactcaacggattttatagttcctttgcaaccattaatccctactgtgtgattatgtgttttggcaaactatgatgacaatgaatagggcatatacattatcaaggtcttcgtgaaactacttaagaaactaattatgtgtatataacaatagtggaaccaacacaacaaaagatgatctggacatatatttgtcctttaartaacagatcacagtgttttaatttaattaagctccaaaacaaagtttagatttggaacaatgattcttaaaagagagtggaaaaaagagctgt

SEQ ID NO: 98514 - DNA, 521 bp, Homo sapiens
atgaaaacaaaatgtgctcactggaggcctactgtgttcttggcaacatctgaaggcatcaggaattgaaaaaaaaatgtggttgcttttatggattatattgtatcataagagagaacatccratatgacaggaagatgagtaaaacaattggaatttttgataaattctacgacagaatccaattaaagtatgagacaaaattatagggatgagagacactggaacagatgtggaacggagtaaaccaggtattttggatcctttccttgtttccgcaggaataaaagcctccaactctaagagggttactcagtcattcattggccaatctaaccactgtcatatagtgtaggtggacagtgtggcatctcctcagctattgactggaccttagggaaggtccgggacagttttcacctgcagcctctgaaatggatgagctcagttgccatgggagtcaatagagaattgattgctaaagaacacaagggttaagtagtgctacacaatgtgggtgg

SEQ ID NO: 98515 - DNA, 521 bp, Homo sapiens
atgaaaacaaaatgtgctcactggaggcctactgtgttcttggcaacatctgaaggcatcaggaattgaaaaaaaaatgtggttgcttttatggattatattgtatcataagagagaacatccgatatgacaggaagatgagtaaaacaattggaatttttgataaattctacgacagaatccaattaaagtatgagacaaaattatagggatgagagacactggaacagatgtggaayggagtaaaccaggtattttggatcctttccttgtttccgcaggaataaaagcctccaactctaagagggttactcagtcattcattggccaatctaaccactgtcatatagtgtaggtggacagtgtggcatctcctcagctattgactggaccttagggaaggtccgggacagttttcacctgcagcctctgaaatggatgagctcagttgccatgggagtcaatagagaattgattgctaaagaacacaagggttaagtagtgctacacaatgtgggtgg

SEQ ID NO: 98516 - DNA, 521 bp, Homo sapiens
atgaaaacaaaatgtgctcactggaggcctactgtgttcttggcaacatctgaaggcatcaggaattgaaaaaaaaatgtggttgcttttatggattatattgtatcataagagagaacatccgatatgacaggaagatgagtaaaacaattggaatttttgataaattctacgacagaatccaattaaagtatgagacaaaattatagggatgagagacactggaacagatgtggaacggagtaaaccaggtattttggatcctttccttgtttccgcaggaataaaagcctccaactctaagagggttactcagtmattcattggccaatctaaccactgtcatatagtgtaggtggacagtgtggcatctcctcagctattgactggaccttagggaaggtccgggacagttttcacctgcagcctctgaaatggatgagctcagttgccatgggagtcaatagagaattgattgctaaagaacacaagggttaagtagtgctacacaatgtgggtgg

SEQ ID NO: 98517 - DNA, 427 bp, Homo sapiens
tcagagcatcagatgcatttcagtgacaatccctgtaaccttgaaagagtcagcaaatccctgtgtccctcacaccagattgcagcagggccttgagtcaataagctatgaagttagcgatgcgtcctcytgggaaggtggcgagcgaggcatccatcatgttccctctttcagcctgttccaaggagagagcctctgagagccgtggaaaccatttcccgggcccattaggctctggccctgtggtgcagtagcagctgtcacctcgtgccagccaaggctcaccaagtggaggccgagggaaaggtgggtgcacaaatacctgccaggaagagaagcaggactctgcctgggaatgcaaggggacaaagcagcttctctgctctgcgatataaaagagcttaaactcagcttctcagggtttctg

SEQ ID NO: 98518 - DNA, 530 bp, Homo sapiens
actcaataaatgtccagcacaatgagtaaaagagccatcccaggtcatattactatatatttcagaacaatgattagaaaaaggtctgaaaaacttccagaggagagagacaggtcaaaaaccctggaaatgaaagacatctgatttcttaaaagtaacactggaatctakgagataaagtaagaacagtttcaaaattcttatcttcaacctaaacttccagacttaaataaattgcctttcaggactgaggatggaataaaaaaacgttgaggtgtaaaaaatgtcaagaatttactttttgtgcatcttttctcaggaagctgctggaagatgtatttcaaccaaacaaagggtggaaaatctaagaaagagatagatgtgggctctagggaacagagaatacaacatagaagagatggaaatggaattgttaatgagagcaaagcaaatttcaggtcaacagccgtgcagctgcccagaaagcagccagtccagattgaagtcaatgggagaaatggaaagaaaat

SEQ ID NO: 98519 - DNA, 530 bp, Homo sapiens
actcaataaatgtccagcacaatgagtaaaagagccatcccaggtcatattactatatatttcagaacaatgattagaaaaaggtctgaaaaacttccagaggagagagacaggtcaaaaaccctggaaatgaaagacatctgatttcttaaaagtaacactggaatctaggagataaagtaagaacagtttcaaaattcttatcttcaacctaaacttccagacttaaataaattgcctttcaggactgaggatggaataaaaaaacgttgaggtgtaaaaaatgtcaagaatttactttttgtgcatcttttctcaggaagctgctggaagatgtatttcaaccaaacaaagggtggaaaatctaakaaagagatagatgtgggctctagggaacagagaatacaacatagaagagatggaaatggaattgttaatgagagcaaagcaaatttcaggtcaacagccgtgcagctgcccagaaagcagccagtccagattgaagtcaatgggagaaatggaaagaaaat

SEQ ID NO: 98520 - DNA, 546 bp, Homo sapiens
gatttggtggtatctttgaagcttctcttcttggcttgcatgtgactttctgctggcccatgacctctcatggcttttgttctatgtacccacatctctagtgtctcttctycttcttatagagacaacagttaaattgaattagggccttaccgttataaccacacttaaccttaattatctctttaaaggtcctatctccaaaaatagtcacattggggggtagggattcaacatatgaattaggagtgacacaatttagttcatgataatgtctgtgctagccatagtacagggaaatatgtctcctttgtagttcccaactccaacacctcaacatagcttcactgatgaaggatcggaaatgtcttatctctacggtggctattaatgcatattgcatggaaggggaggtacagtaatggtgcaactggtcccttgtatgtgcttaactggaaaaacctcttttccaattagggtttcaacagatactttcattctgaattataaataattctactattatactactttacattattattc

SEQ ID NO: 98521 - DNA, 564 bp, Homo sapiens
tttcaacagcagttgtcttcatgcttaaaaaataatgaaacttacattttaaggcagcagagatttaactttttttcacgttgaatttccagtccctactatrgtacctgtaaaagtaataaatgccaaataaataaataaatgaacacacacacatatacgtatatacacaaacacatttcaagtattatttatgtaatcaactatgataaacaaaatgtataatatttatatataaatataagatgttcacatttcattcactaaatatgtaaaatgtgaatgttttgatagcaatcggaacttacttctctttgcctaatttctattatttatagtttttacattttcttttaaattgtgtacttcgaacattgtagtttgcttgtaacagaactacccttattcccaagttagaaacttaattcttaattctgagtttgactgctcttagaccttcatcctttgacaaaacgtttggttgagaataaaatgtattttgtactgacatataaatactgttcattatgattatagttaaataaaattaaatataactgcaac

SEQ ID NO: 98522 - DNA, 564 bp, Homo sapiens
tttcaacagcagttgtcttcatgcttaaaaaataatgaaacttacattttaaggcagcagagatttaactttttttcacgttgaatttccagtccctactatagtacctgtaaaagtaataaatgccaaataaataaataaatgaacacacacacatatacgtatatacacaaacacatttcaagtattatttatgtaatcaactatgataaacaaaatgtataatatttatatataaatataagatgttcacatttcrttcactaaatatgtaaaatgtgaatgttttgatagcaatcggaacttacttctctttgcctaatttctattatttatagtttttacattttcttttaaattgtgtacttcgaacattgtagtttgcttgtaacagaactacccttattcccaagttagaaacttaattcttaattctgagtttgactgctcttagaccttcatcctttgacaaaacgtttggttgagaataaaatgtattttgtactgacatataaatactgttcattatgattatagttaaataaaattaaatataactgcaac

SEQ ID NO: 98523 - DNA, 571 bp, Homo sapiens
gagtgagcaatacccatgacacagccctcaggagtcctgagaacatgcgcccaagggggtcaggctacaggttggttttatgtaatttaggaagatataagctatcagtcaatacatgttaagatgtgtattggttcagtctggaaaggtggaacaactggaagtggtgggtaggagggtgctttcgggtcatrggtgggttcaaagattttgcgattggcatttggttattatctaaagacttggaaccaataaaaatgaacgtccaggttgaggtaagggattgtggagaccaggcttttatcattcaggtgaagactccaggtagcaaggcttcagggagaaaagaatgtaaatgtttcttatcagacttaattaatctgttccatcagtaattctgaaagggaggaggtataatcaggcatgtccaacaccaccttcccatcaaggcctgaactcgtttttcaggttaactttggaatgcccttggttgagataagggatccattcagatggttgggggacctggaattttatttttcatttacaataagcaggatcaagaagaggt

SEQ ID NO: 98524 - DNA, 548 bp, Homo sapiens
aattttgtgataatctctattgggcatggacttccttgaatagaatccaggatggagactagtgggggagtgaacaggaactgctgcagatacaagtgcagaagctgccaccattgtgagcagatggggaggggcaaggcctgaaagccctgcttgctttctcagcagggaatcttatggcctggggcaagtctgagttctctgtgcaggctgcccrgatataaactcagtgccattagcggggcaccgtgggagtgagattggcctcaccaactgcataggagctgggtaaggccttttgctaccagctatcccctacttccctggtgaacaatactgctaagtagaggcagccatactttcccctagaacataactccattggcttcagaaccacccctccttcccccacagtggccatggcaagccctgtccaaaaagagtgagctcaggcctgcctagccctcccccaacctgatggtatttctctacgcactctggtagccaaacacaaaagacataaaccctagggagctttgtgcccccct

SEQ ID NO: 98525 - DNA, 608 bp, Homo sapiens
aaaccagcccaattccaaatgggttctaagcattctcacgtctatgttgtcttaatttacatgctggcagaaaatagcatgtttatatgtccttctaccactaaatatgaattccaaagataaaaagaatgtctcgaacattttaatcaccaatatctagcacctaaaagatgttcaatattactaaatgaatccatgttgttgtttttccaaattaaaagatatcttaaggggccatatcttagtctttattgtataatccagagttgcagatttctaaatctacaattgttttggagttagcaatgcctgagaaattaggtaccaagttgctaacttctgttcctctgtcatactggagggcattatggatagcaatagaagtagcaatgtgcttccctggaaaaatatctaacataaggatattttcctctatttaccactgatatcactcyaccaagagaacaaagacattaagctcgatgaaggccaggagggagctcaattttggacccaggctattctagggacaagcaggcgttggtagtgttactttaagaacttcagacaactgaaggcagcatgagggcatgggacccgtgggtggg

SEQ ID NO: 98526 - DNA, 608 bp, Homo sapiens
aaaccagcccaattccaaatgggttctaagcattctcacgtctatgttgtcttaatttacatgctggcagaaaatagcatgtttatatgtccttctaccactaaatatgaattccaaagataaaaagaatgtctcgaacattttaatcaccaatatctagcacctaaaagatgttcaatattactaaatgaatccatgttgttgtttttccaaattaaaagatatcttaaggggccatatcttagtctttattgtataatccagagttgcagatttctaaatctacaattgttttggagttagcaatgcctgagaaattaggtaccaagttgctaacttctgttcctctgtcatactggagggcattatggatagcaatagaagtagcaatgtgcttccctggaaaaatatctaacataaggatattttcctctatttaccactgatatcactctaccaagagaacaaagacattaagctcratgaaggccaggagggagctcaattttggacccaggctattctagggacaagcaggcgttggtagtgttactttaagaacttcagacaactgaaggcagcatgagggcatgggacccgtgggtggg

SEQ ID NO: 98527 - DNA, 587 bp, Homo sapiens
aatgaagctttgccttggatgactgggtgagagagggaagaaattgatggaatgtgaggctttaggtatagaaaagcctaacattacaggaggcagagcccaagagacgagagagggattctcacacacagggagcttcgaaggagcagccccacacactcccccttgacttctatgggggtggcgtctgtctgcacctgtgtacttatgtgttaggtggggagtagatgttcaggagggcagaagaagagggtgaggggggmagaggaggcaggagatgataagaagaaacaaggatatgaattcagggaagaaaactctggtggagtcccatgttcgttgaatgggtggccctttctagggtactctgatctctaaagagtctcacgccatgactatattcccatcagggaacaccctcataactctgccagaagtgggcccatattttatatttgaatacagtatttatattttacgtaaaaatatatcatttaatattttatgcttctttaggtgccatgtcttttgagatcttttgtctaccagaaagggctagagaaacagttgtcacataaatatggaaa

SEQ ID NO: 98528 - DNA, 631 bp, Homo sapiens
ttcatgtgtgatctagttgtttaaaaaaagactctggaagctccctgcttcactcttttgttccctctctcrtcatgtgacatgtgaccatgaagttcccgtttcaccttccaccatgaataaaagctttctgagggtttcatcagaagctgagcaaatgttggtgccatgcttgtatagcctacagaaccataagtcaaataaatctcttttcttaataggttacccaatctcaggtatttctttataacaacacaaaatgaagtatcacagcatgtttaccacaagtaataacagaactacaagaaggcatgacctgctgcacaagtgcttttaaagcccctacttgcatcatgactatttctattcttgtggctaaaacaagacacatggctaagcctacagtcaaggggcagagaagtacactctccccttagtaaaagaatgggaagttatgtaacaaagggcatgaatacaggtaggcaagaagacttgggttaatataataatgcaacataccagaatagtattggcagacattgtctcagcatatatttatattcagctgtaattttaaagacatctcttctttatcatgaagacatagacatgacaaatatatttatcaaaa

SEQ ID NO: 98529 - DNA, 606 bp, Homo sapiens
gaaagcaagcttcagataattaaaaaaaaaaacaggaggacaccaacataaaaatttagtcatgagtagtaaattaatgttgtttatttctggtaaactgaaataaaatgaacatcataatggaaaaggtatagtatgtaaattgtgtatgtctcataatgaagatagagttgaactacaaaactatgggtataaaagatttttacttcacattaaatcttggaggaaaaggagaaaaggaggaaaaagagttgactggtaaagttcattatagytaatagtagggaaccaatatactgtatccaaatttgggggacagagatgagaacattacatacaaaagtaagtataagaatttgaccatttgaatgaaagtataaaacttaaataataaaaagtgatagaaaaaaataaaatagaaatgaaacgaccacaagagaactgaagccaaacgtattgataatatttaaaaagttagagaggctttctcaccctatgcagaacactagagacaaacctaaaacaatgaaatccagaaacgctaaacataaaaacgtgacaatgatgaactatggaaaagtaggaggagagtgaagaataaaatat

SEQ ID NO: 98530 - DNA, 606 bp, Homo sapiens
gaaagcaagcttcagataattaaaaaaaaaaacaggaggacaccaacataaaaatttagtcatgagtagtaaattaatgttgtttatttctggtaaactgaaataaaatgaacatcataatggaaaaggtatagtatgtaaattgtgtatgtctcataatgaagatagagttgaactacaaaactatgggtataaaagatttttacttcacattaaatcttggaggaaaaggagaaaaggaggaaaaagagttgactggtaaagttcattatagttaatagtagggaaccaatatactgtatccaaatttgggggacagagatgagaacattacatacaaaagtaagtataagaatttgaccatttgaatgaaagtataaaacttaaataataaaaagtgatagaaaaaaataaaatagaaatgaaacgaccacaagagaactgaagccaaacgtattgataatatttaaaaagttagagaggctttctcaccctatgcagaacactmgagacaaacctaaaacaatgaaatccagaaacgctaaacataaaaacgtgacaatgatgaactatggaaaagtaggaggagagtgaagaataaaatat

SEQ ID NO: 98531 - DNA, 531 bp, Homo sapiens
tctaaataatttctcaaaaatcacatttaattagtatgagcaatcctggagatgaactagggtctgaagaactctagacctacaatcttaaaatatcctgcctctaatatttcaaccaaatgacagattakgtatctatataaaatctacataaagtttatcacatgctgttaaatgacaataaaataatattttacataaatcaatataatatataatgtatttatttaacacattatccatatatttgtgtaaatacattacaggcacctttactttgtttataggcattattgcagatggatttaaaactttcaatctccttgtagatttttaggtactcagattatgctaaatgcctacttctctcttataaattcaaaccacaaaataaaagcaaaatacctcaactatttataccagtgatgctaaaatatacctgaaagaaatcataatttattatataaacacatttgataagtctgatataacattatacatacacacacttttttttttttgtaacatgac

SEQ ID NO: 98532 - DNA, 632 bp, Homo sapiens
tacaaaagcaaaatacaacaaatcaatttgtgtattaatttgattgaatatttcaggttagtttaaaatgcaacaatttgactttacatccccagtggactactttcttttatcctctaatagaaaaaaagaaagctaccaaagaaaaacaaaaacttttcctgtagttatatgtttggtaatgttattggtactttgaggctattgagtttgcactgagggataaatgcaaaagaaaaaaattaaactaatatgtcatgagaactggaaattttactatgagagaaaaaaagacatagaagtagaaaagtgcagttaagtaaaactctgaaattaacatggacatatcagaatagtctcaaatgtaacttaagaaaaaaaaatgctttccctagctctgtgcaytgaaaaggctaagaaacaagaatgaatcttatagtaaaacagtaagcttacctgtgcccaggtaatcattatctttccttttttgtttgttcgtttgtttgttttttgctgtgtaacaaattgctacaaatgacaccacttaaactatcacaaatttactatccccaaatttccatgggcccaaagtctggcatattgtatttagattacctgctcttttcataaag

SEQ ID NO: 98533 - DNA, 638 bp, Homo sapiens
gtgtttcaattgcttatgctgtctttcttagggtgggcagtgcctatgtaggtattcattctgtattatttaaaatgtctacatgtgcaccctttattttaggatatgtttttcaggaataaaataataatatacattctctggcctagtaacagagaatcctactggataaatgaatatggaaaatagttttcctgggagcttatagcagggcttctcagtgttatttgctatttaactccrtattgaaaaatgttggcagggcacagtggctcacatctgtaatcccaacactttgggaggctgaggcgggcagatcacttgaggtcagaagttcaagaccagcctggccaacatggcaaaaccctgtctctactaaaagtacaagaattagccagcatgatggtgcatgcctgtaatcccagctacttgggaggctgaggcaggagaattgcttgaaccgcgaggcagaggttgcagttagctgagatcgcaccactgcactccagcctgggtgacagagcaagactctgtttcaaaaaagaaaaaagaaaaagaataagaaaaaatatctaggaagaagaactttccaaaaacagctttatctagtgtggggacacaattttgtagtcccaagt

SEQ ID NO: 98534 - DNA, 638 bp, Homo sapiens
gtgtttcaattgcttatgctgtctttcttagggtgggcagtgcctatgtaggtattcattctgtattatttaaaatgtctacatgtgcaccctttattttaggatatgtttttcaggaataaaataataatatacattctctggcctagtaacagagaatcctactggataaatgaatatggaaaatagttttcctgggagcttatagcagggcttctcagtgttatttgctatttaactccgtattgaaaaatgttggcagggcacagtggctcacatctgtaatcccaacactttgggaggctgaggcgggcagatcacttgaggtcagaagttcaagaccagcctggccaacatggcaaaaccctgtctctactaaaagtacaagaattagccagcatgatggtgcatgcctgtaatcccagctacttgggaggctgaggcaggagaattgcttgaaccgsgaggcagaggttgcagttagctgagatcgcaccactgcactccagcctgggtgacagagcaagactctgtttcaaaaaagaaaaaagaaaaagaataagaaaaaatatctaggaagaagaactttccaaaaacagctttatctagtgtggggacacaattttgtagtcccaagt

SEQ ID NO: 98535 - DNA, 576 bp, Homo sapiens
tccccccttgaactgcactatggaatggtgactaagttatttcccacattttgaattcacccacccacatacaaacaccaaatacttgcttgctttccccaagtcatttcctcatttttaattttatttttttcctaaagtctttttgccccagctgaaattcattactcaaccccgtcttattgagtactttagtttggtgtttccaaggtttatttatttggtgtttgtttttttttttttcttgaaagagtctcactctgtcacccagggtgagtacagtggtgcaatctcggctcactgcaagcaattttcctgcttcagccttctgagtagctgggattacaggtgcatgccaccacgcctggctaattttggtatttttagtaaagatggggttttgccatgttggccaggctggtctcgaactcctgacctcaggtgatctgcccrcctctgcctcccaaagtgctgggattatggacatgaaccgctgcactcggcctcatcctttttttaaattagcttttctgtgtctttagacttaaggcttgttgcttgtatgcagcatatagt

SEQ ID NO: 98536 - DNA, 638 bp, Homo sapiens
gggatgatttgaagtaaggcataatcatgtatgaacatattcctggagtctgacatgagcatcatgaacttgctaattttattccttgatggtttatataagtgtctgacaaatttaataggaagcagagctttattttttttcattatcagctagagaacaaaaacattggcatctgaattgaatactggaatatmgtgtgagtgtgtgtgtgtgtgtgtgtgtgttttactaagactcatgccactcaaagtgtgacccatggactggactgcttcatgaactgtgtggtgctgtcctacaatatgctaagaatagaaatagagtgttctgaaattttagagcaatcggaaagagtagctttaggtctgttggacctaataatacaaatttgggcttgcatatttgtgtttgttttgtttttcatctcatttgtctaagaattcacttttatatagtctataaaagtatcagcctgtgatggatttggagttaaaaagacaaacaaactaatgccacagacggtttagaagcattgatgaggaacctgcatcatgatgacagaaagtgatataacttctgttattctataggcgtgaattttgacatggagtactgtggcttgtattgcattgaga

SEQ ID NO: 98537 - DNA, 603 bp, Homo sapiens
gtgtagcagtgtggaccaacagaggtcactctcatctccatcttggttttgatgggttttagctggcttcttcactgcaacctgttttatcagcaaggtctgtatgacctgcatcttgggctggcctcctgcctcattctgtgacttagaatgccttaacctcctgggaatgcagcctaataggtctcagcctcattttacctgtcccctattcaagacaaagttgctctggttcaaatgtctctgacatttttcccctccgttttataagaaaactcttaatgctaagggttgtagagggatgaagatccatyttctataatttgttcaggctaattaggggggataacattcctgcctaactaatgggtctcttgcattcaagatagagaagagctcagtcagaaaacatcggtatggcatgggccatttataactcttaagttccaacaaaaggatatctagaagataaataagtgttcaatttaagaaaacatttggtaagcttaccctgtatttctacacaaagagtacaagagcaaaatattccacaacagtaaagtaaaataagtaaaactatcccaagtaaactaaatgagaaga

SEQ ID NO: 98538 - DNA, 657 bp, Homo sapiens
ggagcccatctagcagtttaggacataagtcaagaaccagttctgaacaggacaatgtccattgcaatgcaaattcatacacacatccacactcacccagatgaggacaatgtagacagccaattcacctaatrtgtacatctgtgggatgtgggaggaaaccggagtagtatgtaaaaacccactcagacatggggagaatgtgcaaactccacaaacaatggttccagctgagagttagttttatttctcaacaaaggaaaacaacattgaacaaaacactactcaaggacttactatgctatgttgtaactgacttgaatgataattttttcaagtgattgccaaatgtgttcaagtgtgaggatccttttaggatcaaaacaaaaatcttacagatctgcagattctgctagtttcaagtgattgagaaattacattataacaaatagccactataaattcagatacgtttttgaaaaattttattacattaaatacatttcaatgtgttatgagcagtcattagacatttataaataaagattggtgccaatttggaaatgagaactttaaaaaaaaactcagcaaccctcaggaacatatggtcaagaggttagtaatcattcgtttgtaatataatctcactgtacagat

SEQ ID NO: 98539 - DNA, 554 bp, Homo sapiens
atatagtccaggaaaacctttcccagaagtccccagctgagttgctatcacatcttgtttggctgcatctccaaacttgagttaaaaaatagaaaaaggaaaatatcccacatattttacataggataattatgattctcctccttagcctggagagacagattcagccttaacccatacctgtagatgaccaatatttgaatgagctgtgattacacgggtaagaaagagcaggggsctttgagaggtgagtgaagaaagatgtctgtgagatgcattgttttccatgttaactaaattacactcaaatgtaattctgtcttagacggtatttgagtccatttgtttccctctgtttcccagctagtcaaaggaagcgtttcattccacctatctttggtcagaggagagggaggagtgtagaccagcattctacccactgacgacaggtcatctgtctctattattgaagaaccattgcagagcctatgctcaccttctgcgaggtcagtaaaaccagtatatggaagagtgtttggacttgcttaacaaac

SEQ ID NO: 98540 - DNA, 627 bp, Homo sapiens
ccagcactgtgaccggctgaggcaggtggctcacttgagctcaggagttcaagaccagcctgagcaacatggtgaaacctcatctctactaaaaatacaaaaaattagccgggcgtggtgatgtgcaccggtagtcccagctactcaggaggttgaggtgggaggattacttgagcctgggaggtgaaggttacagtaagccgagattgcaccactgtactccagcctaggcgacagagtgagaccttgtctcaaaaaaaaaaaaaaagtaactcctaatccattcaagttttatcatgaaattgcagcaaattcgccacatcttcaggctccacttctacttctaattctcttgctattcccgctacatatgctgtttcttcctccactgaagtcttaacccctcaaagtcattcatgaggattggaatcaacttctaaattcctgttaatgttgatattttgacctcctctcctgaatcatgartgttcttagtggcatctagaatggtgaaagctttccagaaggttttcaatggactttgcccagatctattaggagaattactatctatggcagctatagcattatggcatttatttcttaaataagacttgacagtctgaa

SEQ ID NO: 98541 - DNA, 418 bp, Homo sapiens
attcaagtatctgacaacatgcttctgcaactgcactcaaatagcaaacaacctgaatctaaaagtgcattttttgaaagataaatgttaatcatttctggcctggtgtggtggttcatgyctacaatcccagcactttgggagtcccaggagggcggatcacttgaggccaggagttcaagaccagcctggctaaaagtacaaaaatcagccgggtgtggcggcgcatgcctatagtcccagctacatgggaggctgaggcatgagaactgcttggacctaggaggcagaagttgcagtgagtcgatatcacgccactgcactgcagcctgggtgatagagcaagatcctctctcaaaaaaaaaaaaaaaattctaaaatgttttctgcacattcacattaaacaatacaggctaag

SEQ ID NO: 98542 - DNA, 588 bp, Homo sapiens
acatttggtgggtgcgttggcatcttatagaagctgtggtttatttagataggaccaactgatgtattctctgcaaagtctatggagaggtgtcaggcagtaggacatttggtgggtgcgatttagcccaagtgatggtgccgtcttctgcctgtctagggtaaagtccaagcagctcagaggaaactgctttatggaacttctcagagcccaaccatgacaacttcaaacacgaaaatcattacttagtagggttgcacaaactgcagaacttgccacrtttcatactcctaaaatggtgccttttgggggccaaattatctcctggccctggtttatcccacccccaaaccaccagtctaaccttccttgtatccaattctaacaagtctatatacaaagaacgtggctcttttccactgctgatgagaggggaaatccctctctcaagatgagtgtcaatgtgacattaagtgagaaaagcaggttgcagttttgcttgcaaaataagtaattgctccatcactatttataaaaaaaagtagaaaaaaataccaaaatgctaatagtagttatctctagagagat

SEQ ID NO: 98543 - DNA, 550 bp, Homo sapiens
ctttaggaaaaaattaattgaaaaagtaactttgagtaagatcatatgtgtttcaaaatgccattgctcaagcacaactacagtagaggatataatgaagccatcagcacctctacccagagtcacygtgctggtgacagttccaagtgctgaagacataaacgtgctatgttagcaatttcaatcctcaagggccattgctatggtgatgcgagttgcccaaaacattggacaactcacattccagaacaaaatataatacaatcattttttcaatacacacagcacttacattactggaaaagtcagtgtcgaataaaaccatgcaaaaatacttcatattggttagtgtaatgaagttaggttccaagttgagtttattgtaaccatatttttaatctatatatactattggtggagcctttgaaagatgcacagaatggggatcaattcattggtgtgcaacacagctctctatatagctggatgtctaatattcttggccctggttcatttttattgtgaagtccaaaaacatgccccaacaaaa

SEQ ID NO: 98544 - DNA, 572 bp, Homo sapiens
tgaactacttttgtatgcagttgatttatgggatatctccttgcacctcacattgcaaccacaatgatgcttttaacatccacactgacatgcaaatgttagtgcttaaaactgttcatgacatcctactggtgttacaatcaagatcacagtccagaacatcagctacaaagctctacattatctgccctgccttctcaccactcacctatagcaccactcttccaactgctctctcttctaccatgtgagcatatcatgccccttactacctcagggtgtcagcaaaagctgtttcctctgcagtatttttcttcaactaaataatccctatcctttaccagtcagcttaggagtcatttacataaagaagctttccttggagtcaggtctagatcttcctcgctatacttactgcagcctaaatttcyctttcagaaattattataatcataattaaatatttaattgagtaaattattcaaatggttggctcctcccttagactgtaagctcaacagggacaaggctagcatacagaataaactaataagtatttaaaaatacatttt

SEQ ID NO: 98545 - DNA, 572 bp, Homo sapiens
tgaactacttttgtatgcagttgatttatgggatatctccttgcacctcacattgcaaccacaatgatgcttttaacatccacactgacatgcaaatgttagtgcttaaaactgttcatgacatcctactggtgttacaatcaagatcacagtccagaacatcagctacaaagctctacattatctgccctgccttctcaccactcacctatagcaccactcttccaactgctctctcttctaccatgtgagcatatcatgccccttactacctcagggtgtcagcaaaagctgtttcctctgcagtatttttcttcaactaaataatccctatcctttaccagtcagcttaggagtcatttacataaagaagctttccttggagtcaggtctagatcttcctcgctatacttactgcagcctaaatttctctttcagaaattattataatcataattaaatayttaattgagtaaattattcaaatggttggctcctcccttagactgtaagctcaacagggacaaggctagcatacagaataaactaataagtatttaaaaatacatttt

SEQ ID NO: 98546 - DNA, 575 bp, Homo sapiens
caagaatagagtcaattctcctgtcacatagcttaatgttctgtttagtgcactcattcactgctctcagggtgacttatacatgcttgaccctgtacaaaggggaataaaacattaggtctgtttataagctctctccattttcttgtgagcagtgcactttctccagcagatgttttctccagaacagtagcaccactcaccatggtaatctgatctaggtcttattcagattccattagggcccttctagtcctgtagttttatcactagaagcaacagacttgtcttctgtattactgtgtaagaaggtaaacaaacataggctattatgcgttcatttatgcatagacttatgagctaattacacatttattgaagacttacaggcattgttttagatacattgttcgggtatataaagagaaaactgagactggcttcactagggttgcagcagcattgttacactgccrtgtgttaaatgctacgtgggaaggggtacaagggtgtttatcaggtgtcacaggatcagagaaagttgccggaagtgctggatgagaaaacaagttatc

SEQ ID NO: 98547 - DNA, 575 bp, Homo sapiens
caagaatagagtcaattctcctgtcacatagcttaatgttctgtttagtgcactcattcactgctctcagggtgacttatacatgcttgaccctgtacaaaggggaataaaacattaggtctgtttataagctctctccattttcttgtgagcagtgcactttctccagcagatgttttctccagaacagtagcaccactcaccatggtaatctgatctaggtcttattcagattccattagggcccttctagtcctgtagttttatcactagaagcaacagacttgtcttctgtattactgtgtaagaaggtaaacaaacataggctattatgcgttcatttatgcatagacttatgagctaattacacatttattgaagacttacaggcattgttttagatacattgttcgggtatataaagagaaaactgagactggcttcactagggttgcagcagcattgttacactgccatgtgttaaatgctacgtgggaaggggtacaagggtgtttatcaggtgtcacaggatcagagaaagttgccgkaagtgctggatgagaaaacaagttatc

SEQ ID NO: 98548 - DNA, 527 bp, Homo sapiens
gtgtaactgctttataggatctgtgggccttgtattcatgtgcccttttatgatgttgagtatcatcattttgtttgcatatttagaactcctttgagtattccttgtgggatcagtctagtggtgatgaattcctttagtgtttgcttgtatgagaaagactttatttctccttcatttatgcaagttagtttggcaggatgtaacattcttgcctggcagttttttttaagrcaattttttaaaaaaataggcccctaaccttttctgactaatagggtttctgttgagaagtccactgttagtctgatgggattccttttggaggtgatctaatgcttctctctagctgcttttaagattcattctttcgtgttgaccttgagtttgatgactatgtgccttggttgtgttcatcgtgtatagtatcttccaggtgttctttgattttcttgtatctagatgactatatctctaacaaaataagggaaaatgtcctgcattattctctcaaacatgttttccaa

SEQ ID NO: 98549 - DNA, 605 bp, Homo sapiens
attccttgccactgagatattttagttacgaattaattctctaacttcaaaccacgctgaactgcargtaagtagaggaagctaaggtcctcatctgcccagacacactacacagtaatttactctttgtatatccagtatctgaaaatctcttccaaaagattaagcaacaagtaccttttactctcatattccaggagcctatgtagggcttatgttaccatcatgaaaagaacttggttcaagaaaatgggcccagagctccttccataggatcatcctatcaaggtctttttactttttaacaaacttttcctcccacatagcccaagcaacctttacatgtctttagaaaacttgctcataattagtgtgcattcttcttatattttgtgtgtgttggtgtgtggtgtgtgataccattttaactaccttatattttcaattgctcctgaaatagtctgccagattattttactttgacctactactcagggatattcaatagcttctcattgcctcttaaactcacataacaaacatgcatgtcctgcacatgtatccagaacttaaaataaaattaaattaaaattaaaaaagaaaaa

SEQ ID NO: 98550 - DNA, 594 bp, Homo sapiens
tgacagaaacagccaaatcattgcaaatatgcttaatatttggaggacccagtgtagggtaggaaaagagttaacaaacaactgactcatcttataaagtcattcccttgatgtatcactatttgtaccttatgagaaacttctgcagaactatttagcatagaaattagctgatacttagataaatccatgccttttttatgccagtcattttctatcagtattacatctgaaayaggttgtattagtccattctcaagctgctatgaagaaattcccaagactgcgtaatttataaagaaaaaagtttcagttgactcctagttccacatggcttgggaggtctcagaaaacttacaatcatggcagaaggcacctcttcacagggtggcaggagagaaaatgagtgtcgagtgaagggggaagccctttataaaaccatcagatcttgtgagagaactcactcactatcaggagaacaacataggggagaccacctccatgattcaattatctccacctggccctgtccttgacatgggaattattacaattcaaggtgatatttcagtggggacacagagccaaatcata

SEQ ID NO: 98551 - DNA, 594 bp, Homo sapiens
tgacagaaacagccaaatcattgcaaatatgcttaatatttggaggacccagtgtagggtaggaaaagagttaacaaacaactgactcatcttataaagtcattcccttgatgtatcactatttgtaccttatgagaaacttctgcagaactatttagcatagaaattagctgatacttagataaatccatgccttttttatgccagtcattttctatcagtattacatctgaaataggttgtattagtccattctcaagctgctatgaagaaattcccaagactgcgtaatttataaagaaaaaagtttcagttgactcctrgttccacatggcttgggaggtctcagaaaacttacaatcatggcagaaggcacctcttcacagggtggcaggagagaaaatgagtgtcgagtgaagggggaagccctttataaaaccatcagatcttgtgagagaactcactcactatcaggagaacaacataggggagaccacctccatgattcaattatctccacctggccctgtccttgacatgggaattattacaattcaaggtgatatttcagtggggacacagagccaaatcata

SEQ ID NO: 98552 - DNA, 508 bp, Homo sapiens
ggaggattcagctaccttggcctcccaaagtgctgggattacaggggtgagccactgcaccaggcttaacatgtttaggtgttttatatcagaagacatttttctggtcctctatttcaggagttggcaaacttctgtaaagggccagataatattctcagctttgcgggccatgtgatttctgtcccaactactcaactaattcacatttcctgtcatcatcagcatcacttgagttctaatcttttattattatttaagtagtaggaaatcttctagctgtcaagatacaaaagaccttcaatgggagtgtcagactctaaaasataaagctcaaactccctcccatatttgagtatgaatttaaagctaatatttgctgagcgcttactgtggttcaggcactattctaagtgcctttcctatgttaacctctttacatctcacaatggtatgaaagagaatgaccattataatctccatttggaaactgaggctcagttacata

SEQ ID NO: 98553 - DNA, 548 bp, Homo sapiens
tatggaactattggggagtctgagatgggaggattcagctaccttggcctcccaaagtgctgggattacaggggtgagccactgcaccaggcttaacatgtttaggtgttttatatcagaagacatttttctggtcctctatttcaggagttggcaaacttctgtaaagggccagataatattctcagctttgcgggccatgtgatttctgtcccaactactcaactaattcacatttcctgtcatcatcagcatcacttgagttctaatcttttattattatttaagtagtaggaaatcttctagctgtcaagatacaaaagaccttcaatgggagtgtcagactctaaaacataaagctcaaactccctcccatatttgagtatgaatttaaagctaatatttgctgagcgcttactgtggttcaggcactattctaagtgcctttcctatgttaacctytttacatctcacaatggtatgaaagagaatgaccattataatctccatttggaaactgaggctcagttacataaagttacaccacg

SEQ ID NO: 98554 - DNA, 735 bp, Homo sapiens
tgccacatatgttcagatggcatggtatactccggtttccaaattctaaatatctaaaacagaatatatttttatatcttatattacatttttaagatatattatttggaattttgaatatataacaaatacgtctgagtgattacccccaaaacatatttgtatttcatacactgaggtatatttaactcatgctatactcttttttatgctatactcctaataaactaatactaatattaactaatcattttcaaattttctttaatctttctctcctccttattgaaaatataactctacaacaaaatccttcacaatgaatttggcataggacatgtaaaaatcttaycttccaattgcttggccttcaaagaaaatcgaagctatagaattctgctctacagtaatccagatagtatataattcattttgttttagatgctaaaggaatcagtgtagcatttatcaggatcagactcaggaggcagaataaaatgtagcttttatgttcacaaaagatataggtgcatttgctgtagacttcttttaggaaaataaattacatgtcactataagccaattagtaaatctatgtggtaggtaattcaagtttaactcctcctttatcatacaatggtttgatataaaactttcctttaaactacacatgcaaaagttccgcatctccctagcccagcatcatgtaggtacctcagagctcaatctgccaca

SEQ ID NO: 98555 - DNA, 645 bp, Homo sapiens
ttctttgcaaaccaaagaacagatataataaaatatgctgttgctattgcccctgtgctaacaaagtttgataatcttggatataaagaatcttctttgtctgtgagttattacataaaaaagaataaattttcaaatctatatttgagggttcaaaacaactagataaatggccaacagaaaaaagagaacattgaacaaaaatgcaatcataagaaattaaacctaaggccaggcacagtggcttatgcctataatcccaacactttgagaggccgaggtgggaggattacttgaggccaggtgtttttagaccagcctgggcaacacagcaagaccccatctctacaaattatattttttagaccaggtgcggtagtgtgtgcacctgtagtcacagctattacatgggctgaggtaggaggatctcttgagcccaggagtttcagtctgtggtgaactatgattgtgccactgagtttcagtctcctgggtgaaatagtaagatcacatctcttaaaaaatttatattagatcgcgaccatgattctatgagtctaaaaatcagtctctgacatgggatgaaaytatcaatcttcataggtttttcccctgttcagcaaagggatttcattttggagccca

SEQ ID NO: 98556 - DNA, 689 bp, Homo sapiens
tttcttttctttttttttgagacagagttttacttttattacctaggctggagtgcaatggcactatcttgactcactacaacctctgcctcctgggttcaagcaattctcctgcctcagcctcccaagtaactaagattatagatacccatcaccacgactggcttattttttatatttttagtagagacagggttttaccatgttggtcaggctggtctcgaactcccgacctcaggtgatctgcccgcctcggcctcccagagttctgggattacaggcatgagccatcacgcccggcctgttaaaatactttcaagcaaggctccaagtcactgttctgagagaaagacacttttgagctgaggcctcttcccagtgacgggtgcagcacaggtcrataaacttctaccggttttgcgcttgttaacctagcttttgttttcaggagagtgtttcaactaagaacttataagggttaaacaagataaattatatttttgccacatcagtatttaatagaactgtttggtttctaagcctgacatgcttgtgaatgtagataatacgttctgtttctccaagcagaagtctctgccatgcacaaacatgaagtttactggcttctctctggcaacttagaagctaccaatagaaaactggagaattacatcacattgcgtatatga

SEQ ID NO: 98557 - DNA, 489 bp, Homo sapiens
aataaagcaaagaaataaatagtctatgttggcttaaatggagacaatgtgtcatgtcagcctgttgttttagttttattttaacttttctaagaggcaaccaagtcttgtgtctctctctaactcttaaattacaggttctggaaggaataggggctaatgatttaatgttgactcaattttaagcatgataaatgctagcggttggctagatagtaatttgtaaactggatagccatttgaagtgaaataacaggaagctgactggagtcaatgaatattcttccaaaagaagtactacaggtttagtcattgttcacttacatttttattcaaggttatgttgtaacgatgactggatttttctgtcattctggtgtattcatttctcccacctcccaaatatctgactgttgccctttctcarggaatgtcaggttacatataacattcatcaaaattattttttcctgaaattgtttatttatt

SEQ ID NO: 98558 - DNA, 536 bp, Homo sapiens
ttccaacaaaacatattaggcaaaggattattcttatagatagcctttacaaactgatgaaggagaagttgattttggtgtattgtgtgattgactattttgcaactactaactgaaagattttaattataaagaaaatatgatataatggctaatattttatactttgtgtgtgcccaagcactactctgagtgctttcatatgttaacttgtttaaaatatgcagtgacttggaaagatcagtactattattattgccatcttagagatgataaaaccgatacagagataggcttagtaatttgcccaaaactttcytagtgtggatttgtggtgacacaactaaaaatgagagagccaggatttgacaccagacaggtcgcctccagagctggtgttatcacacaatactctgcttttctaagtgaataaaaagaaaagactacaaaactatgcatgatataactattttataaatatgtgttaatatttgcgtatattttaaagttacacaatttaattcatgtgtaaactt

SEQ ID NO: 98559 - DNA, 575 bp, Homo sapiens
acttaaaatttctgtattttccaagttattaatattataatcatataaccattatataatcacaaaatagtgtttttaaagttacacatttcaaagttgctttgctgtcttgaagtgcatcrtttatattttagtacacttttgaagtatcagtcagtgtttgagttcccattctctgctaggtaccaagctaactggtgtcccctagttctttatcttaagcaaaagcaatgttgtacaattttagagccaaaaggaatcttagaaactcttccgtttctcagatgagggtcctgaagctattacagatttaactgacttacccaagattcactgacagtaggtttttaaccaggcttcgaatccaggtttgaagactaaggtcttctgactttagatactgttctctatgaagcaccagagctctccaagacctcaatcaggtgggaactgtagcacagtggattttttgtgacattgttttgaagtggggaagtataactagactggttacaaatgtattctttcacagcaattgaaaacataatgggaaggttctcagagatactgttatg

SEQ ID NO: 98560 - DNA, 575 bp, Homo sapiens
acttaaaatttctgtattttccaagttattaatattataatcatataaccattatataatcacaaaatagtgtttttaaagttacacatttcaaagttgctttgctgtcttgaagtgcatcatttatattttagtacacttttgaagtatcagtcagtgtttgagttcccattctctgctaggtaccaagctaactggtgtcccctagttctttatcttaagcaaaagcaatgttgtacaattttagagccaaaaggaatcttagaaactcttccgtttctcagatgagggtcctgaagctattacagatttaactgacttacccaagattcactgacagtaggtttttaaccaggcttcgaatccaggtttgaagactaaggtcttctgactttagatactgttctctatgaagcaccagagctctccaagacctcaatcaggtgggaactgtagcacagtkgattttttgtgacattgttttgaagtggggaagtataactagactggttacaaatgtattctttcacagcaattgaaaacataatgggaaggttctcagagatactgttatg

SEQ ID NO: 98561 - DNA, 579 bp, Homo sapiens
ctgtgtgttttttctttatcctggactccctctgcactgtttgttttggaagttgttaagttaaattagccatccctttcctttcctggttactgtatgacaatgcagctgtcagtctgtgaactctgccatcatctatttttagacacagtgtgaatgaagctstcttctctaattgcattcagagagagagagagagagagagaggggcacgcaggtagattttcacaacgatcaaatcagctattctaaatgctctgtgtactgacagtgtcctggagagaaagcaaagaaacccactgtgtgttttcctcacttgctgtcaggtttgttttctttccacattgatgttgattatggtcaaataggaaagtgctgttgccacatttgctttccagtgttttaacacttgctaacttagatggttctgagttctctagctttgttagcgaaagattggttcatcattgggttcagattctttggtaaacaaattccttagaaaatatcctcctggcagtattttccacaaggttaaatcgtcttaagcacactgagaactgtgttagcagtgggcct

SEQ ID NO: 98562 - DNA, 559 bp, Homo sapiens
atttttggttattccttgtcttctgctagctttgaggttagttttcacttggttctcaagttctttaattgtgatgttaggttgttaacttgagagctttctaactttttgatgtgggcatttagtgctatacatttccctctcaacactgccttagctgtgttccagagattctggtwtgttatgtctttgttctcattagtttcaaagaatttattggtttctgccttaattccattatttacccaaaagtcattcaggagcaggttattaaatttccatgattctatggttttgagtgaatttcttagtcttaatttctaatttgattacactgtggtccaacagattgtttgttatgatttcagttattttgcatttgctgaggagtgttttactttggattatgtgattgattttagagtatttgccatgtggcgatgagaaaaatgtatattctattgttgttgtgtggagagttctgtcaatgtcagcaggttcatttgatccagtgctgagttcaggtcctgaatatcttagttaattttctgtctcaatg

SEQ ID NO: 98563 - DNA, 548 bp, Homo sapiens
ttaatctttttctccaaagaaaagccacggactatgctccttggaagatggcttcctttgctataagaagtacactaattaaacatgtacaaggttaaatcctggcaacatgcagctgcttcagggatcagtccttcttgacttcaggtgggaggcattccccgcagaggcaagatatacatgaggcagtgtggggagaatgacgtcagcctcccaaactggcacaaggacctgtgtgtggccttaggatcaaaagcgtccttctttctgctttcctraaaacatatcttgaaattgccttttatgcctcaacccatcttccttgagatgccgtttctccaaggaagtgctctgtgccctctcagccttgcaggtctggctgtgtcaagtgccactgtgcactactgagggactggaggaactgaaaagcattttggtcataggagggaatagccacgggagaagtcaggcctcagacactcttgtttgaatatggatgtttgagccttagctggtagaataaaacactctttcagagtttgaaatag

SEQ ID NO: 98564 - DNA, 660 bp, Homo sapiens
ctgaacaactgaaaggatggagttgccttttactgaaatggggatcctgggagggaataggttggaaatgggacacaatcaagtgttgttcttggtacatgtgacattttcaatgcaaatgaagacattaagtaaagagctggaatatttgcgtccagagttgggagaggctgaggctaaagatacagattaagagtcatcagagaatagatgatttttcagaccacaaaggtaggtgaaatcaacccccctagggaaagcacagctaataaagagaagaggtccaaagcaggtgccccagtcccaaagtctaagagtctggaaagatggaaggagacaggaatggaatctaaatgctggtcagcaaagaagaatgaccaacagaagggtagaggagactctgggaagaaaaactgatcaattatgtcagatgctgggatgaataaaaaaaaagtgaggaayaaaaaatgacctttggatttggactatgaaggttgttggtgatcccgtgaaaagcagttttagtagagtggtggagatgaatccagactggaaaggactcaagagagaacagaggagaagacatatgcacaaggtttttgagaagcattgctgtaaagaggagcagaaaaagggtatgtggcttcagggggaagtggg

SEQ ID NO: 98565 - DNA, 609 bp, Homo sapiens
atatgacctataactagaggaaaattcaaccagtcgaaactgacccagaaacaacagaaataattaaattattagagaagacttaaaaatactattaaaaatatgttccatatattcaaggatatttttcaaaacataaatgtgatgagaaaaaaagtggaagatataaaaaagaaccatatgaacttctagrgatatgtattgataaatacactggataagattaacagcatattaaacattgcaaaaacaaaaagtgaatttgaaagcgttgcaataaaaaatattctctgtaaaccacagagagaaaaaaaagaatttaaaaaatgaacagagcaaaaaaaaacttcagtgaatttggggaatatcagccagtctaacatacatttaattgaagttttgaaaggaaaaaaggactagggattgagacagaaaaaaaaaacatttgaagaaatgatggccaaaaaactttaaatttgatgaaacctgtaaatccacaaatccaagaagctcaacaaaaacttcaggcaaaatagacatagaaaatcacaccaaggcaaattatcataaaagtgccaaaaatgccaaaaacaagaaaatcttaaaaac

SEQ ID NO: 98566 - DNA, 558 bp, Homo sapiens
gaccacctccacaatttttggttcatcctcttattacctgaacaattttttatctaatattttttccttcaaatcaactattcacttcaatatatttaaaaaagaaactagtgcataggtaacaaaagataagtaygaaagttggagaagactatggcctcagagaaaaaatatttctattgtagcagaaataaaagccaaagactggtgatgtcagaggaggggagaggatgtcagaggaggggagacccagagaagattgggtgtggggctggtcatctctgttctaggggatgagaacaaaaatcatcaggaaaacagtggggactagggatgggcagcaaatgagggagtctggctgacctgtgggaaaggagctagcactcgtgtaggagagaaaatgtgcatagggcaggagtgggaaggaggggagcggagagacagggtttcggaaatggacacaaggtgttgggtgaaagatagtgcctagggtgaggctgtaaatgcaaaagctttggaagctgcaaaaagatagaggctgaagaggggtaatggggg

SEQ ID NO: 98567 - DNA, 558 bp, Homo sapiens
gaccacctccacaatttttggttcatcctcttattacctgaacaattttttatctaatattttttccttcaaatcaactattcacttcaatatatttaaaaaagaaactagtgcataggtaacaaaagataagtacgaaagttggagaagactatggcctcagagaaaaaatatttctattgtagcagaaataaaagccaaagactggtgatgtcagaggaggggagaggatgtcagaggaggggagacccagagaagattgggtgtggggctggtcatctctgttctaggggatgagaacaaaaatcatcaggaaaacagtggggactagggatgggcagcaaatgagggagtctggctgacctgtgggaaasgagctagcactcgtgtaggagagaaaatgtgcatagggcaggagtgggaaggaggggagcggagagacagggtttcggaaatggacacaaggtgttgggtgaaagatagtgcctagggtgaggctgtaaatgcaaaagctttggaagctgcaaaaagatagaggctgaagaggggtaatggggg

SEQ ID NO: 98568 - DNA, 579 bp, Homo sapiens
gattcttgtttctccagcatggaagcagatgtgcgtttggagcatgctggtttgggggacccaccaaccatccgaaggagccgaatgtgaaatgagcagggatttttggctccccttctcaatgatgctttgtgatctaagaggtgttttccgttttcagcaatgtgctgcagaatggtctgtaacggtctgttgcaattttctccctaaatctcccatgtttctgccaatagtgaattagactgtcattagcttcacagatgtgctttgatcccaatatggcttgtctcctggcaaggagacatctgaaccattgatgcagattttctaaacctggaggatgaagcacaatatwgtggaagcaacacggaagaggagcctggagccttgggttccagtcacatctctgtagttaattaactatgtcatcttgggtgaggcatgaaattctcattgtctcagttctctggtctgtgaaaggagattggattgattcctaagttcctttcagattctctcatattgaataggaaaactcttcaggtttaggaatagatgctatcttgctgttggggtttt

SEQ ID NO: 98569 - DNA, 577 bp, Homo sapiens
tcccaaggaacaggagcttgaggcaatctgagagagagcaatgcacttgaagattagagataacatcattttttcttcacgaatctctacatgttggttatgagataacaggagcgttctttcagtttacttctatttgattaatctctccatcctcaggaccagggacataaaaggcactcaatcaatgtttagtgaattaatgtgtactttttaaacataagatatgttctggaaaggtgaataaatcaaactttgtaaatggaatatcatttaataagaagctcatgtggcaatttcattctgatwttctctttatctctgattgctgattggagacagttaatgcttcccacatattccttgtatattagtctgttctgacgctgctaagaaagacatacccaagactgggtaatttataaaggaaagaggtttaattgactcacagttccacatggctggggaagcctcacaatcatggcagaaggtgaatgaggagcaacgtcatgtcttacatgccagcagccaagacagctagtgcaggggaactcccatttataaaaccatcagatct

SEQ ID NO: 98570 - DNA, 569 bp, Homo sapiens
tcatatattctaccatcagttccttgtttagactcccagaaaggttactctgcatactggtagctactctccctaagaatacaagcttatgacctgaatttctttattttacttcaaggaatttcatttagttgaacaaayagagattcgtgagggctattcaattttatcttctaaacaatgccacaaggcttttgagaatgttggaagcattaacattttaccatgaactaattctttttcgttactttactctgaacacctagcttggctcccttgtctccaaagggcttattatttggagtgatggcaagatatccaaaggggtttggatcatggagcacagtgagagttgaacagacctgggcagattcctatatgggaagcttagggcagcttgagggtcagggaccccagaggagagggacaccagtaagcaatggcatacagggaagtgaaagatgtcagagatacacctttgatcaataacaaactgtctgttctaacatttgcttaaagttatccctcataccaagacagggaggatgggaaaaggtaggaaagataaa

SEQ ID NO: 98571 - DNA, 564 bp, Homo sapiens
ccccactagtgctatgattctacttttatgggagtttcaatttagagattttaataaacctaaatctgcaaatgggtaagagaaaggaagaaatcatgagaagctcatatattctaccatcagttccttgtttagactcccagaaaggttactctgcatactggtagctactctccctaagaatacaagcttatgacctgaatttctttattttacttcaaggaatttcatttagttgaacaaacagagattcgtgagggctattcaattttatcttctaaacaatgccacaaggcttttgagaatgttggaagcattaacattttaccatgaactaattctttttcgttactttactctgaacacctagcttggctcccttgtctccaaagggcttattatttggagtgatggcaagatatccaaaggggtttggatcatggagcacagtgagagttgaacagacytgggcagattcctatatgggaagcttagggcagcttgagggtcagggaccccagaggagagggacaccagtaagcaatggcatacagggaagtgaaa

SEQ ID NO: 98572 - DNA, 560 bp, Homo sapiens
cccaatactattcaaacagtctcattccaaatctttctgttttctctttggaggaaatttaattgaatattcaacatgttccaaatatttccaaacaagattctgagtaatcaggtattgctggaaaggcagaawccatttccccctccagtggaggaatggccaataaaacctagcaaatatgaccccataacaggaacagggggccagcagagggaatggagtcgatggaggcagaggggaaaaatcttggaggtttgatttgttagtctctatgccagttgccattgtactacccttgcccccatgattcaagggagttttcacttgaaaggagagtcccccaagctctattcgctctgacaactccccacccccagtaacttatatcatccacactttaccccatgagagtaaactgcagaaaaatccaggcacattttaaaattccaagtacctttcatagagaaaattatgagaatcctgcttaaaccaaggaaaaaaaattcaaccaaaagcagagccagaagttactgctggttgcaactactagtttaatc

SEQ ID NO: 98573 - DNA, 560 bp, Homo sapiens
cccaatactattcaaacagtctcattccaaatctttctgttttctctttggaggaaatttaattgaatattcaacatgttccaaatatttccaaacaagattctgagtaatcaggtattgctggaaaggcagaaaccatttccccctccagtggaggaatggccaataaaacctagcaaatatgaccccataacaggaacagggggccagcagagggaatggagtcgatggaggcagaggggaaaaatcttggaggtttgatttgttagtctctatgccagttgccattgtactacccttgcccccatgaktcaagggagttttcacttgaaaggagagtcccccaagctctattcgctctgacaactccccacccccagtaacttatatcatccacactttaccccatgagagtaaactgcagaaaaatccaggcacattttaaaattccaagtacctttcatagagaaaattatgagaatcctgcttaaaccaaggaaaaaaaattcaaccaaaagcagagccagaagttactgctggttgcaactactagtttaatc

SEQ ID NO: 98574 - DNA, 597 bp, Homo sapiens
tcttgggttagtgttttctctgcaaatagtctccctatctctttttaaaaatctgtactagtggccttacaaaaacaatattcaaagaataattctccactactcctgtctcttctaataggaattgtatgacatattgccatgtaaattagatttggctccttgttttatttatacaataaaactgagcaaagatatcaaccacaggataaattaattacaaggcagagaatcctgccagatatttcctttgggggacaaaccaaacaagaaaaccactccccaaaacttgttcttatctatttcattacgtgctttggcaagtctcaatgacctgcttatttaactaacctaatgggtttgtttttgttttgtaatctactcctttgcaaaagttaatgtctttttgctttagtattaaaaattctcccttcytctgttccagtcttccttatggaccttcctcccctgcattccttagatgagaaattgcaaaagtcactgaaattaatgaaaaacacacagtcctaacaacaggaaaccagagacccaatttggccttcaaggggctctgcttaggtgtatcatattgcgtta

SEQ ID NO: 98575 - DNA, 597 bp, Homo sapiens
tcttgggttagtgttttctctgcaaatagtctccctatctctttttaaaaatctgtactagtggccttacaaaaacaatattcaaagaataattctccactactcctgtctcttctaataggaattgtatgacatattgccatgtaaattagatttggctccttgttttatttatacaataaaactgagcaaagatatcaaccacaggataaattaattacaaggcagagaatcctgccagatatttcctttgggggacaaaccaaacaagaaaaccactccccaaaacttgttcttatctatttcattacgtgctttggcaagtctcaatgacctgcttatttaactaacctaatgggtttgtttttgttttgtaatctactcctttgcaaaagttaatgtctttttgctttagtattaaaaattctcccttcctctgttccagtcttccttatggaccttcctcccctgcrttccttagatgagaaattgcaaaagtcactgaaattaatgaaaaacacacagtcctaacaacaggaaaccagagacccaatttggccttcaaggggctctgcttaggtgtatcatattgcgtta

SEQ ID NO: 98576 - DNA, 417 bp, Homo sapiens
aatgagaagtttcccagaggaagcgattctaaactgccctcacagtcacaaccctgcattaggactaaataaagctgatcagcatttatcaatccgtacctatgtgatagattcattcatgtcagtctcyccattgaaaaacagtttccacaagggcagaatgtgacagggttacaatgtatcaacatactcttcaaaactagcacagtccctgacatagaatttatcctacattaattttgttgaacaaatgaaataaaaaagtctacaccccaggaattggaaatactctgttatgattacatatctgcactatacatgaagtaaggtagtgctatttgaaaatggaattagattagtaagtttatattgcaaatataggacaagtgtaaaaacacacttttaaaagtatccttg

SEQ ID NO: 98577 - DNA, 603 bp, Homo sapiens
atctgctcatcttggacatccttcagggaacaatgctcaccccaggtttgctagggccctctcacacaggcaagattactcatgttttaaaaaagagggtcatttgttcaggatgccagaaaaaaaagagaaattagcaaactaatgagttatctgtgcactttgcatacagagtggaagattaatctctgttaactgcttgtttaatgttacagttaataattagttaccttgttgccccagaacattcatcattttattgaactataaggtttaggttgtgtgctttttctccacttttacaggcagctgtttatctttgcttaggttgattttggawaaaagaagcatagatggttggtgaaagaactgttgatattaaagggtaaatttccacacaaaatgtttttgttccttaccatttcaataaaggcatctattgattaggaaaagaaaggtgaatgaaaagaacattggtctgggactcagtcccagccaggggcatggattcagttctgacttgtttgttagcactatgtcttatcaagcaagtaacttaacctttttgggcctctgtttcctcctctgtaaatgagaggatta

SEQ ID NO: 98578 - DNA, 541 bp, Homo sapiens
atatagaatttggtttaagccaaaccaataaatatctattgaacaccaacacagttccattcactgtttcagagggcgggagtacaaaaatgacagagacatgtccccagtccggaagacagaagagataaagtcagatagaggagataaagcatgcacagaaatagatattacacaggactttttaaaaattagaatttatctctatcatgtacctagcacactgaaggatgtttgcttacmtgcatctttctttccctgcaccaagctccctgagaactgggaacttgtcctaatttttcttttacattccagcaacatagtcaggaattcattcataacatgtgctcaataagtgtatgtttaacagaactgaattgccttaagcttaaaaccgattgccataaacaaatggaaatccatttcagatgtaccttgaaagaaggtgcaagcttcaaccattgagagatggtgaagggattgtttccagtagtgggaatagaaagatgagagaggaggaggtagaattacattcactgct

SEQ ID NO: 98579 - DNA, 585 bp, Homo sapiens
tgggaagttaaacgattaatagataaagcacttgtcacattactctgtgatttaatgtctcatcctctaagtgttgtgggttcccagagcaggatttctagtgtctagtgtcctaagacagccctcaatgtgaatcttcctcaccccaaggtgctaataaaaggaaaaactgagcttttgaaaagctctcctaaggcacagctccaaaattcaggacagagtccaaactcttgttttaatagctttggccaaattcatgttcagcatttgatttagagcttgcagtgttaatattttgtgcattgggccaactctccagtgattttaatatttygtttatcgactgatttaacttttaatagtatccaaagccatctcattagattacagtgctgaaagagtgccactgtaatagctatcccgttgttcaagtaaattcaatttggacagatgtagctcaaggcgaaagggaatcgtaatctctgaaatagtttgccatcctatattccaaacaagtcttagctcctctgcgtgcgtgccttggacatgatctttaaagatcttgaaggaccaggggagaaatac

SEQ ID NO: 98580 - DNA, 644 bp, Homo sapiens
ctcccgggtggttaagggactcatgtttttttcccaagcaacaaatgagcatgtctcatcctcctgcttctgaaggtgagaacaatgtatctacacagcggcttttccactagaagtggggatttagagcaacaaagatgtcatgaaaacataatcaagaaaaaagtcaagtgtattgattacatctttgtccctgaagacttcgtgragtaaataaacaggcaaacttggatgaatattcacacaaattaatatttgactgaatttttctgtctacttgctcaggatggctctctaaaatgaatttccactttgaagaattatctattttaaggctctggagatattttctcattactttccaaaacttttagcagatgaaaccccctctagcagtctgtgagagtaccagcctcatggcttttgccagtatttttatattatctttaatctttgcttatttaccaagaaaaatactcgccttgctgttttaattgactttaataagattaagcttgctttatttattggccatttgtatttattcttcagtgaagttcctgttcaggtcttttgctcattacttattggagttttaatgttttcttattgattggtgtgaacattttgacatattaagtaca

SEQ ID NO: 98581 - DNA, 579 bp, Homo sapiens
tggttcaggaatagacagagcaacagaatagctccaaaaactcaaacatacattcaagtccatatgaaaatttaagcaatgttaaaggaaatgttttaaaccaatacaaaaaagataatgtaatcaacagtgttgtgacaataggccagacatttgataaaactaaactggattactaccttattcctgtataaaaattaattaaaactagattgaagataaaaacacatggaaagaagaagggagggagggaaggaaggaaggatggaaggaaggatggaaagaaggaaggatggaaggagggggggagggaaggaaagaaggagggaaggaaggaaggaaggatgggagggaggaaatatcaaggaaaaaataatgtatttataatcacacaatgaggaaaaaattttaagcaacttatatagacaagaagtcacaaagaaatacagcaacaaattacatttgataaaaatgartaactataatataggggaactataacatgttatatattatataataggagaaaaataaatatagttctatataatataactataataggggaaaaacataaac

SEQ ID NO: 98582 - DNA, 677 bp, Homo sapiens
gtatccttacatagtccttgcctctaggaatgaagttggttggtaaaaattggaaacaatgaatgttttacattttactttgtakgaatttgtgctaattgaagtttttcaaacaaaatgaacacgtttttacttttaaaatacagagagatatttaaagatagagaattacaaatctgcccctccacctttagtctccaaacaattatttgaggcagagtgactttgaagagccataccttttcaaaataagcacctctatttgaacaactcctgctctaataactacctctattaggcacacgagcccttgagccttgtagcctgttccagctgctctcctccactccacacagacagtagaagttgaaaagataggagtgtttgctttgtcttatctgatacaaaagttttgaagtttggcattgaaaacccagaagtctgatcatggaatatctaacatatccacaacaacaaaaaagtccgttgagcagaataggacctagtgtttctcagaatcaatggcaaaccatgcaaaccagtgtgccctttctgctgataacgtgccgttttagtcatgctaatttgaaggaggctgaaatctaaaggatataagggaaatccgcctatataaaatttttgtgaaggtgtctctcccagggtttgacttggactgg

SEQ ID NO: 98583 - DNA, 571 bp, Homo sapiens
ttgtgtatattatacaagatactacatatataasttatgtatacacttatatttgcataaaatacaaatatagattacaatatagtaatatataaatgcatgtaaattaataacccatatatagtaatagatataaattataaataaacatatagttttaaaaaaagaattttcatctcctctgactttgagttggggcaggggcaggtgtgagcttattgaaggggtaagatttgcactgagacctaggcaagagtgacaccaacataatgattaaccgatggatggagaaacatggatttctttatccaatgtcaatattcattcagtatcagatgggagtgagttcagaagaaaggggaagatattgtcctcatgacaacagggagaattcttttagaaactcattttcctgcattctagagggtggaagcagaattaggttcaagaagaacaaacctcagtcttcagtgactaatctgagggatgctccgcatttccccactttctgaagatggagatcataagggcagatcctctgcgctctcaggggatgcctctccatggcctt

SEQ ID NO: 98584 - DNA, 466 bp, Homo sapiens
ggttactgtattttgaatagtgtcttttgtcctgggagacttttataccctgaacaatgcaccatctgaattcttgaaagggatgggagataagctttttttggtaaagtgtgataacaacaactgtgaaaaggggaagaacaaaagaatctatccctccatgacagcctggtctcaagcagatcgctttagtgaaccccagtggaaggtgaaagagaatctgggtagattcyttacagcttttggagctctcctatccattgaaatttcttccagtgactctagggatactttagtttggatttctgaaaaatttaagaaatttctttctgtttcccagcaattgaaccaattacagttcatacatgtaaccctccctctgagctgtccgtggtggtggttattcttgctgtttaatgcatgctgtcatttcaaatctcccatgtcccagacagacatgtgccta

SEQ ID NO: 98585 - DNA, 466 bp, Homo sapiens
ggttactgtattttgaatagtgtcttttgtcctgggagacttttataccctgaacaatgcaccatctgaattcttgaaagggatgggagataagctttttttggtaaagtgtgataacaacaactgtgaaaaggggaagaacaaaagaatctatccctccatgacagcctggtctcaagcagatcgctttagtgaaccccagtggaaggtgaaagagaatctgggtagattctttacagcttttggagctctcctatccattgaaatttcttccagtgactctagggatactttagtttggatttctgaaaaatttaagaaatttctttctgtttcccagcaattgaaccaattacagttcatrcatgtaaccctccctctgagctgtccgtggtggtggttattcttgctgtttaatgcatgctgtcatttcaaatctcccatgtcccagacagacatgtgccta

SEQ ID NO: 98586 - DNA, 559 bp, Homo sapiens
taccactcctcaaacaacaaaataaataaaccaaagcctcaattagaaaaccttcaccaagtctatctatagctcataaatatttggtttattctttggacatttctctttgatgatgtctttttcattatcgtttttccttttgtgaagatacatgtgtgtctacatattttagagagtttgtcacatcaatgagaaggaagagaaaaagaggtccacaggaaagggaagaaatagtattctgttaaaagttaatatggcttttctatgaccacttttggtgaattttttttaaaaatcaaaactaggtctcataatactaaggtccatgcagtttcatcatagttctgaaaggcctattattgtcctatacccaaaactgatcaactcacgaatgaggaatctaggagactttttctattttaatttaccagagttcaagacaagcacacattttcacaaacaaatattttattagataaatttagaagaaactgtaagtgaaaaaaaattatgttttwttccctgaaaaaaaatcatgtctaatgaagttttatta

SEQ ID NO: 98587 - DNA, 625 bp, Homo sapiens
aaagatatattgctggccttgccagctgaaggcaaatcacttctgttggaccttatggacaggaatggagaaaaagggatttaccaagtcaatggctgcatacaaggtaccaggagatgtgttaatctgcttaactaatgaaaccatatctggtacagcagctgcaattggggtcaccacttggtcaagcttacaataatccactgtcattctccaagatccatctgtcttctgcacaggccaaatggaagagttgaatggggatgtggtgggaatcaccacacytgtgtctttcaagtccctgatggtggtactaatctctgcaatctctccagggatgcaatattgcttttgatttactatttttctaggtaaaggcaactctaatggtttccatttggcctttcccaccatgtagccttccctcaccctaccagtcagggagccaatgtgggagttctgccagctgcaattatgcattctggcactggggaaatgaccacaggatgagtctggggaccaactggacccactgtaagctggacctgagctaaaactccattaattacctgacctccgtaagcccctactttaactggaggaacacagtgacattttgggtccc

SEQ ID NO: 98588 - DNA, 536 bp, Homo sapiens
aagtgctgggattacaggcatgagccaccgcccccagcctgtgcccttttcactaaatcacatttattgaggtttctttggggcactcctgcttgcgttttcacatttcttatctatgcacctgaattttccctttggaattttgaccacagaacctgttttgtttcagttagaataatcctcagtctggaaatcatgtattaaatgacacaatgggatggaattgtagcctataataagtgaagagaaagagaagattaccacctaagagctttaaatacttgaaatgcgcctggtctccagatgcagagaagttgtgttgaaagaatttgtatgatagctcctcatacagtgtttttatttataaaagtaattcatgtacatcagtttacaaaataaaagttcttacgtaagaaatgttagtcaccagtgtgatgaaacgtagaatgaaaccttaaactgtgttaatagaartgtggtgtcagaatcatagatggtagtggttcctttgtaatcttcgctgagatgatgaattc

SEQ ID NO: 98589 - DNA, 516 bp, Homo sapiens
tgtggggcaggcgtggcggctcatgcctagcacattgggaggctgaggtaggaggattacttgaggccaggagtttgagaccaacctgggcaacatagtgagatcccatctctgttaaaaaaaaaattgctggacatgagggtgcctgcctgtggtccargctactcagggggctgagacagggggattgcttgagcccaggagttggaggttgcagtgagccatgaccataccacttgcactccagctgggtgacagagagcccatctcaaaaagaaagaaggtgggggtggtggagagaaggaagagagggagggagggagggagggaaagaaaagaaaaaaatatctgggtactatttcgtgatatcacagattgagtctttggcttcagagttctagaggtgattcaccagcctgaaaatacgcttttcataccttcgcattcttgccaaagcatgtccttcatttaattaggagaggataataaaatgtaacttgtaaggtgaaaaaaaaa

SEQ ID NO: 98590 - DNA, 564 bp, Homo sapiens
agtgaaataaatgctccacttaaaagataaatactggcagaatggacaagaataccagatccaaacatatattttctacaagaaacccacctaattgtcaaaggcatttatacttaagtaggtggaaaaagatatttcacacaaaaagaaaacaaaagtaagcaggagtagctatacttatataagataaaacagactttaagtcaatgacagtaaaaataaaaacaggaagaagtcattgtataataataaaggaatcaattcaataagatgtaacaatcctaaatatatatgcacccaacactgagcatccagattcataaaacaaatactagtagatctaagaaaatagatagaaagcaatccaataatagtagggaacttcaataaccccatcaaaaacactaaacagaacatcaaggcaaaaaaatcaacaaagaaattttggactttaattagactctagaccaaatgaatctgacatacatttacagaacattctaycctacagccatagaatatatattcttctcatgtgtgaattaaacatttttgaaaatttac

SEQ ID NO: 98591 - DNA, 573 bp, Homo sapiens
tggagggagagaggaatttaccataccatgtatgcttatgtatgtaaatttttgaatatacatggtagtgtttgggagctatattctaaaaccttcccttaatgaagacagaacattgcattttataatgtttccataatgaataaacatatttcagtcctgccattcaaagcatatccaaaaagcaatagaaaatcacattttctaccatttggcggatcctcttcatgtctgtgttaactacagttcctttgctctgccccccctcagaaacagatttctcagctcctctagtagtgactgtattagtccattctcacaatgctttaaacatactgcctgagamtgggtaatttataaaggaaagaggttcaattgactcatagttccacatggctgcagagatctcaggaaacttacaatcatggtggaaggcaaaggggaagccaggacctttttcacatggcagcaggagagagaagagctagcaagaccagggaaaactgccttataaaactattagatctcatgagaactcattatcactagaacagcatgggggaaactgtcctt

SEQ ID NO: 98592 - DNA, 550 bp, Homo sapiens
cccatgaccttttgacctttccattgtttcacttctgaacttaataacaaaacagaaatgactaacatctcctccactcagaaaatgttcagtctttctgttcactttgtatggcattctctctctctctctttccttctctctctctctgtctttctctttcatgatttagaagctagtgaaaaaagtttcagaaaattcagtaaaaagtagaaaagtgaaattaatgaagatttagtacgagcttttatgttaaacaactaggagtcctttggtaacttaaaagagaaagaaatagacttccttgtatagactgaagaggggagagagattagagaaatttttttwaaaaaaaagagaagatgttcaatgaaaataagtctgcagataaagagatcaacttgaaaatgagaaaataagttatattattcagaattaggaaaggaaggagggaatgctggatatattgaactgatagagtagggtattagtttctgtacttgctataacaaatgaccacaaattcagtggcttaaaataacacatttac

SEQ ID NO: 98593 - DNA, 632 bp, Homo sapiens
gttatccacaggttattatattatttctgtttaaaattacccatgtttactattccttgtctacttatgtaaagaaaattggctgcaaggagaaacagaggatttagaagtcaattgggtggcaaacatccactagatctaagggaggagaccaccgctcatattgtctaatgcccaatttcttcctccaaagaaaaaagaactaaaaactaaaaggcagaaatgaaatccacaggcagacagmccggtgccacaccctgggcctggtagttaaagattgacccctgacctaatcggttatctatagattacagacattgtatggaaaagcactgtgaaaatccctgtcctgttctgttctgttctaattactggtgcatgcagcccccagtcatgtaccccctgcttgctcaatcaatcacgaccctctcatgcagacccctttagagttgtaagcccttaagagggacaggaattgctcatttggagagctcggtttttgggacatgagtcttgccaatgctcccggccaaataaagcccttccttctttaactcgttgtctgaggggttttgtctgtagcttatcttgctaacagatccagaaattggtggaaacattttttttccaat

SEQ ID NO: 98594 - DNA, 522 bp, Homo sapiens
aattttccacaactttaagaaaattgtgtgtgcgttgtgttttaattgttttcttttttggatgtttagccatttacgatgttagcacaacactctgagagcctttgaatcatcgtaattcaatattagactcatggaaaaaagaaatacagagtgacttaaactgtcatttccacagtcaataagcatttttgcatacatatatacctgcgtatrtatgtatgtatatatttatgccacaaacagagctgcaagcctcaaaataattctcaaatcagatttggttgtgttaagcttgcaaaacatctttaactttgtcctgtctgcaagaccatatagttctttccataaccaatgattcattttttaaaaaataaatcaaaagtatttcttatttcagtagagtttgtgaaatgtttcatttcagaagtatcagatcttccaattaagtaatcagaatgattcttcttgactgaatgttgaacttcactctgtggatgatcatgctgccaaaacttcaag

SEQ ID NO: 98595 - DNA, 542 bp, Homo sapiens
ccgatgactttgtcatgcagctccaccgattttgagaacgacagcgacttccgtcccagccgtgccaggtgctgcctcagattcaggttatgccgctcaattcgctgcgtatatcgcttgctgattacgtgcagctttcccttcaggcgggattcatacagcggccagccatccgtcatccatatcaccacgtcaaagggtgacagcaggctcataagacgccccagcgtcgccatagtgcgttcaccgaatacgtgcgcaacaaccgtcttccggagactgtcatacgcgtaaaacagccagcgctggcgcgatttagccccgacatagccccactgttcgtccatttccgcgcagacgrggacgtcactgcccggctgtatgcgcgaggttaccgactgcggcctgagttttttaagtgacgtaaaatcgtgttgaggccaacgcccataatgcgggctgttgccggcatccaacgccattcatggccatatcaatgattttctggtgcgtaccgggttgagaagcggtgtaagtgaact

SEQ ID NO: 98596 - DNA, 542 bp, Homo sapiens
ccgatgactttgtcatgcagctccaccgattttgagaacgacagcgacttccgtcccagccgtgccaggtgctgcctcagattcaggttatgccgctcaattcgctgcgtatatcgcttgctgattacgtgcagctttcccttcaggcgggattcatacagcggccagccatccgtcatccatatcaccacgtcaaagggtgacagcaggctcataagacgccccagcgtcgccatagtgcgttcaccgaatacgtgcgcaacaaccgtcttccggagactgtcatacgcgtaaaacagccagcgctggcgcgatttagccccgacatagccccactgttcgtccatttccgcgcagacggkgacgtcactgcccggctgtatgcgcgaggttaccgactgcggcctgagttttttaagtgacgtaaaatcgtgttgaggccaacgcccataatgcgggctgttgccggcatccaacgccattcatggccatatcaatgattttctggtgcgtaccgggttgagaagcggtgtaagtgaact

SEQ ID NO: 98597 - DNA, 577 bp, Homo sapiens
ggctatccacatgcaaaaaaataaatttggacctttgccttacaccatatacaaaagttaactcaaaatggatgaaagatctaaatgtaagagctgaaactacaatactctttagaagaaaacacaggggggaaaatttatgacatcagatctggcagtgttttattggacaggacaccaaaagcacaggcaaaaaaagagaaatacataataagttggagttgtcaaaattaaggatttttttttttttgagacaaggtctcgctctgttgcccagactggagtgcagtggcacaatctcaacctcctgagctcaagcagttctctcacctcagcctctgaagtagctgggactgcaggcacatgccatcacacccagctagttaaaattaagaacctttgtgtatcaaagggcattatcaagagagagaaaagacaacccctgggatggggggaactatttgtaaatcatatatccaataagggattgatattgagaatatatamagaactcctacacctcaacgacaacaacaaaaaatgatttaaaaatgggcaaagtactttaatagacatt

SEQ ID NO: 98598 - DNA, 633 bp, Homo sapiens
cacatgtttcctaactcattttttcccctttaaagatataatgccagttgacttttggagtatcatcctattttttactcatctaacaatagtagatttttttcatcttttgatttatatgatagcatacatatttgctgcaatttttacttgattgtaatttttaaaattgtcctttcaaaatatttctttgtataccatatgactcatcaagtatattttaatgaacaatatcttttgattgacttgatgatacttcttttaaataaaacaatgtgacaatcaytcaaaacttggcagaattaattgacagaattgctcctgctgtgtaaaagatctccacagtagttgcaaaaaaggagctatgtaggtcttacttagcaagaactaaatgaagatgcttatacagcagattttgaattacatattttataccaatgtctttctctattttagtattcagagttaacaatttgacatagcatttttcaacagcttcacagataacagctttaacaaatacaatgtacataccatacaacttgctgatttaaaatgtataattcaatggtttttttagtggaattgctgggtcttatggttactttatatttggcaatttgagaaacaaat

SEQ ID NO: 98599 - DNA, 646 bp, Homo sapiens
tttatgtgcatagaaaaagtaaggtttttttattacttgggtagatatgtgcattgtagtctttaggtggcagtaaagcactaattctaaggtgtttccaccctatcccctactgatctcttgatccataggaacgggatgcctatctccccctggctgagagtgccagcaagatgtacttcattatttctgatttgtccaaaattaataacatgtaccgttttagtttggctgcttttctccgacttttccaacgagctctacaaaacaaacaggtaagctgttggataccctgtaccagrgactgaattacagggattactttactagggatagtacttaatttataataaaaattattaagcaaactttcatagaattatgttccaaaagaccacatgtaacacttttaagctatataaagaaactacttaatttctttttatattgttaacaaggtgtcccaatgtgacaatctttttaatgaaaacagtttatgttctgagtataaattaataagtaatatataatcatttaaaaaacccagtgattctgaaaggtataaaaataagaattatccctataatatcattacctggggaaaacaacatttaacattttattatatatccttgttgtttaaggc

SEQ ID NO: 98600 - DNA, 646 bp, Homo sapiens
tttatgtgcatagaaaaagtaaggtttttttattacttgggtagatatgtgcattgtagtctttaggtggcagtaaagcactaattctaaggtgtttccaccctatcccctactgatctcttgatccataggaacgggatgcctatctccccctggctgagagtgccagcaagatgtacttcattatttctgatttgtccaaaattaataacatgtaccgttttagtttggctgcttttctccgacttttccaacgagctctacaaaacaaacaggtaagctgttggataccctgtaccagagaytgaattacagggattactttactagggatagtacttaatttataataaaaattattaagcaaactttcatagaattatgttccaaaagaccacatgtaacacttttaagctatataaagaaactacttaatttctttttatattgttaacaaggtgtcccaatgtgacaatctttttaatgaaaacagtttatgttctgagtataaattaataagtaatatataatcatttaaaaaacccagtgattctgaaaggtataaaaataagaattatccctataatatcattacctggggaaaacaacatttaacattttattatatatccttgttgtttaaggc

SEQ ID NO: 98601 - DNA, 375 bp, Homo sapiens
aagagggaagtgcctgttgttctctggtaatttgaatttttaaaacttattcctgaaataaaaactccaattttacattaaaacaatttaataaagctacctgaccaaatacaaagtcatacagccatacaatagtaaacataatttttgcttagaaatagtatgattttaaaagtgtattaaactttcaaagcatctgaatatataaataatatgaggtttttaattaakgccattaaaccttgaatgtcatttgacctggagatgaaatagtaccataagtatttcaaagagttgatggggagttaaactataaaatcagtaagaaaggttatgtgccatgtggcacaaaaaacgtatattaaagactaaatg

SEQ ID NO: 98602 - DNA, 562 bp, Homo sapiens
cttcctcccctttcctaggactcatcacattaatatrtatatatggacccagcatcatcattatgcatgttttctgtttcaccactatgctttctttagcattagctccatgattggattttgaaatatagaggcattgatcacaaattttaaattaaaaaaaacaaacagtaggtatgatgacatttcccatgtttaaagagctcttgaacttgccacttactaatttctcaggcacatttaaaaggctttcgggttaactatagcaaagccaaacactacagttctgtcccatccatcttcagaatacaggaaacagatcaatatttgagctgctcgaatctataagcaaacctttcaaaggagcctagtacaaggaagaacaattctttaattagtctcataacatttttgaaaccgattttgatataagtattcactatatataatttttttggtttttattaatggtttgtgatagggtaagtgtacagatttgtgccttactaagaaaagtccaattgaacgtattttgtttaaattaataaagaactgtagggag

SEQ ID NO: 98603 - DNA, 503 bp, Homo sapiens
tatcatttaaaacagcatcgtttgcctaagctcagatatactttagttttttaggaaaaaagcatttcttgttttaatttcccagcagtgtttttataaacagtgaagaagggagtagtatgggtgggacaatggggacaataaaagaatctttccttggagaaacgggaccacaggttggatgtgaggagcaggaaagaataaaatatactgggttatgttcatctaagtttaattttttacttataaaaaatcaaatcaaaataggcttgcaaatcccaactttccatttcaagtaaacaaatgtgatagtatgccagggagctgcctcagctcgggaagaaggtttaaacagttaaactttctgcaaagactgcaaaatatccagctaggaggcaaatgcgtgatgaaacatgacagaggtggaacaggcctctttgtgggttraatcttgaataaggtgcacatgtcaattctatatttattatgagaacatattcaga

SEQ ID NO: 98604 - DNA, 506 bp, Homo sapiens
acattttatgctataatccagtatatacatatgtgtgtgtatgaaacaaaaatttcacgyaatagttgcccttattaagtgtgatgcactcttttattttcttttatatttcccttttttaaatgttgtttgttacccactaaattgattttacctcccactaaactgatttcacaacccactagtgggtccaaaattgtaactgtttaaaaatttgtactatatcccttttcacaatataatgctaattaaataaaacttctccccactataagtttcccttaagtgaaattcaagaatatgtggatttgtttctgtattcatttggtttgagcatatgtaaattccaagtcatcctactagaaacgattagaaaaacagagatttggaggatagaaagagaaagaggaaaagcagtagagcctaaaagtaggattttgccatcaagttagcagagagataaagggacggagtttatacaatcccaaccttgcctgaagtcacct

SEQ ID NO: 98605 - DNA, 506 bp, Homo sapiens
acattttatgctataatccagtatatacatatgtgtgtgtatgaaacaaaaatttcacgtaatagttgcccttattaagtgtgatgcactcttttattttcttttatatttcccttttttaaatgttgtttgttacccactaaattgattttacctcccactaaactgatttcacaacccactagtgggtccaaaattgtaactgtttaaaaatttgtactatatcccttttcacaatataatgctaattaaataaaacttctccccactataagtttcccttaagtgaaattcaagaatatgtggatttgtttctgtattcatttggtttgagcatatgtaaattccaagtcatcctactagaaacgattagaaaaacagagatttggaggatagaaagagaaagaggaaaagcagtagagcctaaaagtaggattttgccatcaagttagcagagagataaagggacggagtttatacaatsccaaccttgcctgaagtcacct

SEQ ID NO: 98606 - DNA, 527 bp, Homo sapiens
atatttccccttcttcattgcatcagaatggagccacgtgactgagttctggytgctggagtgtggccagaagttatgtccacccgttgcagcctaatcactagaatgtgctacatgatgtttaatgtgtgtgctctgactcagttgaccatgtgacagatactaaaagaccacaggatggatgaagctacactgggagagcattgatgtacatgagaaaaaaaacttccaagtgttaaaccacgtgtatcagaggttagctgttaccctagcatcagtcatttttttccatcagtgtaggcttaagagacaaaatgatgctttcagtttaaaatagtttgactcggccacccctttgggatgtctagagtccaatatgtaggtctattagaaattgcaggagtagacgacattacccaggaattgagtatgcggtgagaagaaaagggagccatgggtcttacccctgaggaactctgtcatttacagatggtctgaaaagggttgtcactaaaggaagctactaa

SEQ ID NO: 98607 - DNA, 527 bp, Homo sapiens
atatttccccttcttcattgcatcagaatggagccacgtgactgagttctggttgctggagtgtggccagaagttatgtccacccgttgcagcctaatcactagaatgtgctacatgatgtttaatgtgtgtgctctgactcagttgaccatgtgacagatactaaaagaccacaggatggatgaagctacactgggagagcattgatgtacatgagaaaaaaaacttccaagtgttaaaccacgtgtatcagaggttagctgttaccctagcatcagtcatttttttccatcagtgtaggcttaagagacaaaatgatgctttcagtttaaaatagtttgactcggccacccctttgggatgtctagagtccaatatgtaggtctattagaaattgcaggagtagaygacattacccaggaattgagtatgcggtgagaagaaaagggagccatgggtcttacccctgaggaactctgtcatttacagatggtctgaaaagggttgtcactaaaggaagctactaa

SEQ ID NO: 98608 - DNA, 606 bp, Homo sapiens
tttttgtacccattaaccatacccacctccccctcaaccgctcactacccttcctagcctctggtaaccattcttgcactctctgtgtccatgagttcaatggattggatttttagataccacaattamgtgagaacatgtgatgtttgtctttctgtgcctggtttacttcacttaatgatctccagttccattcatgttgttgcaaatgactggatctccttcattttatggctgaatagtataccattgtgtatatgtaccaaattttctttattcattcatctgatgatggacacttaggttgctcccaaagcttacctattgttattagtgctgcaacaaacataggagtgcagatatctcttaggtatactgatttgctttaaatatttaaatagacatttctcaaaaaaagacatacaaatggcaaacaggtatatgaaaaggtggtcaacatcattgatcaccaaagcaatacaaatcaaaactacaatgagttattatctcaccccagttaaaatggcttatatcttaaaaggcaataatttgaacttttgataccaagaaagtaagatgttaattattttgcaaagagaaagatgt

SEQ ID NO: 98609 - DNA, 606 bp, Homo sapiens
tttttgtacccattaaccatacccacctccccctcaaccgctcactacccttcctagcctctggtaaccattcttgcactctctgtgtccatgagttcaatggattggatttttagataccacaattacgtgagaacatgtgatgtttgtctttctgtgcctggtttacttcacttaatgatctccagttccattcatgttgttgcaaatgactggatctccttcattttatggctgaatagtataccattgtgtatatgtaccaaattttctttattcattcatctgatgatggacacttaggttgctcccaaagcttacctattgttattagtgctgcaacaaacataggagtgcagatatctcttaggtatactgatttgctttaaatatttaaatagacatttctcaaaaaaagacatacaaatggcaaacaggtatatgaaaaggtggtcaacatcattgatcaccaaagcaatacaaatcaaaactacaatgagttattatctcaccccagttaaaatggcttatatcttaaaaggcaataatttgaacttttgataccaagaaagtaagmtgttaattattttgcaaagagaaagatgt

SEQ ID NO: 98610 - DNA, 636 bp, Homo sapiens
cagatctctctgctgaaacctcacaagctagaagcgagaagagatcagggttctgcattcaacattcttaaaagaaaaaatcttcaacaaaaaattttatatccagtcaaactaagcttcctaagcaaaggagaaataagatccttttcagataagcaaatgttgagggagtttgttaccaccagacctgacttagaagagattttgaaaggtgcactaaatatggagaggacagactgctaatagatggtaaagaaacacagttaaatacacagaccaatgacacaataaagcaaccacacaaagaagccagcaaaataaccagctaacaacacaatgacaggatcaaatccacacatatcaatactaaccttgaatgtatatgggctaaatgtaccacttwaaaggcacacagtggcagcctggataaaatgcaagacccaatggtaagctgtcttccagagacccatttcacacataatgacacctataggctaaaactaaagggacggagaaaaatccaccaagcaaatgaaaacagaaaaaaagcagaggctgccatcctaatttcagacaaaacagatttcaaatcaacagagattaaaaaaaaaaaagacaaaggaagggagatgcata

SEQ ID NO: 98611 - DNA, 485 bp, Homo sapiens
tgcggaacttataaagtctaaagccacaaacctttacatgttaaagtcaaggttcagatagaaaaggaatgtgatcatggaaaaatgtaactaagaaataacatgcaccagcttctgaatcctcaaaatctgcaagacagttctcttcctcttgtctcaggaagctttatttctggagtaacttcattatwtacataatctggaataattatattaattttatgtgcttcttagtgtcacataattattttaagtagctggatttttgaatttttagcagagatggggtttcaccatgttggccaggctggtctcgaactcctgtcctcaagaggtccacccacctcaacctccgaaagtgctgggattatatgaataagtcaccgtgcctagcatattttgtattctttactgcagctgcttctcagtcaaaactcttatttttactcagtaaacaatcttgataattaagtatttatttgtct

SEQ ID NO: 98612 - DNA, 485 bp, Homo sapiens
tgcggaacttataaagtctaaagccacaaacctttacatgttaaagtcaaggttcagatagaaaaggaatgtgatcatggaaaaatgtaactaagaaataacatgcaccagcttctgaatcctcaaaatctgcaagacagttctcttcctcttgtctcaggaagctttatttctggagtaacttcattatttacataatctggaataattwtattaattttatgtgcttcttagtgtcacataattattttaagtagctggatttttgaatttttagcagagatggggtttcaccatgttggccaggctggtctcgaactcctgtcctcaagaggtccacccacctcaacctccgaaagtgctgggattatatgaataagtcaccgtgcctagcatattttgtattctttactgcagctgcttctcagtcaaaactcttatttttactcagtaaacaatcttgataattaagtatttatttgtct

SEQ ID NO: 98613 - DNA, 630 bp, Homo sapiens
gccagccattgttctaagcactttgtatacattatcagggacctataaaagtagagattattatcctcattttacagttgaaagccccatcacatcctaaatgagcctgtgtaatcttgctcaccaggccatctcagagctatgtgagtggtggagttgggatttgaatcaagtttgagtgactccagtgcctgctcactgtttatgtagagatgaacaccttgaggggtcatttttctgactactacagtatccaaggacctgagcaatgtgtgatgcataaaaatgctcccaaaataggagctattattatgattcaggcaggggctggttggagaggatgggaagggggtggaatgggtggagagagtttatgggtgactaggaggagagttgccaaacacaccaattacaaaacccaccactacttatatttagataarcagagactgatcattgtctttgttctgcttagcaaaactaatttcactgcttggtgatggcaaattattttcaagcaggtggtaaaatttatcaagaatctgagcctctgccaaaagtaaaactacccaatgagtcagtagtaatcagctggatgatatttgaatctgacctgataaatccaccatc

SEQ ID NO: 98614 - DNA, 483 bp, Homo sapiens
gcaataaaaagaaccatattatttacatgagcaaaagcatggacaaatctccaaataatccagctgagaaaataagccaaataaaaaagcacattttgcatgattccatttatataaagtactggaagatgcaaacaaatttatagtgacagaaagcttataagtggttgatcaatgataggatgagagaaggaaggctttacacaagagcaaaagggaactttaggggatgatggatgtattcattctcttgtttgtggtgatgattttacaggtgtagatatatgtcamgatctatcagattgcacttgaaatatgtgcaattttatgccaattattcttcaataaggacacttagcatctaaaacttgaaaacgttttgctttcttaaaaaggtggaataaaaaatgacttcataataaagaaatataaaataataaagaaaacagggggaaactaaaataatttgtcaaacatttctat

SEQ ID NO: 98615 - DNA, 483 bp, Homo sapiens
aatcatgttaagaaccatcactcagtagctctggatccaaatcaaagctatgaaatacagaatgacattggatgctgaagtgaaaaataccaaccacatttctctgaggttcagacattaatactcagacacattttatataacagtctgctcagtagattagtaaaacagagmccataaagcctggaaatcctcctacccacattaagctaattgagttggagacatccaattcatcatatttgcaggctgatttataagcaactcaccctgccctggagcagaaagtgaaatgttatgagttagctactcttaaaatttcaaacccagcaattctgaacctgtcaataccttaacggtacagagacaagaagaagaattcagttcaggtgcatttctgtgaccctgatgaaaaaataaatacccagtgcacattttatgactgatatttctatgaagagtctagccacatattggaaactc

SEQ ID NO: 98616 - DNA, 670 bp, Homo sapiens
ggctatgcaagcataccttgtgatacacaaactacagtcaagaaaaatctgtcagattgccacctcctactttcattttaactgaagaagtctaacatccagaaacttgaaacgacttccctgcccactctaaggaaactggtttataagttgctccaaacattgacatttgtttttcttctgtttgaaagcttgtctgcaatgccatctccttaaatgagatgtagctgtttaatggaactgacctatgcccaggaatgggagactggtttactgggattcttcaccactcagctattaactcratttatccaccaatgcagacttcagtgtataaaacctcaaaagaaatttcagacaaggagaagttggggctcatgaagctataccccaaaatacagaacattaaactgctgaactgaagaaacctgctagcagaatgatttaaactctctggtccaggtagttctgaataatcatattgcattatatttcctcctaccaaaacaaagagtcatctttgcaattgataatactgctgattgtgaacaggagaaatttccaaacaagctaaatggttacaagacatgcatgccactgatccccttaatgatccttttatgtggtttccaggggaatgggaaactggttttggttccccttataaact

SEQ ID NO: 98617 - DNA, 670 bp, Homo sapiens
ggctatgcaagcataccttgtgatacacaaactacagtcaagaaaaatctgtcagattgccacctcctactttcattttaactgaagaagtctaacatccagaaacttgaaacgacttccctgcccactctaaggaaactggtttataagttgctccaaacattgacatttgtttttcttctgtttgaaagcttgtctgcaatgccatctccttaaatgagatgtagctgtttaatggaactgacctatgcccaggaatgggagactggtttactgggattcttcaccactcagctattaactcgatttatccaccaatgsagacttcagtgtataaaacctcaaaagaaatttcagacaaggagaagttggggctcatgaagctataccccaaaatacagaacattaaactgctgaactgaagaaacctgctagcagaatgatttaaactctctggtccaggtagttctgaataatcatattgcattatatttcctcctaccaaaacaaagagtcatctttgcaattgataatactgctgattgtgaacaggagaaatttccaaacaagctaaatggttacaagacatgcatgccactgatccccttaatgatccttttatgtggtttccaggggaatgggaaactggttttggttccccttataaact

SEQ ID NO: 98618 - DNA, 670 bp, Homo sapiens
ggctatgcaagcataccttgtgatacacaaactacagtcaagaaaaatctgtcagattgccacctcctactttcattttaactgaagaagtctaacatccagaaacttgaaacgacttccctgcccactctaaggaaactggtttataagttgctccaaacattgacatttgtttttcttctgtttgaaagcttgtctgcaatgccatctccttaaatgagatgtagctgtttaatggaactgacctatgcccaggaatgggagactggtttactgggattcttcaccactcagctattaactcgatttatccaccaatgcagacttcagtgtataaaacctcaaaagaaatttcagacarggagaagttggggctcatgaagctataccccaaaatacagaacattaaactgctgaactgaagaaacctgctagcagaatgatttaaactctctggtccaggtagttctgaataatcatattgcattatatttcctcctaccaaaacaaagagtcatctttgcaattgataatactgctgattgtgaacaggagaaatttccaaacaagctaaatggttacaagacatgcatgccactgatccccttaatgatccttttatgtggtttccaggggaatgggaaactggttttggttccccttataaact

SEQ ID NO: 98619 - DNA, 670 bp, Homo sapiens
ggctatgcaagcataccttgtgatacacaaactacagtcaagaaaaatctgtcagattgccacctcctactttcattttaactgaagaagtctaacatccagaaacttgaaacgacttccctgcccactctaaggaaactggtttataagttgctccaaacattgacatttgtttttcttctgtttgaaagcttgtctgcaatgccatctccttaaatgagatgtagctgtttaatggaactgacctatgcccaggaatgggagactggtttactgggattcttcaccactcagctattaactcgatttatccaccaatgcagacttcagtgtataaaacctcaaaagaaatttcagacaaggaraagttggggctcatgaagctataccccaaaatacagaacattaaactgctgaactgaagaaacctgctagcagaatgatttaaactctctggtccaggtagttctgaataatcatattgcattatatttcctcctaccaaaacaaagagtcatctttgcaattgataatactgctgattgtgaacaggagaaatttccaaacaagctaaatggttacaagacatgcatgccactgatccccttaatgatccttttatgtggtttccaggggaatgggaaactggttttggttccccttataaact

SEQ ID NO: 98620 - DNA, 581 bp, Homo sapiens
tttatatcaataaattggaaccaggaaaaaagcaaaaaatttaaattattcaatctattctaaaaattctcagaaaataaataattattaagttaaagaaaaaataagccaaagggaaaatacaataaactagctaatgtggtttgtttggtttttgttggggaaaaaatttatgagttttctaaatatagctaagtaaaatacttaaacatttagatattgacattgaattaattattatacactgaaagctaaaagcaatacctagaatattagctttttttgtttgtttttgcaggatatgagggagtcagttctagaacagattctggtgacaatgaatgtttttctagtacagtgttaaatgttgccttccagttgtcagtttatgtaatcttttttcattaacttctggaaaattttcccattgtcttattatttctgtgtcttctcaatgkatgtgctttatgaatatgctagggtaggcaaagacctgaaagacagcaattgcatttcttactggcaagtgaattaaagacatctaagtccttggaatttattacagcaactaagctaagcaa

SEQ ID NO: 98621 - DNA, 539 bp, Homo sapiens
gtaagctagttgaataagaatgagccttaatatttgctctggaaattctagtgcatagattcacatgttcttcactggacataaggatttggagcttgaaactgctgtagttaatatttgccagaagcccactgtatgcytgtttttggagccaaaatggaaaggaaccagattctggaagtggattctgatgaccttgtttgagtcctgagtgaaaccacacctcaaaccagatcaattgttggaatattcagttccatgagggtaaaattatcatttttagttgagatttctgttgttcaaaacacatgcattctatctgatatacatccacatgagttagatatttttacctctacttcatattaggtttgtgcaaaggtaattgtggtttttgcattactattaatgcgacaagaaaaccatagtaatggtttaatacaagagaaaacccatggtaagatgcctatataattttcccaaagtcattcgtctagtaaatgctggcatcaggatgatccaataggcagaatttagac

SEQ ID NO: 98622 - DNA, 539 bp, Homo sapiens
gtaagctagttgaataagaatgagccttaatatttgctctggaaattctagtgcatagattcacatgttcttcactggacataaggatttggagcttgaaactgctgtagttaatatttgccagaagcccactgtatgcctgtttttggagccaaaatggaaaggaaccagattctggaagtggattctgatgaccttgtttgagtcctgagtgaaaccacacctcaaaccagatcaattgttggaatattcagttccatgagggtaaaattatcatttttagttgagatttctgttgttcaaaacacatgcattctatctgatatacatccacatgagttagatatttttacctctacttcatattargtttgtgcaaaggtaattgtggtttttgcattactattaatgcgacaagaaaaccatagtaatggtttaatacaagagaaaacccatggtaagatgcctatataattttcccaaagtcattcgtctagtaaatgctggcatcaggatgatccaataggcagaatttagac

SEQ ID NO: 98623 - DNA, 558 bp, Homo sapiens
gctgaaagtatcaagtgcaaatagattattcttacactctgctgaccactcaaaatcataccacattttactttgcttaatattaggaccattattttagtatggagcttttagctttctcctagcatttcttacctttctttttgttgtggttaacaaaatcatatttttttgcaccatatcctcagaattagccagcgttttatagacctttgaccaaaaaawtatgatctggttgtgtttctcttttgtgctattgacgtcttacaaatgtctggtagtcatttttttccttgttataaattgagaattctattgtccctctctacctaaatctgtttccctaggtgttgccctctttttccctcccctccccagaaagagtgtctccatatgtcttggttagacttggacttgaactcctaggcttaagtgatcctcctacctcagcctcctgagtactcctgagtagctagaactacaagcacatgcaaccatacctggttttcttttttcaaaggaagaatatgcattctctggaagcatggggaagatgtg

SEQ ID NO: 98624 - DNA, 572 bp, Homo sapiens
caattcaaactcctaaagtgaaacaggaccaagaagagaaaaaaaaaaagttaacaaaagatgtcagctccttgacctagaacagaaatctcagtattcatcaaaggtaaggaattatatcacaggaatcccttgatacatttctaagtactttttcaccaaaagtctgacactggagtctagtcttggttctaattgaactagctagttaactcgtagcaagccactgaccatctctgagccttgctgaataaactttgtaaactggcatgaaacattaattaatgctcttattttgaaactctactactggttaaatatgtgtacatatatgcacccctatgtatatatttatttataatttttgtatgggcttatgttctcatgtctttagggtgtgtatctgggattgaaatgctgggtcacatgscgattctatgtctaacattttgaggaactgccaacatgtttccaaagtggaggcaccattttatattctcaacaaggaatgagaattccaatttctacccattcttgtcaacatttgttactgtgtttgacataagcgggtg

SEQ ID NO: 98625 - DNA, 584 bp, Homo sapiens
ggatgcaaacagttcatttgaggggtgatcctagaggcaggtataagagagtggggaccgtgagacagggaggaggaacagccaatctgtgtgtgcatggtcactgctggaggacagggtgagggattccaccaagccctcagaagcagacacaatgcctccaaatgatgggaggctggagtggttatctgccagctcctatcccctttcactgagagatgcctctggatgtaacctcccccagcttgcaggccttgcttgcaagaagccctagaggcagaaatcagaaggctgcatggtgtaacctgaggtgggtgctgcactgttgggtctgagcccatcgtrgctgaggctgaagtctgaagcagaccaaagggagctgcctctgcctggaatgaccttcctcattttttctggcctgagttgcaggcaggatccaggtttgttcccattcaactttaagacaccctgaattatcacctcctcccagaattcctgcccaaaagacttactaccaaagcaggagctgtacccctagtacctaggaccattatagagctgggtcctggctttccctctgtggc

SEQ ID NO: 98626 - DNA, 584 bp, Homo sapiens
ggatgcaaacagttcatttgaggggtgatcctagaggcaggtataagagagtggggaccgtgagacagggaggaggaacagccaatctgtgtgtgcatggtcactgctggaggacagggtgagggattccaccaagccctcagaagcagacacaatgcctccaaatgatgggaggctggagtggttatctgccagctcctatcccctttcactgagagatgcctctggatgtaacctcccccagcttgcaggccttgcttgcaagaagccctagaggcagaaatcagaaggctgcatggtgtaacctgaggtgggtgctgcactgttgggtctgagcccatcgtagctgaggctgaagtctgaagcagaccaaagggagctgcctctgcctggaatgaccttcctcattttttctggcctgagttgcaggcaggatccaggtttgttcccattcaactttaagacaccctgaattatcayctcctcccagaattcctgcccaaaagacttactaccaaagcaggagctgtacccctagtacctaggaccattatagagctgggtcctggctttccctctgtggc

SEQ ID NO: 98627 - DNA, 608 bp, Homo sapiens
attcctcgaataggctattattatatccatttcacaggtaggaaaactgaagcaaagagaggttcaacacatcatccaagatgacacaaggtggagccaactttcaaagccaggctgtctccctctggagccctagttcttcctcactctgctatcttgccacaccatggcttttttggctttttttcttctccctcaaggacctctgctttggtgaattcttgccaaaatgaacctcagagacatacatctaaggaccttgcgtgcaccaaagagggtgggtggagggggcagagcttcctgggggtccactctagggcctgcaggaggcctgaccttgggcagacagccctagcctcagctcttcttatagctcccytgctctttcctcttcttgaactgctgggtgccagcatcagttcagctctttccccccaccctctgctcaaggcctaggaggacagcagctgtccctacttgctgcactgtggggaggcgcctgtgctcactgctctgctgttgaagagctcagtgaagcatatgatgtgactgtggatatccaactgctttagctgacatcttggtaagtggcttcccactccagttcc

SEQ ID NO: 98628 - DNA, 583 bp, Homo sapiens
gtggcaaagttgggattcaaagccaggcagtctcattctgggccttgtgccagatgaatgtgccactgtcctctcaagtgttaagtgattactcctggggatggggagaggggtagggggactttttaaacatttttaaacatgcactaattttagctgacttaaaaatgttagacatgacagccagcacacactcttggaagttcgtgtctaragactgcaccttaacatctgctatgatagcactcatagcccatcttcccacatggcttctgaaaaaccactaccattgtttccattgatgagacccaggaagagaggaaatcgaggatggattttatggttacagtttgggggcctttatgtggttcctggacaaccttggctagaacacccccggctttagggggatggtagtggagaattagtcaagtaaagacatatgaaatctggaattatgcaatttctaattcttgggcagggtgtttatcttggctcttagactgcagagttcataactcaagagtacagctactgatatatttttacaaagtgattatctgattttcttggtttcgatgtc

SEQ ID NO: 98629 - DNA, 609 bp, Homo sapiens
aggatctgacaaactcactgtatatttgctagaaaaatagtgaaaaaaaggtaaatcacctctagtgttattatgaaaattttttatagctggaaaaaaaatcaagaaaacaatctmatctacaatagccacaataaataagtaaataaacaatatacctgggaattaatcagcagcatgatagagctctaaaagaaaagctataaaacactgataagagaaactgaagaggataccacaatacagaaagacacaccatgtttagagattgaaaaaaataatattgttaaaatgacccaaagcaatcttgcaattaaatataacattctttacagaaatagaaaaaaaattatagaatttgtatgaaaccacataagaccctgattagccaaagtaattttgagcaaaaataacagagctggggcatcacactacttgacttcaaaacatactacaaaactgtagaaaccaaaacagcgtggtactggaataaaaacaaacaaactaaaatgcagtgtgtgtgtatatatatatacacttccataagaaaggctaagcatctcagagaagaaagaaaaacacagtgtgtctgcagatgttttacctgaa

SEQ ID NO: 98630 - DNA, 639 bp, Homo sapiens
agtatatttgtagtcaactttatcacaaaatttttcatgcagaataaatcgttgacaatgataagttgtcttactgccttgtagcttcacataaaaatagatattttcagtatttttaaagtgtcaaaagttaatcattcttttggcttaatcatagatgttcagatttactttactcttagtattttaagttgccttgtattaatttatcttgactaacaaacaattttatgactgagtcagaataaaactattttgatctagattattattcaattacatctacctcataatgttcaaagcaactaccataatgaagatggacctgtcttgaatgtcaaaattctaaacacagaatatttgggggtgggaggtggacatgatttatcaccagtctgagacaacagatggaaakatagatgattataataaggatgaaagtatcctgagaaaacacacattgaaaacaaagttgcataaaaacagccaggatggtgaaagcacggcgaggtgtatggaaatcagcaattagttcccacaaactcatgtggggcatcttctttggggcaggccctgccccacatactacatgtgcatttgatagatggtaaaattatagcattagaaaaatagatgcag

SEQ ID NO: 98631 - DNA, 582 bp, Homo sapiens
tagttgtaaaatcttgggaaaagctgtttactctctctgcacaatccatttctgcataataaaatgaaattaattatactatacttctgatatggttgttattcagattaaatgaattagtatatttaaattacttaccaatatcaataactagtacatgatcaatcagtgtagctyatacaattatgccttatctagtcttatttccaagctattactaaaagaatctttctacggtaaactgacaaaatttattttcttccacatttgaaatatacatactatttctatttgcatgcctttgcactaactcctgctcttttatttcaactttctctgggtatatctttatcctattctgattcaaaatacaactcaattcttaactcctctatgaagcatttataggttactttaacaatctctgagtttttctagagtaactatagacaatactcacaatggaagtcatcatcacgtaagtgttcagtgttactgcatgtgtgatcatcttttccatccagcggatttgacatgagcaaagagcatggccttttcacccagagagaaaaatttgaattc

SEQ ID NO: 98632 - DNA, 457 bp, Homo sapiens
atctgttttaacaatctgtgtttgtctagagatgtttgagagcatgagaaaggaagtcaaggaaagcttgaccatccccggcagagtctggagtttggcagctgggaatggagatagcacgcagagtgaacaaaggtccaagatgagctcagagccactgaatgacaacacaccttctgaatgcacatgactcctcagatgcctctggtctctaacacctcacagagcagctgccacaccacaccactctcaggttcattagttattctttaggkggttagagcacagcatgaaggaagcagggttgattggttttattcctgcaatgattagggcattttgcactgcttagtggccctatcctgctccctgaggctagtctacaggtgggaaatattggtcctgccgaggaaccaactggcatcaccagatgcattggcaacgttggaaaaataca

SEQ ID NO: 98633 - DNA, 457 bp, Homo sapiens
atctgttttaacaatctgtgtttgtctagagatgtttgagagcatgagaaaggaagtcaaggaaagcttgaccatccccggcagagtctggagtttggcagctgggaatggagatagcacgcagagtgaacaaaggtccaagatgagctcagagccactgaatgacaacacaccttctgaatgcacatgactcctcagatgcctctggtctctaacacctcacagagcagctgccacaccacaccactctcaggttcattagttattctttaggtggttagagcacagsatgaaggaagcagggttgattggttttattcctgcaatgattagggcattttgcactgcttagtggccctatcctgctccctgaggctagtctacaggtgggaaatattggtcctgccgaggaaccaactggcatcaccagatgcattggcaacgttggaaaaataca

SEQ ID NO: 98634 - DNA, 457 bp, Homo sapiens
atctgttttaacaatctgtgtttgtctagagatgtttgagagcatgagaaaggaagtcaaggaaagcttgaccatccccggcagagtctggagtttggcagctgggaatggagatagcacgcagagtgaacaaaggtccaagatgagctcagagccactgaatgacaacacaccttctgaatgcacatgactcctcagatgcctctggtctctaacacctcacagagcagctgccacaccacaccactctcaggttcattagttattctttaggtggttagagcacagcatgaaggaagcagggtygattggttttattcctgcaatgattagggcattttgcactgcttagtggccctatcctgctccctgaggctagtctacaggtgggaaatattggtcctgccgaggaaccaactggcatcaccagatgcattggcaacgttggaaaaataca

SEQ ID NO: 98635 - DNA, 457 bp, Homo sapiens
atctgttttaacaatctgtgtttgtctagagatgtttgagagcatgagaaaggaagtcaaggaaagcttgaccatccccggcagagtctggagtttggcagctgggaatggagatagcacgcagagtgaacaaaggtccaagatgagctcagagccactgaatgacaacacaccttctgaatgcacatgactcctcagatgcctctggtctctaacacctcacagagcagctgccacaccacaccactctcaggttcattagttattctttaggtggttagagcacagcatgaaggaagcagggttgaytggttttattcctgcaatgattagggcattttgcactgcttagtggccctatcctgctccctgaggctagtctacaggtgggaaatattggtcctgccgaggaaccaactggcatcaccagatgcattggcaacgttggaaaaataca

SEQ ID NO: 98636 - DNA, 577 bp, Homo sapiens
tctcagagacgagaagtgcatggtttgtttgtccttctctattgaccaagttttgactttctaaaatactctccctccttgaaagtggatttcaaaaagtgttccagttacaattcttttagactctgatcctctcccagatgtataaacaaatatgtatattaaacatcctgttcaaacaaagtagggaaaacaggctaagattatggggcagggaagcagcagtctctctttcagtgcctctttgccatcccctaccttgtgtccattagaacatcttcaaaattacatgagactcattgcagcttcttcctaaaacaaggctagtgacactttagctctaagattccaaaatcatttkaaggaatagcctgtagaaccaatcctctgtatctttgcatctcagattgaatacttccaaaaataagcattaaaacatataggcaccacttattatacttttattaactcacataatctatacaacctcattgggaatgggtatccttacacccaatcaaaaggtcatgaaactcaagctgagagaggttgactgttttagctaaggtcacacaaa

SEQ ID NO: 98637 - DNA, 579 bp, Homo sapiens
  misc_feature (1)...(579): n = A,T,C or G
nnnnnnnnnnnnttcaagcaatttcccctccagtcctttttcttattattgatccaactttaaaatgaaggtgtgagtgtggggtgcaatggctcacacctgtaatcctagcaccttgggaggcggaggcaggtggattacttgaggtcaggagttcgagaccagcctggccaacatggtgaaaccccatctctactaaaaatacaaaaattagccaggcgtggtgrtgcatacttataatccctagtatctcaagaggctgaggcaggagaatagcttgaacccaggaggcagaagttgcagtgacccaagatggcaccactgtactccagcctgggtgacagagcaagactgtctcaaaatataataaattaaattaaatgagggtgtgaggatgtttagagaatagactcttcagtaaattatagatgatcaggatgaattaacagattcattctttcaatatgggggcaggggcttctttttttaaaaaaaaaaaaaaatctgcttttcattccctgacatccgtccttgtaatctcatggttcttcgaggtaaatcagaggttctttgaggtaa

SEQ ID NO: 98638 - DNA, 532 bp, Homo sapiens
tccttactagctgtttgattgattcacatacactagccaataagtaaattctcatctgagaaaaactaccagtaactcaagtcatggacgcttgaggtcctattagaataactgacatttagaatactgtctactgatgaagttctatcgaaagcctttggataataatgtaattttctgtgcatgcatgtgtgattgtgattgtgtttgtgtatatataatactgtgtgtgtgtagacacaaacacttgtattcatcttccttcagtaatcaatacatcctttaagggagagaacattatctctctgttattcatttgtaaggtttagaacagtgttgacccacagatttcatttatatrtttgttaaataaatgaataaaataaagaataaaaatggccttggtagccaatatagtaactgactgactatggtatctaaaataacacccacttacacatctctgttcccttactgggctttactttttccttagcatgaattcatgttggatgttgtattagcatgtttt

SEQ ID NO: 98639 - DNA, 579 bp, Homo sapiens
ggtcatcgtggttttgccacatcactgagaytttattattaataaacattgttttatgttagcctacaaaaaaagactggaaagatccttataccattgagtgtgttaagcactgttatatccattttaaatttctaagacttgaacttgtgtttgacttgtgagtgctaaactcctgagaagggaaacagggccacctctttttactgtgcagcttgcacacggcacagctggatttggtgttcctgtctgaagctctcagtgtggttcccattctcctcatcattctatgctataaaaatctcatcggaacacctgtaacattattttgattcattttaatttgtgatccaaagttgcttttaggtaaaattccaaattggggccttaacatactggtttttgcccttcttttcttcctttcaatcatcctgggcacctggcaactcctttctgtctttcttattcccctgcaacatttatttccaggaaagaaggtccttacattcacttgcaccatttgaaccatatacgtttgttccatcgtagtatccgaactttaactagagatgatgcctt

SEQ ID NO: 98640 - DNA, 588 bp, Homo sapiens
gatcgtttaactttttcttatttatttatttatttatatcaaggctttacatattacagccattaactttacctgttatttatcatgcagatagtttctaacagtcatatttttaactttaatattacttatagttaccttgactatgtctcccaaaaaagcatgtgttgaaaacttaattctcagtgcaacaatgttgggaggtggggcctaatgagagatgattaggccgtgagggtggagtgaatggattaatgctgttatctcagactttataagggtttcttataaaaggacaagttcagcccccttctctttctctctgtctctttttctttccctctcagtccttctgccatggaatgacacagcaagaaagcctcacaagatgctggcccctcaattttagactatccagcctccagaactgtgagtcaataaatttctgatcattacaaattagctagtctayggtattctgtttatagcaaacacaaaactgactgagacggttacttttatttttagaaatttcaagtttcaagttaggtttcttgtggtacttaggaaggccttccctactgaaag

SEQ ID NO: 98641 - DNA, 605 bp, Homo sapiens
ttgttgtttttgccctgactcctttaaaaagtagatatgaggacttagaaaagagatgccaagagtttgtgcctcacttcctatatccacaaaataagaatagtcacatatgccccctacaattattcagtgtgatgctgcagggccagctgcaccgccacctcccaaccccattgcactggctcttccggttaggctggcccaactccaggaggaacaggcagaagggctggagtgaaccctcccagctcggcctggagcagccctccagcaaactgatgggaattggaaagataaaacacccagcttcctttgagtcaggtggtatgacactgaggtgtgtgttctgcycgtagttatactccagttgcccatggtggtaacccacttgataagatatcctttactggtttccttccctttcctgactcatttcctcattctcttactggcatttcctgcaatctcttcccaaataaactactagtactcaaattcttgttccagggttggaggcactccacccaagacatatgcctacacagcagaattagttcatcaaaccaagtctttgtctcaccctcagactgtttctgaagccagac

SEQ ID NO: 98642 - DNA, 559 bp, Homo sapiens
caatattatcaacatcaattgtccttatagttatttataaattcaattttgttcctatactgataccattaaatattgcaagtacacgttactataaaatrttatatagatgaaaacacaaacaagaatagacaagaaaactctgaaaaaaaaaaaaaaacccactggcaagccctgcgtaaaatcttgattgattaaaaaactcatggatcactgaaactaaaaattcagaaataaaccaaagtgtctaagaaagtgtcatagtgcatcttggctgctataacaaaataccttagactgggtaaaggataaataagagaaatgtatttttcacagttatggagtctggaaagtgcaagatcaaggcagcagcaaatttcgtatatggtgagagccctattccccatagatggtaccatctcgcacatgggacaagggcattcccttcaacttcctttgaaagagcactgattccattcatgaagatgaagaactcttggcttcaccactttcccaaaggcctcacgcctaaaattatacacatgaatttgaaagggga

SEQ ID NO: 98643 - DNA, 559 bp, Homo sapiens
caatattatcaacatcaattgtccttatagttatttataaattcaattttgttcctatactgataccattaaatattgcaagtacacgttactataaaatgttatatagatgaaaacrcaaacaagaatagacaagaaaactctgaaaaaaaaaaaaaaacccactggcaagccctgcgtaaaatcttgattgattaaaaaactcatggatcactgaaactaaaaattcagaaataaaccaaagtgtctaagaaagtgtcatagtgcatcttggctgctataacaaaataccttagactgggtaaaggataaataagagaaatgtatttttcacagttatggagtctggaaagtgcaagatcaaggcagcagcaaatttcgtatatggtgagagccctattccccatagatggtaccatctcgcacatgggacaagggcattcccttcaacttcctttgaaagagcactgattccattcatgaagatgaagaactcttggcttcaccactttcccaaaggcctcacgcctaaaattatacacatgaatttgaaagggga

SEQ ID NO: 98644 - DNA, 384 bp, Homo sapiens
tttaactctcactaaacataaatatctgattttttcacctgagatctatgtatgtgtgttggagcatgcctttaccaatcagcataaagttacatctctccttgcrcctctactttctacttgtgcagagtttaaaatgcagaggtgagagcttagggttttctgggtcttttgctaagcatgtacctgaccttgagcatccccaattccccatttccttcttgatcccaaagaccgttatcacagtcttaattcccagcagcttttcctcctagagctttttgacatgattattcttagacccaactgatatccttcgttcctggtagactgcgtagctcatttccatttaaatgcttttagaaatattaaactatggattta

SEQ ID NO: 98645 - DNA, 590 bp, Homo sapiens
tcactggaggaagagaaagacgtgtgagcgccttgctgggctttctgggagatgttgtctctttatttctcccagccctttggtcacagggcttcargactacaatcccagcatgcatcctgctcagggacaacgcgcgtcactgtaggaagaggtggacctgtgctgttctcgctatgctttttgggatacgtattctcgtaaacactcccagccctttggtcactgggctgcatcactacaatcccagcatacatcgggatcagggagagtgcgctaatcagtggagaaaggggcgaggctctgcacacctcgctggtcttgctgggagatgcagtctcataaacactcccagccctttggtcactgggctgcagcgctacaatcctagcatggaccgggcgcagggaatgtgcgcgtcactggaggaagaggcagggttgtgcacgcctctctgggcttggtgggagttgcagtctcataaacactcccagacctctcatcaccgggctgcaggactacaatcccagcatgcacccggctcagggagagtgcgcattactggaggaaaagtctaggctgtggatgcc

SEQ ID NO: 98646 - DNA, 392 bp, Homo sapiens
ggtgtctgagaccaacaatacagackttttgttgtgctaagccatcagaagcaaggtccctttggggagcaggaggccagtaaaaagttcagaggtaaaaaaaaattaacttcaaatcacagaagtgtttccttcaacacaaaagtaatatagattcattaatatatagaagtggaaattaagacaatttccacaactactcacccagagaggattaaaaaaataattgaccaccaactaattaaacaaatacacaagtcataaataaagtatgagtaatgtttatacaagcaaatgaacagagaattatgttggcaatagacgtgtggttgattcatatttgactgattcatattcaactgtacacagttgaatatagtcatacaaaatta

SEQ ID NO: 98647 - DNA, 392 bp, Homo sapiens
ggtgtctgagaccaacaatacagactttttgttgtgctaagccatcagaagcaaggtccctttggggagcaggaggccagtaaaaagttcagaggtaaaaaaaaattaacttcaaatcacagaagtgtttccttcaacacaaaagtaatatagattcattaatatatagaagtggaaattaagacaatttccacaactactcacccagagaggattaaaaaaataattgaccaccaactaatwaaacaaatacacaagtcataaataaagtatgagtaatgtttatacaagcaaatgaacagagaattatgttggcaatagacgtgtggttgattcatatttgactgattcatattcaactgtacacagttgaatatagtcatacaaaatta

SEQ ID NO: 98648 - DNA, 392 bp, Homo sapiens
ggtgtctgagaccaacaatacagactttttgttgtgctaagccatcagaagcaaggtccctttggggagcaggaggccagtaaaaagttcagaggtaaaaaaaaattaacttcaaatcacagaagtgtttccttcaacacaaaagtaatatagattcattaatatatagaagtggaaattaagacaatttccacaactactcacccagagaggattaaaaaaataattgaccaccaactaattaaacaaatacacaagtcataaataaagtatgagtaatgtttatacargcaaatgaacagagaattatgttggcaatagacgtgtggttgattcatatttgactgattcatattcaactgtacacagttgaatatagtcatacaaaatta

SEQ ID NO: 98649 - DNA, 392 bp, Homo sapiens
ggtgtctgagaccaacaatacagactttttgttgtgctaagccatcagaagcaaggtccctttggggagcaggaggccagtaaaaagttcagaggtaaaaaaaaattaacttcaaatcacagaagtgtttccttcaacacaaaagtaatatagattcattaatatatagaagtggaaattaagacaatttccacaactactcacccagagaggattaaaaaaataattgaccaccaactaattaaacaaatacacaagtcataaataaagtatgagtaatgtttatacaagcaaatgaacagagaattatgttggcaatagacgtgtgkttgattcatatttgactgattcatattcaactgtacacagttgaatatagtcatacaaaatta

SEQ ID NO: 98650 - DNA, 523 bp, Homo sapiens
agttcatttagtcctgttttactcatacttgttttactctatcttgtaagcacatatgcttctctgctagaattagagaaataaattagtccactgatagtgtttcaaagttatataagtcattctatcagaagcctgtttataggagtacttggcacagttatttctgtgggtctctgagacattcttattttgttgaagacaaagccctgtggcctggaactgatttgcaagcacttttagaaaaatagccgagtacaaccaaaagtatatactaatgaaaaagtaagccatgctttcaggtatgtagttagttgatacactaaaatattcttttatataatgcaaacagcactaacactttaaaaaatagaattatatcatgcasagtgagggcactggaaattttttaaaaaactttcatttctggattatttacattaataacaattatgtaaaaaatttaacctaggggaagctaagcatatgtcttattatttaatataacaagatgcaaaatagg

SEQ ID NO: 98651 - DNA, 610 bp, Homo sapiens
gggggtaggagagcgtagaggagaatgtatgagcaagattaaagagaattgaatattaataggaatgtatgaaaattattatcaaagttccatttcttctccagaaacagggatctgaacaaaagtttctgaagaaggcctcaaccaaaagcccctcagttaggtgcccctgaatctagatgcctggactggraatgaaaatctacatgtgagcctcagtggccaagatttccggtattgtttatttcaacccctcagagactgcaatgcactgacatttacatgcttctcctaaatgcacatgtcagcagcagtgtgacaaccaatgctttcaaagatataatgtgggtatcagagtttctggcaaaaatttagataatcttatcttttcaacctcaaataacaatatatgctgagaaacttcaaaggcatgcacctccacaaataatttttcaggaaaggataaagaagcacagctgtaggagaaaaattaggctggaagttgatgctacctgtgggaattgctaataatggaagcacagtttgttagaatttaacatgtctgattggtgaatataatgtcacagcagcatagatgcaggagtacttg

SEQ ID NO: 98652 - DNA, 573 bp, Homo sapiens
gtatgagcaagattaaagagaattgaatattaataggaatgtatgaaaattattatcaaagttccatttcttctccagaaacagggatctgaacaaaagtttctgaagaaggcctcaaccaaaagcccctcagttaggtgcccctgaatctagatgcctggactgggaatgaaaatctacatgtgagcctcagtggccaagatttccggtattgtttatttcaacccctcagagactgcaatrcactgacatttacatgcttctcctaaatgcacatgtcagcagcagtgtgacaaccaatgctttcaaagatataatgtgggtatcagagtttctggcaaaaatttagataatcttatcttttcaacctcaaataacaatatatgctgagaaacttcaaaggcatgcacctccacaaataatttttcaggaaaggataaagaagcacagctgtaggagaaaaattaggctggaagttgatgctacctgtgggaattgctaataatggaagcacagtttgttagaatttaacatgtctgattggtgaatataatgtcacagcagcatagatgc

SEQ ID NO: 98653 - DNA, 573 bp, Homo sapiens
gtatgagcaagattaaagagaattgaatattaataggaatgtatgaaaattattatcaaagttccatttcttctccagaaacagggatctgaacaaaagtttctgaagaaggcctcaaccaaaagcccctcagttaggtgcccctgaatctagatgcctggactgggaatgaaaatctacatgtgagcctcagtggccaagatttccggtattgtttatttcaacccctcagagactgcaatgcactgacatttmcatgcttctcctaaatgcacatgtcagcagcagtgtgacaaccaatgctttcaaagatataatgtgggtatcagagtttctggcaaaaatttagataatcttatcttttcaacctcaaataacaatatatgctgagaaacttcaaaggcatgcacctccacaaataatttttcaggaaaggataaagaagcacagctgtaggagaaaaattaggctggaagttgatgctacctgtgggaattgctaataatggaagcacagtttgttagaatttaacatgtctgattggtgaatataatgtcacagcagcatagatgc

SEQ ID NO: 98654 - DNA, 573 bp, Homo sapiens
gtatgagcaagattaaagagaattgaatattaataggaatgtatgaaaattattatcaaagttccatttcttctccagaaacagggatctgaacaaaagtttctgaagaaggcctcaaccaaaagcccctcagttaggtgcccctgaatctagatgcctggactgggaatgaaaatctacatgtgagcctcagtggccaagatttccggtattgtttatttcaacccctcagagactgcaatgcactgacatttacatgcttctcctaaatgcacatgtcagcagcagtgtgacaaccaatgctttcaaagatataatgtgggtatcagagtttctggcaaaaatttagataatcttatcttttcaacctcaaataacaatatatgctgagaaacttcaaaggcatgcacctccacaaataatttttcaggaaaggataaagaagcacagctgtaggagaaaaattaggctggaagttgatgytacctgtgggaattgctaataatggaagcacagtttgttagaatttaacatgtctgattggtgaatataatgtcacagcagcatagatgc

SEQ ID NO: 98655 - DNA, 573 bp, Homo sapiens
gtatgagcaagattaaagagaattgaatattaataggaatgtatgaaaattattatcaaagttccatttcttctccagaaacagggatctgaacaaaagtttctgaagaaggcctcaaccaaaagcccctcagttaggtgcccctgaatctagatgcctggactgggaatgaaaatctacatgtgagcctcagtggccaagatttccggtattgtttatttcaacccctcagagactgcaatgcactgacatttacatgcttctcctaaatgcacatgtcagcagcagtgtgacaaccaatgctttcaaagatataatgtgggtatcagagtttctggcaaaaatttagataatcttatcttttcaacctcaaataacaatatatgctgagaaacttcaaaggcatgcacctccacaaataatttttcaggaaaggataaagaagcacagctgtaggagaaaaattaggctggaagttgatgctayctgtgggaattgctaataatggaagcacagtttgttagaatttaacatgtctgattggtgaatataatgtcacagcagcatagatgc

SEQ ID NO: 98656 - DNA, 625 bp, Homo sapiens
agaatgaataaataaatataatttgtaatacaaaagtaatggaatattactcagcttttaaaggcagaaaatcttgtaccatccacaataaagagaaatcttgagaacatgatgctaagtaaaattagtcacaataaaacagatactctatgattctacttatatgtaatatctaaagtattgaaacttagaaacagaaaatagaatgatttttatcaggagccaggttgtaaggaaaatgggtagttgtcatttcatgtgtcctgagtttcagttttgcaaaagaaaaaagttttacaaatatgttgcaaagcaatgtaaatacattaacatgactgaactgtataagaaaaaatattaaagwttctaaattttatgttatgtatttttaccacaatcgaaattaaaaatgacacccaagggccaagagagatggctcatgcctgtaatctcagcactctgggaggctgaggcatgcagattacttgaggccatgagttcaagaccagcctggccaacatggtgaaaccccagctctatgaaaaacacaaaaattaaccaggcgtggtagtgcacacttttaatgccagctactcaagaggcagcagctggagaattgctttaa

SEQ ID NO: 98657 - DNA, 563 bp, Homo sapiens
tattttgtccacaatcagagaccatttgacttcatcctttcaattagtatgacttttatttcttcctcttgcctaatttccttggctaggacttccagtactatgttgaataagagggctgaaagtttggacgatttgtcttgttccagatctcagagagaaagctttcaacttttccttattcagtataawgttagcattgctttttcataaatggcctttattgagttaaggcacataccttctattcctaacttgttgagagttttcatcataatcaaggctgaatttcatccaattcttcttctgcatatgcaaaagctacaaaaatgaaaatacttaatgtgatggctaatacagggtgtcaaattgattggattggaggatagaaagcattgatcctgggtgtgtctgtgagggtgttgccaaaggacattaacatttgagtcagtgggctgggaaagggagatccactcttaattgggtgagcaccatctaatgagctgacagtgaatataaagcaggcagaaaaacgtgaaaaagagagactggcctaagctccc

SEQ ID NO: 98658 - DNA, 581 bp, Homo sapiens
agatctcagagagaaagctttcaacttttccttattcagtataaagttagcattgctttttcataaatggcctttattgagttaaggcacataccttctattcctaacttgttgagagttttcatcataatcaaggctgaatttcatccaattcttcttctgcatatgcaaaagctacaaaaatkaaaatacttaatgtgatggctaatacagggtgtcaaattgattggattggaggatagaaagcattgatcctgggtgtgtctgtgagggtgttgccaaaggacattaacatttgagtcagtgggctgggaaagggagatccactcttaattgggtgagcaccatctaatgagctgacagtgaatataaagcaggcagaaaaacgtgaaaaagagagactggcctaagctcccagactacatctttctcctgtgctggacacttgcagccctcaaacatcagactccaagttcttcagctttgggacatggaccgcctctccttgctcctcaaacttgcagacaaccaacctattgtgggatctcatgatctctctagggaagcccaactaatacacc

SEQ ID NO: 98659 - DNA, 581 bp, Homo sapiens
agatctcagagagaaagctttcaacttttccttattcagtataaagttagcattgctttttcataaatggcctttattgagttaaggcacataccttctattcctaacttgttgagagttttcatcataatcaaggctgaatttcatccaattcttcttctgcatatgcaaaagctacaaaaatgaaaatacttaatgtgatggytaatacagggtgtcaaattgattggattggaggatagaaagcattgatcctgggtgtgtctgtgagggtgttgccaaaggacattaacatttgagtcagtgggctgggaaagggagatccactcttaattgggtgagcaccatctaatgagctgacagtgaatataaagcaggcagaaaaacgtgaaaaagagagactggcctaagctcccagactacatctttctcctgtgctggacacttgcagccctcaaacatcagactccaagttcttcagctttgggacatggaccgcctctccttgctcctcaaacttgcagacaaccaacctattgtgggatctcatgatctctctagggaagcccaactaatacacc

SEQ ID NO: 98660 - DNA, 557 bp, Homo sapiens
taccatgattatagctcaatgcagcctcaagttcctggggaactcaaggaataatcttacgtcagcctccaacttcctgagactacaggaacattccacaatgcctgagtaatctgtgaaaatattttttaccaatagcttgtcacaatattgcccggggtagtgtcaaactcctggatttaagtaattgacagggtttggctctgtgtccccaatcaaatctcatcttaaattgtaataatccccacatgtcctgggagggaccctgtgggaggtaattgaatcatgggggtgggatyttcccatgctgttctcatgataacaaataagtctcatgtgatctgatggttttataagtggaggttcccctgaacggtctcttgcttgttccaataatggtgagacctccctaaccatgtgaaactgagaggccattaaaacttttttcatgataaattacatagtcttgtttatgtccttattatcagcatgataatggattaatacagtagccctcttgccttagctttcaaagtagctggagtcacatgcacgtg

SEQ ID NO: 98661 - DNA, 557 bp, Homo sapiens
taccatgattatagctcaatgcagcctcaagttcctggggaactcaaggaataatcttacgtcagcctccaacttcctgagactacaggaacattccacaatgcctgagtaatctgtgaaaatattttttaccaatagcttgtcacaatattgcccggggtagtgtcaaactcctggatttaagtaattgacagggtttggctctgtgtccccaatcaaatctcatcttaaattgtaataatccccacatgtcctgggagggaccctgtgggaggtaattgaatcatgggggtgggatcttcccatgctgttctcatgataacaaataagtctcatgtgatctgatggttttataagtggaggttcccctgaacrgtctcttgcttgttccaataatggtgagacctccctaaccatgtgaaactgagaggccattaaaacttttttcatgataaattacatagtcttgtttatgtccttattatcagcatgataatggattaatacagtagccctcttgccttagctttcaaagtagctggagtcacatgcacgtg

SEQ ID NO: 98662 - DNA, 557 bp, Homo sapiens
taccatgattatagctcaatgcagcctcaagttcctggggaactcaaggaataatcttacgtcagcctccaacttcctgagactacaggaacattccacaatgcctgagtaatctgtgaaaatattttttaccaatagcttgtcacaatattgcccggggtagtgtcaaactcctggatttaagtaattgacagggtttggctctgtgtccccaatcaaatctcatcttaaattgtaataatccccacatgtcctgggagggaccctgtgggaggtaattgaatcatgggggtgggatcttcccatgctgttctcatgataacaaataagtctcatgtgatctgatggttttataagtggaggttcccctgaacggtctcttgcttgttccaataatggtgagacctccctaaccatgtgaaactgagaggccattaaaacttttttcatgataaattacrtagtcttgtttatgtccttattatcagcatgataatggattaatacagtagccctcttgccttagctttcaaagtagctggagtcacatgcacgtg

SEQ ID NO: 98663 - DNA, 654 bp, Homo sapiens
ctacaacctcttgcctgcatgctattggctgagacatctgctggtcatcctataggggtaacattgtacatgctaagtcattttttcttgctgacttcaagattctcggtgttttaacatttgaatctctgattaaaatgtgtcttgtcatgggtctccctgtgttgctactagttggtaaagtttcattaaattttaggccattttctccctcaaattttgagagttctcagccactgtttgtttcttgaaataactttgctgctctsttttctctctttttattttagaattcccattagaagtatattggccatcttaatggtatcccataagtcccttaggctttcttaatttttaaaattatttttaccctcctcaccatataatttcaaaagacttcttatgaagcttgctggattttttcctgctagatcaaaccagttgttggaccttctagtgaatctctaaattcaggtattttatttttcagctccacactttatgtttctattttgtacttttaatcacttcattgataatctcattatcttcatgaattgttttctttttctgtttagctttctatgttcttctttagctgaatgagcatctttaagctaggtgttttagccaggcacattgatatgtgtg

SEQ ID NO: 98664 - DNA, 654 bp, Homo sapiens
ctacaacctcttgcctgcatgctattggctgagacatctgctggtcatcctataggggtaacattgtacatgctaagtcattttttcttgctgacttcaagattctcggtgttttaacatttgaatctctgattaaaatgtgtcttgtcatgggtctccctgtgttgctactagttggtaaagtttcattaaattttaggccattttctccctcaaattttgagagttctcagccactgtttgtttcttgaaataactttgctgctctcttttctctctttttattttagaattcccattagaagtatattggccatcttaatggtatcccataagtcccttaggctttcttaatttttaaaattatttttaccctcctcaccatataatttcaaaagacttcttatgaagcttgctggattttttcctgctagatcaaaccagttgttggaccttctagtgaatctctaaaytcaggtattttatttttcagctccacactttatgtttctattttgtacttttaatcacttcattgataatctcattatcttcatgaattgttttctttttctgtttagctttctatgttcttctttagctgaatgagcatctttaagctaggtgttttagccaggcacattgatatgtgtg

SEQ ID NO: 98665 - DNA, 641 bp, Homo sapiens
tgaattgttttctttttctgtttagctttctatgttcttctttagctgaatgagcatctttaagctaggtgttttagccaggcacattgatatgtgtgtctaattccagctactttgaaagctaaggcaaggggattactgtattaataaattctcatgcagctaataaagacataaccaagactggataattcataatgaaaaaggttaatggcctcacagtttcacatggctggggaggtctcacaattattggagcaaacaagagactttgttcaggggaatctccacttataaaaccatcagatcacrtgagacttttttgctatcatgagaacagcatgggaaaatcccacccccatgattcaattacctcccacagggtccctcccaggacatgtggagattattacaattcaagatgagatttggttggggacagagagccaaaccatatcaattacttaaggctaggagtttcagaccaccctgggcaatattgtgagaagctatatgtaaaaaatatttttacagattaatcatgaatggtggaatgttcctgtagtctcaggaagttggaggctgatgtaagattattccttgagttcccaggaatttgaggctgcattgagttataacca

SEQ ID NO: 98666 - DNA, 579 bp, Homo sapiens
tcactctccccagtccagcaaactcattcctcttcctgcataagcctcctgtgtttctgcctttttttatctgcaccctctgctgagattcttttgtcttcacccatcccaaagccatccatatttccactgcttgactagrggtaattatctcattcacccagcctaatttttaaccttaccttcctgctcccaccctctcttcactctgaacaagattttactaggttgttgttatgttctggggttcggagaatctgactagtgtgagtttcccaaggtaaaggtaatgccttaataattttcactttaattgctgtttgcgcagtgttttgcacaaaatttaacacaataattgctcccagagtaaatgtataaatctttgcaatgtctgatttgactcccttagagtttggatcttttcccctacaaccatccagagtcctgtctaaccaaagtgaaaatgcggaactccctctttctggctggcatccctgcagagaatggaaataaatgctgtctatgccaactccctagaacaagtataggtttcatctagactagttttcaaaatgagga

SEQ ID NO: 98667 - DNA, 560 bp, Homo sapiens
acctcactgattctgtaacccccaactaatccaccctatagtccctagatgaccagagatgcctattatcctctgctttttactgtcactctccccagtccagcaaactcattcctcttcctgcataagcctcctgtgtttctgcctttttttatctgcaccctctgctgagattcttttgtcttcacccatcccaaagccatccatatttccactgcttgactaggggtaattatctcattcacccagcctaatttttaaccttaccttcctgctcccaccctctcttcactctgaacaagattttactaggttgttgttatgttctggggttcggagaatctgactagtgtgagtttcccaaggtaaaggtaatgccttaataattttcactttaattgctstttgcgcagtgttttgcacaaaatttaacacaataattgctcccagagtaaatgtataaatctttgcaatgtctgatttgactcccttagagtttggatcttttcccctacaaccatccagagtcctgtctaaccaaagtgaaaatgcggaactcc

SEQ ID NO: 98668 - DNA, 579 bp, Homo sapiens
tcactctccccagtccagcaaactcattcctcttcctgcataagcctcctgtgtttctgcctttttttatctgcaccctctgctgagattcttttgtcttcacccatcccaaagccatccatatttccactgcttgactaggggtaattatctcattcacccagcctaatttttaaccttaccttcctgctcccaccctctcttcactctgaacaagattttactaggttgttgttatgttctggggttcggagaatctgactagtgtgagtttcccaaggtaaaggtaatgccttaataattttcactttaattgctgtttgcgcagtgttttgcacaaaatttaacacaataattgctcccagagtaaatgtataaatctttgcaatgtctgatttgactcccttagagtttggatcttttcccctacaaccatccagagtcctgtctaaccaaagtgaaaatgcggaactccctctttctggctggcatcmctgcagagaatggaaataaatgctgtctatgccaactccctagaacaagtataggtttcatctagactagttttcaaaatgagga

SEQ ID NO: 98669 - DNA, 579 bp, Homo sapiens
tcactctccccagtccagcaaactcattcctcttcctgcataagcctcctgtgtttctgcctttttttatctgcaccctctgctgagattcttttgtcttcacccatcccaaagccatccatatttccactgcttgactaggggtaattatctcattcacccagcctaatttttaaccttaccttcctgctcccaccctctcttcactctgaacaagattttactaggttgttgttatgttctggggttcggagaatctgactagtgtgagtttcccaaggtaaaggtaatgccttaataattttcactttaattgctgtttgcgcagtgttttgcacaaaatttaacacaataattgctcccagagtaaatgtataaatctttgcaatgtctgatttgactcccttagagtttggatcttttcccctacaaccatccagagtcctgtctaaccaaagtgaaaatgcggaactccctctttctggctggcatccctgcwgagaatggaaataaatgctgtctatgccaactccctagaacaagtataggtttcatctagactagttttcaaaatgagga

SEQ ID NO: 98670 - DNA, 591 bp, Homo sapiens
tcgctctgtcacccaggctggagtgcagtggcaggatcatggctcaatgtaatctctgcttcctgggctcaagtgattcttacacctcagcctcctgagtggctgggattacaggcatgcatcaacacatctggctaatttttggatttttmgtagagaagggtttttgccatgctggccatggctggtttcaaacccctggccttaagtgttccagctgccttggtctaccaatctgctaagattacagcaagagccactgcatccaaccgattttgattcattctatctcatatatcaccaaagactgtttttggaagttgatgttagcataatcccattatgcatacttcagggctggggagacctgaagcacacagtcattttcatatggtcacagaaatgaaaaggaaaagaagattttaacccaactctgttctctcaaacctggggccctggctgcatttagaactttttgggaattaagggacataattgtgtttgcataactgtttacaggtaaagagttgacatgggagaggagggtgagcaatcagcagcccagcagggactttgcgtagatttatggag

SEQ ID NO: 98671 - DNA, 591 bp, Homo sapiens
tcgctctgtcacccaggctggagtgcagtggcaggatcatggctcaatgtaatctctgcttcctgggctcaagtgattcttacacctcagcctcctgagtggctgggattacaggcatgcatcaacacatctggctaatttttggatttttcgtagagaagggtttttgccatgctggccatggctggtttcaaacccctggccttaagtgttccagctgccttggtctaccaatctgctaagattacagcaagagccactgcatccaaccgattttgattcattctatctcatatatcaccaaagactgtttttggaagttgatgttagcataatcccattatgcatacttcagggctggggagacctgaagcacacagtcattttcatatggtcacagaaatgaaaaggaaaagaagattttaacccaactctgttctctcaaacctggggccctggctgcatttagaactttttgggaaktaagggacataattgtgtttgcataactgtttacaggtaaagagttgacatgggagaggagggtgagcaatcagcagcccagcagggactttgcgtagatttatggag

SEQ ID NO: 98672 - DNA, 553 bp, Homo sapiens
cccacaggtaacacagtttagcccagggcaggtccgtccatgccaggccacctgtgtcatctaatctgggcaacccgaccctgcctaccattaccctgtgttgcaaggggagcaggaaaggagggggcttttcctcacaggggcaggttttaagacacaggaaccctggtgggtctgtcatgttcatacccaggtcacggttggtggaataaaaagttgtgagttgcggaccaagtacgtctactcaratgtgaatcccaaggccttaagctgtcctcgggtttcctcattggctgggggtctatgcagatactcctatgttcctgatctaggaaacagaatttctaatgcagatgtcacctggtggtaaaaacaaagaagacaattaacttttttcgctgctgggaacactctttgtagagctgcattaaaatcagtgagcagatatttgatgggttcaagtcccccatctccttggacaactggcaggttcaccacaccccccaagcatggcatacaatgagttatgttgagagcaggcacatggggttct

SEQ ID NO: 98673 - DNA, 533 bp, Homo sapiens
agttgtgagttgcggaccaagtacgtctactcagatgtgaatcccaaggccttaagctgtcctcgggtttcctcattggctgggggtctatgcagatactcctatgttcctgatctaggaaacagaatttctaatgcagatgtcacctggtggtaaaaacaaaraagacaattaacttttttcgctgctgggaacactctttgtagagctgcattaaaatcagtgagcagatatttgatgggttcaagtcccccatctccttggacaactggcaggttcaccacaccccccaagcatggcatacaatgagttatgttgagagcaggcacatggggttctctacagagagggacctgacaaaaccaggatgggtccaggatccagacccaaatatggaatttctctgcgctttctcctaggggatttccatgagtgaccctcagatctaccccccaaaaatctagccttaactggtcccagtggcaacttggttaagtgtaaagtccctttttacattcttgtagaaatatcag

SEQ ID NO: 98674 - DNA, 533 bp, Homo sapiens
agttgtgagttgcggaccaagtacgtctactcagatgtgaatcccaaggccttaagctgtcctcgggtttcctcattggctgggggtctatgcagatactcctatgttcctgatctaggaaacagaatttctaatgcagatgtcacctggtggtaaaaacaaagaagacaattaacttttttcgctgctgggaacactctttgtagagctgcattaaaatcagtgagcagatatttgatgggttcaagtcccccatctccttggacaactggcaggttcaccacaccccccaagcatggcatacaatgagttatgktgagagcaggcacatggggttctctacagagagggacctgacaaaaccaggatgggtccaggatccagacccaaatatggaatttctctgcgctttctcctaggggatttccatgagtgaccctcagatctaccccccaaaaatctagccttaactggtcccagtggcaacttggttaagtgtaaagtccctttttacattcttgtagaaatatcag

SEQ ID NO: 98675 - DNA, 533 bp, Homo sapiens
agttgtgagttgcggaccaagtacgtctactcagatgtgaatcccaaggccttaagctgtcctcgggtttcctcattggctgggggtctatgcagatactcctatgttcctgatctaggaaacagaatttctaatgcagatgtcacctggtggtaaaaacaaagaagacaattaacttttttcgctgctgggaacactctttgtagagctgcattaaaatcagtgagcagatatttgatgggttcaagtcccccatctccttggacaactggcaggttcaccacaccccccaagcatggcatacaatgagttatgttgagagcaggcacatggggttctctacagagagggacctgacaaaaccaggatgggyccaggatccagacccaaatatggaatttctctgcgctttctcctaggggatttccatgagtgaccctcagatctaccccccaaaaatctagccttaactggtcccagtggcaacttggttaagtgtaaagtccctttttacattcttgtagaaatatcag

SEQ ID NO: 98676 - DNA, 633 bp, Homo sapiens
tgcctagagtcaattaaacatacaagccaaatattttaataaattataaattatataatttatacataatatatacatttgagcatgctattttacaacttctgaaaggaaattacagacaaatgtgacacatgataattcagaaagtgaaaacacagtcatagtaatcttcatattaaagaagacagaatcataaaatactaagtgagaaataaagtaataattgtgaattcaatatatgttgaacaatattctaatttcccttacggaaaaagtttttgtaagaaatcagtaaaatgagtacatacaataaaccatcctacagtagaggctgttggcatatagagtttacatttctatgattaggtcctactaagaaaaaggaaattttaaaataaaatacttagaytttcctatttaataagataatttttgcctataaagtttttcagtctaattttcttgtagaattaggttttagccatcgtaaaacttgacattatgaagcagaaaacaggtgtcatctgtctctggtgttcctggaatttctaacccaaatgccaattcctccacaactcccttcacacacttctgaattgaagcacaaacagatttattaaaattggcataaca

SEQ ID NO: 98677 - DNA, 633 bp, Homo sapiens
tgcctagagtcaattaaacatacaagccaaatattttaataaattataaattatataatttatacataatatatacatttgagcatgctattttacaacttctgaaaggaaattacagacaaatgtgacacatgataattcagaaagtgaaaacacagtcatagtaatcttcatattaaagaagacagaatcataaaatactaagtgagaaataaagtaataattgtgaattcaatatatgttgaacaatattctaatttcccttacggaaaaagtttttgtaagaaatcagtaaaatgagtacatacaataaaccatcctacagtagaggctgttggcatatagagtttacatttctatgattaggtcctactaagaaaaaggaaattttaaaataaaatacttagattttcctatttaataagataatttttgcctataaagtttttcagtctaattttcttgtagaattaggttttarccatcgtaaaacttgacattatgaagcagaaaacaggtgtcatctgtctctggtgttcctggaatttctaacccaaatgccaattcctccacaactcccttcacacacttctgaattgaagcacaaacagatttattaaaattggcataaca

SEQ ID NO: 98678 - DNA, 633 bp, Homo sapiens
tgcctagagtcaattaaacatacaagccaaatattttaataaattataaattatataatttatacataatatatacatttgagcatgctattttacaacttctgaaaggaaattacagacaaatgtgacacatgataattcagaaagtgaaaacacagtcatagtaatcttcatattaaagaagacagaatcataaaatactaagtgagaaataaagtaataattgtgaattcaatatatgttgaacaatattctaatttcccttacggaaaaagtttttgtaagaaatcagtaaaatgagtacatacaataaaccatcctacagtagaggctgttggcatatagagtttacatttctatgattaggtcctactaagaaaaaggaaattttaaaataaaatacttagattttcctatttaataagataatttttgcctataaagtttttcagtctaattttcttgtagaattaggttttagccrtcgtaaaacttgacattatgaagcagaaaacaggtgtcatctgtctctggtgttcctggaatttctaacccaaatgccaattcctccacaactcccttcacacacttctgaattgaagcacaaacagatttattaaaattggcataaca

SEQ ID NO: 98679 - DNA, 502 bp, Homo sapiens
aatattctaatttcccttacggaaaaagtttttgtaagaaatcagtaaaatgagtacatacaataaaccatcctacagtagaggctgttggcatatagagtttacatttctatgattaggtcctactaagaaaaaggaaattttaaaataaaatacttagattttcctatttaataagataatttttgcctataaagtttttcagtctaattttcttgtagaattaggttttagccatcgtaaaacttgacattatgaagcagaaaacaggtgtcatctgtctctggtgttcctggaatttctaacccaaatgccaattcctccacaactcccytcacacacttctgaattgaagcacaaacagatttattaaaattggcataacagcggtctccagaaatgtgcagagattttcccagatccccaaaatcaatgacaaactattcagatcatttaggttctcacaagattctgggaggactttggctttcagtgtgaacgc

SEQ ID NO: 98680 - DNA, 468 bp, Homo sapiens
acctcctgtgctctggtgagatggggcctcccctcacagggtattctgagactgtgagtgagaagctaacacagtgccttgcaatactcacgggagctgtcatcctctgtgaccatcacgtggccttgtagtgttcagactgcctggcctgcstggggtttggtgaggctgttttgtggtcagctgctttagaatctcactttctctgcaatcaaacagtgactgtctttgtgtctgtttatgggtttaaaaaatcctaatatttcatttatagtagtttcagcttgcatgtgtttatttgtataaattttattagaataaagagagcttaagacaacagcattttaaggtcttaatgaggcatagactttcatgtcacaacagctattgttgacctctgtttgctacctttatgtaatgtatacacataaagtacagccagaggtgactagagctgagctgcttggg

SEQ ID NO: 98681 - DNA, 468 bp, Homo sapiens
acctcctgtgctctggtgagatggggcctcccctcacagggtattctgagactgtgagtgagaagctaacacagtgccttgcaatactcacgggagctgtcatcctctgtgaccatcacgtggccttgtagtgttcagactgcctggcctgcctggggtttggtgaggctgttttgtggtcagctgctttagaatctcactttctctgcaatcaaacagtgactgtctttgtgtctgtttatgggtttaaaaaatcctaatatttcatttatagtagtttcagcttgcatgtgtttatttgtataaattttattagaataaagaragcttaagacaacagcattttaaggtcttaatgaggcatagactttcatgtcacaacagctattgttgacctctgtttgctacctttatgtaatgtatacacataaagtacagccagaggtgactagagctgagctgcttggg

SEQ ID NO: 98682 - DNA, 468 bp, Homo sapiens
acctcctgtgctctggtgagatggggcctcccctcacagggtattctgagactgtgagtgagaagctaacacagtgccttgcaatactcacgggagctgtcatcctctgtgaccatcacgtggccttgtagtgttcagactgcctggcctgcctggggtttggtgaggctgttttgtggtcagctgctttagaatctcactttctctgcaatcaaacagtgactgtctttgtgtctgtttatgggtttaaaaaatcctaatatttcatttatagtagtttcagcttgcatgtgtttatttgtataaattttattagaataaagagagcttaagacaacagcattttaaggtcttaatgaggcatagactttcatrtcacaacagctattgttgacctctgtttgctacctttatgtaatgtatacacataaagtacagccagaggtgactagagctgagctgcttggg

SEQ ID NO: 98683 - DNA, 476 bp, Homo sapiens
aatttctatatatcctccagctgagaataggtattctgatgtggcccaaatattttctcaccgctaccttcagggtctmaactagcaaatcaggacacctgcagaggacagttgaccgttttcaaatagaaagagaaataccccgttcatgagagtaatccagtgattttcaaaaagacaagacacactgacatccagcgcagtcagggcacaattaccttggaaaaatcacctcacacagaatggttgaggagactttctaaggtgagcaaatttgggcaacataatcctttcttatttatttccagcccccgctgcccccctgattcctaatggccactccacagtgtggtcagcagtggggtgcagtgttgtgagagaggggctcaaggacgggatgaaggtctttaccgcgttaccaaaatgcaggttaaaaagttgctaaaaacatgtctaaatattctaattcctactgt

SEQ ID NO: 98684 - DNA, 476 bp, Homo sapiens
aatttctatatatcctccagctgagaataggtattctgatgtggcccaaatattttctcaccgctaccttcagggtctcaactagcaaatcaggacacctgcagaggacagttgrccgttttcaaatagaaagagaaataccccgttcatgagagtaatccagtgattttcaaaaagacaagacacactgacatccagcgcagtcagggcacaattaccttggaaaaatcacctcacacagaatggttgaggagactttctaaggtgagcaaatttgggcaacataatcctttcttatttatttccagcccccgctgcccccctgattcctaatggccactccacagtgtggtcagcagtggggtgcagtgttgtgagagaggggctcaaggacgggatgaaggtctttaccgcgttaccaaaatgcaggttaaaaagttgctaaaaacatgtctaaatattctaattcctactgt

SEQ ID NO: 98685 - DNA, 513 bp, Homo sapiens
aggcttgcagtaaaattatcagttcccactttctttgctgcattctcaaatgcaacacatgagaccagctttcccttgccaatttacaatgctgttaactatatgtcctttattatacatttcattaaagttttctattatttggtttctttctacttctccctacagttctggcaatatttgctttttatatttagaagcctcccttttgggtgcataaatatataaagctatattctcttgagaaattaacctctattattattgtatggtaaactcatttcatgcttgtgagagacattgctagaaagtctattttgtctaatttaagcattaccgttgcactcctttggttattgtttgcatggaatatcattttctatcctttcacttttagcctatgctcttaattcataattgagtctcttgtaagcagcatattaygaggtttaaaagattaatttatccactctgtctgctttagtctcttttggctgctataactgaatatca

SEQ ID NO: 98686 - DNA, 591 bp, Homo sapiens
tgtgactaacctctgcagtgagaggggtgatgtgggacttagccctgaatttgtgggatctgtgcgaactctaagttgtgtcagaattaaattttggggcaagaaatgggtgttggagaagcagtgggttttcagggaactttacacatttaggatcaaaagtgttgtaaggagaaagacaatgtgggggcctttgctggagagagactccaggtgtctcggggaaggtaggctctgctctgcacacaggctgctacgccatgcactgccctgtggttccaggcatcctcccatggtaagaaggaccgacgactctgagggaagaagttctgagaacagatgccttctaccctcctgccaacytgaggccaccacatgtttttcacccactgaacatacacactgcatgttgacgtggtcaagcccctctcaggacaaggctttggcatcaagattgttgcccatcctacctttcctcatagactttcccaccaaaaacccacacacgtgcctacaagacccctggcatatgttctacttcagacaccgaatctgcagtggcaacctggttttttcaccatcgcagatttc

SEQ ID NO: 98687 - DNA, 519 bp, Homo sapiens
ggggatgatgctaacatctacttcctagggattgtattagatgtatataagataaaacataaaaatcatgtggtgttacctgtagataatgcacacacttagagatggaagcattaggagaatatgtagaaggtagcatgggccacaactcaaacaagcctgggtctggcagggtgatcttgggaatgtcacttctccactgcgcttcattttcattctgctccagtatgaagttgaaattaaatgtagatactgtcctctggcattcatatagtttagctgtgtgttccacccaaacttctctgtgtattataacccccaggtgttaagggagaaacctgaggggagatgattggattatggggaygggttctcctcatgctgttcttgtgatagtgagttctcatgagatctgatagtttcataagcatctggtacatcccatgctctcactcacttcacttgtcagccactgtaattggaaggtttctgaggtgccctcccaattatgtggaactg

SEQ ID NO: 98688 - DNA, 527 bp, Homo sapiens
cttggaggccctttcagtggacagagatagaatataaatatatatttacccttttctctttatgaaattactttctgtaattattttatgtagataacttcaagccaatctcacaggattcttctgtgctttctttcattccatatttgtatctcctttcttccatgtgagtgtcctagctctcaacaatatcaacagatctattcattgtccaacataatatacataaagtaaccccagaatggccaccccatgccactacaaaaaccaacctactaataaaagttcaggaagtatttgaatcccctccccacactgatagtgaagttgtattgtcaaaatactttgatcagaagctccttggactagttctttctttttcagtgtcattatttattattgtgaaatatagttgagtacatttatttttgtttgcattcagttctgggtttcctttttaacttatttttktatgctaaatacaacatttatgcgctctcaaggtcaaaattatacttaaaaaatat

SEQ ID NO: 98689 - DNA, 515 bp, Homo sapiens
gatcgtacgtattctgattctataaatttttcaggccacagataaaaagcaaacacatttttcttgctaagataaaagaaatctttttaaggggagaggagtttgtttttgcagcagagaaaaataattccaatgagatgattaagagtcagttccaaacaaatttaaaaaaatctacatataaaaccttgaaaatagtatacttatggggagggattattataaaatgggaaacaacggtataattgaaccaccttttacctctaggcatggaactgtatgytttataattgccacaacacttctgctggatagaggttctgttctgcccatattacaacatgctgcacaccaaggatactgtgggttaaagttatttaccccaaattacatagctagtgatatggtttggctgtgtccccacccaaatctcatcttgaactgtagttcacataatccccacgtgtcatgagagaaatccagtgggaggtaatttaataaggggcggttaccct

SEQ ID NO: 98690 - DNA, 515 bp, Homo sapiens
gatcgtacgtattctgattctataaatttttcaggccacagataaaaagcaaacacatttttcttgctaagataaaagaaatctttttaaggggagaggagtttgtttttgcagcagagaaaaataattccaatgagatgattaagagtcagttccaaacaaatttaaaaaaatctacatataaaaccttgaaaatagtatacttatggggagggattattataaaatgggaaacaacggtataattgaaccaccttttacctctaggcatggaactgtatgttttataattgccacaacacttctgctggatagaggttctgttctgcccatattacaacatgctgcacaccaaggatactgtgggttaaagttatttaccccaaattacatagctagtgatatggtttgrctgtgtccccacccaaatctcatcttgaactgtagttcacataatccccacgtgtcatgagagaaatccagtgggaggtaatttaataaggggcggttaccct

SEQ ID NO: 98691 - DNA, 603 bp, Homo sapiens
gaaaactgtgaaggataagtacatttctctgacaaataattgttgagaggaaaagaaaagagatcaggagagggaaaaccatagactaaaaaggaaaattataatgtgtccactacagttggattctaattcaaacagaattatgagataatcaagtaaatacagttctaacttaatatctgtgggtattaagaagttttttttwaaatttgataatagtgttacagttttgttttaatagagtcctgggtggttgcagtggctcatgcctgtaatcccagcactttgaaaggctgaggtggaaggatcacttgagcccaggagtttgagaccagcctgggcaatgtggcaaaaccccttctctacaaaaaaaaatataaaaattagcagggtgtggtggcgcatgcatgtagtcccagctacttggaaggctgaggtggaagaatcacctgagcccgggaggctgaggctgccgtaagcagtgattgtgccactgcaccccagcctgggcgatagagtgagactctgcctcaaaaataaacaaataaataaatctttctcttccagatattttttagaggaagtgatgtaatacctaagact

SEQ ID NO: 98692 - DNA, 603 bp, Homo sapiens
gaaaactgtgaaggataagtacatttctctgacaaataattgttgagaggaaaagaaaagagatcaggagagggaaaaccatagactaaaaaggaaaattataatgtgtccactacagttggattctaattcaaacagaattatgagataatcaagtaaatacagttctaacttaatatctgtgggtattaagaagttttttttaaaatttgataatagtgttacagttttgttttaatagagtcctgggtggttgcagtggctcatgcctgtaatcccagcactttgaaaggctgaggtggaaggatcacttgagcccaggagtttgagaccagcctgggcaatgtggcaaaaccccttctctacaaaaaaaaatataaaaattagcagggtgtggtggcgcatgcatgtagtcccagctacttggaaggctgaggtggragaatcacctgagcccgggaggctgaggctgccgtaagcagtgattgtgccactgcaccccagcctgggcgatagagtgagactctgcctcaaaaataaacaaataaataaatctttctcttccagatattttttagaggaagtgatgtaatacctaagact

SEQ ID NO: 98693 - DNA, 588 bp, Homo sapiens
atcagatgcatttccacctgaacaacatagtataacatgggaatctttttaggatttgaaattataccagatgccttcctctaacttattcatctctcttttttctataattcagttactcatcaagttctttcaaatctgccttataaaatcttaagtctctccttcctcttatctctatgtcttatgtcagacagaccctggccatctctcggctggactaatgctatcaccttctgattgcttttgttgccttgctggctctggtcttttcctctccacyaacccattcttaaaactagctggaggtatttcaagataatgtcactggtctgcttacatcatccaatggctccccattgcatagagaataaagcctggacttcatgcaaaacaaaagacccatgccttcctagactccctctaacttctatgccctaatttcttctgctttgtcacaaaccaggtccttttgtacctctacagctttgcacaagccattgtccctgcctgttatacttctgtctcattcaacacctagaaaatatctctagatctaaaccaaatatccagtatgcattgtaaggt

SEQ ID NO: 98694 - DNA, 580 bp, Homo sapiens
attggaaaataataaaaaagtggagaaataatttttcattataatctttactttctgcctggggttttcttagtgggaagggaacttaccaaaaacatgctattatgtgctttaatattaaacaattattatgagccaatgggatgtttgtaggtagacttcatttgttcatttattccaggtagccaggggtcacagaatggtggaggaagctttgtctgtctacattgcactaaaagagaaattggctttgctgcgcttaagtccttgtcagttagcttatttccttgtgtaccttttctttgtccttttttcccttcctgacctggtgtgactaacatcgggtctttctttatgtctgcaggtctacattgctaaaaccagcagattctagtgagaaatgagatwgtatcttattttattttctttccaaaaaagaatagattccttaccccatgcaaatgcttatgaacattcatgtgatgattcagttaaaaagaaaaaggatgtattcttgtgtatcagtaaatctttaatgactcagttactggtttgcttaattgtagacttctctgtcatt

SEQ ID NO: 98695 - DNA, 369 bp, Homo sapiens
ttgattaacaattagcagcacctgtagttggctataattttaattactgattgcattagggctgactacttaaaattatatctgcacaaamgccattagattacaaggaaaagaataaaactattccaaaataattactctattaaaattgagattaaagccaattaataaaatattttaaaagatttttatttcaagcaatgttaacagattttccctcaattatgcaacatggaaagaaaccgcccagtgatcattctaatgtaactaacttgccattttcctgggagaccaggaagtagttcagaatatgccattgtccatcagaacaatagttattaggaaaaagttcctaggtaacaatagata

SEQ ID NO: 98696 - DNA, 613 bp, Homo sapiens
tttgctcattattgagctatataaagactatgtgatacagtcagtgaatattcctgggaaaagcaaatgaccaaaattcaccagagaacattctgcacacatcgattttcttttttctaggattaatgactagggccatttagtgcaggcctttaaaatttggtacccaatggcattcatttaattagaagtctttttcactccctgcacatattcaataacatgaggctgagtactgtcatctgcctatcttataactgagagataaaaacagattccttattttagctcattccccacttgaaaaaacatgaatctttttaaaaattgtccttaaaagtgagagataataggaagggtatggagagacattagcctacagaaatgacaaaatcctaaggttctatgctcctataatgcttcagtataataaactccagatattaaatattttcaattccatttccttacaatagttattttgcaaatgaggacattaaggcaaagttgtgattggttctttgsgtatgaattatacaaatcattaattttctaaatcttgacttcagaaactctccaagaagccttcttgcctcttctgtatgagttagct

SEQ ID NO: 98697 - DNA, 594 bp, Homo sapiens
acttaggtggctacagcacccagttattcaatccaacactaactgaggtattactgtgaaggtattttgtcgatgggaataagtccatatgtagttgactttaactaagagatattgccgtaatctatttggatggcccagattcattcagataaaagaccttaagtgcagaactgaggctgccctgaggcagaacttctgccctgccatggctgtggacttagcttgagagctccagcctgcccctcttaatggcctgcccagtgatttttgaattgcctggccagccatcataaccacttaaaccaattccttgcaatacttttcttagtatgtatttcctgctggctttctttctctggtgaaaatctgactgatatacctgttttaagcaaagcaaagtctgctaacaacttgaagttatcattagaaagcaatttagatctttgtggctttaaagtctgttttatcagagattaggattgcaamccctgcttttttttcttctttctttccattttctcggtaaatattcctccagccctttattttgagcctatgtgtgtctctgcaagtgagatgggtctcctgaat

SEQ ID NO: 98698 - DNA, 518 bp, Homo sapiens
atgcaacaacaacaacaaaaaaagagacctaattaaactaaaaagctcctgcacagcaaaagaaataatcagcagagtaaacagacaacccacagagtgggagaaaaatctttgcaaactatgcatgcaacgaaggactaatatctaaaatctacaaggaattcaaacaaattagcaagaaaaaaaaatcccatcaaaaactggtcaaaggacacsaatagacagttctcaaaagatatacaagtagccaacaaacatatgaaaaaaatgctcaacttcactaattataaaggaaatgcaaattaaaaccacaatgagataccaccttacttctgcaacaattgtcataattaaaaaatcaaaatgtaatagatgttagcgtagatgtgcaaagagaccacttttacactgctggtgggaatgtaagctcgtacaatcactatgaagaacagtatggagattccttaaagaactaaaagtagaactaccattcaatccagtaatcccactactgggga

SEQ ID NO: 98699 - DNA, 404 bp, Homo sapiens
acaataattaatctgaaatctaacatagataaagaygagaataaggagagcttgtagatgaagagtcaagaaaatgcttttctaatggagcaccatgaatttgctgttttgattaagctgaaagttggaacactgaggagtatggaaaacacctaataagcctcatcacttagaataccttcccaatagtattagtttatttccagttcatgatgaaaaatgtggaacctcaactgagtacatttttgattgaacaactgattaaaccccaaataaagtgctgcattattattattatgtgtcctgcaaataaatgctcatagctaaatttcatgcagaagcagcacaattctcattaatataataatacaatcaggacaggtttttaaaaaaatttagcatta

SEQ ID NO: 98700 - DNA, 404 bp, Homo sapiens
acaataattaatctgaaatctaacatagataaagacgagaataaggagagcttgtagatgaagagtcaagaaaatgcttttctaatggagcaccatgaatttgctgttttgattaagctgaaagttggaacactgaggagtatggaaaacacctaataagcctcatcacttagaataccttcccaatagtattagtttatttccagttcatgatgaaaaatgtggaacctcaactgagtacatttttgattgaacaactgattaaaccccaaataaagtgctgcattattattattatrtgtcctgcaaataaatgctcatagctaaatttcatgcagaagcagcacaattctcattaatataataatacaatcaggacaggtttttaaaaaaatttagcatta

SEQ ID NO: 98701 - DNA, 547 bp, Homo sapiens
acatatgttagcattatttaccaagatataacctaaagcagattgaacatcattttggcaatcccatgtacctaaacatgtcaaataatcctgtttaccgctcttttctggacacttcaggggccctctgaagtattcaaaaagccaggtgccagggaagacgattttgaaactgaagttcgatttagggaaacctgttaaatatgtttaaagcacttaaatagagttccagattaccagaaactatttattttgccaaaatgacacagaagttttaaggaagcaaaaaaaccttttataatcctttacaaattttgccaaagagcagattagcaccttargaaaaccatgttatgcttttatttcaatgctcaatttacagaaaaaccatataataccggtttttgaatttagtctatatgttcacacagagaacctcttctgcaagattaatttccacaattcttccactacttatttgaaccttcagctttttcctaatttaactcaaagcaatcatttaaccctaggcaagagtttacatttc

SEQ ID NO: 98702 - DNA, 517 bp, Homo sapiens
atataacctaaagcagattgaacatcattttggcaatcccatgtacctaaacatgtcaaataatcctgtttaccgctcttttctggacacttcaggggccctctgaagtattcaaaaagccaggtgccagggaagacgattttgaaactgaagttcgatttagggaaacctgttaaatatgtttaaagcacttaaatagagttccagattaccagaaactatttattttgccaaaatgacacagaagttttaaggaagcaaaaaaaccttttataatcctttacaaattttgccaaagagcagattagcaccttaagaaaaccatgttatgcttttatttcaatgctcaatttacagaaaarccatataataccggtttttgaatttagtctatatgttcacacagagaacctcttctgcaagattaatttccacaattcttccactacttatttgaaccttcagctttttcctaatttaactcaaagcaatcatttaaccctaggcaagagtttac

SEQ ID NO: 98703 - DNA, 594 bp, Homo sapiens
aaactcttcattaaaggttggcagaatgagacattaagcatactacctagggcatagttaaccctgtaaaatgtaaatgaatgaataataaatatctattccaatcttggtcttaaaaacttawgatgaagataaggtaatgtacttaaatattatatactactctttaaacagatagacagcagaaaaattactgtgttcactatcaaattaccctaaaacatagcaacttaaaacaacaaacgttttttatctcacacagtttctgaattaggaagtaaggaatctggaagtagcttagctgtaattctaaattatttttggtaaaattatgccacttagaaagataagtctatagattagggttatagtggaataaacgttagctcgttagcaggaaccctgcagaattatagtggggaactttttataagaatactgggatttgatatatttgataagaatagtgtatttgacagacatcttacaacaaaaagtgagcaaagtccaattgtctgctttctttggggaggggaatgaagaggcttccaaaagaagtaactggagacgtcagggatagtctttttaataact

SEQ ID NO: 98704 - DNA, 594 bp, Homo sapiens
aaactcttcattaaaggttggcagaatgagacattaagcatactacctagggcatagttaaccctgtaaaatgtaaatgaatgaataataaatatctattccaatcttggtcttaaaaacttaagatgaagataaggtaatgtacttaaatattatatactactctttaaacagatagacagcagaaaaattactgtgttcactatcaaattaccctaaaacatagcaacttaaaacaacaaacgttttttatctcacacagtttctgaattaggaagtaaggaatctggaagtagcttagctgtaattctaaattatttttggtaaaattatgccacttagaaagataagtctatagattagggttatagtggaataaacrttagctcgttagcaggaaccctgcagaattatagtggggaactttttataagaatactgggatttgatatatttgataagaatagtgtatttgacagacatcttacaacaaaaagtgagcaaagtccaattgtctgctttctttggggaggggaatgaagaggcttccaaaagaagtaactggagacgtcagggatagtctttttaataact

SEQ ID NO: 98705 - DNA, 551 bp, Homo sapiens
atatatatgtctatgtatgtgtgtttatctataatatataaataaaatatgtgtttacatatgacttataactttcaagtctgtcaatacgtttttgtttgcttgaaatagataaatattgttagtatgatattatgtataatttctctgatcactgaaattgaatggtaagagcacataataaaggccagaggcatttgctaaaatcctaattttttaagcctcattcctgacctgataaatggtcacacagtacttacaagtaatggttgctgcaaaaactcttgagataatatatgagaaatgtaagtgaaaggtaatttttaraaagcgtatccctctatgctcattatttataaattcttaaatatcttaagaattttttttcatgtctcagagttctccgggttaaagcactggtagatcatcaataaaagaatggaggatttcctgctaactcctacattctattgtggacaaagaaggtggcagtttgtcctgagccaaagcatttttttttttttttgaagaggggcacagaatgttcagaa

SEQ ID NO: 98706 - DNA, 452 bp, Homo sapiens
aaaacttacagccaccttatctagtgtgcttgcaaatacatctttctgtggtggattttgattgtatttgtcaggattccttcgttgtagctctaaaccacaaccctacagataaaattgtaatctcagacacgtaggccctgatcattactgttcatgtcactgatttccacaggcctttacgggaatcacatcactaaaacgttgctgatgggaatgacgtgaggaaaagaatgaagtcactgatttgtagcccgtctgtaaaatacgtagatttttttcttctgtttaaaaatagcgtatctctatctttgaataaactaagtttgaaatgttcctattgtttagatttatgctgttakgcaggtccccgagtagagatctttgtctcattgatgctgcaatgctgcagtcgattctagatgatctagtgatgaaagccaacctctttg

SEQ ID NO: 98707 - DNA, 541 bp, Homo sapiens
atgggtgtgtaaatatacaaaattaagacaactcagcaataaaaaagaacggactataacaatatagatgaatgtcaaaattatgatgctgagtgaaggaaaccagacgcaagagtaaacaatttatggtgccatttatttaaaaaatagaaaatgaaattaatttataggaggtgacatggtttggctctgtgctcccacccaaatctcatgttgaattgtaatccctacatgttggggaagggacctggttgaaagtgtttggatcatggggtggttcccccgtgctgttctcctgatggtgagttctcatgagatctgatagcgtaagtgtagcagttcccccatgctgtttttgtgatagtgagttctcatgagatctgatggtgtaagtgtgctggttcccccacgctgttctcytgatggtgagttttcatgagatctgatggtgtaagtgtggatgttccccatgctgttcccctgatgttgagttctcacgagatctaagggtgtaagtgtggatgttcccccatgctgttct

SEQ ID NO: 98708 - DNA, 541 bp, Homo sapiens
atgggtgtgtaaatatacaaaattaagacaactcagcaataaaaaagaacggactataacaatatagatgaatgtcaaaattatgatgctgagtgaaggaaaccagacgcaagagtaaacaatttatggtgccatttatttaaaaaatagaaaatgaaattaatttataggaggtgacatggtttggctctgtgctcccacccaaatctcatgttgaattgtaatccctacatgttggggaagggacctggttgaaagtgtttggatcatggggtggttcccccgtgctgttctcctgatggtgagttctcatgagatctgatagcgtaagtgtagcagttcccccatgctgtttttgtgatagtgagttctcatgagatctgatggtgtaagtgtgctggttcccccacgctgttctcctgatggtgagttttcatgagatctgatggtgtaagtgtggatgttccccatgctgttcccctgatgttgagttctcaygagatctaagggtgtaagtgtggatgttcccccatgctgttct

SEQ ID NO: 98709 - DNA, 500 bp, Homo sapiens
aaatgcagtcattgctttctgtctctgctgcttttcacaggtataagccactggctgatacattcctgcgtgagaagaaggaacagtcagctgccgagcgatgtcgacttgttctccagcagtgtaaattacaaggctggcaggttggtgacctacaagctatgaaaataacattttaggattttaaataaatgagctgagtcattgcagggagccaccagaatcttcctggcaaaaacaaattcctttgatgtgtttggcaaggcgtgacattaagtgtattccctggaaatttgtcattctttatgacttaccgattttaacatcttgcagccaacatgagaggaaatctaacaggctccctttacaacrtgacagaagcttatgagccccattctgtttgcccgtgtgtcagattcataccttgtcagtaaagcattttgtcatatttacccatagcaggagtcagaggagccaaaattgaagaactaaggttgatt

SEQ ID NO: 98710 - DNA, 575 bp, Homo sapiens
tttatgtaaaatgaaaacctctgaagctaattctaagtggaaaaataagtggtataatctgattttcacacattttatatgcatcaactggttataggatgatttcttctgtgtagttatttgaatgctatattcattttaaagccatctggagggatgacgaatgaagaaacaaatctgtcagagtcggtccatgtgataccaggggtgctgcttcggaacacaggcactcacacagcacygggagagtcgagaggggcactgcaccgatgtggctctgtgcagaaaggctttcccagtggtacttttcactgatagttcaagaagatgtcgagaacttcggggtgaaagaagttttgtgggtaggcaaagaagagtggcctgtgtgtcccgtttgaggcaggaacttgtgatacctgtttctggaaattgtggaaggagaagttgagatcttaaccttagagataacatatcgtctatgattttaaggatgaggagtcagacacacagttccttctggtggcttactcaagattataatacagacaggaagaaagaaacaaaattagaacacc

SEQ ID NO: 98711 - DNA, 505 bp, Homo sapiens
tgtgtacaagatcgaagttggttctggttgtattgtacccatagttggtataaatattctccacaatttttattttttccaaaagatcgtttgacaaacattaaggctgagaagatttcatttcaagattacaatatgattgacaggagtgaaagccgtgtgcagagtgggaagcaaggctgtttcaaatagatacctattattgatgagcaaaatgctaatgaactgtgtcctaggaagaaaagatttaaatttgtgggaattcrtttctaagaaatccaaatattcaaattagccatacttcggaaacagaactaagaaggagaccaagatcattctatccagaccttgggatatgacccgggtgaagggaaataggttgggaaaatggaatcttggttctgccacttagcagctgaatgaggttccgcaaactaacttccgtaagtttcagtcacttcatctaccaaatggggattaaaatagcatgtacttcataaaataa

SEQ ID NO: 98712 - DNA, 520 bp, Homo sapiens
gaccacttcaacaccttaggtgtagaactcaagagagttgtgggtggccaatggcattattcaattattaagagaatgttaaaagtcarccgtttactggcaaggtacttcctcactgcagggacaaagcattgatggagccactccataaaaatgtttctgaaatggcttggctctgtatccccagccaaatctcatctcaaattgtaatccccataatcctcatgtgttgagggatggactgggatggaggtgattggatcatgggggcgatttcccccatgctattctcatgatagtaagttctcatgggatctgatggttttataagtgtctggcagttcttttttcacacttgctccctcttgtctgctgccacgtaaaatgttcctgcttccctttctgccatgattgtaagtttcctgaggtctccccagccatgcgaactatgagtcaattaagcctcttttctttataaaattacccagtcttcggtatttattttagcagtatgaaacag

SEQ ID NO: 98713 - DNA, 621 bp, Homo sapiens
ccttggtcttcaaccctaaattgttgattacttaagaaacttgtcattctcacacattctatccagacagctagataatgccatgagggggaaatgctcattattctgattgatgtttcccaatcattttctgttttcctatgcttaatttttggaaaaagctgattttatgtgtaacatctataggtagattttgacctacatgtagtaaaagcatccaaattctttcttttttcaaattaagaaatacttagatgagttaaatggaagcgatagtcttttttagattaaaatatagattattttagtagccgtgaaataatcaaattttttctgaattaaacactataatgctaagttattaaggtaaaagctacttagattccaaaacaaaaatacatggcttgatgaggtgaagattttctgggggaaaaaatctagcaaaattatgttamctattgtaaatcattttgccaacttatttagatttttaacctctagcaataacagattattttgatacattattcatatttctgcattgtgcaccttttgcaatttgcatatctggctgcaaataggcccttctttcaggcttcagtccccttggtcacacaggat

SEQ ID NO: 98714 - DNA, 650 bp, Homo sapiens
actgttctttgttgtctgatgttcaatatctttaaaaccattgttttatgtattttgtctgttttccttaatttccagtatgaggagtaattagacccctgttatgttatctttgctaaaagaaaaagttactaggatagttttgaaattaaaagaaggcagtattaatatttatctcattacagtagagcatacatattatgtttacctttcccaaaagccaagtgaacaggaacttaaaaagaaagggaaagtgatcaatatggtcaaatatgttcattagtcttggaaagtaatgggaaattggtgaccagagagactaatccatagaatggtggagctagaaactagattacagtgaattaatgatgaagtgggagtgagaagtagaaaaaacaagtaaagatgatattccttaaaaagttgagttgaacagtgacagacrggtactagatggcatttgtaagaaaacagaatcagagaaaagtgttgactattcaaatatttgttgatgcaaaaaagagagaaaattaaaactgactatgaatagagcagaggctgacaaaatggcccacagactggccactagtttttataaagttttattggaacacagtcagtcatatttatttacattattatctatggct

SEQ ID NO: 98715 - DNA, 563 bp, Homo sapiens
acgtgtcaggcaatattctctaccattttctcattcagtgctcacaactccatgaggtatataggttctgttattatttctacttttcacataaattgattaaataactttccaagatctttaaataggagaccttggatttgaaccactatatctatgctctcaagcacataagtactggctccagtagttgcataatgggctcagtgaaggatgtaagaaagtatgtagtactgaggcagaacttgacaagggaaagaaattagacccacaaacatgaaatggaaagaaagacacattttagagaaacagagagagaatrggaggcctggacagggcagatctatcagttttgctccgtaggccatttacaaccaacagaagtggaggtgatgctgtgtgacttccaaggcgaaatcaaaaaaggtcatgcagtattcacctgctaatctagtgacacctgctttgggaaatgcagctgccatgtgagtaatctaattaacaccaccatgctggagaggctacatctaggcagtccaactaacagccccagctgagctccc

SEQ ID NO: 98716 - DNA, 557 bp, Homo sapiens
cccttcaactatcagagtatccttattcttcttggacacagaacaagagctcaggaactaccaaacaagggtacaagctataatacaggctgggtgcgcctgcgcctgcgcctggcccagccgtgggctgagccrgtgtgccagctagacttagccaggggggtcgagtgggtggggcgcctccagcagcaaggcaaggtgcgtcgccagccagaggtcctggctggcaaagcgactgagcaaattcctgtgtcactttaatttctaatactattaataaatttatttttattctttttcattcatgaaagtactgtgagtaaacaaactttgccaatataaagcagatgccattcctatgacttgaaataagagagcctagcatagtgaaaatcattgttccaggagaggaaaactttaaattccaattaatatttagccaccaaaattctgacttgtttttatgcagtgtgagacaacttattatgaatttaggaagggcagcaaaaccgctttaactaatcaaaatgctctttaattccctaatttgagaattc

SEQ ID NO: 98717 - DNA, 568 bp, Homo sapiens
cggttaatgtactctatctttgtggtcctccatggcatcttaccttcaagcacaacacatgccattgggtattgttttactcaaggatggycaggtgtgttcctctaatggctcgtggggaaaaacaatctctctgtttaatcaagggtgtcattaccaaccagatggttgaatatctagaattaatcagttattgggtacctgtagaatttaaaaaacagaaggctgccaagttaagacagccttgacaatttgtgtataccttgaaattttgtatacacattggcagaagtaatacaaactttacatcatttccatcttattatagagttgatactaattggatctcaataagccttgactctcgttaaacgatgcaaatataacctaccttttctttcccttgccaaggtttttttttttctgctgttgttgctgtttgttttgatgtgttttatgttattttgtattatttggatttgccataccatggttacaaacagaagaggttaaaatattcttgaaaatgcatcaataaataatttatgttgtctcttaatcaaataac

SEQ ID NO: 98718 - DNA, 542 bp, Homo sapiens
  misc_feature (1)...(542): n = A,T,C or G
cctatactgaaatagactgcaagccagatttggctcatggatcatagttagctaacccctgagctaacatgagcaagaaaagaaagaagacacaaattgaccaaatcaagagtgatagaggaaacatcactacagaccctattgtaattaaagggattagaagaggttagtatgaacaattgatgttaacatattagaccatttttatgaaatagaaaaaattcctagaaagacacaaatcttacaaaatctttttaaattattagatttcttctatgatttgaattagaaatttaaaatcttccacaaaaaaakcccaggtccagatggcttcactggtgaattctactaaacatttaaggaagaaataagaccaatcttacataaactctctcagaaaatagagaaggagggaatgtttccgggcacattttaagatgcctgtattatctcatactaaagccagataaagatatgacaagaaaagacaactacatattcagttcctcannnnnnnnnnnnnnnnnnnnnnnnnnnnnnnn

SEQ ID NO: 98719 - DNA, 371 bp, Homo sapiens
accagcactaattggaaataactgagggactgttataattatttaaatcctagtttggtcktgtggggggtggtggtagatttgctttattagtcagcttagaatgtgttatcccatggtaacaaacagccccatatctcagtggcttatggcaacgcaagataactttcttacctgtattttggctacggcaggttagctcgaatctgcttcacatctttttgctgtccaggctcaagaagcatctcctatccagagcatgcctgtctcagggtggaggaaaaaaaaaattgatggaagcacatgataagtctcaaggtttttgttgggagttgtacgtgtccctttcgctcatattttatttttatttc

SEQ ID NO: 98720 - DNA, 561 bp, Homo sapiens
ttatcattttgaaaacaggtaaatagaggcaaaaaaaaatccagcatttatcttgcctttcttktatgactgttatctcagatggccaaatagttgaggagagagaagtttctctttatataagtattgcagctgaaaaatgacaaaggaattatagaattggaacatcattgttctacaacccctgaaaatactgcattttaacaaaaattgtcaatggatgttaacatcacaagaaggaaatcaacctgacatgtgactcctggcggaaatacacaatcccacctctgagctattcttgtcaagaaacctaagtgtgattcagcctctggatctcactaccaatttaccagcaacacagaggacagagaaacaagttaaacatcaccataggacagcaatcttgaaaaattcaggctgtggaaaattttataggacaacctgatttcttcaacaataaactacaagggggctgggtgcggtggctcacgcctgtaatcccagccctttgggaggccgaggcaggcggatcatttgaggtcaggagttcaagaccagcct

SEQ ID NO: 98721 - DNA, 542 bp, Homo sapiens
aatgtgaagaacctacaaggtggtggaaaacatatataatttaataaatgtaatatagcattaaataaataattagaataaataattctaaataaaatttagaatttaataaataaaatatagaatttatggtagagaaaatatgcttttaaaaatcaatttgtgccaggtgcagtgccgcacacctgtagtccyagcactttgggaggccaaggtgggtggatcacttgaggtcaggagttcaagacctacctggccaacatggtgaaatcatctctactaaaaatacaaaaattagcctgatgtagcagcaagtgcttgtaattccagctactcaggagactgaggcaggagaatcgcttaaacccaggaggcagaggttgcactgagccaagatcacaccattgcactccagcctgggcaacaagagcaaaactccatctcaaaaatcaaatgaaaataaaaatcaatttgttatgtttgaaagtggattggcccccactgggaaaaggattactgtttcaaagttcacatttccaatg

SEQ ID NO: 98722 - DNA, 542 bp, Homo sapiens
aatgtgaagaacctacaaggtggtggaaaacatatataatttaataaatgtaatatagcattaaataaataattagaataaataattctaaataaaatttagaatttaataaataaaatatagaatttatggtagagaaaatatgcttttaaaaatcaatttgtgccaggtgcagtgccgcacacctgtagtcctagcactttgggaggccaaggtgggtggatcacttgaggtcaggagttcaagacctacctggccaacatggtgaartcatctctactaaaaatacaaaaattagcctgatgtagcagcaagtgcttgtaattccagctactcaggagactgaggcaggagaatcgcttaaacccaggaggcagaggttgcactgagccaagatcacaccattgcactccagcctgggcaacaagagcaaaactccatctcaaaaatcaaatgaaaataaaaatcaatttgttatgtttgaaagtggattggcccccactgggaaaaggattactgtttcaaagttcacatttccaatg

SEQ ID NO: 98723 - DNA, 536 bp, Homo sapiens
acttctgcactactgacattttgggccaggccattctttgctgtaggggctgtcatgaaagtaacaggatacttagcagcatcccgtgcctttacctcctctccccagtaacaccaccactatcctctcaccaccccaatggtgacaatcagaaatgyctcctggggaatgggcaaaactaagtctggctgagaaccactgatctaaggctttctgactcagttcactgtgatgtaactctctctctccctctctccctgtctcatacacacacacacacacacacacacacacagacaaaaaaacccccaaaactccaaaattaactgaaaaaaagcaataataaaccccaagaaggagacagacaggaagagaaaaatgacagacagagaggaagagaaaaatgaataaatggaaggaagaaaagaaggaagaaatagagagaggaaaggaagtcaggaggcagggaaggagggagggaagaaagaaaaagagaaagagaaagaaaaaaagatacaaaggaaggatggaaggaa

SEQ ID NO: 98724 - DNA, 441 bp, Homo sapiens
gttgtagttccacatttctcttgtagatggcaacaaatatttcatattttttttgtcccaacttctctactgaatgctaacttcatgaaggcagaagacttcatcttctacttaatttattttgctctatgacagtaaatgctgcatgctctcaagactagcttactgacatttaaaattatttgctatttgtaattatttgcatgatagtgatagaagtgaaaaatctaggaaaatgagaagatgcaagccatcattcatggaaagtgcactctcggggacatacgtatatacagtgcatctaatttccctcctttaactcatctaaccataacaaagtaagtttctaatactaacttcatggtagtttgcagaattgggaaatatgtaagccacataygcatatacaaaaatgtcattcacctgttatcactcagatag

SEQ ID NO: 98725 - DNA, 582 bp, Homo sapiens
cctgaataatgtggggctcactctgttgctctcactagatggttatttacttcacagctgaaaagacatttattttcttggtttcttttccagttcctagagtagaatcctgcctaaaattagcaggcatatttataattaattaaacccttattttaaagatatttacaacttctcatctaagtgttccacctgcaggggagtataacctattmattaaaaggaagattataatattataattcataaggtattaataagaaatgttaaagacattaggtaccaaattacctaactatttaattggtgttctctcccagaaaaaaatggaaatacctttcattgataagaaagagttaatttgggggtagaatggtaggtgcctgtggggagcagcaaactctgacagatttgctcacttgaaggaacgttaggaaataacctctcccctgtaaaactacccacttaaaaaacagatctgttcagaaagttttttttttggttttttttttttttttttttgagacagagtcttgctctgtcgctcaggctggagtgcagtggcatgatctcagctcattg

SEQ ID NO: 98726 - DNA, 433 bp, Homo sapiens
tgacaggggttaagatccgtttttaattggttccactcctggtggaaggctttcttctatacatgtcaggttttctttgacttatcaataccttcatgaagaaacaatgaagtgaaggacattttaaaagcaggttgtataagccactaaaaaattttgaataatgcctagtctctgcatataagtaaaaaaaaaaagcagtttaacaatatgttaattatatgtagacattatttttatcacaataaaattragacatactacaagaacagattgacttagtttttcagtttgcaattatcttcccagttaaatataagtaaagatcttaataaatgtaacattaaagttcttgaactatataccacacaccattccacataaacagaccggttatattaaaactagcaaagccgtattttgtctgtgcttg

SEQ ID NO: 98727 - DNA, 470 bp, Homo sapiens
ttaatggctcttgttttaggcttttcatgtagcatcacttgggtgcctttgggcacttgggtgaaccgggggacattgagcaccactctgattggttggcagggaggagtcagagcttgactcagaccaagtcccatcactggtcgcactgagggtgaagtggcaggaggaggaggaggggctccggctggtctgtggtgaggtaagttgggaaggggtctgaaaatggggtagagagatgtggtccaagggagccagccagtgacgggtactcctgtgtttgctgaattctccaagcccagtgctgcaagcattgagtgagccctagtgtgtgccaggccctgacctgaagmtgagcaggggtcagagtgccctgggcagcccaggatgaagtgggctccaacagcagctggagggagttaggtgtgcaagggcctggcagcccatttcccttccacatggtttagcct

SEQ ID NO: 98728 - DNA, 617 bp, Homo sapiens
tatgaaaaaaaataataaaattataacaattagataagtgctacgtgaagatatcaacaatgttggctatcttacagtaagttttcaaagttgtggaaagggtggaagagcatgccacttagttttagggcacagagagctgacagaaggaagttaatgattgcaaggttggcagaccagatcatgaaggatattttatgatatgtgggaaactttggacttgatctcatatgagaaaatattcttctgggtacagcatgaagaatgaattgtaagagaggctaggttaggctaggagtagggactctgtaatggtgaaggcctgaactaaatccaagccaatggaaggaggatgagagggacaatgtgtagagagattttaaaaaagaaacaatgacagagatataaaaggctgaaggaaaaacaaagatccaggatgactcccacctttgtgactctaaaaactgggcataatgtggaccactaattaaaagmaaaacaaaacgcttaaaagattcctagattctgacacaccatttataattttaacacaaaagaaggctaatcagtttcctgggataagacctttttctgatttctggcatgtctttttcttt

SEQ ID NO: 98729 - DNA, 602 bp, Homo sapiens
gagaaagattccagtcttggttttattcaatctgttttaagcaagatacttgaaattttgtgtgttgacacctttctaggactctctaaaacttttatagcttgttaggttatttatatacagcatcaaaagcccttgacttaattatatgggaattgctagtttccaatgactggagaaaataatataactctaggttgttgccattaaaaatgaatgattttaccttatagtcatacaagagtggaaatcttacaactctataggtttatgtaaagtgyatagttatatacagtttcatatgaggttatatacaaacatagatgagtcctttaaaaattatatagtttcaatctaggactaatccaaatataaaacaatctctcattaccctaatgagaaaacctaggaaaagggtttttagctaaattgaataggcaaaagtttagacatgtaaatttaaaagttatatgtctatattacctttgataatgttttaaatttaatattcactattaaattattctattataatttaatagtgaatattaaaaatagtgaatattaaatagtgaatattcactattatattattcacattt

SEQ ID NO: 98730 - DNA, 584 bp, Homo sapiens
atgaaataaatttctgtatactccacttttaaaaatatgtactcaacattttttttaatgacatcttcatgtgtttctccccaaaactatgcttctctctatttcccagagttggccactatcgtgacttttcggctaaccattaatatcttctctatatgcttagcacacacatatgaaagtatccctaagcaacatattgcttaatctgtttgtgacattcatagaaatgwaatcctatcgtatagattcttgcgtgccttgttttcatggcttaccgcgaaatttttgagtcatcagacttgatgggtttaaccaaggctcattcttttggctgcatggaatagtattgtacaaatatatcacaattgatccacctttctcccagtgagtattcaagccatttgcagtcatttatttgtttttacaaataatgttcccataagtattctcatttatatctcttggtgcacacatacaatactttcttcaggatatatgtacttagaaatgaaattgctgggatatcagtttggacagcatcaaagtgactagatagtgctaatatatttttttccaagaga

SEQ ID NO: 98731 - DNA, 578 bp, Homo sapiens
aaatttgtttaagggaacacatgtcaattgatgtcacttaaattgataaaagcaatacttatttaatatttattttttaaaacaaaataaaatacagttgaatggaaaatgagaagttttcctttcaaaactkaaacttatttttccactatggttaaaaatttcattcatattcaaaataattttaatgctaattttttgacaaataaatataaatgaaattaaagctctgctatttttttttaaacaaatgactatttaattaagatatcagttagtcaggttagcaagcaccagtctggagattttgaacagaaagatattttgtatagggaattggttagtaagatgttagaagggttgtaagaacaaagagtagaaagaatttgacccagtgttagaagctgctcccatcctcggatgaagcccacagtcccttgtcactggactaaaggcacttccacttaaactgttgaaagcaccgccactgctgctgagcggggatcacccctgcttgccactgctggaactgctgatgatgctggtactcacagtccccacctgcttccctgctagag

SEQ ID NO: 98732 - DNA, 578 bp, Homo sapiens
aaatttgtttaagggaacacatgtcaattgatgtcacttaaattgataaaagcaatacttatttaatatttattttttaaaacaaaataaaatacagttgaatggaaaatgagaagttttcctttcaaaacttaaacttatttttccactatggttaaaaatttcattcatattcaaaataattttaatgctmattttttgacaaataaatataaatgaaattaaagctctgctatttttttttaaacaaatgactatttaattaagatatcagttagtcaggttagcaagcaccagtctggagattttgaacagaaagatattttgtatagggaattggttagtaagatgttagaagggttgtaagaacaaagagtagaaagaatttgacccagtgttagaagctgctcccatcctcggatgaagcccacagtcccttgtcactggactaaaggcacttccacttaaactgttgaaagcaccgccactgctgctgagcggggatcacccctgcttgccactgctggaactgctgatgatgctggtactcacagtccccacctgcttccctgctagag

SEQ ID NO: 98733 - DNA, 539 bp, Homo sapiens
tttcccctcggaaaacaggagaaagaagtgctaacagcatctggggtaaactgcactaaaaaccttgctctaggctggttgcggtggctcacgcctgtaatcccagcactttgggaagacgtttacaacctttaaaacagaggtttcaggccaggcatggtggcttatgcctataatcctagcactttgggaagccgaagtgggcggatcacgaggtcaggagatcgagaccatcctgactaacacggtgaaaccccatctctactaaaaatacaaaaaattagctgggtgtggtggcacgtgcctatagtcctaattattcaggaggctaaggcaggagaattgcttgagcctgggaggtgaaggtttcagtaggccgagattgcacyactgcactccagcctgggcgacagagtgatactccatctcaataaaaacaaaacaaaataaaacagaggtatcaaaatagctacgttgaggaaactcagagaaattcaacataacatagagaagaaattcagaattctggcagataactt

SEQ ID NO: 98734 - DNA, 630 bp, Homo sapiens
atgaaactactacaataaatcattggaggaaatatccaggacattggtctgggccaaaatttcttgagaaataccccacaatcacaggcaacgaaagcaaaaatggacaaatgggatcacattcagttaaaaaacattctgcattgccaagaaaaacgtcaacaaaggtgaagagctaacccgcagaatgggaaaaaatatttgcaaattatccatctgacaaaagactaataagcagaatatataagtagctcaaataactctctaggaaaacctaataaycccattaaagcttatttcttgcatatttaatgataaatttaacttacatgaacaaataaagtttaaaccttgcttaataatatggtagtaatgatagtaacatatttgtgagataaaattctatttatttttgtttttatctgataatgtaacattgtatccctatcaggcatgaaatactctgataatttttcatcagactccagatagtacctgtagttctaaccctgacctacaagactgcaagactgtagtcccaggcaacctctcagatctctacgctccctcattcaatgctggccacacaggtcttcgtgtcagaccagcctccacgctggggcccatcat

SEQ ID NO: 98735 - DNA, 522 bp, Homo sapiens
cctaacatcttgggagtccaccccttgcaacaatgtgcccaggatgtgggacacagagttaaggaaataattttggagctttaaagatttaatgacggctctgctgggtttcagaaatgtgtggggcctgttgtccttttcttttggctgacttctcccttttggcgtgacaatgcttactcaattcctgcaccgccattgcatctcgaagtaaataattaatttctttttttattttttattttacaagctcataggtgaaagaaacttgccttgagtccccaatgagactttgaattttggacttttgagtgatgctggaatgagctgaggctttyaaagactattgggaagggatgattgtattttgcaatgtgagatgaacataagatttggggtcccagagatggaataatatggctagtatattttgtcctctctaaatctcatgttgaaatgtaatctccaaagttagtggtggggcctgtggaaggtgtttgggtcatggggacaaatccctcg

SEQ ID NO: 98736 - DNA, 496 bp, Homo sapiens
aacacaatgctatagactttggaatattgtatgggctcgtaatcagcgtactgaatttcaagccattccttggccactcaatggccactactaaatcacacaacccacccaactggagaattaaatyaaatatctggagcaatttaatgtgcatgcattcgtggccacaaaaatgaagatacaaataagtaggtgattaatttttattaaaatctgatgattttctatagaaataaattcaaatctattaagtatataacttcaggctagtgtcataatgcattcaatttttgtctgcaaaatctgctcgtgcacatctttgttcaaagaaccacttgctacttagtgaccttaactgaaacattaattgttttgtgtgcccaaatttaatagaacctggctatcagggatgatgtcacaaagaacattgttattgaaatgccaggagtttgttctaggtcctgctgttcactaaacaaaaagccaatcactgaga

SEQ ID NO: 98737 - DNA, 541 bp, Homo sapiens
ggccagaaatactgagaatgctgtaggaacaaatacgtcaaacacagtgttgttttttccctaccaaaatgtaggatctttttggcatataatacatgatagcagctctctcgaggatattttaagaacttkgttggggtttaatcacccattctgcttgaggatttatacgatatacatccaatatataagcatctggatccaagcaatgctctcctaaaagaaagagaaagatcagagaattagtgtacatttgtgtgtgtgtgcgtgcgcacacatatgtgtctgtgtgtgtttgtgaggttcaaataaggttaatatagttttcttggccaaagtaagtagacatatgttaaggtttcttaacaaactcttcttccctcttctccctctctcctttcttttttttttctttctttaagactgtgaagtatgggtatatcaaacaaatctcatgtgaaattttggaagaaagcagacataccatcacaggcaaattgttcccttgcttcatggcatcaattagaaaattatggcaagg

SEQ ID NO: 98738 - DNA, 541 bp, Homo sapiens
ggccagaaatactgagaatgctgtaggaacaaatacgtcaaacacagtgttgttttttccctaccaaaatgtaggatctttttggcatataatacatgatagcagctctctcgaggatattttaagaactttgttggggtttaatcacccattctgcttgaggatttatacgatatacatccaatatataagcatctggatccaagcaatgctctcctaaaagaaagagaaagatcagagaattagtgtacatttgtgtgtgtgtgcgtgygcacacatatgtgtctgtgtgtgtttgtgaggttcaaataaggttaatatagttttcttggccaaagtaagtagacatatgttaaggtttcttaacaaactcttcttccctcttctccctctctcctttcttttttttttctttctttaagactgtgaagtatgggtatatcaaacaaatctcatgtgaaattttggaagaaagcagacataccatcacaggcaaattgttcccttgcttcatggcatcaattagaaaattatggcaagg

SEQ ID NO: 98739 - DNA, 471 bp, Homo sapiens
gagaagctagagagaagatgacatttgaactgtgccttggaggataaatacaagtctactgatgcggagaagaggatgagagccttgcaaggagagaagatggcctgggcaaaggcacagaggcctcaaagtatatggtgggcaggggactgctgcatggccaagtaaacgaggagccggaggagacgaggcttaggaaacaggctggtgtcaaattgtgaaagccgcagatgtcctgctaagtaatagggttgtgccttatctatgattaatggcaagcaggcacagtttttgccttggagcccggtgaaagcaggattgacttgaattgatagaaagagaaaagaggcagcaaaccatttaattgattgactgatcaattarttaattacccaagtctccttgtgaaagttccaaaccttctcactctcctctcactccacattcagttctacatagcagcaggaattc

SEQ ID NO: 98740 - DNA, 592 bp, Homo sapiens
tattcctcatttttaagatgaggcatctgaagcttaacatatcacttctccaagtcataaaagcaaagaggaagtcaggacttaaatgcaggtcagatttatttcaaactatttgcctctctttgaaaatagttttttagcgaataaatgtgttgattagtaaaacatatggcataaagtttccagcgaacacttcaatccactaagccatttacctcaaaattattacattgcatgacatgaaaaaatatctgacatagcatctaaaatgcaagataatttttacaatattggttttacttactgaatagtgacatagagaactattattaactcagttttgtagatgaggaaaccaagtaagcaaaccttcaaagaaggtgcctactttgacttctcagcccgaggtctttccatgatgctacttgctctttctaaaaaatgcatgtagttcctctgtctcaaatgtctttctccartcgtgatcacctaattattgcctcttgctattgttttaattagtctactccaaaattcaggtacttccaatgtgataatattacgaggtgaagcttttaggcagtgattaagc

SEQ ID NO: 98741 - DNA, 543 bp, Homo sapiens
tatagtacactatgaggctctgcsataaacaatcttaacattctcaggaaaatgtaactgtatttaactaaaactttagtataaactgtattggaatgatgagatagaagagtggtgaaagttgtgttggtgtaagagttcatcagatgtaatgagttctcaagagataatagaacaaggatagtaggaaaagcctatatagaacttgaggataagtagcagcaggagaaagatttaatgtatacaagagtagtgtccttgggaaacgacactctgattaaaatgaaatacattatcaaattctatgaggtcaaatacctcatagtttaaagtttctgagatttgtgtttgcttaaaaaggccttttctgaaatgcttacaaaaataatctcattttcttacaatactttcctagtttacttttgtttataaaattatctctttaatctatttggggtttaattttgtatggtttagtactgacttttaaaaaattttgtttgattatatctaatgtcacagatgtagttatttctaatgtta

SEQ ID NO: 98742 - DNA, 543 bp, Homo sapiens
tatagtacactatgaggctctgccataaacaatcttaacattctcaggaaaatgtaactgtatttaactaaaactttagtataaactgtattggaatgatgagatagaagagtggtgaragttgtgttggtgtaagagttcatcagatgtaatgagttctcaagagataatagaacaaggatagtaggaaaagcctatatagaacttgaggataagtagcagcaggagaaagatttaatgtatacaagagtagtgtccttgggaaacgacactctgattaaaatgaaatacattatcaaattctatgaggtcaaatacctcatagtttaaagtttctgagatttgtgtttgcttaaaaaggccttttctgaaatgcttacaaaaataatctcattttcttacaatactttcctagtttacttttgtttataaaattatctctttaatctatttggggtttaattttgtatggtttagtactgacttttaaaaaattttgtttgattatatctaatgtcacagatgtagttatttctaatgtta

SEQ ID NO: 98743 - DNA, 543 bp, Homo sapiens
tatagtacactatgaggctctgccataaacaatcttaacattctcaggaaaatgtaactgtatttaactaaaactttagtataaactgtattggaatgatgagatagaagagtggtgaaagttgtgttggtgtaagagttcatcagatgtaatgagttctcaagagataatagaacaaggatagtaggaaaagcctatatagaacttgaggataagtagcagcaggagaaagatttaatgtatacaagagtagtgtccttgggaaacgacactctgattaaaatgaaatacattatcaaattctatgaggtcaaatacctcatagtttaaagtttctgagatttgtgtttgcttaaaaaggccttttctgaaatgcttacaaaaataatctcattttcttayaatactttcctagtttacttttgtttataaaattatctctttaatctatttggggtttaattttgtatggtttagtactgacttttaaaaaattttgtttgattatatctaatgtcacagatgtagttatttctaatgtta

SEQ ID NO: 98744 - DNA, 543 bp, Homo sapiens
tatagtacactatgaggctctgccataaacaatcttaacattctcaggaaaatgtaactgtatttaactaaaactttagtataaactgtattggaatgatgagatagaagagtggtgaaagttgtgttggtgtaagagttcatcagatgtaatgagttctcaagagataatagaacaaggatagtaggaaaagcctatatagaacttgaggataagtagcagcaggagaaagatttaatgtatacaagagtagtgtccttgggaaacgacactctgattaaaatgaaatacattatcaaattctatgaggtcaaatacctcatagtttaaagtttctgagatttgtgtttgcttaaaaaggccttttctgaaatgcttacaaaaataatctcattttcttacaatactttcctagtttacttttgtttataaaattatctctttaatctayttggggtttaattttgtatggtttagtactgacttttaaaaaattttgtttgattatatctaatgtcacagatgtagttatttctaatgtta

SEQ ID NO: 98745 - DNA, 621 bp, Homo sapiens
tgatttagcgattagaaatctgaagttatcccttaaattttgctttctttaaagtttttcatctgccagttttgtttggtgcaatttcattcctatattgtaaatctgagtgtttaatatgtaattcaataatttattgtaatattattttatgatttccttattacgtgatttttgaaaaagagaacttcccagtttttccaygctgctcctccttcattcgttccacccttattttcgtttcttcttttcaagcctggttagaaaatgttctataccaaatgactgatggtaattaatacaactatgaataagtcagaggacacccttgctgccttagttctgacattcaaattggggtagtaggaaggagagagaaaaaaagcaacaacaaaaagcccataactcaacagggtactttgtgataaactccaaggaaaaaataaacacaatgatgtaacagaaactgaccacctggtttggaaagggctgaataacatcacaactagaagaactagtgaagcaagagcaaaccaaccccaaagctagcaaaacacaagaaataaccaaaatcagagcaattgagaaatgaaacactatgcaaaaggtcaatgaatccag

SEQ ID NO: 98746 - DNA, 610 bp, Homo sapiens
aacatggtaaacgaccttatgtgaaaacaatcagataatccagaatgtagaactttctataggacaactgtcctggtcttttaaaaaagtctgataaaagaaaagaagkgtggaagagaggacttaagggaaacaagtaaatccagtgtgtgttccttcatcaaattgttttctttctttaatttttgtgtgaaaaaccaggtgaaagacaaattttgagcaactgtggaaatccaaatgtggaccatatgtatttgtaggtctcaaagaacttgctttatgctttaatctgggtgctcctgtattgggtgcatatatatttaggatagttagctcttcttgttgcactgatccctttacaattatgtaatgcccttctttgtcttttttgatctttgtcagttaaagcctgttattcttattaaattcttattaaagaattattaattgtagtaggaaagatagagatatttttagttacatcacataatgttttaatctttgtgatgcatgctgaagtattaaggggcaaagcattataatagctgtagttctctttaaggtggtttgtcaaaattgcataaaaacataaagcaactttgagaaacgt

SEQ ID NO: 98747 - DNA, 610 bp, Homo sapiens
tttacttcctgcgcttctgtcatatctggaaataaactgggtgctggaatatgcagggagccctttacagacaattactcttctgttcaataggtagctcttttactggctgtcctaggctaacattagaggagatatgaaatcaataaatacagtatgttttccccagaattgatagtgcagtagrgtgtgtgtgtgtgtgtgtgtgtgtgtgtgtgtgtgtgtgtggtggggacacaaatgaccataatgtagagcaaaatgtgaatgtcaaaggatgatgcaaatgaagggaccacatcacactgggtgatcaggagtgattcttgaggaggttgaactggagtctggtgttgctgggttgtcgagcataacaatgaagatgatttgctcaggggtcagactttcctttgctgcctgtgtgaccttgtgaaagtcacttaatttttcgaggcctcaaatgtctccagtgctaagtggggctagtaaaggtcacttttgaaaattaagtgagatagtatatgcaggttacctgctacaatacaaaaactcattaaatgttacgatttttgttaaatattctgaatagagatgatagatgaaaactatt

SEQ ID NO: 98748 - DNA, 604 bp, Homo sapiens
agtcttgaaagttggatgatttccttcatgtcagatatccctagggtacctttaatgacatataaaaattttattctcacatctgaaagcaattccacagcgtcctgacaaccggcatcttaaggactyattgaaccctgactggttgcttagatgccttgtatggcagtcacagagagtcattccctcatttataaggggtttgttttgtttctttccttttgtttctactgcatcaagtacagttattcatttatttcccgacagaacaaactgacttgatatgcaagttggtacagtgatggccagagggcacccagattcagaatctcttcttctcaggttcactgtagtgggagtggaaagatcctatgtcctcacttttgttcttaattaactgcaaaatgttgggcaagtaactcactctctgcatcttagatcccacacttcaaaaatgacaaatattaagattggtgacaatctgtttccatccataaggatggaatcctagcctttggattggactctccttccttctctggtagcaccaggacctctggtttgcacgtggctcagcatctatcaggcaggtcctgggtgcagc

SEQ ID NO: 98749 - DNA, 422 bp, Homo sapiens
catccccatgatctgatcacctcccactargtccctcctcaacactggggattacaattcaacatgaaatgtgggggggacacagagccaaaccatgtcaggaggcatagatgaataattagcagacaggaagtgtgtacaatgtccttcagcacacaagccatgacacagtaggatggcttgtccatacttctccatccgtaacttctaggtgtcccttggtgacttccctgcattcacctgctccttgcttgaaggaagtaccccaggctcacggacagaagtgcatcacactcagggagggtccagcagaccactgagagcaacggtgctgagcagccactcattctttcattgaacagatttcactgagtcctgtatgggttgggatgagcaagactctgctgtcaaaactaagccct

SEQ ID NO: 98750 - DNA, 422 bp, Homo sapiens
catccccatgatctgatcacctcccactaggtccctcctcaacaytggggattacaattcaacatgaaatgtgggggggacacagagccaaaccatgtcaggaggcatagatgaataattagcagacaggaagtgtgtacaatgtccttcagcacacaagccatgacacagtaggatggcttgtccatacttctccatccgtaacttctaggtgtcccttggtgacttccctgcattcacctgctccttgcttgaaggaagtaccccaggctcacggacagaagtgcatcacactcagggagggtccagcagaccactgagagcaacggtgctgagcagccactcattctttcattgaacagatttcactgagtcctgtatgggttgggatgagcaagactctgctgtcaaaactaagccct

SEQ ID NO: 98751 - DNA, 535 bp, Homo sapiens
gtgggtttgccttccccagcccactgactcaaatgttaatatcctttggcaatgccttcacagacacactcaggattaatactttgcatccttcmatccaatcaagttgacactcagtattaaccatcacaagtctaccccttgtcaacttgaacccatgcacatcttctgagattatgcataatcttcaaataaagacagtaataaggtcataattatgtctaatgtaatacaactacccttcatacaactggaaatgtaccaatccccaacccaaatacataaagttaacaatacttaaatgctgatatgaagtcaataaatcttatgtcacatgataaaggaaataaaatgaagatattttcttagtacaagtgtatacgtgcacaaacatgtttttaacaaaagaaggaggaaatacttaggacaattacagtcctcattcctgcagctggtcaagtggtcatagctggtattggtgattaacttcttctactacccattctatattccctttgccttcagcaagcaactc

SEQ ID NO: 98752 - DNA, 592 bp, Homo sapiens
taggcatgactagaagcaataagatagtaaaataccctgtattctatgggctaacagatatcaagaaaaaaatgaaaaatatatacacaaatatcacaatgtatcataggcacttatatgcaaaagaaataatggtggcgccaaagaatgatcaattctaacccttgtggtcagagatgtgttatcttttaggcacagtagacagtgcctaggacccactttttagcagtctacaaaaatgttttattttattttaaaatcagaagaaaagttaacttttaggtagccaaaaatgttttcaatatataatattaatatattcagttttatgccaattcaattgtaaaatacaaattttaattttttcatgaagaaaggtgtccacaaaactgcttagggcccatgaaataataatgcagccctagttggaataaacataagtaaaggtttgttagaggagatagcttgtctaagttgattaaaatagtgttggtgttcccctatcagacaygagagagagaagcatttcagctaaaaggaacagcaggagcaaaggtttccaaagataagaatcagcctaacatgttttaaa

SEQ ID NO: 98753 - DNA, 627 bp, Homo sapiens
ttatatttttttaagttgttatactggtatacctgaaggggcaggaagagaagaggcatgtccttgagggccagaagggagaaggaaggagcatattcctcaaaactagaaaagaggaacaaaatgattaggtctttctattaatggagacatatgtcctgttgggtggcagatcttctgtgaggtagcggaacctgaaaggtgatgaccacatgggggcaccaaaagaggctgaaccttggaccctgcaactccaagccccagcaaaggtgcctgtgccctaattgtgacacagaagcagcagagccatgggaacttgaagggactttgtgggctgcacacaaagggctgcagagctaaccagtatagatcagcaccttgagggcctctttgatgcactaggatcccgtaggggagccccaataatcaygactgggaatacatttcctgtggcccaatgtgatggtggcttcaatgccatacatacattcactttaaaaaataaaaaaatgtaaaagtgttcctttttctctgcaactttgccagcatctgttgtttctggactttttaataatcgccattctgactgacatgagatagtatctcattgtggttttgatttgcatt

SEQ ID NO: 98754 - DNA, 537 bp, Homo sapiens
atgtacatcagtaaacaatctgtgccctactcccatccccatgaacctaccaccactaaaaacatccctccccacagttaatgataaaagcatagactcttagagctacatggggccttagatcacttatgcaaatccctcgtttcagataacgtaacaggttcatagaggttaagtaacttgtctaagatcatacaactgattattaacggagtcacaaccaaacctgcaggtcttgattctgtcytaatcaatgacaaatttcatactcaaaaatttcaaaaacataactataaaacttatttcagaatgtttatagcaagaatgatttcataatgggcagtgtggtgtatcttcacatacataacatgatgagaggtggagccttcaagattaggagagcctagggtctgcaaagatcctacaggagcttccagtcacctgtctgaaggggtcaggaaagccaaccagaggaatttacatgtagaccaatacctgaagacggtgaggtggtattcaagtgaaggcataggctca

SEQ ID NO: 98755 - DNA, 645 bp, Homo sapiens
gccattcccaccccctgaaatacattattatgaaatattttatatttttcaagccacaactcaaggcctgctccccgtccttcattcgattaacaaataattatgcatacagactctgctaagtccaggggattccatagtgagcgaattccaagtgttataaataccccaaactgcctgctcagaaagcacataacagtggcttaaactagtctggggagttagacaagaatgctctgaaaaggtggcctttgacctgagctctgactgcaaagtaggagttaacttcaagaggatagcctcttacagtggtaagcttctgatattttgcatgaaatgatataatattaactctaaggagatcatgaataggtagggtgtagactgtaattcctagagcaacaactccgaaaaacaacacaaataagtataactaaaatgcaattggtaaacaaaagttatttttaaaatagtctaataatccaaaaaaaaaaaaaaagctggggacacagaaaacaaatagtaaaatggtagacccaaagccaaccatatcaataagcacattaaatgctaattaaatattcrtggactaagactccaattagaagactggaattgtcagaatgagtaaaaaagtagagccca

SEQ ID NO: 98756 - DNA, 410 bp, Homo sapiens
attcgtttctgaacatgtagttgaaattccaaaatttaactattcatcatataccaaagacagtacatccaggacacaaattctggagttagtgttccatcacttaccaattgagtgatggtgccatgcttctattttatcttcagtaaaactgagataataatagtacacacctcctggagttattgaragaataaaatgaggagataggtagatagctagatggtagataaagatatcactttatcgcttagaacagtccttaaaacatagcagacacttagaaaaatagtagatgctattttatatttacatttgtaaataactattctctgggtagctgtgtcatttcttaaagcgtaaattatttaaaggcaggctactgtctttctgtaatcaatggagaattc

SEQ ID NO: 98757 - DNA, 529 bp, Homo sapiens
aggaggctgtgaatcaagaagggagaagtgtgtctccagcaggaggsaaaccgggcgagtcagctggcactttctaagcaggccctcccagaccactccccatccgcccagaggccgtgaggtctcctctctgcccacccagtccctttgaaaggccttgattgggaacaaccttccttggaggcagggtggacactgaccgcccaatctctgcacctcccacctctgcagaatcttgtctgaaaatccaattcccctcatacaagaaggaattgaggattattcatatattcgttcaaacactgctaggtgctggactgagcctggagatctaggaagcaaagtctttcttggcccccagggcaaactaccaggctagacacacagtgtggcagtaaagtagaagactatgggagccctttagcctggcttgaagcagtcagagaaggcttcttggaggaggtagggatgggggtgaacaggaattgttccatcaagggagaacagaagcacaaaggtttgcaggctc

SEQ ID NO: 98758 - DNA, 521 bp, Homo sapiens
acttgagatatatatatatacatatatatatatgtatgtatgtaaaaccctgttttgtgtgctagggactcaaaattgaataatacatagtctgaactctcaaataattcccagacaacgggaataagcttagtaataaatatagttcaacaaaattagaatgggctcttttcctggtcatgatctcagagaaytcccctggtagcctaacaacctgggtccctcctctgtcctaaccaagcagccctgtacctctttcttccttcctgtatgctgagcaattcagcttcatttccgttcctcttcacagcttcaccacctgcttgccacacctgggttcctttcctccctgccaggctaacttgaaaactgtatgtctttcccatactccacttccttaatgttgtagaaaataaagtcacagacacatgcatttttgacttagttctcctaaaaacaactaagaagcagagggtagcagaagtgacaaaaacggaacagatataagatgtagaattctt

SEQ ID NO: 98759 - DNA, 570 bp, Homo sapiens
tgtaggggaaataaaagaaaagagatggagcctcaattatagaattaatgatgatgagtggaaaagaatgaaagaccaactaaacacatgcgggaagagggtttaaaattcattaaagaatgaacaagaaacaaaacaaaacaaaacaaaacaaaaaaacacttgaggcactttgccatcttgattctagagcataagagaaccctaatacatgtctccatatatatccatctactttccaaaggaaatgagtgaaggctagattacagatatgtataaatccttaaaaattttattcttcaggcttatctgccagtgacgtcttgctaaaaccacttctcctttaaagaaatctctgaggtttgtactactaaataatarcacattaataattccccattctagagatgaggaaatagatagcataacttgcccaaagtcccacagatggtaatggagctgtgtgaattcagttgttcaatgtcaaaggccatgagcttcaccactatgctacactgcaggactctgttggtgatgcaaatcacagtgggtcaaaatgtaaggactcag

SEQ ID NO: 98760 - DNA, 598 bp, Homo sapiens
catgtgagaccctttctttgtttacatattttcttgtttcttacactgtttttcatgagtccttaagtccttatataaattttgattttggcaatccatatagggattaaaggatctgactaaatgtcagcctataatgggtgctgaaatattgatgcattaaaattcccctggaaatataatgaaatggagaaaattatactcattagagttcttctcatggagatgttctctgtacaattggaaggagtactttgatattgcactctctagtagcaatgcaacgaatgtgttcttggttgcatgcagggttttattttgctaagtagggtatgtgagtttgaggccagagtggaattgctagagataataggagaaagggcaaactgcagcagtgatgcatcatcacctgttttccatgaagcttttggcatcacctcaaaataaatattagacaaatgyttcaaaatagcagtgtgactatctataaaaataacatacatggcccaacagaaacacagggaaaagatataaattggaagatcatgtaacagaaaccaaagaagcaaatatatacataaaaagatgctcaaccaca

SEQ ID NO: 98761 - DNA, 566 bp, Homo sapiens
tgtttgaatgatgtcaagaccgctctgaatttktagatgttcgtaataaagtagatccaagaaaaggattcagcaaaagaggctctcccaagatttgtgaacgttaaaaagattggtgatgaatatttcaaaaaaatctgctttattttagcagcaacttcataacagtagagtcaattgtccctgaagtcacagtgggtcacttgcagaatactacagtaattggagacagcatacattcttgtgaggaggaatattccctgggaggctctggagcctgtttcagcatttggtataacagccaacattggtgaaagtgccttatgcgatgtggatgttaaaaaaatcagtcattagtcagggttggtggcacatgcctatggtctcagctacctgggaggctgaagtgggagaatcacttaagcctggggaggtcaaggctgcaatgagcagggaggggccactacactccagccttaggaacagattctgtctcaaaaaaaaaaaaaagaaaagaaaaaagaaaaaataaacgtcagaattttatagctgaaagggacttttga

SEQ ID NO: 98762 - DNA, 566 bp, Homo sapiens
tgtttgaatgatgtcaagaccgctctgaatttgtagatgttcrtaataaagtagatccaagaaaaggattcagcaaaagaggctctcccaagatttgtgaacgttaaaaagattggtgatgaatatttcaaaaaaatctgctttattttagcagcaacttcataacagtagagtcaattgtccctgaagtcacagtgggtcacttgcagaatactacagtaattggagacagcatacattcttgtgaggaggaatattccctgggaggctctggagcctgtttcagcatttggtataacagccaacattggtgaaagtgccttatgcgatgtggatgttaaaaaaatcagtcattagtcagggttggtggcacatgcctatggtctcagctacctgggaggctgaagtgggagaatcacttaagcctggggaggtcaaggctgcaatgagcagggaggggccactacactccagccttaggaacagattctgtctcaaaaaaaaaaaaaagaaaagaaaaaagaaaaaataaacgtcagaattttatagctgaaagggacttttga

SEQ ID NO: 98763 - DNA, 562 bp, Homo sapiens
accatgtaactttaagattttagtatctttgttggtcctaaattgactatgagttttgctctgatgaaaattacttgtgccagaaagctccagtgggttgaaacattctgccacagtaatccctatggattagagcatattgaagcacaaccatgggaaatagaatgcttcttttaaaccactgagccaacaaataaggtcatttgatgctgagagactgtgatcatccatgaaggggctagttcaccagaaacattaagctggtttgggtgggctcatctgttggttggtggtgagaacactggggtttctttttccatcaatccccctttgcttttttatccctcaaagttacaagatataagatcacaaacttacaaaataacaaaacaaggtggttgtatccacacctgagctaaagctaagtcaactttttgtacagtctgttgcctttcagctttctgtataaatgacttaacatggcaatgtattaggcattctaaatggcraaaattccaggtgttatttctcagtaacaattcagagatatttactttatatt

SEQ ID NO: 98764 - DNA, 650 bp, Homo sapiens
gtagctgggactacaggcatgtgccataatgcccggctaatttttgtattttttagtagagacagggtctcaaactcatgaccttgtgatctgcctgccttggcctctcaaagtgctgggattacaggtgtgagccaccatgcccagccaaaagaatatctttaaactaactaatcactggagtgatggctggtaagtgatgtaaaacggctccatcacctcagtttctccccttagaattaaaactaaatatgtaagctaccactagtatcaccttccaactaaaagtaacattgcttaatagatgtcatttgtagaagatatgatatagcctgcttttgtgagcaatattcgtacctgctactaaactctaaacttctactgttttcttctcactaatttggcatcagagtagaggcttcatcttttcctgagcttgaggcaagacrtatataccaagatctctgccctgcttattgtttctaacttttcatcctgcctgtctagaaacccttttggcccaagttttttcttgttagattaagaaagcaaaaaaagactgtgattgcttgattgcttacatgcaataacagaacatatgaaactcagatcttaataatattcaatttaaaatttttcagcaaatattt

SEQ ID NO: 98765 - DNA, 572 bp, Homo sapiens
agaattaacttttcaaagtcaacaacagtaaaccacacgttgaactttagaataaattaactaaatttacagattattttcagaaaaattggtgtcttcatgacattgaattatctctgactctctagacatggtatatctctcgagtctcttttattatcttcaataatattttgtaattttcatcataaacatcacatacattcttttagctttacattatgctcccttatagatttttgttgytataattattggatttttttcttaatattctgcaattgtatattacaggtatatagaaaaactattgatttacttatgttgatattgcatctgtcaggcctctgagcccaagctaagccatcatatcccctgtgacctgcacgaacacatccagatggctggttcctgccttaactgatgactttccaccataaaggaagtgaaaatggcctgttcctgccttaactgatgacattatcttgtgaaattccttatcctggctcaaaagctcccctactgagcaccttgtgacccccactcccgcctgccagagaacaaccccactt

SEQ ID NO: 98766 - DNA, 565 bp, Homo sapiens
aaataaaactcagaattttaaatacttcccaagattgcacagcagataagaaactagtacacacacccaagtccaagtctagaggtttrgtaggaccaaaatgacatctctgaaatattctatgtcatttgctgagaaacctttaaattcttccatgaggcacacattccaaaaaagagtaggcggatctgacagagaagggagggggcagggttgggggaaggacttctttgatggccagaaagctgaagattcatgaaagagcagcctgtagagagcattacctatttagcgccactgctccctggaggaaaacaaagatcttttctgaaatctacagaaaccaaaataattaatggcccaatatatggaagtctttcacataacattttttacagctgagcagtctccattttaagaattctcctacacagtattttttagcacattttccccagttgtctcaataattcacttgaggagcaacagattgttcttctttcctattaattataagataaattataatttcagtgtttcaacagtagctatatggacactgtgt

SEQ ID NO: 98767 - DNA, 565 bp, Homo sapiens
aaataaaactcagaattttaaatacttcccaagattgcacagcagataagaaactagtacacacacccaagtccaagtctagaggtttagtaggaccaaaatgacatctctgaaatattctatgtcatttgctgagaaacctttaaattcttccatgaggcacacattccaaaaaagagtaggcggatctgacagagaagggagggggcagggttgggggaaggacttctttgatggccagaaagctgaagattcatgaaagagcagcctgtagagagcattacctatttagcgccactgctccctggaggaaaacaaagatcttttctgaaatctacagaaaccaaaataattaatggcccaatatatggaagtctttcacatarcattttttacagctgagcagtctccattttaagaattctcctacacagtattttttagcacattttccccagttgtctcaataattcacttgaggagcaacagattgttcttctttcctattaattataagataaattataatttcagtgtttcaacagtagctatatggacactgtgt

SEQ ID NO: 98768 - DNA, 559 bp, Homo sapiens
ggaaggccatgcacaggcctgaccatggaaaaccctgaaactgacatgcatgggaatgaactaggtcctgcctcacagggactgatacagtaggttgcaaaatctgtggtgtagattcaagaagagagagagagagagagagagagcgcaattgcataagtacaactcagcaagwtttcagtttccaaatctttccgtcaaacctgagtgatgtggttgctgaacagcagcatcagggcctacctacagaagaaaataaacaaataaataaaacctggcatttactcagccaaagcttctaaaacctgataaattctgcacttcctgaggactgcataccatcttcatcactctcagtgcttctctgttagggaaaaacagaaagactggggaagccccattcacagaggcatatcctgcagctattttcttcccataaaactgctgtgatagaatataaaattgatcagcttcaccttcatctttaaaccccgccccagtgttcttggacctgagttttttctatacaattcgctaatatacaatttcttaaatgtaa

SEQ ID NO: 98769 - DNA, 559 bp, Homo sapiens
ggaaggccatgcacaggcctgaccatggaaaaccctgaaactgacatgcatgggaatgaactaggtcctgcctcacagggactgatacagtaggttgcaaaatctgtggtgtagattcaagaagagagagagagagagagagagagcgcaattgcataagtacaactcagcaagttttcagtttccaaatctttccgtcaaacctgagtgatgtggttgctgaacagcagcatcagggcctacytacagaagaaaataaacaaataaataaaacctggcatttactcagccaaagcttctaaaacctgataaattctgcacttcctgaggactgcataccatcttcatcactctcagtgcttctctgttagggaaaaacagaaagactggggaagccccattcacagaggcatatcctgcagctattttcttcccataaaactgctgtgatagaatataaaattgatcagcttcaccttcatctttaaaccccgccccagtgttcttggacctgagttttttctatacaattcgctaatatacaatttcttaaatgtaa

SEQ ID NO: 98770 - DNA, 544 bp, Homo sapiens
tatagtgccttattattctgattttaggtataaattttcactttttagattttcttaaaataagttatgattatgattatgcttattatgataatttgtttgggcatctcctatgactattaaattgatgatttaaaatatttatcccctatgtaagttacatgattaactaatgctacattatgaaatagtttttcattcaaaattaaacttcaattatccttgcttctttctctccttttctaatccagcaaatcagatctatttttatatttgtttacatttttaatcaactacacatccctttaaatctgtttattgctttagaatttgaaagttcaaaaaagagaaaggcctattaagagactgtacagaatttagtacatatttctggacgctttcaaacatttatttccttaagtcaacytctgggtgtgatctcttaataaaactcacaagtctccctgaaatggtaggttagaatagaaattattttaacttctgcttccttatatagattaaaaacttgtgcatagttgaattc

SEQ ID NO: 98771 - DNA, 648 bp, Homo sapiens
agttgtttgcccaacccccagctacaccctctattttcttgactgaaaggcaagaagggcatttgcagaagcacaagcatctctaaccaagcctttccagctggaaatatctctttgtcattcagagaacctattagtttgatgatgttccttcagtgctcagtgtatggaacaccagctaggtgctttatgtacattatttctggatgtttataaacaccacacaaggaaatgtcattcattctttaaaagctaggtggggatagagataggctttgaacataaagatgtgaaacaacagatatgtttcgcagcttgggggaaaaacctgaattgtcagtgtcgtttcctggatgggtgaaattacaggtaagactctttttatgyatacggatttagagattaaaatagaatttcaaaattgttaattttttcttattgagttaaattaggtaaaatttgtgacttcctctataaaacatctcctgacaggtaacatattcagtaaagatgtcaattactgaacaagtgttattctgttgttctaatttcattttatgtctgtcttctactaggttgtatatcttttgctgtaaaagcatatgctaattcttgttttgtgcctgaatctgaccatattgtatggct

SEQ ID NO: 98772 - DNA, 648 bp, Homo sapiens
agttgtttgcccaacccccagctacaccctctattttcttgactgaaaggcaagaagggcatttgcagaagcacaagcatctctaaccaagcctttccagctggaaatatctctttgtcattcagagaacctattagtttgatgatgttccttcagtgctcagtgtatggaacaccagctaggtgctttatgtacattatttctggatgtttataaacaccacacaaggaaatgtcattcattctttaaaagctaggtggggatagagataggctttgaacataaagatgtgaaacaacagatatgtttcgcagcttgggggaaaaacctgaattgtcagtgtcgtttcctggatgggtgaaattacaggtaagactctttttatgtatacggatttagagattaaaatagaatttcaaaattgttaattttttcttattgagttaaattaggtaaaatttgtgacttcctctataaaacatctcctgacaggtaacataytcagtaaagatgtcaattactgaacaagtgttattctgttgttctaatttcattttatgtctgtcttctactaggttgtatatcttttgctgtaaaagcatatgctaattcttgttttgtgcctgaatctgaccatattgtatggct

SEQ ID NO: 98773 - DNA, 554 bp, Homo sapiens
caaagcatacaccatgagagaatgagataagcttcaagagactcctgccattccaacttcataggagacagtgaattcacccacataccaagaacataactactgcaaccatyattgggggataccagtgcacagagactctctataactaaggaactcatatacagacttcaaccctataagcaccaagaataaagttaggctaaaataaacgttaaatatccttaataggggccggacttggtggctcacacctggaatcccagcacattgggaggccaaggcaggccgatcatgaggtcaggagttcaagaccagcctggccaatatggtgaaaccccatctctactaaaaatataaaaattagccgggcatggtggcacacacctgtagtcccagctactctggaggctgaggcagaagaatgaggcggaggttgcagtgagcagagatcacaccactgcactccagcctgggcgatagagcgatactccatctaaaaaaaaacaaaacaaacaagcaaacaaaaaaacccacacagtccattcaagaac

SEQ ID NO: 98774 - DNA, 554 bp, Homo sapiens
caaagcatacaccatgagagaatgagataagcttcaagagactcctgccattccaacttcataggagacagtgaattcacccacataccaagaacataactactgcaaccattattgggggataccagtgcacagagactctctataactaaggaactcatatacagacttcaaccctataagcaccaagaataaagttaggctaaaataaacgttaaatatccttaataggggccggacttggtggctcacacctggaatcccagcacattgggaggccaaggcaggccratcatgaggtcaggagttcaagaccagcctggccaatatggtgaaaccccatctctactaaaaatataaaaattagccgggcatggtggcacacacctgtagtcccagctactctggaggctgaggcagaagaatgaggcggaggttgcagtgagcagagatcacaccactgcactccagcctgggcgatagagcgatactccatctaaaaaaaaacaaaacaaacaagcaaacaaaaaaacccacacagtccattcaagaac

SEQ ID NO: 98775 - DNA, 557 bp, Homo sapiens
taaaaatatgcatactgcctactcccagttactatttccccaaaggtagacatcttcaacacttttagctgattattttggtactttataatatgattttattgctacttaaaaagtgtttagttgtaaaagttatctttcggattttccaactgaaacatgatttagggtcttccttgtacacacacgcacacacacacacacgtgtgctaaaaaatttgtacatttctcatattctctcaaaatagacccaattttctttattattrtactttaagttctggggtacatgtgcagaacgtgcaggtttgttaggtatacacgtgccatggttgttactatttgtaatagccaatatatggatcaacatgtgtacatgtgtccagtaatagatgtaagggtatagaaaatgtgtgtgtattcatattccattatatatacatatatattccattttatacacatatattacatatgtataatggaataacattcagccatattaaagaatgtcatttgcagcaatatggatgggattgtagattattatgttaagt

SEQ ID NO: 98776 - DNA, 581 bp, Homo sapiens
atgttctgacagcacagtatatcacccagggaaagtgcaggctcattaatagcactggttattaagggatttggatcagggtagctgtgctggcagtattgatgggacacagcagagaatgagtaggtagagtcttgtgctcaacttttatctctactcaaaatgctctcggtccttgttacccataataytctcccagagagaccatcagcattgttatcagcccattagaatcttgggcctcactccagacctatataataaaaatccgtcttataaaaaaatccccaagtggttcataggtacattaaatttggagtcaaactgctcagcttgacaggagaggatccttgtcttgggcctgaaatacaattttggaaaccatctttaagaatgacaaatatgcggtggctcatgcctgtaatcccagcactttgggaggccgaggtgggcggatcacaaggtcaggagatcgagaccatcctggctaatacggtgaaaccccatctctactaaaaatacaaaaaattagccgggcatggtggcgggcacctgtagtcccagctacttgggaggctgag

SEQ ID NO: 98777 - DNA, 612 bp, Homo sapiens
aagccttaagtggctgagagagcagcagtaaaccctgtagttcctggggtgcaggaaaagatctcttgtgtctaggggaaggttaaaagaaaagaaaatctagcccttggcatggagaacaggaaacagagatatcttactgctagatgaggggcaggaatgttgagaaattccacctccaagaaaatgttcacaatgaccagcaccaagctaacaagcaatgaggaagaagcaatggcattttactattgttggaagggtgggggcaaggacaagggtaaaaagagagattctatttgaaaagcatgagtgcaggggtaaactgaagttcatagttgagcataaacattgagaaaaactctctgacaaaccaaatcccacrccacataaaaagtataaagaaggtaaaataccaacaacaaaatccagatgtcaaagaaatcctaagtagattcactcaacccataatattaatggcctagcagaagaaaaggtgttcccaatgccagacataaatatgatttatcttagtctcaatacttctatgtgctacatagtataatcaaacataactatgagaaacaccaaaaaaattaaggaaataaaaaagaa

SEQ ID NO: 98778 - DNA, 557 bp, Homo sapiens
atttatttgaaagaaagtcatgagcaaacctaaatatatttacatttgtacataaaatatactgtatttacaattacttgatgctctaaagacagaacttaatgtgacgtatgcagctggaaattacaagaccacatggttcaataaatcccagtagaaaatatacatctgttgactctttgtgcaattgttttatttgaaggaagttttatttaatcgagtggtatagtgtcttagtaygtcacttatcttgtcttaggaaacatcccacctgccttaggtgtaagtttttaatttctaaaataaatgagagtaaatcattttctgttctatattgaagagaatgctttctgctctatgcaaagtcaattttatcagtagagttttgactgatttatgacacaaacaaatgtgtcaattgtagagtttgctgaaattagtagattggtaacaagaacttgtgaatattatttaattgcatctgtaatgcctacagtattatgcaaagactcttgatctattgattagctgatactgaaaattaatttgatgttaaa

SEQ ID NO: 98779 - DNA, 612 bp, Homo sapiens
attttttttctggcaaagatttttttcctttaaaaatatttaatgattatgtatgagaaggtatatagattttcacatgtgtacacttagtactaatgaacgttttaggcatagataaaggaaatctactctcctccatcttcatcactcaatacatattttctaaacaccgatgttttgtcacccataaaaacatcattcccagaaaagaaaaagtgcattaggagaattccatagttctccctttaactcatgtatttgttttataaagccaggtaaacattttcccactaatttcaaaatgtacccacactaaagaataacagcctattcccacataggtaaaaacagtaaagtttgttaaagagatgaataaattgtcattcttatctaaccattttttgttgtgaaagataagaaagaaacagacaatggccatatttgacttttatgttttagagcggaatcacagagtgaaggcaggaaagatgaagacaatctgatcttcttcagctattgggtawaaaaacccaatgtgaagaagtaccaattagccaaaaaagaaattcgagttgtcatttttgaacagattagtttcagaaaaaacaggca

SEQ ID NO: 98780 - DNA, 579 bp, Homo sapiens
gtataggccaaagagtggtccaatgtgggtaaaggtatcgtgaacagcctgcgtgcagtcctaaagagtggccttgattctgtcttgtcatatatgcaatacttttgtccaatcataagtacatttcccatttaatattgttcacgttagttgcagggactattctaatgggattataacaagctaaaaaagcttatgcacagcaatgaaaaccactaacaaaatgaagagacaacctccagaatgggagaaaatatttgtagactatccatcctacaagggattaataaacagaatatataaggaactcaaacaactcaatagcaaacaaaaaaaattaaaaaatgggaaaaagacctgaatagacatttatcaaaaagaagacatataaatggacaataggtatatgaaaacattatcaacatcattaatcatcaaaaaatgcaaatcaaaaccacaatgaggtatcatctcactgcaattagaatggctattatcaaaaagacaaaaaataaaatatgttggtgaggatgtagaaaaaaaggwacactcatatattgttggtgagaatggaaagta

SEQ ID NO: 98781 - DNA, 605 bp, Homo sapiens
ttcactggtggtgacctgtagccatgacctgctggtaatgggaatgccagagcaggtgtgatacttataggcatttgcaawatatcaagggatcagcgcccacaaagacatcagagttggtggttattgctaagttgaatttacatcttacattaggataatgaacaaatgaggctatcagcaagcgtgacaatctcagggctttcttctagcattcaaggaagattttatctcctacttggcagggcagacataactgaaagtaggctgaagacctaattactatagtcacagagatgtttggatgctcagcttattcaggtctgctatgcaaagaccaggggattctgaaaaatgggatgtggatatctttatagatgtcctgagaatttgaccttatgaccccctttctgctagctctgacttttatgtatttaacattttttaaaaattttctaaaacattttaatagacatactttccaagaatgttatgtactgcagttgttcactgaagattcattaagcatccatttattgagtgtcccctattgctgagaactctgctggaaggtgctacgtaggcccttgggacacaatagtgag

SEQ ID NO: 98782 - DNA, 591 bp, Homo sapiens
aaggatgaataggcatccataaacatactagatcttgggaaaaaaaggaatacttagaaaaatgattcattcattatagagacgaggcagagagaaacctaggaatagaattatcctgctagggaaaatcaaggcaaaatggcaaggttggtaagatttgtctttgatggtgatgaatgtttaggatctggtataagacaagctgagttcatatcccagctctactmtttatgacttagtgagctacttaagctctctctgcctctaattctttatctgtaagacagctaataataatagctgccacttcacctagtaagagaatcaatgagataacatgcgtctaatactaagtgtagtatttggcatatgagggtcaatgcacattgttgttacttatattagtgctgtgtttttttttttaatcataatgtaggccaggcctgtagaggttgcttgatctatcttggatgtgatgcctgcattttgggagtctaccatgagagaactgatgggacctgcctttggctgcagagaacctaccatttgggcttttccccagcactgaaaataaatcacctaataaactct

SEQ ID NO: 98783 - DNA, 591 bp, Homo sapiens
aaggatgaataggcatccataaacatactagatcttgggaaaaaaaggaatacttagaaaaatgattcattcattatagagacgaggcagagagaaacctaggaatagaattatcctgctagggaaaatcaaggcaaaatggcaaggttggtaagatttgtctttgatggtgatgaatgtttaggatctggtataagacaagctgagttcatatcccagctctactatttatgacttagtgagctacttaagctctctctgcctctaattctttatctgtaagacagctaataataatagctgccacttcacctagtaagagaatcaatgagataacatgcgtctaatactaagtgtagtatttggcatatgagggtcaatgcacattgttgttacttatattagtgctgtgtttttttttttaatcataatgtaggccaggcctgtagaggttgcttgatctatcttggatgtgatgcctgcattttgggagtctaccatgagagaactgatgggacctgcctttrgctgcagagaacctaccatttgggcttttccccagcactgaaaataaatcacctaataaactct

SEQ ID NO: 98784 - DNA, 513 bp, Homo sapiens
cagaattaatttattgtaaactcttttttaggataaacatttcccctacgaataaaatacaaacaaaaatatcagtttttagccttttgcacgacaagttgtttctcagtaaagtctacactttggtcccagtttgactcttcaggaatattcaaaacaagtttaatctctcttcaacgttatagttctttaactattcagaaatggaatttgtktctccaacatactatttatttctctcaggggcaagagtgtggaatttgtttattaaaataaaatgcaactaagataatcatttgcaaatattgaaaggatgcgttttttgtttcccttcatgtaaaatacgtttgctggcaaccaattgtcagtattgcctcaggaaagaaggtgataaaacgcacctcaggaagaaagaggaagttggtagcccacaccttcttgacctcatgagttgcagaaagaagggaggcttgtgtaagagaagctggtctgtgagacaagtttgttctcacc

SEQ ID NO: 98785 - DNA, 534 bp, Homo sapiens
gtatatcttctgactccacttctaattctccttctctccaccatatgtgcagttattttcttcaatgaagttttaaatccctcaaagtcatccatggaggttagaatcaacttctgccaaattcctgttaatgttgatattttgacttcctcccatcaatcacaaacgttcttaatggcatctagaatggtgaatcctttccagaaggtttttaattaactttgtccagatctatcagaggaatcactatatatggcaggtatagccttataaaaggtatttatgaaataataggcttgaaagtcaaaattattccttgatccatgagctgcagagtggatactgtgttagcaggcawgaaaacattaatctccatgtacatctccctcagagctcttgggtgatgggaaacattgtcaaaaagcagtaatattttgaaaagaattttttcataagcagtaggttctaatggtgggcttaaaatatcagtaaaccatgctgtaaacaaatgcattgttcattcaggcttcattg

SEQ ID NO: 98786 - DNA, 631 bp, Homo sapiens
ctaggtatttgcacaactgatttgaaaaccgatgtccacagaaaacccagcacgtgaatgtttatagcagatttattcattattacctcaaacagtaaacaaccaatatgtctttcaataggtgagtggataaaaaagctgtagtacattcatgcaatggaatattattcagtggtaaaaaagaaggagctattaaactgttaagctacacaaagaaatgtatacatcttcaatgcmtattgccaagtgaaaagacagtctgaaaggactatgtacagtatgattctatttgtgtaacattctgaaaaaggcataattatagagatgataaataggtcacagttgccaagggcttgggaggcagtatggttaaataggtgaaacaaaggaaatgttttagcgtgatgaaactatcctgtttggttctgtaatgtgaatacatgacaccacataattgtcaaaacccatagaaccttacagcagtaagagtggaccttgatatatacaaatttaaataatcatgtaagaggttgaaggatcccaagatgggacacagaacatgagaaaataatctacctgtattaaaaatgtatgaaacaacctcactgaaagggctgggaagaaaatgttg

SEQ ID NO: 98787 - DNA, 638 bp, Homo sapiens
cacaggagaaaatctccacaacattggtctaggcaacactttctcagacaggaccccaagagcacaggcaacaaaaataaaaatagacaaatgagattgcatcaaaataaacatcttctgcactgcaaaagaaacaataaagagacaactcacaaatttgaagaaaatatttgcaaactatacatctgataaggggctaatattcaaaatatatgaggaactcaattcaatagcataaaaacaaataacctggtcaggcgtggtagctcatgtctgtaataccagtactttgggaggctgaggccagaggagtgctagaggccaggagttggagatcagcctgggcaataaagagagaccccatatctacagaaaaattcaaaaattagccaggtatggtcrcaggcacctgtggtcctcactactcgggaggctgaggcaggaggatcgcttgagctcaagagtttgaggctgcagtgagctagatagcaccactgcactcgagcctaatgatgaccagtgttggcaaggatgtggagacaaggaaaccttgctgtgctgttggtgagaatataaattagcacagacatttcaggaagtagcatgatgtttccttaaaacactaaaaatagaattac

SEQ ID NO: 98788 - DNA, 581 bp, Homo sapiens
tgacagtggcttaaaattatggaatttgctacccaagatgatatgaaggaccggcaaagaaaatgtgttggaaggtgtataaaaacctaagttgggaaataatctagccaattcctatatgtagcatacatcagctgttaaatataatgatatatgtacttggaattaaacaaaaatatatattacatgtaattawtgggtcacatctctttattattgactgaattattgattctgcaagattttgccaccctaaaactgaggcaatatgattcctacttgtaagcccagccctccttttagcttcaagataaatcctgattttaagcagagattttaaaaatgtaacaattttgtcacctactctatttcatagctaagacttgtcaccttatgagactgagtctctgattttgtattgttattttgtagtgagattatcagaatcctttattcatatcaaaaccatgccctcttttctttatctattcaaggccttgcatttgtgattattttaggaagaaatacttgcttcaattaaactcaactaaaatatcacctcctcttgctatgcattagtt

SEQ ID NO: 98789 - DNA, 608 bp, Homo sapiens
tcacaatgccaaaacttacatttcaaagaaagtttgatatatttctaactagaaattatgaaaagtaattagaaggtaccaattttcttaagcagagcaagagagaagtaaaaaattaaggagataacaaaatattgtcataaaaaaagacagggttaggagtaccaaaccaatacaaaaattggacagttactaaaaacatttagttttgtattaaattataatgattcccaggtaacactttttaagcaacagtactatagatatagacagtgatgcttgaaactaaggattaaagayagttatgtatagaaactctctttgtttataaattcagtgtgactagggtttgtgtgtgtgcatgtgttttgcaaaaggctatataaacattaccaactgcttacacgctcccatttgtagaacttgtcttactatctgtatcacataagactgtaaagactgtattaagtcagagttttccagagaaaaaggaccaatagcatgtatacataaggagggatttattttaagggattgtcttatgtgattgtggaggatggcaagtctgaaatctgaaggacatctagcattctgtagacccagagaat

SEQ ID NO: 98790 - DNA, 549 bp, Homo sapiens
aattcattgaacgtagtgatgcaagatattttcttgaccacttcatgggactcaggacaggggtgccccatttactcagcccaccccactcaacctctcccaggagggagcacgcgagcaaatgagtgcaggaaccagagcaaacaattgcaggaaccggccagcagcttcagtgccagcaggagcaaactccactcacttgggtccgccttgatgcaccactggagggagggagtgtgtaggcgagtgcaggaacggggctggcagctttagcgacagcaggagcaaactctgtgcaggccccatggcagcatccaggtgtgggtggktgcctgtgatcccaaggccccagaggacttgttacattgccctcttaactctgttgtccacagacacagtgtgttatcagctcagtggaccgtttgcctcattgtgagatggctgccctctgccagcaaaggcaaaaggccagtgtgaaagcctttttgggtacctgcatttggtgcatcccaaattcttgtccggtgcccaagaggaatgaggtcatgt

SEQ ID NO: 98791 - DNA, 195 bp, Homo sapiens
ccacctttccaattaccttatgggactggacatgatagcaggcagtcacaggacctttgayagacatttttttcattatggcttacaagatctatcttgtttcttgacttgcagttacttccactatgagggctttgttttgttttgttttgtcttttttgtaaatgagaattgaaatgttcaaaattttcacca

SEQ ID NO: 98792 - DNA, 611 bp, Homo sapiens
tctgaaatgaaggttaaaaactgaccaccagtggaatagatctgcttcacagatgtgctgtctttgcctcttccctccatattacttttaagcaaattgaatcagacaatattaacaagtaggactattttgccacctttggtgtttaatcatctaatctaattgaagaagtgaccagccccatcatattcacaggtcacaccatattcaattggagaggattatacacggcacctataccaagggaagaaaatctataagctatcttagaattctgcctattatagaaagaaacatttaattttgaagatttagaagtcattttagtgataaaattccagttccttctctgaacatcagttacatcatctgtaaaatgaagatataacactgttttatttctctctaatttggtcttgagctctctggagagtggctgtaacatctagcccagccctgacaaggtttcaggggatttagttgcagacatttacaaggtgcctttcatgaatatgtttttttccartggacagcctaatgcctaagtattcaactccatgcctgtgtccaacctggactaggtatcctttttgcaggaaatttgttcatac

SEQ ID NO: 98793 - DNA, 633 bp, Homo sapiens
accttggatgctctcattttactattctggaatgccccctctctgctctttatgattcaaatccttctcactttcactacttaagtaaatgtctaccccagacaataaatatgtgtcaatcaaggatccatctcatttactgggcactacatatggggatatattaaaaggctaaaaaaaaattaggggtaaggaggccaatcagggtgcatgttttccaagaaagtctctagaagaagggtgacataaattgcaaggacgtgggttrgtgtgaggttttcatgacttcatctgccacccaaattatttattttccattaatataaattttatgcttgacttaaataaaacaatttaatcagaaaaattcatatccttgaaattaatcaagtaaatagatttgtgtgtgtgtgtgtgtgtaaattttccctgaatttaagatgttagagcaagaaacaaaaccaacaaaaataaaataatattttaaaactgtagctctcacctattgcatgcttaaagctaggagtctaatatctactccaattttcttaaaaaggaatacttactatggtttgagtctgtcccctcaattttatgtgctggaaacttaatacccaatttcatatgttgatt

SEQ ID NO: 98794 - DNA, 617 bp, Homo sapiens
tttttcagggttacttccatatgtctgatattaataagcatgtttagtaaatccaaataatgcttgaattaaatagagggaaacttgggaaaaaatgtttttcgataggtgcagaatatgttggtggcaataactagagatgttgacattatgtccagattatagatccttatcaaggaggtcactgaccttcagaagctatgcctgtcggtagggtctaactgtgtgtcagtatatggggattgggtgagtacttggcataactatttaagagagggtgaaaagagctgcacaataactctcaatctaatggagtaaaggcagaattctggtatcttatasccttcatattaaagcagctcagacaacagccccttcccagctctcatacagttggtatgagatatcagtgagggtgaatagagaaacgtttcttactagctcctcttctcttgatgttccaggaattttcctggcagttaactgcaaccattcaggttggttggtgtctgctgtgactaccacagaacgtataaccacttcacttggcagtacctgtaggtagcagatagttctactagaaatgagctctcccagggctccttcctccattttgc

SEQ ID NO: 98795 - DNA, 582 bp, Homo sapiens
gtaagaaacacggcagtttgcagttgggaatcataataaaggatgtgacaccaaagtggcaaggtataaggagagaaccaaaggtggagatcggtccagagcattatagctgaggagtgagtgaagactgctcaggcaatgaagtcctgctcacatgacaaatggcaagtctacccttttataagacatcagggcaagcaggggctgtttctcaatgggaytgcatctgacccatcttctactggtgtttattgaacaggtatttggaacaagaaattacactaagtacatcaggggttctatgatgataaggaaataagccagggaatatcttgaaatgatgtccagtcataagttttataattctattctgcatccataataattaaaatgaggttaagacataaggtaccttcttaaataaaatttaaaataaattttatagatatttataggaacataatttatttgaatattatggcccaaaataaaaatatcatgataaattgccagtaaatcccttttgctctttttaatgcacaatttcaatatattcagttttctgagggcttacatgagcca

SEQ ID NO: 98796 - DNA, 556 bp, Homo sapiens
aaacaaattggcccaaggaaagctcttcggtcttatcttacctgcctcctttcacacttttactggccacatctcacatgggtacttatgtttccttcagagggtcaaccacctcatgggcacatgctttgatgttttttcttcagtgctgacattcctatcctactccttcctatatactaacatttctaaattcaggtcaaatgctagtacctttttgcaggtttttctcatctttctttagcaccatagaatatgttccttcttttctttcccaaagcactttcccttatgacactcttcatttattgaattaggccatagttatgcagatgcatcaactcactagattttaagtttactgaaggtataagcactcaaagattagcacagtgacttgcccatagttagagctcaacaaaactctaactgaaatacaaagktatttaaactttattttagataagtcaatacttactggataaataaaattgtaatattaaaaataacatttcatatattacaggtgaaggaaatattttatgaatagttacgt

SEQ ID NO: 98797 - DNA, 608 bp, Homo sapiens
aatagaaccaaggagaggtctgggaatgctgtgacggtaagtaaaacaataaaaggtccacctgcatttaaacattttattcctcttgctttattcacaagtgcctaacatagggtagacacagaatattaagtatatggaagcagtttttatcaaatgatttcctaaagtgtgtayaaaatagtataagtccctgtgatgtccccaagcaaagattttcagagtaaatcaataatttttaaaaattcaatgtctttttcttattttcaatgttcttttaacatatcaaaatatcttaaaaattgcatcttttccacaacaactttctgacaccaaagggatgtcctacaattcagtttaacctgaagttagtatagaccctacaagttaaagacaaagtcctttaattctgatatgaagtatccagggttagtggagaccctaccggttaagggctcagtcccacaaaactgctcccacttcagacttcagttgcaagttttcggtatctccaagttaccttcactttttttccaaaagactgcaaatttggggttcccaaaacatttcaccctaaagttcaataattcactagcacaattcacaga

SEQ ID NO: 98798 - DNA, 566 bp, Homo sapiens
gccatgtatcacccccactcaggagggactgagaggaaagtgacttgaattaaagagaaggagagcaagttagtcattaggggccaccatacagaccacaccttctcatgttcctcctccttggtaaaggtttggtgcttggagaagagctggatgggtgctcaggagggaaggccacctgggttcctctagaattagcttcctagaggaagggactgagtggataacacatttctggtgtctctccaatgcttatgactctttggaccttcatatcttccccaatcattgaatgacaagggagaaagcaggggtctgaggagaagccaccctccttttcttttctttctttcttttttttttttagagatagagtctgctctgtcgcccaggctggagtgctgtggtgtgatctcagctcactgcaacctctgcctcctgagttcaagtgattctcctgcctcagcctcctcattaactgggattacaggcacgtgccaccatgcccrgctaatttttgtatttttagtagagacggggtttcactatattagccaggctggtct

SEQ ID NO: 98799 - DNA, 535 bp, Homo sapiens
aatggggaatacattccccttaacttctcaaattcacaactcacttaacagattattggggatatgctgatttttcttgtacactaacctagagaggaacaagagaggttggaataaagccaagcaggagcagagcaattgatccaggttcagccagtcacaagcatgaaaggtcctcaagtgaatacacatggaggaagaaagatgcacatggagaaaggctgagattccagaggtcagcgtatttgggattgaatgcaagtccttggctagaaagggtgagtatgtatgcaagaagttaggatagaggcagagtttaggaataaatttgggacactagagtgtgcagagtcagaagcaatcttagggtagktccaatatataaaatgtaggagatgagaggatgggggaaataaaaatagaaacttgaatttcatctcctgacttgtaaatacttattattataagcacgtgtctcagaatcatgaaaggctagttcaaagcggatgctacaaaccgaactgtgttgccaaaa

SEQ ID NO: 98800 - DNA, 583 bp, Homo sapiens
tacactctatattttgtaaagtgacttctgtttctgaaacgtagaacccaattataaattttctaccccacttctcaatccctgctttaccttgatggctttcatgtcaatagctacatatctgtccaaaatcattctataagcttctcacaagtaagaatgagacttcagttgttttgtagtctcagccyagcacagcacatttagagtagtatgtggtcaatggctattggctgattaattattgaaagcctgatatttcattcgttacttctttctgtccttccatactcatctactatcattttcagaactccctagtggtttaatgaaagggatctgaatatatacaaatcttagatttatcactttaaagctagaaagggccttactgatcaaatatattcaatcatttccttttatgaaagaatacataatgaatatgaaaaagtaaagatttttaccccatctccaattcctagttccatatcttatatattagaggttctccacatctaatctttaattgatgattgaaaacacatttccatctaaatgcattagtgctgagcattccctcccc

SEQ ID NO: 98801 - DNA, 583 bp, Homo sapiens
tacactctatattttgtaaagtgacttctgtttctgaaacgtagaacccaattataaattttctaccccacttctcaatccctgctttaccttgatggctttcatgtcaatagctacatatctgtccaaaatcattctataagcttctcacaagtaagaatgagacttcagttgttttgtagtctcagcccagcacagcacatttagagtagtatgtggtcaatggctattggctgattaattattgaaagcctgatatttcattcgttacttctttctgtccttccatactcatctactatcattttcagaactccctagtggtttaatgaaagggatctgaatatatacaaatcttagatttatcactttaaagctagaaagggccttactgatcaaatatattcaatcatttccttttatgaaagaatayataatgaatatgaaaaagtaaagatttttaccccatctccaattcctagttccatatcttatatattagaggttctccacatctaatctttaattgatgattgaaaacacatttccatctaaatgcattagtgctgagcattccctcccc

SEQ ID NO: 98802 - DNA, 430 bp, Homo sapiens
cccacatatgatccttttgggaagccatggtagttactcagtcctcaagacattttaaggtctgatatcaaatggccacagatatttttctcttctgttgcttccttgtttatttctccctcacccttttctaattctaactttctaaaaactaattcttccagagattaaactgtaggtatttcaaggtataaagagggtagcygtattactgaataatattgactgaaaacctccctatgctaaataatgacagaaaggtggaaaataaaccacatgcacacacacacatgcacacaaacacatgcaaagaagacttaaaaacaaagaacaagattagggtgtatgttgtaaagctttagaaaaaggtcttatgccagacacaacataatacaaatgttgaaataaacagacaggggactaagaattc

SEQ ID NO: 98803 - DNA, 587 bp, Homo sapiens
cgacgcaaccatcccgggatggtgaccaacgcgcggctgctgcgggcagagggactgaagagaaccggtggtcccgacgctggccccgagcccgaggagttaaactaacaaagagctccccgagccgcgaaaccycccagagcggaagcgacgcctccccgccgccgccgccgcgccgcgaccctccccaagttcagggcccggcagtggactcgctgcggggcctgcggccaggacggcgccgggttcgcagtcgggatgcgggaaacaggtagaggccagaatacgagccccaaagagaagagtgggcgcttccccaaacgggtcggcgcagcggaaaaggctaactgaagcaagcgggaggccccgcaccgaggccctgcttcccggggagcagccaggcacagcggacaggggggccgcgctttgttaccggctgagagaagctccggccgccgccgccgccatcgcccccgccccggggcgtcgcttcccggcggttctcgccttcctcggccgagtagtcgatctccccctcctcggtcttgagacgcttggcctggctctcgtactcccggtcctcctcg

SEQ ID NO: 98804 - DNA, 601 bp, Homo sapiens
actatttgtggcattttgcctgttcagcatgtatactttatttggaaaactaactcctccactataaacatttgtttctactgagcctgcaatcattgtatctcatctatccaaccagaagtgtgtacatgatccatcataccaagactcagccaatcatagcaaattgcatggtaaatattttaggctttcatgaccaaaaaagacaaaatggaagatattatagaggtatgtaaaaaaactaatgtaaccattaaaaaatgtgaaaaacttattcttatcctgtggtatttaaaamaaattaaaaagatgacaggccagatttggcccatggaccacagtatgtaaagcctatgtatttcattttcccagccaccctgattggttcaggagtagacacgtttctcaaatcggtcaacaaaagtttatatctgagatttttcaattcagtgctggaagaaaaggaagcttgcttttagaaccatgagaaaaggatataaattaccctgcttgctctatgtctataaagggggtgatacagcttagctgtatccccacccaaaatttcatcttgaatggtaatccccgtaatccccataat

SEQ ID NO: 98805 - DNA, 576 bp, Homo sapiens
atcacattcgacttcagatagacctgttttcttctcaggtggcttccgtagaaattctaggcactgaatctactccggggagatcggttcctcggaaactctcatctgcctcacctccattactgtaataggctgcacaagcatgagcagtgggcttgccaagggctttgagcaaacaccctgtaggtcctgctgcctggcaggctggatgtccgcccagtcctctggyaacctgaagggcaatgaggcttcatgatcctagaccaaggtggtaaattccctttgtggatagcatcaggatgcaggtagctttgctgagcggctcagagctagaatgtagatcaaagagttacaaacaagtgggtgcagatatatggcaaaagtcagtgtgggcttttcatatgtcctttgacctcccactcaatggtacaaataatttataagcagaatttaactaaaatcctacatgatccagtgtttgaagactgttaagtcaaaagcacaaaataccaacagataaaagatagaactgaaagaaatttcaagttttcttcagttttaagaaaacataaatgg

SEQ ID NO: 98806 - DNA, 578 bp, Homo sapiens
atgagataaaggagcaaatggtggaaagagaaaggagagagwcagagaaagagagagagagagagaggatttctggcaacagcatttagttcctagtgccagttatccctgagacccagctgcacccattctcatcccatagtttgcctataagagatatccggtgttcatctaataaaccccactattttcctaggcactttgaattagagtctgtaacttggaacacaaatctttgataaatgcatagtaactataataattattattattaatttttgtatttcaataggtttttgatgaacaggggtatttggttacatgaataagttctttagtggtgatttgtgagattttggtgtacccatcacccaagcagtgtaccctgtacccaatgtgtagtcttttctcccttgccaacccccccaacctttcccctgcgtcccccaaatccaatgtatcgttcttttttttccattttcattctttttttttaaatttactttaagttctgggatacacggatacatgtgcagaatgtacaggtttgctacataggtatacatgtgccgtggtgg

SEQ ID NO: 98807 - DNA, 578 bp, Homo sapiens
atgagataaaggagcaaatggtggaaagagaaaggagagagacagagaaagagagagagagagagaggatttctggcaacagcatttagttcctagtgccagttatccctgagacccagctgcacccattctcatcccatagtttgcctataagagatatccrgtgttcatctaataaaccccactattttcctaggcactttgaattagagtctgtaacttggaacacaaatctttgataaatgcatagtaactataataattattattattaatttttgtatttcaataggtttttgatgaacaggggtatttggttacatgaataagttctttagtggtgatttgtgagattttggtgtacccatcacccaagcagtgtaccctgtacccaatgtgtagtcttttctcccttgccaacccccccaacctttcccctgcgtcccccaaatccaatgtatcgttcttttttttccattttcattctttttttttaaatttactttaagttctgggatacacggatacatgtgcagaatgtacaggtttgctacataggtatacatgtgccgtggtgg

SEQ ID NO: 98808 - DNA, 578 bp, Homo sapiens
atgagataaaggagcaaatggtggaaagagaaaggagagagacagagaaagagagagagagagagaggatttctggcaacagcatttagttcctagtgccagttatccctgagacccagctgcacccattctcatcccatagtttgcctataagagatatccggtgttcatctaataaaccccactattttcctaggcactttgaattagagtctgtaacttggaacacaaatctttgataaatgcatagtaactataataattattattattaatttttgtatttcaataggtttttgatgaacaggggtatttggttacatgaataagttctttagtggtgatttgtgagattttggtgtacccatcacccaagcagtgtaccctgtacccaatgtgtagtcttttctcccttgccaacccccccaacctttcccctgcgtcccccaaatccaatgtatcgttcttttttttccattttcattcttttttttwaaatttactttaagttctgggatacacggatacatgtgcagaatgtacaggtttgctacataggtatacatgtgccgtggtgg

SEQ ID NO: 98809 - DNA, 583 bp, Homo sapiens
tggctaatttttgtatttttagtatagatgcggttctgccaggttagccagattggtcttgaactcctggcctcaagtgatccacctgccttggcctcccaaagtgctgggattacaggtgtgagccactgcaccctgcctacatttcttttyaaatgccgcaccttggaagcaccatagtggttttgtccttgcatgtgcgaatccagttttgggcattgctaagtggatacacctgctgaataatcacttgatctttccagtggcacccaccaaagactcatcttaagatcctgtaaaagatgcacccagtggaacttggtactaaaagacaatggaagctcttttcaatcctagggttctagtggtctacaaaatgccttactatccaaatttaactgacatttttctttgccacagagtatgtcaacaatccattcattcatggtcaaatattgtaaactttttaaggtatgcagcacttaatttttctccagaaagagtgagaagataatattcaactaaaaacataaaatctcagcttggaaatggagaaatatcttcctaggcctgggtaaatcca

SEQ ID NO: 98810 - DNA, 592 bp, Homo sapiens
ccgaagtgtcagatggatgaaaggcattttatcactctggattttcagcaggaaccacagctgccaaacggggcagcacagcaagctcctgagtttgttgactctggtgctaactcagagagcttaaagatctgaggcatctgggccatgtctgcaaagacggtgttagcaatgccttaacactatcctgatattttcagcctaacttgttttacttggaagtaaaaaggagaggtaggtggaaagctaattttgcatagaatatttaacaggaaataaggatacaagcctagtaaacctgtattagtccatgttcacactgctgtaaagaactacccaagactaggtaatttatgaaggaaagaggtttaattgacttacagttcagcgtggctggggaggcctcaggaaacttacaatcatggcagaaggcaaaagggaaacaaggcatgtcttacttgttggcagaagagcragagggaggggaaactgccaaatatgtttaaagcatcagatctcgtgagaactcactcatcatcatgagaacagcatgggggaaaccgatgccctgatccagtcacctcccaccaag

SEQ ID NO: 98811 - DNA, 592 bp, Homo sapiens
ccgaagtgtcagatggatgaaaggcattttatcactctggattttcagcaggaaccacagctgccaaacggggcagcacagcaagctcctgagtttgttgactctggtgctaactcagagagcttaaagatctgaggcatctgggccatgtctgcaaagacggtgttagcaatgccttaacactatcctgatattttcagcctaacttgttttacttggaagtaaaaaggagaggtaggtggaaagctaattttgcatagaatatttaacaggaaataaggatacaagcctagtaaacctgtattagtccatgttcacactgctgtaaagaactacccaagactaggtaatttatgaaggaaagaggtttaattgacttacagttcagcgtggctggggaggcctcaggaaacttacaatcatggcagaaggcaaaagggaaacaaggcatgtcttacttgttggcagaagagcgagagggaggggaaactgccaaatatgtttaaagcatcagatctcgtgagaactcactcatsatcatgagaacagcatgggggaaaccgatgccctgatccagtcacctcccaccaag

SEQ ID NO: 98812 - DNA, 439 bp, Homo sapiens
gaattccaggcgcagctcctaggggatgttgttaatcacacaggacatgctttgtcttcagattgtaaaacattaagatacctgtgagataccttggtcccagaggagccacatcttgtctgaaaagaaatattttatagccccatagtcacattgccaaaattgggctgcatgaccaggctcaatagtacaaaatcaagggaacataaaagaaatcaggtgcaaataatcatttatatattttataaatattgttgtcaagctggtacaagttactccattctatctgagactttagaaaagtatattaatcaacaattactacatatcatttggatttgttcaacaacaagcaccatggttgttgacatgcctaaagataagcaaagaattgcaataatcctgttgcraacaaccctgacctttaatctgtcagaaa

SEQ ID NO: 98813 - DNA, 433 bp, Homo sapiens
aggtgatttttgtatttttttcaaaagctgatcattttaaaacaaaacattccaaaagtttctagctattaatatagagttaatatgcayttgaagaattttcaataacttaaaccaacttttagtaaaattgaactttaaaatatattgacgtgcgtttattacataagctggtatgtgtggaaaacaaaggcaaagattgagcaaaagatatggagtaaaatcatgctgatgtattttacactaacaaaaagccacatatagccatagtactaatgtactactctttaacatattacagtaattgtaatttatggctttgaaacttttaaggtatgaaacccccaaatcatgtttatatttgaaagagaaacttaaggcaataaataatttgtagcaattagaagtatattttgcatgccattaatatata

SEQ ID NO: 98814 - DNA, 433 bp, Homo sapiens
aggtgatttttgtatttttttcaaaagctgatcattttaaaacaaaacattccaaaagtttctagctattaatatagagttaatatgcatttgaagaattttcartaacttaaaccaacttttagtaaaattgaactttaaaatatattgacgtgcgtttattacataagctggtatgtgtggaaaacaaaggcaaagattgagcaaaagatatggagtaaaatcatgctgatgtattttacactaacaaaaagccacatatagccatagtactaatgtactactctttaacatattacagtaattgtaatttatggctttgaaacttttaaggtatgaaacccccaaatcatgtttatatttgaaagagaaacttaaggcaataaataatttgtagcaattagaagtatattttgcatgccattaatatata

SEQ ID NO: 98815 - DNA, 363 bp, Homo sapiens
agtgatactcaacagctaccaatatgacaaaaccagagacagctagttgcttgagactcttggtggaagtacacagcaccacctatraagtgttcaggccaaaaaaaaaaaaaaaatcaaacctgagtctaatcaagtttctcaactgaatgcctgattatagcaaacataggcaacaatggcgcaaagatgttatcaacaaaattcagagtgtgagaaactttacgaatgatcaaattttgccaacaatgcaattgcaaggaaaataaaaagatatgtagaagatatggaaaaagatatggaggaagctttagcttaaaatagatttaaaagacatcacagtcagttgcaatgtataggtct

SEQ ID NO: 98816 - DNA, 579 bp, Homo sapiens
tgtttttactatgaaatttgtaaaagcaactcacttccattctggaatcttcttcctaatgaaatcatttttctcatccgcccagctgtgcaggaagtgtgagttatcacagttcccactgttgtaactccagtcccacgaagtcagaggagtaaatgagctgctccctcaccattttgaactgatataggggatttcatattttagtcaatcaagagcacattccgcatatgttgtctttctcaaatgtttggatatcttttttttcttttttttttyttttttttttgaggcagggtctcactatgtcacacaggctagagtgtagtggtgcgatctcagctcaatgcagcctcagcctcctgggctcaagtaatcctcccacctcagcctcctgaatagctgggactacacatacaaccatacccagctaattctgtttttatttttttgtagagacaagatctttctatgttgcccagactggtctgaaactcctggactcaaaacatatgaatatccagccctggaagctaaaaacaagctttgtgcccaaaaaaagtttatatttttgatttt

SEQ ID NO: 98817 - DNA, 579 bp, Homo sapiens
tgtttttactatgaaatttgtaaaagcaactcacttccattctggaatcttcttcctaatgaaatcatttttctcatccgcccagctgtgcaggaagtgtgagttatcacagttcccactgttgtaactccagtcccacgaagtcagaggagtaaatgagctgctccctcaccattttgaactgatataggggatttcatattttagtcaatcaagagcacattccgcatatgttgtctttctcaaatgtttggatatcttttttttcttttttttttcytttttttttgaggcagggtctcactatgtcacacaggctagagtgtagtggtgcgatctcagctcaatgcagcctcagcctcctgggctcaagtaatcctcccacctcagcctcctgaatagctgggactacacatacaaccatacccagctaattctgtttttatttttttgtagagacaagatctttctatgttgcccagactggtctgaaactcctggactcaaaacatatgaatatccagccctggaagctaaaaacaagctttgtgcccaaaaaaagtttatatttttgatttt

SEQ ID NO: 98818 - DNA, 291 bp, Homo sapiens
tccatgcccctaccttttctggcagcctgtttttggttatkgtccccctttctagcaatcgcatcattccaacctctgcttctgtcatcacctctccttccctgactctgaccttcctgcctccttcttctgaggacccctgggatttcattcagcccacacacataattcaagctaatcttatctcagcattcttaactcacctctgcaaagttctctttgccaggtaaggtaacatatttacaggtttaaagaattagaatgtcaatatttggtggggaagtggggaac

SEQ ID NO: 98819 - DNA, 645 bp, Homo sapiens
tataatgatggcatcattattataatgataatgctcatattttaaaaaattatcctttaaaaatggtccaatgtttaatgcaagtgtttcactttaagtaggagttttaaatgcgcatacaagtggaataactgggaggtgtctatttaagcttaataagtaacgataaaaaataatatgaagacaaacagataaaataaatccatttttagyaaatatgtggttcctatttttgtgtgacagaatcacaggactaagcttatttaaaacaagttttctattttattttaatatgtttttaaatgttcagagaaagcagggtggttacttggggactttaagaaacaaagtccttgagtgacgtagagaattttctggggccagctagacagagtaggcttttctagtgtgagggagaccctggccagggaaaaagaggccaaggaaaccaagtgagttggagtggtgtcctggtgtggtttgcagaagatctttttcctgagcaggaaaagtgcagtaatgtgaaatgtaaagtggagtgtataaccttatctttatttctctctgaaaacagagaaacgtttgcattttgacactgaaagtttgctgggaactgatacaggtagctgttagaagagctgagag

SEQ ID NO: 98820 - DNA, 550 bp, Homo sapiens
tttagtgggccatacagtctctgttgcaaaacaatcactcaactctgccattgttgcatgaaagcaatcatagagtatgcaaatgtaaatgaacaagcatggctggtcatgaggactggagatattatacacgtatatatataatgctatatatgtacatgtttatatattatgtgtgtatatatgctatatatagcacatatgtgtgtgtacctatatataacatatatacacacatatacaatttttttctttsaaaaacaggcaatgagccagacttaatccaagagcaacagtttgccaacccttgtactaaatcatgacacatgctaaatgctacctcaagctgtgaggaccattacgtgacggcagaatgtgacatttgtacatgcttcctacattatcacttgatcttcacaagaaccctgctatgtaggtttttaatgactttccattttatatagaggaagctaacaggttaactcacttgtcctaaacaacattgttgtaatgaagtatgaaaactatagcatgagtctcctgactttta

SEQ ID NO: 98821 - DNA, 386 bp, Homo sapiens
ttgcagatgagggctgagtgtggttttgggccatatatatcaacaactgctgataaattcgttggaaagggggaaattttgcttctataagaagaagtctggtaatgggaggttgtcaggttgtaggcttcagcggctcaatgatattagggatctgagtctgccatcttttctttctttcccttggctttcccctcacaattccccagctccaagcatcacaacctcacccacatgcactcagaggcaggaagaaagggggaggaggggtccttcttacatgtctctgtttttatcrggaaagaagatctttgtcagtagtccctggtggatttcaggagacctaagtcaggtcccttgggtcagaaatgagtcacgttcctaca

SEQ ID NO: 98822 - DNA, 501 bp, Homo sapiens
aagcaaagccagtgtgattctggacaatgactttcccagggatttttctctgtctttatacgtagacatgtatatataatctgcaatctcctaagaggtcccttgaatttaaatgactccaraaaattggggtagaacaaaaacaatctctaaaagtggtttcgctgaaaagcaacctggacaggaggttaaacctgcagagtggaacagagtgaataaatctaggggaaaattactttgagcttcaatactaaatagcctgaattccaagactttgtggaaaatatggtcatcaaagcctgatgctgctttgccaagtgctgtgggactagatgatttatgagataattcagggcattaagagggggacgagggtgcaaggtgaggcatttgaacccaggcacattctggaggaggttatgattacagggcagattgtccctaaggaagcaaggttgtggggccccaccatatcaggagatctcttcatcttgtgctttg

SEQ ID NO: 98823 - DNA, 659 bp, Homo sapiens
taagggttgacagtacactatcttgtttaatccccataataactatcaaatatttattattatttttgttgaaaatggaagccattctcagagatttaagtagcttaaaccaaaatctcacaataagtagaattcaaacccagagctgactagaagcctcgttctattcattatcctgtgttggctataatatgatgaattttatacaagtgaaatttgaaattcagggaggacaccatgaagagatgtctagcaggcagtttaagtaggatgagaaagcagagttagaaatggagatttgggagtgtgctggctagattgctgtaatgacacccaatattgatgcagtttgatggggccttcctacattgaccttgggcttgtctgtgtggyttgctttgccaatgggacagcagcacctgtgaggcgagcggaaagttgaaaatgtagaagattgcgtggggtttactatctatgtgcttttagaaccttgagcagccaggagaaaaaactcagcctagctgggtagatgataacagatatatggcctagtttccttcatggtctcagctgacagccaggcaatccccagaagcaggggctcccagtgggactggcaactcactgcaaatgcatgagtaagcccagcccagcctagc

SEQ ID NO: 98824 - DNA, 659 bp, Homo sapiens
taagggttgacagtacactatcttgtttaatccccataataactatcaaatatttattattatttttgttgaaaatggaagccattctcagagatttaagtagcttaaaccaaaatctcacaataagtagaattcaaacccagagctgactagaagcctcgttctattcattatcctgtgttggctataatatgatgaattttatacaagtgaaatttgaaattcagggaggacaccatgaagagatgtctagcaggcagtttaagtaggatgagaaagcagagttagaaatggagatttgggagtgtgctggctagattgctgtaatgacacccaatattgatgcagtttgatggggccttcctacattgaccttgggcttgtctgtgtggcttgctttgccaatgggacagcagcacctgtgaggcgagcggaaagttgaaaatgtagaagattgcgtggggtttactatctatgtgcttttagaaccttgagcagccaggagaaaaaactcagcctagctgggtagatgataacagatatatggcctagtttccttcrtggtctcagctgacagccaggcaatccccagaagcaggggctcccagtgggactggcaactcactgcaaatgcatgagtaagcccagcccagcctagc

SEQ ID NO: 98825 - DNA, 654 bp, Homo sapiens
gcttgttttgtacttgacctgaggttgctgctactaatcttttagccctaaagagaaaggcaggttctgagtattagatttctttctagatgcactgaaaaaaaaaccttaacaataaaaccccaaagtagcaagtgatgttttaacagagagaagaaaattcaactgaggagagtctgcttgtctctatttcacaaaaatgattcaaatattcatcaaatatttaatatatgtatacaccagactttgttttgttagaggttcagggattagaaatgaaaagctcacaacaaaccagttcctgactttaaaatatttacaatcttttaatatagataacaaagaagcttaagtgtyatatatatatatatatatacacacacagaagtacttatatgtcatatgagcaggcaacctatgtggaggctggtcacgggattgaaacatgaagtaaatcttgaagagcaaaaagaagtaataaagagagacaaaggaatgctaactaagtatgatcagatcattatggctgcagcattacatgtgtttgtactggtttcataaggctatgataggaaaaataaacatagcaacaacaacaaaacagcaacaacaaaatagtaacagtggctaaagttatatagtttctattttgtg

SEQ ID NO: 98826 - DNA, 492 bp, Homo sapiens
aggctgtgatgtgctttcactcagcctctgctgtcttccctgggctaaggctttgtaatttgtgattcagcccaaaagacaacatctatatttagactaaagactcagggggaaaactacaacataatgaatgtgtgctttataaatttgatgctctaattatctatgtttccatagatcttaatcttttaaaaaagaattartgtccctgtcaagcaggctcaggattttgcatttgtttagtaatgatacagtttcgcattggatttcttcctatcagcatatacagcaatatattgtacagcatatttggcaatatactgtttaacagtacactgtactttgtctgattaccttattgttatctatattgaaatagaagaaaaaataaaaataaaaccatagttctgtggtccagctctgccatgtgattccaccctatgtaagtttcaaaatgtagccaaaatttacgggaatcttccccaccaacat

SEQ ID NO: 98827 - DNA, 492 bp, Homo sapiens
aggctgtgatgtgctttcactcagcctctgctgtcttccctgggctaaggctttgtaatttgtgattcagcccaaaagacaacatctatatttagactaaagactcagggggaaaactacaacataatgaatgtgtgctttataaatttgatgctctaattatctatgtttccatagatcttaatcttttaaaaaagaattagtgtccctgtcaagcaggctcaggattttgcatttgtttagtaatgatacagtttcgcattggatttcttcctatcagcatatacagcaatatattgtacagcatatttggcaatatactgtttaacagtacactgtactttgtctgattaccttattgttatctatattgaaatagaagaaaaaataaaaataaaaccatagttctgtggtccagctctgccatgtgattccaccctatgtaagtttcaaaatgtagccaaaatttacrggaatcttccccaccaacat

SEQ ID NO: 98828 - DNA, 616 bp, Homo sapiens
gaagcatattttgcatgatcttgatggccgcyttataactgagccgcatttccaacctgcttctgggtttgtgtttaaaactgacctggtgctaacatgagagcatgtagcttttgctgtgctgggaagcatgctggttgcttttgaagtggcatgaaataacaatagccatgagggtccaccattatcctgatgggaaattctttttgtagttgacgagacaaaagtaaactcctctttgggattaaaattggcagttagaagtaccttcattcttaatgagctagtaagaaaataattcaagttgacctaattcgtaaagaatgccgtcacaccaaatgaaagccaggcaggtgtcatggagcatgaggtttccatagcaggctgaatattccaagttaaagacaaaagtaagcaatggccagaaattttgactcatgctcagattatctatggattatatgaatgaacgataactagcatttattcatttccctcagtgatttgatggtgaaattgttgctggactagacattctttttaatgtctgcaagaattaaaaactaatttcagatgttattttcaaaatagattccaacagtaattgaaattggtt

SEQ ID NO: 98829 - DNA, 546 bp, Homo sapiens
atctctgtccaggtgtcaacaatattttacacacattatcacaaccaactggaatccaagggttctgaggtctggcagaacctggacagaggtctgaaccctagataacatgctataaggatgtctcgccaactcacaggttaaataaataaaaaatgtctaacaggatcatcaacttctttaacttttggtttattctaaagtgttgtcttttaatcctgacaatgttactggacatakctattagtggcttaatcgtgttgaggtctactgctacaacctcaatgtcacttaaaataccacattaatcataataaatactagacgcatttatgttcaacaaacatgtgagtgcacaaacaagttagtatgtttcatggtacacacagaaacagagctagagttacataggtatagttctggaaatacagatggattccgatataaatatgaacacagctaccagtacaaatgctaattttacagactctacagataaaggtcaggatttacatatgtttctgaacttggaagaaaatgtaaaga

SEQ ID NO: 98830 - DNA, 368 bp, Homo sapiens
gattccttattgcctttaaaacctgaaagcattgataagggaataaaattattatagctaacactgagggcttactrtttgccaaggacagtgcaaaacatgttatatatactttaatcatcacagaaatcttatagataatattattaacttccattttatagaggagaaaaaggagttcttaagctttataaataaattgcacaagatcacatcatgtgaaaatgttaatgttgagcaagattgatgcttaatttcactcagctggggaatcaacaatgtaaactgaagaattaaataccagcgttgcacagagaagataagaaaatgaaagttttctattatatggaaataaactaaataatata

SEQ ID NO: 98831 - DNA, 564 bp, Homo sapiens
gggtacagccaaatctcagaaatcaccactaaagaacttattcatgtaaccatagccagccacggtggctcacatctataatcccggcactttggaaggctgaggcaggtggatcacctgaggtcaggagtttgagaccagcctggccaacatggtgaaaccccatctttactaaaaatacaaaaattagttgggtctgtgtggtggcaggtatctgtaatcccaggtactcgggaggctgaggcaggagaatcgcttgaacccaggaggcggaggaggttgcagtgagccgagatcgtgccactgcactccagcctggtccatagrgcgagactccatctcaaaaaaaaaagtaactaaataaataagaagaacttattcatgtaagcaaacaccacctgttccccaaaaacctattgaaataaataaaaagaaaccaaacatatgaagtgtacttaaactgtaagcgaatataacctcatcaaactcactgactggcatatctttcttcttaaaatatgacctattagcagacaaagtctttgaactagatgaatacatagc

SEQ ID NO: 98832 - DNA, 564 bp, Homo sapiens
gggtacagccaaatctcagaaatcaccactaaagaacttattcatgtaaccatagccagccacggtggctcacatctataatcccggcactttggaaggctgaggcaggtggatcacctgaggtcaggagtttgagaccagcctggccaacatggtgaaaccccatctttactaaaaatacaaaaattagttgggtctgtgtggtggcaggtatctgtaatcccaggtactcgggaggctgaggcaggagaatcgcttgaacccaggaggcggaggaggttgcagtgagccgagatcgtgccactgcactccagcctggtccatagagcgagactccatctcaaaaaaaaaagtaactaaataaataagaagaacttattcatgtaagcaaacaccacctgttccccaaaaacctattgaaataaataaaaagaaaccaaacatatgaagtgtacttaaactgtaagygaatataacctcatcaaactcactgactggcatatctttcttcttaaaatatgacctattagcagacaaagtctttgaactagatgaatacatagc

SEQ ID NO: 98833 - DNA, 467 bp, Homo sapiens
cgtagcagtcgtggacgttgtgttacttctcagcttgctggttccctgttccctttgcaatgatctcattattggcattttgttttcaaagtgttatcgttcccattttgcattatgcctctgtgtgctctgtgtggagtggtgtttttttttttttttttttttttcaratggagtcttgtcttgctctgtcacccaggctggagtgcagtggcatggtcttggctcactgcaacctccgtctcccgggttcaagtgattctcctgcctcagcctccagagtagcttaaggcactgcctgccactgttctttcaaccaagtttatcttcttcaagaatattctgaagattaaatgtctttgattagcaaattcttttttttaattttggtgaaattgggagaaggggacttatgctttcataaacatcttctttagtggaataaaaaactggacttggggccaatt

SEQ ID NO: 98834 - DNA, 467 bp, Homo sapiens
cgtagcagtcgtggacgttgtgttacttctcagcttgctggttccctgttccctttgcaatgatctcattattggcattttgttttcaaagtgttatcgttcccattttgcattatgcctctgtgtgctctgtgtggagtggtgtttttttttttttttttttttttcagatggagtcttgtcttgctctgtcacccaggctggagtgcagtggcatggtcttggctcactgcaacctccgtctcccgggttcaagtgattctcctgcctcagcctccaragtagcttaaggcactgcctgccactgttctttcaaccaagtttatcttcttcaagaatattctgaagattaaatgtctttgattagcaaattcttttttttaattttggtgaaattgggagaaggggacttatgctttcataaacatcttctttagtggaataaaaaactggacttggggccaatt

SEQ ID NO: 98835 - DNA, 467 bp, Homo sapiens
cgtagcagtcgtggacgttgtgttacttctcagcttgctggttccctgttccctttgcaatgatctcattattggcattttgttttcaaagtgttatcgttcccattttgcattatgcctctgtgtgctctgtgtggagtggtgtttttttttttttttttttttttcagatggagtcttgtcttgctctgtcacccaggctggagtgcagtggcatggtcttggctcactgcaacctccgtctcccgggttcaagtgattctcctgcctcagcctccagagtagcttaaggcactgcctgccactgttctttcaaccaagtttatcttcttcaagaatattctgaagattaaatgtctttgattagcaaattyttttttttaattttggtgaaattgggagaaggggacttatgctttcataaacatcttctttagtggaataaaaaactggacttggggccaatt

SEQ ID NO: 98836 - DNA, 595 bp, Homo sapiens
ttaatgaacagtgagttcacctccaattccaggccaacatcccagagttttttgttgttgttgttgttttgctttattttttttccctccaactttctgtattttttatagaagcttcttcaacattgagtgacttgacttccattatctttgatacatttccatttccattatttgctcaatccatttttgtgtcttcatactcctagttatgtggctaacttggccccagccctgttgctcctgatttgtgggctgtcctcttgaacccaaacctaccaagcaygtcgactgagtctgcaatgtcagccccagtcctggctccaaagatcatgctgggtaagtccccagtcctagtcttatccccaaccctggagaacacaccaaccaagtacccaactgagttcctggccctgactctagtgagcttgccttttgagatccaggtattgaccaaagagaagggaaagaaatattaactgtataaaacaatgaattaggcacttaacaaaaatacaaccaagaacactcacagagtccacttcactcccatgctacctccactggagcaggtactggtatccatggctgagag

SEQ ID NO: 98837 - DNA, 442 bp, Homo sapiens
gaatgcaattgtatcctaagttattggtttaatttttccttttgtaaatcccagctcttcttttttcctaaagacacagctgktcaaattgggtttcaaagaaaatttatttcaattagtttgtacctatcttcacatgcatgtgtttctggatacatgtgtgtgtctgggtatatgaccatctctccgcatgtgtacctatatccatgtgtatggaagaacacatatgttgtagactgtatttgcctgaggttccactgcagatgctgtttctgagcatgcattggttggaatatgtttacgtgtatgtgcaaatatctacatctaagtgagactgtggatacaatacaactaatgaaatcaaacacagactacttgtggcttaacacggttcttccgactgcactttcttgttgactgtcaccttcttgcatagctccac

SEQ ID NO: 98838 - DNA, 372 bp, Homo sapiens
ttcttttttcctaaagacacagctgttcaaattgggtttcaaagaaaatttatttcaattagtttgtacctatcttcacatgcatgtgtttctggatacatgtgtgtgtctgggtatatgaccatctctccgcatgtgtacctatatccatgtgtatggaagaacacatatgttgtagactgtatttgcctgaggttccactgcagatgctgtttctgagcatgcattggttggaatatgtttacgtgtatgtgcaaatatctacatctaagtgagactgtggatacaatacaactaatgaaatcaaacacasactacttgtggcttaacacggttcttccgactgcactttcttgttgactgtcaccttct

SEQ ID NO: 98839 - DNA, 560 bp, Homo sapiens
tccaaggacaacatagtttaaaatatataaaccttcatttcctttggaaagaacacccctggcaggaattaaacccaatgaaaatcaaacactgattctcccactccaatctctctcaccccttgttaaggaacgttctgcctcatgtctgcctgygttcctcttcctgcccgagctcacagattctgtcatcaatcagcatgtggtcggtggcccccatggtgtgagcaaggcaggggatgtggacagactgtgggatcaaggagctaaaaatctgtatgggctgtgattcaaacacatggaaactaaattaatgcaatgagcatcgccccaggtccctggcacttccattgcaaacaggcatgtcacagaggtgggggatgctcgagtaccagagcagagaagttccctggaggccagagaacatcaccaaatgtgcagaatgggtaccttggaataccagcccaggggctcaaaggtgcctcacagggtgagcataaatgaggcttggttggggggagtctccatggaaggcagaaggacaggacttcaagctgagc

SEQ ID NO: 98840 - DNA, 574 bp, Homo sapiens
ctgtcacactctggtaactgtctgaccttcctccacattctttttactggtcacatctggtcactggtggaaaaaatacaaaagcaaagctagttctcatcttaggtgctttgggttgagattatttctgctctgttttttaaaaattttattcattcttcaactgctggttccaaagccttaacttttttctcccaatatatatttgatcaagtagtaaattctatgggctctaccttcacaatatatccagaatctacctacattcattgttattaatttgtacccctggtgttcrgccagtatcaccttctcccaatctatttcagccagtgacaatgaggacatgcctcaaaactttaatatctaagaatacctcaggattgaggttttccaagttacaaattacccagttgagactaaggattcttactgtttcaatttgattttatcttcttggttgacaggtgagtactcagagaaaaatatggcaatgttatttgctaaagctttcattaaaaatagtataatgacattatgtgtaaaaggactgtcagtaaatccttccaaaaat

SEQ ID NO: 98841 - DNA, 574 bp, Homo sapiens
ctgtcacactctggtaactgtctgaccttcctccacattctttttactggtcacatctggtcactggtggaaaaaatacaaaagcaaagctagttctcatcttaggtgctttgggttgagattatttctgctctgttttttaaaaattttattcattcttcaactgctggttccaaagccttaacttttttctcccaatatatatttgatcaagtagtaaattctatgggctctaccttcacaatatatccagaatctacctacattcattgttattaatttgtacccctggtgttcggccagtatcaccttctcccaatctatttcagccagtgacaatgaggacatgcctcaaaactttaatatctaagaatacctcaggattgaggttttccaagttacaaattacccagttgagactaaggattcttactgtttcaatttgattttatcttcttggttgacaggtgagtactcagagaaaaatatggcaatgttatttgctaaagctttcattaaaaatagtataatgrcattatgtgtaaaaggactgtcagtaaatccttccaaaaat

SEQ ID NO: 98842 - DNA, 598 bp, Homo sapiens
tggatcctgtcaaattccccgatactcccgcttccctttaaacacagctgaagggaagattaatgtgggcctggtgagaagggagggtggggagggagacgcaggtggaaagtgcagggcaggcgaagagttggtgatagarcagaaatgtctggaaagactggatggcagagagaactccagatagctgtggtggccaggagtgatcctcatggctgacctgcaacccaacctgccccaggaagcctgttgtgaccctccagaccctaccccacactgctgggacagaccaggggtcagccaaggggctccagacctctgaccccatcaaggccctccccagggcttccaggggatggggtccagccaaggccttgtcgacagcccagtgccccacacaacagcccagccacctgcccctgcagtgagttacaggaagcccactgctccctggatcacacccgtcctgagcagaaggggagacagaggcctactgggagtgcaggacttcagcccaggcctccaactgctgggcaactgggccccactcccccaccactcaggaaatggctggttctatagagatcccgtcactgaa

SEQ ID NO: 98843 - DNA, 621 bp, Homo sapiens
ggttcctgacctgtggtcagtaaaaaatgtcattttctaacagrcccaggagttccaagtttatcttgggaccttaagaggagaggatcacccaactcacaagtatttgaggatacaaacccatggctgggctctgctttaaaaggtcttatctgagattccttgtgggacagagttccctcaaagccaatctaaaaggcctatgtagacataattattctagctgcactttatgcaaataatcaggccaagtataagactaaaatgtattttgcaaacaactctatcccatcatgatttttttaaacaaaaatgagtattggagagagaggaattatgtttcaaaacctgttataagtttgtcattaaattctcaactcattagttgtttttaaaagtttttgcctacattttagactaaccctgattgttcctgtgaaccaaccagcaatctctggctgcagctcagaagaaacaagagggatgggtaatgtaaaaatctggatcaatattctagttctgagccattatcttgcaaatcccgccagatgacaggaataaatagagtgcccctaacccagaggtttcctttttgggaaagtaagaccaagagagaaaacc

SEQ ID NO: 98844 - DNA, 613 bp, Homo sapiens
aaatgacaacgcagaaaattgtatggtacttctcagagcttcaagagctttttctgatcttccagtgccatcttatactaacatgaagacactggaagctttttgttgttatatttgttttgtttgggttttcaaaaaaatagaaggagagtagtatgtactcagtgacttgagaatgtaagtatagaaacaaaagatgaaacctgagatttgagaaggctaaaataaagatttctattcactttcattagatgtttataagatatttaatatatcaagaattcttctggccattctagaactcttggtaaatacctgtttcacttgcaatgatgtttttttaaactcagaatgatgtactaggtgatagcttcaccatcttgctcaaaggggaagaaatgtagtgtagcagctagctggatgataaacattaatttrtcagtataataaactactgatagtgtagttgtactttcttcttttgaaccattaaaggcaagagtggttttatctaggaatctggtctttcattacatcgtttctgttaaagtcactacctgagagcatttgtctagaagactagctagctcaaaatttttagggttttctgggc

SEQ ID NO: 98845 - DNA, 566 bp, Homo sapiens
tgcttatttcatgaagaaaagtaaccaaactgaaacttgaagacttcttttgtgatcaaattggccatgggcaatgccaacaaagagacgatagtcttgttcatgagcaaagtagacacagttgctggagaagcaaggtgaggaggaaagttttttctakaacaacagtagccatgtaagaagtgcacacaggttgatggaagatttactttatgaagctatggttagctcaatttgggagatcaaagatttattttatgaaccaggagaaacagctactgtggactagaaagcaaacatcttttgttaataaagcatcaccagtggtgctgacaaagaggtgaaagacttttttcctaagcaagatagccatggccaattcaaggaacaacagggaagatttttcattaaaaaatgtatccatggactgggtgtggtggcttatgcctgtaatcccagcactttggaagtcagagtcaggaggatcatctaaggtcaggagttcacgagcaacctggccaacacggtgaaactccatctctactaaaaatacaaaattacctggg

SEQ ID NO: 98846 - DNA, 566 bp, Homo sapiens
tgcttatttcatgaagaaaagtaaccaaactgaaacttgaagacttcttttgtgatcaaattggccatgggcaatgccaacaaagagacgatagtcttgttcatgagcaaagtagacacagttgctggagaagcaaggtgaggaggaaagttttttctataacaacagtagccatgtaagaagtgcamacaggttgatggaagatttactttatgaagctatggttagctcaatttgggagatcaaagatttattttatgaaccaggagaaacagctactgtggactagaaagcaaacatcttttgttaataaagcatcaccagtggtgctgacaaagaggtgaaagacttttttcctaagcaagatagccatggccaattcaaggaacaacagggaagatttttcattaaaaaatgtatccatggactgggtgtggtggcttatgcctgtaatcccagcactttggaagtcagagtcaggaggatcatctaaggtcaggagttcacgagcaacctggccaacacggtgaaactccatctctactaaaaatacaaaattacctggg

SEQ ID NO: 98847 - DNA, 603 bp, Homo sapiens
ggtttctaattcttcctggtttaagctaggagggctgcatatttacagcaatgtatccatcttctctaggttttttagtttatgcttgtaaagttgctcatagaaaccttgaataatcttttgtatttatgtggtgttggttggttctagtatttcccatttgttttctttctttttctttytttttcttttttttttttttttggagacagagtcttgtcttgcactgtcacccaggatggagtgcagtggtgcaatctcggctcactgcaacctcttgcctcagcctcctgagtagctgggatcacaggcgcctgccaccaagcccagctaattttttattagagacgaagtttcactatgttggccagactggttttgaactcctgacctcgtgatctgcctgccccggcatcccaaagtgctgggattacaggcatgagccactgcgttttgtccccatttcttttctaatggagcatatttggatcttctatgttgttttcttggttaattttgctagtggtctatcaatattatttatcttttcaaagaaccagagttttctttcatttgtcttgtggatttttttttgtttcaatt

SEQ ID NO: 98848 - DNA, 563 bp, Homo sapiens
caacaggctttaggcccttaccagcaccaggatgcaacccaaatctctatgtatcagccagaacacatggaactagctttcaagatgacccctgcagacacaggctttaggcacacccattgccaggccagcttgtggttccaggctccaggaccaactcaggtttcagatcactctagagccgggtctgcccacagagscccaggcttcaggtcattgggcttccaaagagagtagggaaggacaaagggataaaagccttatttaaagaagtaatagcagaaaactctccaatctgggggaaagacataaatacccaggtaaggaagacgtcaccaatcagatccaacccaaataatactaccccaagacatattaaaatcaaactgtcaaaaatcaaggacaaagaattatcatatgacatatatattataagaactactgtgtgagtcagtaatcccaccaccaggcaagtatccaaaagaaaggaaatcagtgtattgaagagatatgtgcattcttatgtttattgcatcactattcacaatatccaaaatatggaa

SEQ ID NO: 98849 - DNA, 353 bp, Homo sapiens
gagcaagtgagaggaagacagagagggtttttttttttttctcaaaacgtagtattggagggcagtttgcggtgttttatttccttgaagtgtgtttatgtatcttcatggcttttatctctaaaatcttggaggaatttaaatcctagccaagtgaggatatatacttttatcagctagtattccaagtttagcaagcaatgtttgctttttcccttccaaaaaaaaaaaaaaaaaaaaacggatggttcaraaacttttgagccactcacatgctctcacattgtaaatgtgattcactcctctgactggccctgcttgtcatagaaaacacagtctacttgcatttagca

SEQ ID NO: 98850 - DNA, 507 bp, Homo sapiens
ttcataccaatgcagttttttaaaaatatcccaacctgcctacacaactacttcctctctctgagatttatctcaaaagtggaattagattcctgtcttagctgtaaaaataaagccacaaagggcatcatgcatgagagagtaaatgtgaaactctgtgggggaaaatggaaacttcagatattattakggcctagctgccaatggtgattctctcaagattttattggcaggttgagtgaaagtgccagagtgtggatgcacaaattgtagtttaattggtgtgatttatagctaatggtgcatcagaaggaggaactaggaactgtgccttctaatttaaggcatagtacctaagactgcatccactaggtaagaaaaccttccttggcaaactcaaatattaaatcttcgctgaatttgtcttgttcttttatataaaaatcatggagccaggagctaaaataatatctaagtttcctctttgcctgacgccatccatgcaaa

SEQ ID NO: 98851 - DNA, 365 bp, Homo sapiens
ctactttagttgtaaaccaaggggatagcattcctgaattattttgttagaggaagttattttttttctctctctctgaaaacttgacatcctcatggtagaagagaagatagatgagaagggctgcccagccttttgctcgcagaagttctagcttagaggaggtgtagatgctgctattatctttttgctggtaacttcaggggcatggaaaagagaagaatgttcaagagagggtaccataggaaggcacctgggtgtggctayacaatctgcctacagagggatcctatttcctgtgaacacagagaaccagtatcataggagaagatatttgttgggttgatttgatttgccatgacctt

SEQ ID NO: 98852 - DNA, 613 bp, Homo sapiens
gtgaagggtcttgtaaataaaatccacaggactttgggatggttctgacatggtttcttaataaagaaaagtcaytggaagtgttaacatagctgcaggtgagggttttggaagctcatgcttcaccttacctgctctctatattctaaaagttgcagaagtaaattcgaaaacacaactttctgtaaaacttaatgatgggactgaagagtacaatcatgttaaaagctacttttatatagcaactactaggtgctgggtcctctgctaagtacttcacaggcattatctcgagttctcaagagagaattcaagaatcctacaagggagtagggtgaaaaacatccttattttatagatgaggaaattaaagcctagataggtgttagccaagattcatctaattaaaaatgagagcttatcttacagagtcattgtgaggactaaatgaaactgtatttatttaccaaatgtttggcatggtatagggttgctgtttaaattatgttcatcttatttcaatgtctctttcatattagtctcaagcacttcactgtcttcgtagcatttgggttcttgaaatacttctgtctgagagaaaactgacagtgat

SEQ ID NO: 98853 - DNA, 613 bp, Homo sapiens
gtgaagggtcttgtaaataaaatccacaggactttgggatggttctgacatggtttcttaataaagaaaagtcactggaagtgttaacrtagctgcaggtgagggttttggaagctcatgcttcaccttacctgctctctatattctaaaagttgcagaagtaaattcgaaaacacaactttctgtaaaacttaatgatgggactgaagagtacaatcatgttaaaagctacttttatatagcaactactaggtgctgggtcctctgctaagtacttcacaggcattatctcgagttctcaagagagaattcaagaatcctacaagggagtagggtgaaaaacatccttattttatagatgaggaaattaaagcctagataggtgttagccaagattcatctaattaaaaatgagagcttatcttacagagtcattgtgaggactaaatgaaactgtatttatttaccaaatgtttggcatggtatagggttgctgtttaaattatgttcatcttatttcaatgtctctttcatattagtctcaagcacttcactgtcttcgtagcatttgggttcttgaaatacttctgtctgagagaaaactgacagtgat

SEQ ID NO: 98854 - DNA, 613 bp, Homo sapiens
gtgaagggtcttgtaaataaaatccacaggactttgggatggttctgacatggtttcttaataaagaaaagtcactggaagtgttaacatagctgcaggtgagggttttggaagctcatgcttcaccttacctgctctctatattctaaaagttgcagaagtaaattcgaaaacacaactttctgtaaaacttaatgatgggactgaagagtacaatcrtgttaaaagctacttttatatagcaactactaggtgctgggtcctctgctaagtacttcacaggcattatctcgagttctcaagagagaattcaagaatcctacaagggagtagggtgaaaaacatccttattttatagatgaggaaattaaagcctagataggtgttagccaagattcatctaattaaaaatgagagcttatcttacagagtcattgtgaggactaaatgaaactgtatttatttaccaaatgtttggcatggtatagggttgctgtttaaattatgttcatcttatttcaatgtctctttcatattagtctcaagcacttcactgtcttcgtagcatttgggttcttgaaatacttctgtctgagagaaaactgacagtgat

SEQ ID NO: 98855 - DNA, 475 bp, Homo sapiens
ttttaataatgccaaactattcttttaaagtactttcataataatgaatatttaatgtgtataaatatgaaatgtgcaatattgtctattaattcagcaatggctccttttataggacttcattatctatrgatgcatatgagtgtttatgtgttgcagtaacagtagtagtcacagacataaaaacatttgcaccatcactctatcccactcaaacaaaaaataaacagaaatgcaggatagttatttttgtttgctcattcttaatgaccaatttctttgattatcctgtgaactcaagacatttactggcatggtcatagttccttgtatagaaatcataattagcatttacttgaaatagcaatgcaacattctaattagtatgacctcttttctaaaaactatctctgtgaagatctttctgatgtggtggttgtgttattaccctcaacattaagatgacagcaattcc

SEQ ID NO: 98856 - DNA, 596 bp, Homo sapiens
ctttgggccaataaatatctaatgaactctatagagttgtcctcatgcaccaagccacaaaatccaaacaccaagtttactaattcaatcaataaaggtgtcattagcagggtttcctcaactccagccttggatggcaacattcaatctccaaatgttaaagacttggaattcctagtcaacactattagaaatcaaacctaattaggaaaagctactcaaaattatagtagatgtcactcagtattgccattttaagtttcatatttgatgcctttttatccaaaaacaaaaacaaaattcacaaaatgtggatgggcaaagggaaggctttgcagcgagacccwgcccagtgtggcattctcaaaggtattttagctcacagctatgagctgtggtttttaatgtacctttgttgggaaatgatcaggcacaaagagcaaataccagaattttattaaaggattattattgggttttgaggcatacaaacaaaacaggagttcatatataatctccacatttcccagaatattatgaccctgtccttgaggatgaaagtgaggacatttcgggaagcttagatattgaaaaga

SEQ ID NO: 98857 - DNA, 606 bp, Homo sapiens
gcactggtatgtagtggctttggtggtccatgagatccttgaggatcctaaatgtggagcaggggcctgaagttcaagggatagtcaggagttgaggggctggaatgggaatggaaaagcctcacaagagtgggtggaggaatggagaaggtaggggttgggatggggacaaattaaaggattcaaagtgacctaagctggtaagaggagggaggagcgtgggcactgggaagggagaggtctgagaggagcctgttagagggcatctcaattttcctgaagaagccagtgaagttccaaaatatctagtaaaggcatgccaataagaaaagaataggacagagttagcatcttagtgtagagcatgtcagtggggatttgagaaggatgttggggcaggaatggggagtggaagggtctagtccactgagaagctcccatgttcttaactagtggtgccttgcaaacaaagaagcctaggactctaacccagcctttatgtcttataaacagaaaaacttgagactstcacccagcttctaaaagagtggcatgtatcagtctatttttatactgttatgaagaaatacccaagactgagtaatt

SEQ ID NO: 98858 - DNA, 573 bp, Homo sapiens
tggtgtaagcaaatcccttgtcatgccgcagcacttcttgagtttcttgaagctctcaggctgggatgctgatgcccttggtaatgttgttcacaatccaagtcccctctcatatgagggcatgcatgtcctgagcatttcttcaaactacattagtagtttatagacaagcagcttgtccagggcaaactcaggccagtggttgtctgcagcgtgatgaggtttctgaggtttgtacaaagtcatcaggcttcagctcttagggcttcttcagatccagagacagcttccaggccacaaagagacccagtaagggatayggacagctcggttttagtcttcagtgacttcaaatcaagtacaaatgagaaaaactggagaaggtcatttggaggatagtgacctgatattaaagaaaatacagaaaaagggagaattttataaggattgtcagtttgggaaaggtaacatgttccggcccaatttgcagttaagtaccaaccctcctttttccacagggagggtagaaatcaattaagtgtttaccaggtcatatggtttggatttgtgtcc

SEQ ID NO: 98859 - DNA, 539 bp, Homo sapiens
gaatcataaatttctcaggccagatggtattaagtcatagcctgccaaatatctacatcatttacagtactacagtaaatgaaattagcactagttggcactttgaattgtcaagtgttaatttgctagacattcacaatcttccttatgcttgctgcattatagtagctgattttataggtactgttttaagagttttaagaatgtattaacatgtttttctctgagatcacgttagtctttcataggtatctgagtacctctttagagatatacacaaacaygaagttacggggggaaaactttggaatgaagactctgacactttgaattttcatggtggttatgctaccaacttgtatcacttgggtctgtcccttcaatactctggactccagctcaccataggacattaatgaccaggggaagcttcagtggttcctttcaggtatagtattctgtgattatgaaattttattctaaggttgattttgactcaagaccagccttgtcttcaaacatttttctaccccgtgtct

SEQ ID NO: 98860 - DNA, 524 bp, Homo sapiens
atgttttttaccattttataattgcagaaaatatttttatattctcaaatattatttttctgaatgtattgatcaaaactataaatcattgatctgcttgaaaaactgtatcaaattttctgctactaatgagaaaatttaattaagacagatacagaacaatatagagtttagacattttagagctttattatcagtgctgttgatcttaatttatttgtattttaatatttgattacacaaaatattttaaaatataaacaaacatcatttaatatagttacagaaaatatcatgaaaaactgttaaytttttatattatgtaccattttttgcacttcagaagagttttggtgttaaggctgaactggggcgagtaaaaatgagatgggggtgtttatattataattctttctcctttataagattttgtatctgctggaatgatgtattcttcagtgtttgtaagaactcacctatcaaatcatcagagttgatttatttgtaggatgacttataataaa

SEQ ID NO: 98861 - DNA, 539 bp, Homo sapiens
gggtgaggacacagatgtggaggaataagtttttttgtacaggtaagtacaaatataaattattgtgaaattaaaacttgtttagaaagaggtggataattggacctatttgtgtcttcctacttaggaatagtcatctctctaggaagtggttataatgagatgattaatgctgggttggaatctcagccagaacaaggaggggccgttgggccttctttttctttctgctatgactatgactataccacactccatttattccttgtmatacccccaggctttattttctctttttaattatcctgagaagttacatgtttaatgccatgttgacctttaattagcatgaatatggcaacactgtgtagtctcagagatatttttctaagtgacttgagtaacccttccatagaattcaaggtttgattactatttctaccacaggcagattgccttgtaacatagaaaataggagtgctgaaatcatttaaaatacagacttagaaaccaccgtatattaaggaactaaaggagaa

SEQ ID NO: 98862 - DNA, 554 bp, Homo sapiens
attcccataagtcttacctgagatttgccttgcctatgtcttaatgccatgtaaattgaatgatattgtatatacccttttgtgtccagctttttccacctaacattatgtctgtgagattcatccgtgtggttgtgtgtattggtagactgttcatttttattgccaagtagtagtctattataaaaatagatcatattgtgtttactcactcaacgactaactggtatttggattattcccagtttggggccatgagcattcttgtataagcctctgtatgaagacatgttttcaaattctcctcctaaatatgtaggrgtagagtttctgggtcaaagggtagatatattttaagtttataagaaactgccaatgttttttccatttctgccaaccacacctgacagttccggttgttcttcatcctagctaacatttgctgttgtcagtctttttaattttacctattctactgggtgtgtagtgggtatctcgctgtagtcttgttttgcacttctgtgatgactaacaatgtcaagcattttttaatg

SEQ ID NO: 98863 - DNA, 591 bp, Homo sapiens
gaattttaaattggatattacagatatcaaagagccccttctcagcctcagattatattacaaaaaaaaaaaaaaaaacagatgaaggctacacctcacttgtgaaaggatcaaagttgctttttggtttctttctttttaaatatccccaagtgaatttctgacccttgagtctaaaaattcatttcaaactcatcgagttgtctcaaacttctcttgaacgactttagttaaaagaaattgatttatgagtagcatgcaaaaagccactttattaatacgtcctattaggaaacccacttggaagactgaattgaagttaaaaggatgaaaagacatttcaagcaatgttagaagacaagccattgacttgagagacaatacttgcatcacagataacaaagtgccagtagctggaactcatgaaaaactacaaatcaacaagaggacaataatccaacagaaaaatgggcaaaagattatgaacagcttacagaggagaaatggccacaaaggatgaaagatgctcagcttcaccaataattraggaaatgcagataaaaacaacaaataccatttcactcctaccac

SEQ ID NO: 98864 - DNA, 496 bp, Homo sapiens
taatcccagcactttgggaggccaaggcgggtgaatcacgaggtcaggagatcgagaccatcctggccaacatggtgaaacctgtctctactaaaaatacaaaaattagctgggcgtggtggkgggcacctgtaatcccagctactcaggaggctgaggcaggagaatcgcttgaatcagggagtcagaggttgcagtgaacggagatcgcgccaccacacaccagaggctccatcttaaaaaaaaatagtaataaaggctgggcgtggtggctcatgcctgtaatcccagcactttgagagactggggcaggcagatcacctgaggtcaggagtttgagaccagcctggccaacattgtaaaactccttctctactaaaaatacaaaaattagctgggcatggtggtgcacacctgtagtcccagctactaggtaggctgaggcaagagaatcacttgaattcaggaggcagagggtgcagtgaaccgagatggt

SEQ ID NO: 98865 - DNA, 509 bp, Homo sapiens
aatcatatacagagattaactaaggctcaccaatcattcaatgtcrtagagcattcacttgactgtagataagatcttctaagtaacaagacttactgtgttattatatagatatatgaagttccacattactatacagagtaaggcagacagcagctgttcccagttatacatggtgacattaacatgacaaaattcacatcagccccaaaactcatctaaaattccattacctcattattgattaattgctccaactttaaatgtacttgggatgaagctgacttatatgtctactttgtctgtttagtccagaatgttctacctgtcaaaatgaaggaatccgatgattttctttcaaaaaagagaataggtatactgactggcacagttgcccttgataaaaacaacacatatgcacaatgggcttattcatcctaacaaagacaaattacacatgtaacaattatgcatgtaattagttccccatgactaaaataatggaaata

SEQ ID NO: 98866 - DNA, 399 bp, Homo sapiens
aagctcaaaggcaaggttttcaaattaacccaataaaaacaaaaagaaattaacaaagattccaagcaatgtgagatcgtgttagccaaacctaagactatttggttttctcaagggagaagagaaagccaaaaagttaaaaaaaaaaaaaaaaaaacttatttgagggaataactgagtaaaatttcttgggtcttgctagatatttagatactgaaatatgagaggcccaaaraactcctggtaaattcatcacacacaccaaaaaaatttccaccaaggcatatagccatttggctatctaaagtcaacattaaggaaataattttgaaagcaatgagacaaaagtgtcagtcttataggaaaacctatcagactaatagtagacttcttattatt

SEQ ID NO: 98867 - DNA, 657 bp, Homo sapiens
tcacaaaactatttcacaaggcattggtcaagggtatatcttctggaccctcccaactgagatgagtaggtctaaagtgactaatccactcctccatccaaatctctctaagcctttagatcccttcctctacagtaaaccaagagagatcaagtatttccagttcactcacaatgggccatcttttaattcatatttcagctaactaagcaaataaactattagaaccttttttaaatgccgaagctgcaacattaaatgcagagtccctacttagtgggcccaaatcaataaagtctgcctgatccaactccatgttccttccaccattatcccacacccttaatatccactcccatgcctgctttccagatttctgtttatataagttagaaaactcaagcctttctttttgagtgtagcacacctcctcacgggtcacactctcaacctcacttctaggggtctgccaggactttagtctagttataggtctagaagcaaacgggtgttgggggtgggtcctgaggagaattgacattatcttgcctggcaactgccaccactgaggatggggatactatttcttctggcaaaaaagwttcatcagagtttataaactcagtgtccccatctttatcagggtcctcccacaca

SEQ ID NO: 98868 - DNA, 617 bp, Homo sapiens
ttcctatcttctagctttttggaaatacacaaaaaattattgttaaccatatttactctacagtgtttatagaacactagaacttattccttctatttagctgtaatttgcatctattcaccaatacctctctatcgcccctgcccacttgcccttctcagtctcaaataaccacaattctctctacttctatgatgtcaatttttttagctcttacatttcagtgaaatatraagtatttatctttctgtgtctgacatttcattttacataatgtcctgcaagctcatccatttttccaggaatgacaggatttcattctatattatggctaaacattattccattgtgtatatataccacattttataaattcatctatcgattgacactttggttgattacatattttggctattgtgaatagtgctgctataaatatgggagtgtaggtaactctttggtacacagattttcttttgattggataaatgtccattaatgggatggctagattgcatggtggttgtgttttttggattttgcaaaacatttatactcttttccataatgggtgtagtaatttacattctcataagcaatgtataagagttcca

SEQ ID NO: 98869 - DNA, 617 bp, Homo sapiens
ttcctatcttctagctttttggaaatacacaaaaaattattgttaaccatatttactctacagtgtttatagaacactagaacttattccttctatttagctgtaatttgcatctattcaccaatacctctctatcgcccctgcccacttgcccttctcagtctcaaataaccacaattctctctacttctatgatgtcaatttttttagctcttacatttcagtgaaatatgaagtatttatctttctgtgtctgacatttcattttacataatgtcctscaagctcatccatttttccaggaatgacaggatttcattctatattatggctaaacattattccattgtgtatatataccacattttataaattcatctatcgattgacactttggttgattacatattttggctattgtgaatagtgctgctataaatatgggagtgtaggtaactctttggtacacagattttcttttgattggataaatgtccattaatgggatggctagattgcatggtggttgtgttttttggattttgcaaaacatttatactcttttccataatgggtgtagtaatttacattctcataagcaatgtataagagttcca

SEQ ID NO: 98870 - DNA, 611 bp, Homo sapiens
ttcttcttccaatgtggcccagggaagcaaaaagattggacacccctgccccagaagtatccacttttccatggcacagtctctgactctatcaagatgcctggacattctggagaaaggcattccagcagagttacaatgattgacaatatagtacaatttccatyaacacccacattgtacttactcatagcaaaaacctggaaatagtgaaacctttgagaaggaaggaattaaaatggtttgtgatgctgcaacatttacttagtctagatgtacttttcccgttttcacccagttgttgattacttcaactttcctaaatgatacaaatttctaaatcaagggaggttttctatcttaaacttgttcatgttcttttcttttattttcatcatttgtgattattaatggtattggtcattttattaatagatgatttcaacaaatacatgatgtgcttccatgtgaacattccccagcaaactcatggtcattaaaataaactggcatcctattttattaatttggtcagtttgggaatctatgtatcaagtttttgtgaaataagctgaaaaaggcatatttcaaaatcctatccttatcttact

SEQ ID NO: 98871 - DNA, 661 bp, Homo sapiens
tatgaaatttttttgcaattttaaaaaactcatcagctattttatgtgtggcccaagacaattattcttcttccaatgtggcccagggaagcaaaaagattggacacccctgccccagaagtatccacttttccatggcacagtctctgactctatcaagatgcctggacattctggagaaaggcattccagcagagttacaatgattgacaatatagtacaatttccatcaacacccacattgtacttactcatagcaaaaacctggaaatagtgaarcctttgagaaggaaggaattaaaatggtttgtgatgctgcaacatttacttagtctagatgtacttttcccgttttcacccagttgttgattacttcaactttcctaaatgatacaaatttctaaatcaagggaggttttctatcttaaacttgttcatgttcttttcttttattttcatcatttgtgattattaatggtattggtcattttattaatagatgatttcaacaaatacatgatgtgcttccatgtgaacattccccagcaaactcatggtcattaaaataaactggcatcctattttattaatttggtcagtttgggaatctatgtatcaagtttttgtgaaataagctgaaaaaggcatatttcaaaatcct

SEQ ID NO: 98872 - DNA, 606 bp, Homo sapiens
aattataaaatgtaagtctggatttctggagataagccagtgatttaaatataaatttggaaatcattaacaaatatatgacaccttagacattttgagctaatataataagatactataggttggagaacttataaatatcacaaatctatttctcacagttctggacgctggaagttygagatcaagcattctggagcatgttctcttctgtgttgcagactgctgacttcttgttgtgtcctcaaatgggaaaaagagggctagagagctctctgggttctcttctatcagggcacaatccctttcatgagggctctaccgtcataactccattgcctgcaaaaggccttacctcctaataccatcacattggaggttaagatttcaatatatgaattttgggtgaacacaaacattcagcccattgcatatgatattcaaagtcacgaattagctaagctcacccagcaaaagtgtgtatacagagatgttcagtatggagtaattccagatttaaagcttcaacagaagagaaggagccaggaaaggagtttaagaagggagagtccatagagatacatggaaaagcaaaagtgtgcaatt

SEQ ID NO: 98873 - DNA, 548 bp, Homo sapiens
aaactgtccattttttgcttaggttcaacaaagtatagacagccatgtagaaatataattggatcaaaaggatgtgatctaatactaattgagttgggtaacccagtagggcctgcccatttagatttttctgagcctctctgcagcattctttccatgtgggtatggggcaggaccctctctggaatgaaggtcttatgacctacagtcaaacaaggtaggtcagagtggaggctaaagcaactccatctcagatgctaattcaccataatgacttctgatkaaccccggttccatgaagccctctaagatttccaatgtatctattgttcctgtgtgagagcatatacttaccgtaaatcctgtcattagtcaaaacaattttaatgtatcatgcttcaattgtccaacacatcccttcagaatttccctctggtatgtaagccctgggtctgaggggtaatggtgcagacctccaccatcttgtctcactgccaccaaagacacaggcatggctttggtctgtaagtccctattaaatgtgtctt

SEQ ID NO: 98874 - DNA, 548 bp, Homo sapiens
aaactgtccattttttgcttaggttcaacaaagtatagacagccatgtagaaatataattggatcaaaaggatgtgatctaatactaattgagttgggtaacccagtagggcctgcccatttagatttttctgagcctctctgcagcattctttccatgtgggtatggggcaggaccctctctggaatgaaggtcttatgacctacagtcaaacaaggtaggtcagagtggaggctaaagcaactccatctcagatgctaattcaccataatgacttctgattaaccccggttccatgaagscctctaagatttccaatgtatctattgttcctgtgtgagagcatatacttaccgtaaatcctgtcattagtcaaaacaattttaatgtatcatgcttcaattgtccaacacatcccttcagaatttccctctggtatgtaagccctgggtctgaggggtaatggtgcagacctccaccatcttgtctcactgccaccaaagacacaggcatggctttggtctgtaagtccctattaaatgtgtctt

SEQ ID NO: 98875 - DNA, 534 bp, Homo sapiens
ttttgttgttggcaaaattcaatcccttgaggctgcaggactgggctctgctcctcactggctgtcagcctggggccactctcagattctgaagtcctcccacattccctgccacatggtcctctccatctccaagcctgctatgacacaacgcattgttctcatgcttcaaatctctgacttctctcccgggaccagaagaagaatactctcttcttttaaggggctcatgtgattgggtcaggtcaactctatcatatcatggagtctcaccgtcttgcccaggtgggtcttgaacacctgggctcaagtgatcctcctgcgttggcctcccaaagtgctgggattacaggcgggaactgctgtgcccagccaaggccagcatcttcagacytctctgccctgttttcacatggtcttctcctctttgtgtgtgtgtcaaatctccttctgcctctcttataaggacgtgtgtaatagcactcagggcccacctggatgacacagggtcatctcgccatctcaaaatcgtta

SEQ ID NO: 98876 - DNA, 526 bp, Homo sapiens
atagcagcatttatgttaattctgctacatcattcctcttagaccatctctctccgttttgttttcctagaatagcccattgcttgtattaaaatcatttctaggtataaactttattctcagtaaaaccttgaaaatgtgaatatacttggcatttttayttcgtcaacacagaagaaaattctgtacaaagccaaaattcttcttttgattgccctcgtaatataggaaaaaaagatggaaatataaatattttatatgaaaactaaaatcctctgatatggcctcaaggcatgttggtcagcctcatccctttcacaaactggcatcagtgactgctactctcagtttccttccttgtttccttccatatactctccctattcctcccccaaaatcattacttctagttaaaatcgatctttccttccatttttcattcttgtcaccattttcaggaaagagctattgcccctttctttgatcaaaggcaactccccaagtacaatgtttttttttcttgcct

SEQ ID NO: 98877 - DNA, 574 bp, Homo sapiens
ctgttttcttgttgtcttttagaagttttgtacctttttgtccctttgttgtcttcctttgtasttaagtgattttctctgtgtgtttttgtttcttgttcttttatttttagtgtatctaataaaaatgtttgccttttggttactatgaggcatgtgaagaatattttatagtttcaatagataattttgaatggataacaacttaattttgataataagaaatggggaaaagcaaacactctgctctttaattcaatcactcccccacattttgcatttttgatgtcttaatttacatcatttatatcacttatcccttaacaaattattgtagttgttattgtttttgttttgtattttaaccttcttactaaaaacatgtaagtggtttacattcagttattactatattagagcatgctgaatttgtctgaatatttatttttacctgcggatttataccttccaattttttgtattacatattagtgaccttttctttcagtttgaagactgttctttaacatttcttttaaggcaggtatggttacaatgaattccttcatctttt

SEQ ID NO: 98878 - DNA, 598 bp, Homo sapiens
cgatcataggccacctgtctttgctaactgtttttttcaaaggaaaaataaactttcttttatctttatgatataaggtaatttttacaacttggagcaagaytaggctcttactctctcatggagactgggaaataaggtattatctttctggaggattacgtttgaaagagatggctcccagatccttgaaaaaggaaattttctgcttacaagttacacatgccacttctacctgcatttcactggccaaacaggtcacatgtctaaatctgacccttccttcaataggacagaaatgtataatcttctaggagatagggccactacagcaggaagaccagataatgggagaatggtaatataatctaccacaatgaccacagtgaaaacattagtaatcctcagggttaaaccaagtcttcttggacacttaggttgattctaggctattgtcaatagtggaataacaaaaaataaagagaatagcccatttatttttttgcagagaagctagacaattcacagtaacttatggcctagacaattttatttcttgatcaacacaactctttatagatgcctatggtccaaaaat

SEQ ID NO: 98879 - DNA, 560 bp, Homo sapiens
catgcctcacaaagccttttgacagatagcttgcattaagttttcatcacgggatattccatttttctctataggcatcagtgggctccaaaatgtccctttgcagatcctacagtgaaagtgtttctaaactgctgaattaaaacaaagatttagctttgtgagataaatccagacatyacaaagcatttcactgatagtttgtttccagtttttatcacaggatagtcagtttcttactataggcctcaatttgctctgtaatatcccctcttagattccagaaaaggagagtttccagcctactgaatcacaagaaatgtttaactctgtgagataaaatcacacattggaaagcattttcagacatagcttctttgtagtttttaatcgtgggatatttggtgtttccactataggcctcaatggattttgaaattttccctcatagggacacaaaaaaagtgtctttatccttctgaatcaaaacaaagttttaactgtgaaaagaaaatccacacatagcaaagcattttcaccatatctgccaacaaggaaac

SEQ ID NO: 98880 - DNA, 560 bp, Homo sapiens
catgcctcacaaagccttttgacagatagcttgcattaagttttcatcacgggatattccatttttctctataggcatcagtgggctccaaaatgtccctttgcagatcctacagtgaaagtgtttctaaactgctgaattaaaacaaagatttagctttgtgagataaatccagacatcrcaaagcatttcactgatagtttgtttccagtttttatcacaggatagtcagtttcttactataggcctcaatttgctctgtaatatcccctcttagattccagaaaaggagagtttccagcctactgaatcacaagaaatgtttaactctgtgagataaaatcacacattggaaagcattttcagacatagcttctttgtagtttttaatcgtgggatatttggtgtttccactataggcctcaatggattttgaaattttccctcatagggacacaaaaaaagtgtctttatccttctgaatcaaaacaaagttttaactgtgaaaagaaaatccacacatagcaaagcattttcaccatatctgccaacaaggaaac

SEQ ID NO: 98881 - DNA, 560 bp, Homo sapiens
catgcctcacaaagccttttgacagatagcttgcattaagttttcatcacgggatattccatttttctctataggcatcagtgggctccaaaatgtccctttgcagatcctacagtgaaagtgtttctaaactgctgaattaaaacaaagatttagctttgtgagataaatccagacatcacaaagcatttcactgatagtttgtttccagtttttatcacaggatagtcagtttcttactataggcctcaatttgctctgtaatatcccctcttagattccagaaaaggagagtttccagcctactgaatcacaagaaatgtttaactctgtgagataaaatcacacattggaaagcattttcagacatagcttctttgtagtttttaatcgtgggatatttggtgtttccactataggcctcaatggattttgaaattttccctcatagggacacaaaaaaagtgtctttatccttctgaatcaaaacaaagttttaactgtgaaaagaaaatccacacatagcaaagcattttyaccatatctgccaacaaggaaac

SEQ ID NO: 98882 - DNA, 435 bp, Homo sapiens
tcacgttggctttccatggttttgatgaaaatctgtttcctcatctcatacaatgtggttagtaatagtatcatttagrgttgaagaattaaatggtacgaattatatagggtgcttattataacctacatggaaaatgcctaggatatgttagctatgctcatcaccaacatcgttatatgatggtaataatcagatagttaggaagggcgacgccaagaaaatggatacatgctctgagggaatgaatgtggagagatcagaaggtcaagaacaaagccgtacaacatgtctgcagtaaagggatagagaaaagaaaggctataaaagaaggaatgaaacaaagttagagtaaaattataaaatcaaagctaaggacaatttccagaaagggtaatatcatttaatatcatagaagtttaggagcacaagatg

SEQ ID NO: 98883 - DNA, 435 bp, Homo sapiens
tcacgttggctttccatggttttgatgaaaatctgtttcctcatctcatacaatgtggttagtaatagtatcatttagagttgaagaattaaatggtacgaattatatagggtgcttattataacctacatggaaaatgcctaggatatgttagctatgctcatcaccaacatcrttatatgatggtaataatcagatagttaggaagggcgacgccaagaaaatggatacatgctctgagggaatgaatgtggagagatcagaaggtcaagaacaaagccgtacaacatgtctgcagtaaagggatagagaaaagaaaggctataaaagaaggaatgaaacaaagttagagtaaaattataaaatcaaagctaaggacaatttccagaaagggtaatatcatttaatatcatagaagtttaggagcacaagatg

SEQ ID NO: 98884 - DNA, 435 bp, Homo sapiens
tcacgttggctttccatggttttgatgaaaatctgtttcctcatctcatacaatgtggttagtaatagtatcatttagagttgaagaattaaatggtacgaattatatagggtgcttattataacctacatggaaaatgcctaggatatgttagctatgctcatcaccaacatcgttatatgatggtaataatcagatagttaggaagggcgaygccaagaaaatggatacatgctctgagggaatgaatgtggagagatcagaaggtcaagaacaaagccgtacaacatgtctgcagtaaagggatagagaaaagaaaggctataaaagaaggaatgaaacaaagttagagtaaaattataaaatcaaagctaaggacaatttccagaaagggtaatatcatttaatatcatagaagtttaggagcacaagatg

SEQ ID NO: 98885 - DNA, 435 bp, Homo sapiens
tcacgttggctttccatggttttgatgaaaatctgtttcctcatctcatacaatgtggttagtaatagtatcatttagagttgaagaattaaatggtacgaattatatagggtgcttattataacctacatggaaaatgcctaggatatgttagctatgctcatcaccaacatcgttatatgatggtaataatcagatagttaggaagggcgacgccaagaaaatggatacatgctctgagggaatgaatgtggagagatcagaaggtcaagaacaaagcygtacaacatgtctgcagtaaagggatagagaaaagaaaggctataaaagaaggaatgaaacaaagttagagtaaaattataaaatcaaagctaaggacaatttccagaaagggtaatatcatttaatatcatagaagtttaggagcacaagatg

SEQ ID NO: 98886 - DNA, 530 bp, Homo sapiens
taattgatatcaattctcccatggaacacaacaaaattttctttgagacactaagtgttaacaaaaccatggaaaattgcaaagcccagatccaagagatgagcttggcattgagcatcacttttcagctcaagatttttactgattctaggaagttaaaaaatagattgcaaaactaaggwatacttttggcagcaaaatgcatgtaactgtgagtgtgcaagggaatatggtggggagaattggagcacagtaccctccaggctttgaggtgggggcaaggactacactcgataaagaccagcccactcggggacataatcctagtgtctgattatctgtacaattatggatgcattaaagtaacctgctagtgtccttagcttactgcaaagagcaaatgtaattcctctgtagagaatgttaacatttccagggcctcaaattactctcagtttttcatatataatgcctagtactcaatttaaaaatacatgtaaataaatacatgacgagatatgatgaagaaa

SEQ ID NO: 98887 - DNA, 635 bp, Homo sapiens
ggagaaagtaaaaagagacattttatgaaatgacagatgaacaataagtcctataaatacagcacatagattaagcaactaaagaaaacttcttgcagactacagaaaaaaagtcataaattttagtaaaacaagaataatgcaagttacaaaactccagaggttgcagaagagaattaaaaaaaaactgtcctcacataacctcttataaaaagatgtagactggagcagtctaaaaataaaatctgaaggtaaaatagaaaccacaggaacttctaccagtaactgcagatttgtaattgatatcaattctcccatggaacacaacaaaattttctttgagacactaagtgttaacaaaaccatggaaaattgcaaagcccagatccaagagatgagcttggcattgagcatcacttttcagctcaagatttttactgattctaggaagttaaaaaatagattgcaaaactaaggtatacttttggcagcaaaatgcatgtaactgtgagtgtgcaasggaatatggtggggagaattggagcacagtaccctccaggctttgaggtgggggcaaggactacactcgataaagaccagcccactcggggacataatcctagtgtctgattatc

SEQ ID NO: 98888 - DNA, 437 bp, Homo sapiens
catcaatccaaaagcttacacatggcggattccttcacaccagttcacagtacaaagtaactccttgcttgtagaaaacattattattatcattattatttttgatatggaatttgactcttgtagcccagactggagtgcgatgttgtgatctcggctcactgyaacctctgcctcccaggttcaaaggattctcctgcctcagcctctcaagcagctgggattacccgtgcgcaccactatggcctgctaattttttgtatttttgtagagacggggattcaccatgttggccaggctggtctcaaactcctgacctcagatgatccacttgcctcaaccttccaaagtgttgggattacaggcaggagccatcacccccagactagaaaaaattattcaataacaaacagtagcagtatgcttgggggttttag

SEQ ID NO: 98889 - DNA, 422 bp, Homo sapiens
aagaattctgtaaatatacacaatagggtaggaatgagaaaatctttagaagaaatattcaagaatgtttgatttctagcaaatccagatagacagttttggcaacaaccaagtcataattttragtcttgttataggagctagaattttattcaagggacaactgatttgattagattagatgctgtgcactgcatgtttgcatcaacaaatgcacatgttgaaactctaacagtagaatggcattagaaggaggacctttgggaagtaatttggttttgatgaggatggagttcccacaatggggttagcatcctaataagaagagcaggagactacagccctcttctctcagccatgtgaagatacaacaagaacacctgcaaaccagtaagagggccttcaccagacactggctctgc

SEQ ID NO: 98890 - DNA, 579 bp, Homo sapiens
tttttcaaatggaagtagaatttcacatttttgcttcaaatgaaatacttaagaagaaaactatgcatttgatgaacattctgggataacactgacaaccacagaaacaaatgtgacaggtaattcagtaatccagatacttaccaatctttctgagatatgttcttattataaatatgcccagaattttctttatagggagggcagatacatttacatctgacatcctcgaaattctgtaaccaaaatggaaacagtatagtgcgttgacagtttatcatcaatatttttaaaaactgtaccatatacattttgccaagcatcctctttagaataccaagtattctaaaatcattcatttaaaactttaacagacacagtttttaaaagccacagtcctttatggtaatgccaatgaatcattatatattacatgtagttattttgaaataatacctaatacatgatctaagacttattaaccatatttatgggtcacatgacaatcaaattatgttaatgttattaccatctatctgccactagaaagacacatrgtaagcagatagttgtgcctgt

SEQ ID NO: 98891 - DNA, 705 bp, Homo sapiens
ctactctatattaatgtacatacattagcactagctctatgatcacacagaaggatgctatgccattcaaatattggaaaatagaaagcacatattttccaagttttatcttctacaggctaaatttcctgagtttccttatttgtctgccttgttcactaattgtgccttgggtggcaagggaagtacctggagcatgatgggcacccagtaaagatctactgaatgagtaagtaaataagtgaatgaatgattccaaatgtttttgtcccatgawgagcatgtcctcatacatttctgtccgtcttcaagtgtagctcccaaaatagaatgtaaaacttcaggtattgcctaagaagcacaaagaacgagactgatcactactctcatcttggatgcaaaacatccatgaatgtaacccaaaactgatgtctgtttttgaacaatcctattactatggattcatatcaagtttatagtcagttaagaaccacccgcccccaccgcctgagatttttattcacagatctactattaagctacatctccccccaattgagttttcagtctgaagttcaagacctaacattattcccagtaaattttgtttttattggatttgggccattactccagcatctaaagacctttttgagccttgattctgacctctgacatattagatatacagcatagctttgtgct

SEQ ID NO: 98892 - DNA, 705 bp, Homo sapiens
ctactctatattaatgtacatacattagcactagctctatgatcacacagaaggatgctatgccattcaaatattggaaaatagaaagcacatattttccaagttttatcttctacaggctaaatttcctgagtttccttatttgtctgccttgttcactaattgtgccttgggtggcaagggaagtacctggagcatgatgggcacccagtaaagatctactgaatgagtaagtaaataagtgaatgaatgattccaaatgtttttgtcccatgatgagcatgtcctcatacatttctgtccgtcttcaagtgtagctcccaaaatagaatgtaaaacttcaggtattgcctaagaagcacaaagaacgagactgatcactactctcatcttggatgcaaaacatccatgaatgtaacccaaaactgatgtctgtttttraacaatcctattactatggattcatatcaagtttatagtcagttaagaaccacccgcccccaccgcctgagatttttattcacagatctactattaagctacatctccccccaattgagttttcagtctgaagttcaagacctaacattattcccagtaaattttgtttttattggatttgggccattactccagcatctaaagacctttttgagccttgattctgacctctgacatattagatatacagcatagctttgtgct

SEQ ID NO: 98893 - DNA, 566 bp, Homo sapiens
ttactaaggctgacatctgaccatccatggacttagcaagcactttgtctctgcataagtgttcaagaaagtggtacagtgaaatacatttttacaaattagaataaatatgaggcttgcaacatcataggatgctaacttttcaagatgaacttttatgaatgcttgtgtacacatgtatgtgtgtttgtgtgtttggaatttgtatcagttattcacgttaatttatttctgttctaaaaattacggttctgtatagttatgaaaaagaactgaatgaagtcaactgttgttgtgaactttacccttaatacaattttgtacttcagttggaaattcctaaaacagattacttgtgtaaacatcagtacaaagactaaaagctcattgtaatgaatatgttagttaattgactatgttgcatacaggtaggataaactgaggcaacacatctggctctaatcacagagactgtgatatcagtagaaaaacaatatttatcccagttcrtcttcctctgctgtatgtataagaaataaggttagtggatgctgcagtgagagagg

SEQ ID NO: 98894 - DNA, 504 bp, Homo sapiens
atattgacaggctctgtggtggggtgttttttcccgagtctgggctaccatcaaaatgttattttccagctgctgagtgctggtcttttatatcataactcaagatcaattatattcagaatgcaacataaaaaatacatttagtaagatttcatttctggcagaggtgcttagattacgataaaagtacagaatggtacacaggacaatgtgcttctgaattatcagactgtatttaacatctgaaattatccctcaccactaatttaggctttatgtacccagaaagaatgaagctgattatctattggcagttaaatttaccttggttcagacctatgggtgcccatttattctaackaacagtagaatatcaaattaagaagctttataagttccaatagaataaacatgtggcttaatttgtttacagattgtctgtcattagcaatcacaaatgaattatttaaaatatgcccatgtaaaaggtatgtgtacttattt

SEQ ID NO: 98895 - DNA, 578 bp, Homo sapiens
cattcatcttaagacaaaatggaaactgagcaaacttatcaaacaggcgtatcttctgtaatatttgatagatttcactgaaatttagtacacaggtaggggttatagaaataacagattggattgggtgatggttacagtttacttaactgctaggrtagctgtctctgagtatcttccaaaaaatggcttgcagtaattgataccctgggagaagctaatgcattggcagaggggctagaaatttaagaaagctatatagtgatttggtcgatgacatagccagactatataaatttaaatgcaactgccattttagtgaaaagttcctttttttttttctctcctgccaaagtttctgaataattatatctctactttaggatacttggataggtacagcctctgggtccaagaaatcttaggaagcttttcaaaaagccacagcacagtcagtaacagcccatctgtctcttaattttagagtatttttttaaaaagaaaaattgctttcaatttttatgcccacctctaagctgtaatgcaaattactcagcaggctgccctgacaggtgata

SEQ ID NO: 98896 - DNA, 578 bp, Homo sapiens
cattcatcttaagacaaaatggaaactgagcaaacttatcaaacaggcgtatcttctgtaatatttgatagatttcactgaaatttagtacacaggtaggggttatagaaataacagattggattgggtgatggttacagtttacttaactgctagggtagctgtctctgagtatcttccaaaaaatggcttgcagtaattgataccctgggagaagctaatgcattggcagaggggctagaaatttaagaaagctatatagtgatttggtcgatgacatagccagactatataaatttaaatgcaactgccattttagtgaaaagttcctttttttttttctctcctgccaaagtttctgaataattatatctctactttaggatacttggataggtacagcctctgggtccaagaaatcttaggaagcttttcaaaaagccacagcacartcagtaacagcccatctgtctcttaattttagagtatttttttaaaaagaaaaattgctttcaatttttatgcccacctctaagctgtaatgcaaattactcagcaggctgccctgacaggtgata

SEQ ID NO: 98897 - DNA, 534 bp, Homo sapiens
acctagttgggagggaaaagtggatatgatggatgccaagcaattttgaggatacttgtttttcattatttttgtgtgcttgcttttgttttttgttatgagcagtacaaagaagatttatgtcctagctgaaagggtacaggataggatatacacttgctactcttccttttgaagagtatacattttaaaaacgtttattgaaagcaaactatatattagaagctatatgaggcttttgccctcttttaaactttttaaaaaacaccaaattatgcatacttattgtaacaaaatcaaacagctataaatagataaattgtttgtgtgtgagagggagggaggatgggagaagaatgagagaaatatatagagtataaagttcttctttatctcagtatcctcttaccccgaccaaattatcttatgcagagcttccactgttaacaacaatgtcactrtttcgaagactcagaatatccatttatttggtaccaagagaggacatatttcttttctcttttccgaccactg

SEQ ID NO: 98898 - DNA, 532 bp, Homo sapiens
tgaaattataagcttgaattagaagaacaaatattactttaagttttaaggctggtacaggtacaggaaggtcaaatatattttgtctcatgaagtgctgtgttgacaaggattctaagaatccatctaggcttaatggaaaagagtgtcatcatcgatgagtgatatctgcactgaggtagtaagagtagaaacatatggcatgtttttgccacttcttacttaggctgtcaatgtgaatactgaggtcacctaggaccttagagagattaaaatgggaaggcagtaatcataatcctaaataaaaaagggtggtgaggagtagccaccagttgcaaaacctaaaataagagggattttttcataataatggaagartaagatctggaagcaacaatagggaatttaaaaaatgcttacaaaatatcagaagacaagcctctctgttagcacaagggcaactttagcaggaagccaggtttgcattaagaactttgttagaaacagagtcccagtttaaccatgcagttgt

SEQ ID NO: 98899 - DNA, 618 bp, Homo sapiens
ttctttctataaatccccttctgattactttgggactacctggataatccaggataatctccccatctcaagaaacttaacttcatcacatccacagtcttttgcccttcaaggtaacctatttgcaggttctgaggatttgaacactgatagctttagggggctataaatctgtgtactacagtaccttrtctgcttcccaaataaacacaaacaatagttttgacaaaggctttgccccttcaaaacatggagagcattattccagcctcgaaaatcagtttccttttttacttatttactctgggactcaggctgatagagcacctgctatctggagtattaccaagagacttgtagaaaaaaatagagctctgggtgattttatactgaaaaataaaggtcccataagtgacacacattactcttgctcacaaattattaaccatgaccagtcttatggagctacactaccacaagagtgctagaaagtgtaatctcaacatgtatccagaaaagaaaaaaataaatattaaatatcatcattaatcaccccagtaagtattttattcccctataggtatctttcattctcaatgcaatgattaacctcttagt

SEQ ID NO: 98900 - DNA, 584 bp, Homo sapiens
gaaagcacagagtccttctgagaatggggacccatgtgagtatacagatcacaaaccctgcctcatgacctttctacttggtatgtcctctgcctggatcctgggtgttctctcctcagatacctgcaagactctctcactgtattcaggtctttgctccccaggaggccttccctgaatatcttacctaaagagattcgtaacctcttccctcctttctttaccctgaattatctttcttcatagggcccaataactttttataagtctttttgcttattgtctgtttccctccactagaatgcaaggcacaagasagtgggaacttcatcatgtttattgctgtctccccagtgtctagaatagtgcctggcacatagggtacatttcataaatatttgctgaatgcatgattaaatgaatcccatcatttagtcaatgaaagtcaagtagccttgtatattatcttcccttttaaaacatgctcttacgcttcctatacctaaaataaatatggcctcttatgcctcttttccacaaagtgctcatagtgctgcatcatttacagtctacagagctgcata

SEQ ID NO: 98901 - DNA, 584 bp, Homo sapiens
gaaagcacagagtccttctgagaatggggacccatgtgagtatacagatcacaaaccctgcctcatgacctttctacttggtatgtcctctgcctggatcctgggtgttctctcctcagatacctgcaagactctctcactgtattcaggtctttgctccccaggaggccttccctgaatatcttacctaaagagattcgtaacctcttccctcctttctttaccctgaattatctttcttcatagggcccaataactttttataagtctttttgcttattgtctgtttccctccactagaatgcaaggcacaagacagtgggaacttcrtcatgtttattgctgtctccccagtgtctagaatagtgcctggcacatagggtacatttcataaatatttgctgaatgcatgattaaatgaatcccatcatttagtcaatgaaagtcaagtagccttgtatattatcttcccttttaaaacatgctcttacgcttcctatacctaaaataaatatggcctcttatgcctcttttccacaaagtgctcatagtgctgcatcatttacagtctacagagctgcata

SEQ ID NO: 98902 - DNA, 547 bp, Homo sapiens
gtcctagtaaatctctcacttaataaaagaaatgtgtatcattatgttttgtatgtttatttggcaaatcctaccttattaattgacttccatcattcagttttatattttttattgctgaatgtaataaagttttattttatcatgcaaataaatgctttacaaaataacaattaaggctggtctgaaggcagtgagttatctcaattgattgttcatagttacagattgaacttgtkgttccactcttccctgccttctctctactgcacttgactagtctaagttttttcttaatttaaaaagtaacaagggaaaatatttttttctgataaaataccaaaattttacgttaactataacacgaattatgtaacagagaccataaataaaaataacataggaaatgtgttctgtgggcatatgacaattttctgttttagtgcatttttctcttgtttgtttattaatttgccaagcatttaataggaagctactatatttcagcactatgcttgaagctgggattacaaagattaatgagaca

SEQ ID NO: 98903 - DNA, 595 bp, Homo sapiens
aatgttaggttgagaggaacatgagcaggtctgtagatactagaggagggctcaatgaagaaggtgaggttgaaggtaaaggaaaacaagaaaaagattgatgaagccaattgcagagggagcaggagggagtaggttcccagtggtgrtgagggcaggaagaacttgccctctgagacttgggcagaggaggcaggcaactttgtaatgtgtatgagtaggatgatataggatgttttactgacactgccaattttgtgaataaagtatgagatgaggtggtcaactgagagccattgagaagtgggatgaagaacctggtcaaagacaaacaggaaggttgacaaattgctcagggctaggctgagattgaaaagcacaaatgaattgtatagtaactttgtgccagtgtgcacttgcagcagcaacaccagagtttagaatcagaaaaggtaggttgtaaaattgatcataagttttgatctttctggtgaggtagtaatttagaatgaaggggtctggccagtgtaatggaagaagagaggctaagaggatcctgttagaccttaatgaaagaacaagtcaaggaattagg

SEQ ID NO: 98904 - DNA, 595 bp, Homo sapiens
aatgttaggttgagaggaacatgagcaggtctgtagatactagaggagggctcaatgaagaaggtgaggttgaaggtaaaggaaaacaagaaaaagattgatgaagccaattgcagagggagcaggagggagtaggttcccagtggtgatgagggcaggaagaacttgccctctgagacttgggcagaggaggcaggcaactttgtaatgtgtatgagtaggatgatataggatgttttactgacactgccaattttgtgaataaagtatgagatgaggtggtcaactgagagccattgagaagtgggatgaagaacctggtcaaagacaaacaggaaggttgacaaattgctcagggctaggctgagattgaaaagcacaaatgaattgtatagtaactttgtgccagtgtgcacttgcagcagcaacaccagagtttagaatcagaaaaggtaggttgtaaaattgatcatargttttgatctttctggtgaggtagtaatttagaatgaaggggtctggccagtgtaatggaagaagagaggctaagaggatcctgttagaccttaatgaaagaacaagtcaaggaattagg

SEQ ID NO: 98905 - DNA, 561 bp, Homo sapiens
attaggactatttcataagttaggaccccgccacccaacaatgyaaatggtcaaaatgtaggtaacaaatacttataatcataaatggtattaagaaatgactgtgtaatgctgagttaaaaggtattataaggtcaggtgtggtagctcatgcccgtaatcccagcattttgggaggttgaggcaggaggatcgcttgaggccaaaagttagagaccagtctgggcaacatagagagatcccatctctaaagctatttttttaaattagctaggtgtggtggcacgggcctgtggtcccagctacttgggaggctgaggcaggaggatcacctgagcccaggaggctgaggctacagtaacctgatatggcgccaccacactccagcctgggtgacagagtgagactctgtcttaaaaaaaaaaaagtaattacagaatgttcaaaggggatttgaattgaattaaaaagaacaaaactcctttaagaagtcttatatctgacataaaaagaacaaataacattgactgcagcaacagggtctaaattatcctgtacaga

SEQ ID NO: 98906 - DNA, 629 bp, Homo sapiens
gtttcagaaattgcactgccaagaggaacctcattacctcttggctttgtgtttgagaaaaatccagttcagctgacaaaatgaagatgagygagacgctcaactgaagattgtaaatgcactagtctcagcgtggttttccaaatgtaatcttctactctcagaaaaagaacttaactgttcattaatgaagtgcaggtgtatgcgaacaactggaatgaagagaaaagttgtcccaaagtgaaaagtaatgcctaaaactgaatggtaagactatatgcagggggttacattcatttgttcaggaaatatcgactgagttcttatctaccttttgccaggcaatgtgctaaccgttgcgaagtctatcacaattactaagcctcttctcaaggcttatgcaagatgaaaggaggagggaggagagaaaacagaaatattgggtgatgagaaagagaaatacataaaagaagaggaagagaaatgagactgagggagaaaaaagagaaagaaattgaaggaggaacagaaagaaaagttgtcgtttacagcttcaacatacttcaggcccatattacatctcatctattgcaataaatccttaaaacattctcctttcttcctttcaa

SEQ ID NO: 98907 - DNA, 609 bp, Homo sapiens
gcaattttcacatgccagatactgtgcccagtgctgggaagatgagagtaaataacacagatctggttatttacctgatctcagacttgcatagcagcaaggtgaccagtatgcataaacaagcaattatcatgcagtgagacaaagtgctgtagtggctgaggagcagaggtacctgtgtcatctcaaagaactcccagaagagatactttctaggcatgggttatccaggtacaggtctgagccagggagtaaatgtgtgagggaggaaaataagggagactatatgatagtgggcagcaggcaggyagagatgagctccaaagcccgagactgtgaaagatgttcagcattgttggagctccaagggttgaacaggaatggagacttaacagttcaggtattaccatatcatgatctgatcacatgaggcctaagatcatagcctacaattctatctctctaccctaaacccacagtccttacctcatctcccccatattcatggccagcttgattaccagttttactgaaaatatgttctctgcctttccacttcagtgtctttacacatggcctgcttcctctgggattctgtccctttcatat

SEQ ID NO: 98908 - DNA, 562 bp, Homo sapiens
tatgaacacctgtttaaaccatgaacttcctttaaggcccaggtaaaagctttcttaccccaaacctaccctatgtccccatgtctcactggtttaatctcttcttacctaaaattcctattttctcttaaggttcttgtttcatttcaatagttatttatttaactggctcatctcccctcctataccrttaaagaggtcaaaagtaacactgatagaaataaacaattttcatggcttctataaactttttcctctttaaaacaacagagggatatatttaactatggaaatcatttagaaatcaactagcattgccttagcccaaaactactgggcaaatcccccatttcagtccaggccaatctctctggcccagtaatgctccttgtttctttctcatttgttttccttcccaatctttccccacaggccatttccctcactcaggatccttataccttctattttgtctggttgcattctgggctctcagagctacgtagctttggcatggaatactgacatccaggttgcagacaattttggtctggtcaacagt

SEQ ID NO: 98909 - DNA, 562 bp, Homo sapiens
tatgaacacctgtttaaaccatgaacttcctttaaggcccaggtaaaagctttcttaccccaaacctaccctatgtccccatgtctcactggtttaatctcttcttacctaaaattcctattttctcttaaggttcttgtttcatttcaatagttatttatttaactggctcatctcccctcctataccattaaagaggtcaaaagtaacactgatagaaataaacaattttcatggcttctataaactttttcctctttaaaacaacagagggatatatttaactatggaaatcatttagaaatcaactagcattgccttagcccaaaactactgggcaaatcccccatttcagtccaggccaatctctctggcccagtaatgctccttgtttctttctcatttgttttccttcccaatctttccccacaggccatttccctcactcargatccttataccttctattttgtctggttgcattctgggctctcagagctacgtagctttggcatggaatactgacatccaggttgcagacaattttggtctggtcaacagt

SEQ ID NO: 98910 - DNA, 627 bp, Homo sapiens
gcttataaagtctatgtttgcctctgcaaaaagagtggggatttaaagatggaacacacgtcattactttcactaactcttctacttccttccatttacagataacaatttggaaaggaagcttgtttgcactcggcctaggtagcgtgacacgctaactattctcacttaagaagaagatggagttaacactagagatctggagcatctgtgagtctaggatcctgcatcaataacctggggagaaatggctatcaagtcctaaactctaccttagtgtgtaggttcaagatataagcaaagagataatgcagcctaatggaaagaaaagatccctaagagtttgacttaataagtttcttcctccttcctccctgctctccccttcccgatcccctctcccttctctctgctccattctccctcttcctttcttcctcttcctcctcctccttcatctttcctcctccttccccttctttttcttcctccacttccgttcctcttccttcttgcaaaaaacactggagtaactgcttgtcttcacccatcttctcattccctsccctccccacaccttttcatcaccacctgtcattgtgaggaatccagagatctgcatgttaa

SEQ ID NO: 98911 - DNA, 616 bp, Homo sapiens
ggagattattttttcttaaatacatattgccaaaaatctagaacactgttttgtctactctttatccctggaaatacagtgtaataatgtaattggtatctctttccatcctggattttcttacattaccaccaaattagtcccagtaacatcaaggattattataaagttgaggaataaaatacattgtgctgactctgtattgagctgaaaatattccctggtgtaggaaaccactcctcttttctttctcccctttctttcctttagtctactccttgccctcctttttcttccctttcatctttagtcaaaatcctacytaaaatgaagttgtttaattgacatttactttattcttctaaaattagagtgtaaatataagacaacatctacgtgctggggagatttgtttcattggggattaaagaataaaatattttaaacaagttttgtgcttgattttgtatggatactgtcatatcctagaaaagatggagatagtatttttaaagtagtacaccaaatgggtgtgtttcttttaggttaccttcctctgttgatgcttaacttcattcatattggaaagtggaaagcggggcataagtgccaccag

SEQ ID NO: 98912 - DNA, 483 bp, Homo sapiens
tgtgtcatcatgcccatccttaatgtcatcctcttttgcttgtgctcattgactgggtttctgccatcaatacagccttgacaaaccaatttcctgttttcctagtgagaaaagtgaagttcaaagatgccagcaactccttcaggatggtgaagttaggacgtggtcgaggaaggcttcaggcccctggctcagcattcacacgtctctgcaactactcacatggttgtggttttcatcagcccagtgtaatggggccaaaaataattttgcataataaatgtattgtgaatggtctagtgctcgggcacctgcatgatggtggtcatttcctaggtgctgcggagagtggtcagagcgaggctcatcrcttaagacacacttttttcacctgtaggccaagatcaactgtcctttgctgcttttgcacaacaactcagagccatgtctgttttcttaaaggcattcctgtgtcttgatgtt

SEQ ID NO: 98913 - DNA, 605 bp, Homo sapiens
ctcactgttgtgtattcagagcctagcacaaatgctagtgcaaatagtaataatgataactagaggacacgtgtctcattctaaatgccagttatccaagaaatatggccttcatttatttctgtgtgtcaacattatttttgactctgaattactctgatggactgctgggaaattcagtattcttagacttgagggctcccctctcacttcagtcatgccacaatcctggggccttttcagtaatctctcacgtgtcctcaggggttattgctgagggggcatattgcactagtacccccattgtcccagcagctttctgctgctccagagtcatgcatggaattgagcatcgtgggtgtggctaggtactttcargcttctgggctgatttccctggacacatcatatttcatatgaaattccatttgaatttcattctcccttgacatacatattgcattccgtaaaggtaattgctgtcttcctggtgcagctggtgttaaaagagcagagtcctcactattttggaaccaaaacactctcctgcaccgttaccctttactttaaaagtctcttctaatcttggaaactcctccttatcg

SEQ ID NO: 98914 - DNA, 623 bp, Homo sapiens
tttatatttttataaaataatgcagggcaaggtttcagcaaaaggtgaaatattttactcatttattatttcctattctcttccaaaaacaatttgtatggtcccacagtaaaagaacagctaagataaacccaaagccgattgtcagaagaaaaaaagaaaaccattgagaatttaagaaagagggaaagaaaaatatcaagaaattccggttgaagacacagctatggcagttgagtacaaaattgagttctgagtttgctgataacgccagagaataaaagatggtgagaaatggaagcaggtgctgtttccagcctcccttctctgtaccgcatttctctcctgatgcttcattgcgttttctcctgtaagaacttgctccagagaaagacttttaaatcctaatagcaacttaaattaatgagtagcttcttccaggagaatgtcyccttaaaatcactggaaaacagaaaggctgactttttgttagaaaggatttctgatgttagttctttgtggggtagagaaagtttggttcggcatcaatttttgggtggagagttcttcagccaaagcagtgactttggctgctaattagaatcacttggggagggtttaaa

SEQ ID NO: 98915 - DNA, 617 bp, Homo sapiens
tgagaaagttacatttgaactaagatgtaattttccaactcaaactttttgttgttgtcatttttttttttttggtttttttggttgttgttgagacagggtctcgctctgtcaccaggctagactgcagtggcacaatcatggttcattgtagcctcaaactcccgggcttaagtgattctctckagtagctggggccacaggtgtgcaccaccatgcctagctaatttatttcactttttatagatactcactattttgccaaggctggtctctaacttccagtcacaagtgatcctctgaccttggtctcccaaaatgctaggattacagatgtgagccactgcatcaggctgcaaaatgtttttgtatcatatttcattgaatatttccctaactctttctttttccttttattaagaatgtcaattgtacatacatttttctcagtcttcctgattactttgcatatgtagactactgagctaggcattacagctagctatattcagaaaactacagccctagcatcctacagagggtcactgtggaattaacctccctatttatttgcatatctcgtcttttcatcatcatcagttctttattttgggatg

SEQ ID NO: 98916 - DNA, 556 bp, Homo sapiens
agatatttttacatttcttttaatttctttattggtccattggttgatcaagagcatgttatttmatttccatgtatttgtaaattttctgaacttcatcctattattaatttctagtttgggggtcagaagagatacttgatataatttcagtctttttaaatttgttaagacttgttttataacctaacatatgatctatcctacagtatgttctatgtgcacttgagaagaatctatgttttgctgctattgacattttatatatgtctgttagtactatctggtctagagtcatttaagcctgatattttcttactgattttgtgtctgggtgacctgtgcattgctcaaagtgtggtgtcggagtcccctattattactgtattgcagtctatctcagtcttcagatctattaatgtttgccttacatatttaggtgatctgatgttgggtgcatgtatatttacaactgctaaattatcttgctctatggatttaatatgggtatctttgtgaataaaaaagaccctcctattactcacaaaattccaag

SEQ ID NO: 98917 - DNA, 556 bp, Homo sapiens
agatatttttacatttcttttaatttctttattggtccattggttgatcaagagcatgttatttaatttccatgtatttgtaaattttctgaacttcatcctattattaatttctagtttgggggtcagaagagatacttgatataatttcagtctttttaaatttgttaagacttgttttataacctaacatatgatctatcctacagtatgttctatgtgcacttgagaagaatctatgttttgctgctattgacattttatatatgtctgttagtactatctggtctagagtcatttaagcctgatattttcttactgattttgtgtctgggtgacctgtgcattgctcaaagtgtggtgtcggagtcccctattattactgtattgcagtctatctcagtcttcagatctattaatgtttgccttacatatttaggtgatctgatgttgggtgcatgtatatttacaactgytaaattatcttgctctatggatttaatatgggtatctttgtgaataaaaaagaccctcctattactcacaaaattccaag

SEQ ID NO: 98918 - DNA, 618 bp, Homo sapiens
tatttcttctccatttctttttaatcatatttcctcctctgaacttctaccctcagatttattcattatctaacaaatactgatggtgcagctccatggcccaaagctgttctgggggccacagcagtgatatgagtgtcctggggaagctgacattccacggacacaagcagccattcgtctgtctcattccgccaagacctctgtgaggtcttgttgacccctttgcatgatgatcttaagtttgttcaccactgttcagcatatgggcattaaaccctatttttgcattctccttcccactattttctcctactgattaagcggtatctcctccactgttatttttcttccagtgacatattcaggaagagcaagatctcaaaaaatataaatgttgatgttccccatccaatcccggttgtcattagartgtttatacttatccacgcagtgcttcagttctggaatatattcatctttaccttaccctggttagcaataacagcaacaggaattaaaaccagtgggctactgttacagcttggcaggtgtaacttcagagaacaaaggggattcttttttgttttttgtttgtgattttgtttattcatttat

SEQ ID NO: 98919 - DNA, 591 bp, Homo sapiens
ttctgtgaacagaagagtacattttctgattaacagagttttttgcaactaggaaaataagactgtttttaagtatcatgatttaaagccctygcagtaggaaaccaaattatatagtttatagtgaaatgaaatggagattcatccattgttattgccatataaaagttatatttaaatgtaataccttaatatattttacttccttaaaaaagaaacaaaatttaattttatgacaaggaaatttctattatgtttttcactattaacataattttaaaaataatttgatgttaacacttttctatgaatcagaaataataaattttggccaggcacggtggctcatgcctgtaatcccagcactttgggaggccaaagctggtggatcacttgaggtcaggagttcgagaccagcctggccaacatggctaaacccagtctctactaaaaatacaaaacttagccagtcatggtggcacatgcctataatcctagctactcaggaggctgaggcaggagaatcacttgaacccaggaggtggaggctgcagtgagctgagatcgcgtcattgcactctagcctgggca

SEQ ID NO: 98920 - DNA, 587 bp, Homo sapiens
aaaaaaaaaaacccaccactctcagctcaccaggaagatacaacaattgtacgcatccaagaactgtgaaaggaaaataaatcttgggactccaaaatcactaagctgaagggaaaagtcaagttgggaactgcttagaatcaacctgcctcccattctatcccttaaaaaaagataagtactaagattttaaaaacaagctacatacctccctcacaaggaatttccttgtggacaaaggacagatagaactgaaagtcaccactctgctcactgagatagatgcgtatctgacggcctcctttggaaaggctaatcagaaactcaaaacaatgcacccatttgtcgcttacctacctatgacttggaaacccccttcctgctttgagttgtcccacccctttccaggcagaaccaatgtacatcttacatatattgattgatgtctcatgtctccctaaaatgtataaaaccaacctgtgcccygaccaccctggacacatgtcatcaggacctcctgaggccgtgtcactggcatgcgtccttaactttggcaaaataaatttcctaaaatgagacctgtctca

SEQ ID NO: 98921 - DNA, 631 bp, Homo sapiens
ctgctgttttttcgttttccttcaaactagtaaaactaaaaacgtttctgatttttaactgttactgtttttatctggaaaactcattaatctagattttgttaccactgacagccyataggtcccctctaaatattgtttttaatgtaacttctctacaacgaaatgcctggatctttggcatgcggttcaatcagttttgcactgacaaatgcagacatctgtgtaacccacattcctatcaagtaaaagagcattcccatcagcccagaaagccccctcgtgccccttcccaggcatccccctgcctccagaagcagccactgatggtttgtttttaacatgcatcttaatttaattttaattttaaaacatcacctgcattttcaaaccaaagaaaaaagactccttcctccaagaaaggtctcctgctggctcctgggcccatcgggtgctgttgctgtgtagccaggccgggtgcacattcttcacaggttgtagtgctcctggctcagaccgggaggttttctgaagtctagtcagctacacaactctacacctggaatgtcagacattcgcaatgcctccagaacaatggatggcaaaaaaattcattctgtgctttttccgg

SEQ ID NO: 98922 - DNA, 631 bp, Homo sapiens
ctgctgttttttcgttttccttcaaactagtaaaactaaaaacgtttctgatttttaactgttactgtttttatctggaaaactcattaatctagattttgttaccactgacagcctataggtccyctctaaatattgtttttaatgtaacttctctacaacgaaatgcctggatctttggcatgcggttcaatcagttttgcactgacaaatgcagacatctgtgtaacccacattcctatcaagtaaaagagcattcccatcagcccagaaagccccctcgtgccccttcccaggcatccccctgcctccagaagcagccactgatggtttgtttttaacatgcatcttaatttaattttaattttaaaacatcacctgcattttcaaaccaaagaaaaaagactccttcctccaagaaaggtctcctgctggctcctgggcccatcgggtgctgttgctgtgtagccaggccgggtgcacattcttcacaggttgtagtgctcctggctcagaccgggaggttttctgaagtctagtcagctacacaactctacacctggaatgtcagacattcgcaatgcctccagaacaatggatggcaaaaaaattcattctgtgctttttccgg

SEQ ID NO: 98923 - DNA, 579 bp, Homo sapiens
  misc_feature (1)...(579): n = A,T,C or G
ttgcagcaacgcctgcaaagacgggcccaagcgcaccgtatttctgttaagaacgtgtgattttttttttctgcgccaccttgtggccgtaaaacaacttgcccacgtgaaagttgaccgctttttcccgcgccggcagagccttgctgagagccgcactgcgggaatccgcctccagacaaacgtgcagaaaatggtgtcttcctttacaaccagtgacaggaaacagacttccccttcttcatactccgtttcctttattcctgaattccatttcctcggcccgcccacccactgtcctcagacagccgtttcccagtgtgacctccttttccagctgcactctccggcggaggcccttttcccagcccggaccctcccgggcggccctcgcagccctcacctccgggtccccgccgcccctgctccattacagcacgatccccgccacacaggcccgccyctccctccgacagccaatcgcgcgcgaccccgcccctcccgctgggcccggggcgctagagctccgangtgctaggggagctgaattctgcgtcttcctttaggctgcggcgagac

SEQ ID NO: 98924 - DNA, 568 bp, Homo sapiens
tgaataatgttccatatatayacacacacacacacacacacaatttgtttatccatttgactttttatggacattgtctttttatggactttcactgccctcgatgtctcctgtgccctacctattctaccttttcatcttttgactattgtgactagtgctgttaagaacgtacatatatttgtttgagtacccctttttaattcttttatttatatacccttttttttttttttttttttgagatggagttttgctcttgttgcccaggctggagtgcaatggcacgatcttggctcaccacaacctccgcctcccacgttcaagccattctcctgcctcagcctcccgagtagctgggattacaggcatccacgcctagctcattttgtatttttagtagagatgggatttctctatgttggtcgggctggtctcaaactcctgatttcaggtgatccgcccaccttggcctcccagagtgctggtgttacaggtgtgagccacctcgcccggccctctttttttttgtttttaatagttagtttgttcaaattgggatctaaac

SEQ ID NO: 98925 - DNA, 626 bp, Homo sapiens
gtcattttgagcattcatttagtggttcataaaataacattacatgaggtatcatttgctttcctctgatgaagctatactacatgtcaaaggtactcagaaaggaaggatatttcttacactgaaatgtattgagtattcatgagactataaaaccaagttatgattgctatttaccaactacaataaaccagatcgtttctatttacccaaatatgagtaactggctgtaatgagaataaaagaaacattggaggcaggcatttaaaattgttgctgatatggcrcaactaattattaacttatcctccttggcaactgacaaaaaaagaacatggtgacttgagaatataactactcacagaagatgaatgttttaaaaggagattatatttgacatatatgtcaacgggctgttggagcaactgggaaacttcagctatagggtcttagaaaactaagtaaatattaaaaatgaggcaataactttaggaaaaaatgttaacataaagatgtgatcatagtgatttgactcaacgtaaacaatatttgtaatcaaaacaaaaataagcactatgcatgtaattaaaactgcgatataattatattgaagaatagggatgctc

SEQ ID NO: 98926 - DNA, 539 bp, Homo sapiens
caacgtaaacaatatttgtaatcaaaacaaaaataagcactatgcatgtaattaaaactgcgatataattatattgaagaatagggatgctctgggaggtacaaaaagatatattataatctaccataataataaagaagtagtactttgacatacacacagaaacatatgatttaggaatattacataaaaacagctgaagaaaaaaaaaactcagaaatggggtagagagggtggcccaagagactgtaagattttatataaatatacacacacatatatatatacacatatagagaaacacatactcaatgtttatrtatatgagcatgttagagctattgtttagtactaatattcatatatatacatagatatataaacaatttactattgttggattttctgatttatgagcatgtattactttgactttttaagttgctacaaaaccagttagcactgacaatggaaaccatttgagaaatgccttttgggctggcctggatcagttctatgtttctagattcaatttgcca

SEQ ID NO: 98927 - DNA, 627 bp, Homo sapiens
gttttgataaaaaaataaagtcaaagcataggcgctgtttgtctgagtgagagggggtaactaagattgtacagaactggaaaagttaggacaatctgaaaataaagtgcagctaattgaacatgatacactaatctcttggatacagagaattcagttattagtkgaaacccagttcatcaatggaaatgtaattgttgacagagcatgaactatgattgacatgaggtcagaaagtccaaaggtcgcagggttagtgattcatatcagcttgtcagagcctttcctgtaatacactccatacttggaaaccagagtgattggaacatgctctcctttcatctcagagatgagaccagtttccacctaagcctctggtatttggacttgggctggtaaggcaactcatagaaatgcattcccagaagcagggaaccttcccacccccaacatcaaacttccataccaacaccaaattatgtccagtccccaggagagactcatctcaccctaggagggggcagtgggtgatatgcccagggcttcctgctaactttggccccagggactgctgaagaatgcaccacccctgtggtgagagagaaggaagaaaagaaggaaaggaca

SEQ ID NO: 98928 - DNA, 560 bp, Homo sapiens
atgcctggcctgatattttcctgtcaaatgtagctccttcttataggaggaaccctgaataaatgtgtaaaggaaacagtaatccagtcagggtgggggcactggctttcatctagcactgccagagcccatctgatccaactacccaaataaccgagcatttattttcaataaaagagaaaaacaagaacttttaacatgggtgatataagtataaattgctacagtacagtcatttttggggagcaatttggcactrccttctcactcaaacatgtgcacaacctgtgacccaaggatttccccatatgagaaagaatcttctgcctctgatccaaggatgccagaacaagaatgttcacaacattactgtttgcaatgtgaaaatggtaaaaaatgtaagacaactaatacccattcttttggaattggggtaaaccgttttaagtccattcaataggattcctaaagtatttaaaaataaactagaattctcttatcagcatggataaatcttgctgctataacattaagtgaaaaacaattacaactgaatatag

SEQ ID NO: 98929 - DNA, 560 bp, Homo sapiens
atgcctggcctgatattttcctgtcaaatgtagctccttcttataggaggaaccctgaataaatgtgtaaaggaaacagtaatccagtcagggtgggggcactggctttcatctagcactgccagagcccatctgatccaactacccaaataaccgagcatttattttcaataaaagagaaaaacaagaacttttaacatgggtgatataagtataaattgctacagtacagtcatttttggggagcaatttggcactgccttctcactcaaacatgtgcacaacctgtgacccaaggatttccccatatgagaaagaatcttctgcctctgatccaaggatgccagaacaagaatgttcacaacattactgtttgcaatgtgaaaatggtaaaaaatgtaagacaactaatacccattcttttggaattggggtaaaccgttttaagtccattcaataggattcctaaagtatttwaaaataaactagaattctcttatcagcatggataaatcttgctgctataacattaagtgaaaaacaattacaactgaatatag

SEQ ID NO: 98930 - DNA, 559 bp, Homo sapiens
cttctagcttaaggatggtgctcatttctccaccccttgaatctggtagggcttatgaaccttttgaccaatagaatgtggcaaaagggaaactgagttctagcactaggctttaagaggtcttgaagcttccattccctctctatgaaccctcaggctatcatactgagaagaagcccagtctagcccacaagagggtgacagccactggaggagaggtgacagccacaccaactgccagatacctggtcaaggccactgtgaacccaccagctatagtcaaatactgagataaacagaggctgatgagtgattctaggtgagaacaacaaaagaaatacacaggtggtcatcccatggaatcaggaggaaaatcagtcattgttttaagtaaccaacttattggggtggtattttgggcagcaayagataattaatttgggtcactgtgttgttcacatccttcagtaaaggatgtgaagactgaaagaaaaaaaaggaagaagggaggaatggtgaaagggaatgaggaaggaaggaaggaaagaaggaaagaatg

SEQ ID NO: 98931 - DNA, 559 bp, Homo sapiens
cttctagcttaaggatggtgctcatttctccaccccttgaatctggtagggcttatgaaccttttgaccaatagaatgtggcaaaagggaaactgagttctagcactaggctttaagaggtcttgaagcttccattccctctctatgaaccctcaggctatcatactgagaagaagcccagtctagcccacaagagggtgacagccactggaggagaggtgacagccacaccaactgccagatacctggtcaaggccactgtgaacccaccagctatagtcaaatactgagataaacagaggctgatgagtgattctaggtgagaacaacaaaagaaatacacaggtggtcatcccatggaatcaggaggaaaatcagtcattgttttaagtaaccaacttattggggtggtattttgggcagcaacagataattaatttgggtcactgtgttgttcacatccttcagtaaaggatgtgaagaytgaaagaaaaaaaaggaagaagggaggaatggtgaaagggaatgaggaaggaaggaaggaaagaaggaaagaatg

SEQ ID NO: 98932 - DNA, 669 bp, Homo sapiens
acaagtgaaagtcaatcaaactaaaaagcttctgcacagcaatagaaactatccacagagtaaacagacaacttacagaatgggagaaaatatttgcaaactatgcatctgataaagatctaatataacaaatccataaggaagaaaaaatgacaagcataaaacaaccccagttaaaaagggcaaagctaatacaggagcagaaaatcaaactccrcatcttctcacttataagtgggagctgaacaatgggaacacatggacacagggaggggaacaacacacaatggggaacaacacacaacacacactataattttctgtagggggttgaggagagggagagcatcaggaaaaatagctaatgcatgctgggcttaatacctaggtgatgggttgataggtgcagcaaaccaccaccacacacgtttatctatgtaacaaaactgcgcttcctgcacatgtaccccagaacttaaaatttaaatcaagaaaaggcaaaggacatgaacagatattttctcaaaagaagacactcaagtatatgaaaaaacactcatccttactaatcatcaaataaataaatgcaagcaaaaaccacagtaagatgccatctcacatcagtcacaacagctataattaaaaagtaaaaaaattagatgttggcca

SEQ ID NO: 98933 - DNA, 582 bp, Homo sapiens
gagaatactttaactttccaaaaagctattcaaaagtataattttcaaataaaatatatgtttgtatgacaacaaatgattttttayaaataatatattctgcattatcaatctgccactggtttttattaaataaaaaaacctgtaagtttgtatgctcttaaaatacatataacatttgtaagaatagtttttgtgtaaaaataattatagttcactataactatgttaaaaatagacatagccaggcaagtcgctcatgcctgtaacccagcactttggtaggctgaggcgggcagatcacttgaggccaggagttcaagaccagtctggccaacatagcgaaaccccatctctaataaaaatacaaaaattagccgggcatggtggcccataccttgtaatgccagctactcaggaagctgtggcaggaagattgctggaacccgagaggcggagtctgcagtgagacaagatcatgccactgcactccaacctgggtaacagagtgagactctgtctcaaaaaaaaaaaaaaagaaaagaaaagaaaagaaaagagaaaaatagacacagatgaagg

SEQ ID NO: 98934 - DNA, 507 bp, Homo sapiens
tacggccagcttccggactcttctagagagtgactaaggacggcatagaggaattaggaatagtagctttataggtaaartaattaaatgtaaccttaagcataaaaagataaagttaactaggaaaatgaaaactcaagatatacagattaaatatgacaaacaatggatctttttttgtggatcttggtttgcagataccgatatctcatatagtgattcacttgatccaaaggcatttgatggaagctgtcttctcccaaagactatttgcttttggaagaatcctaagagtcattagttagaagtttttggtagggatactttcctgtaatatgaagatgacctaaacctctttacttgagagataggaatcaaaggatcagtcttttaaagactatgggtttgctagttgttagctgtgcctgatagtgacttttttcctatgatctttccctgccgtgtctcttagaagacaaggtatccaggtatgaaaaccaattttgc

SEQ ID NO: 98935 - DNA, 588 bp, Homo sapiens
tataatgtgatgtaaataattaagatcaggtggaaagacaaataagattgaaggaagacccaagaccaaggtttggggcactctcagaagttctaaaaaaaaaatttagactatgagtaaagaaggattgatcagcaaggtgaaatggatcaaggaaatgtgggcactcagaggtacagaggggttaattgctgctcagaaaatactcagacgaatgctgaacartagattagatagaaccgatgtcctagaaatcatgaagataagtgactttattaaaatacatattataaacaaagaaggaatttactgttcgaaaagttgtcttgaagaattgttttgggagaaaataaaaaataaaccttattttctaaaatacactaaaactaattccaaatgagtcaaaggattgtgtacagatattttaaattaataaaacaatgttagtgcagattctctttaattacttccctgattgttttacctatagtaactcatttaattctactagcaatcttttcatgttggatacagctattcaaattttcttttgttattgcaatagcctcctaaccattcttccacaaa

SEQ ID NO: 98936 - DNA, 282 bp, Homo sapiens
gcagaaaccatttttaaaaagatatattacataaaaaatgtaaatgtatctacatatcaaaacaaataaataaaagtaaaggcaaataaccaacaagaaaaatatttgcatcgggtgactgagaagggttaacattcctaaaggactctaataaataaattataaatttaaataactttaaaatgaaataagaaaatatatcagtaaatcaaaaagattagccaaacataagatctaaaatrtattgaatgtttacatcaagcattattctaaacgcatcat

SEQ ID NO: 98937 - DNA, 592 bp, Homo sapiens
caaaattagcccactagctaccaagcaatggttcttaatcagtctaaaataattgcaacagacatagaatacagaacctcgatggcagggaagctcatgaacattaaggagaaagttgaaaccctagccaagtaatccagtaaagcaatctaagtaagtgctgaaagatgaaattgccattttaaasaacagccacactgaatttctagagcagaaaaaattcagtataagaattttataatacaataagaaatattaacagaaggtaggccaagctaaggaaagaatctcagagctcaaagactggttcgttgaatcaactgagtcaaaagaaaattttaaaaaagaattaaaaaaagaaaatgaaccaaagctttaagaaatatggaattatataaagagaccaaatctacgactcattgtcattcctagaagagaaacaaagagaaaaggcaacttggaaaatagatttgagaatagagtctatgaaaatcttcctaacctcgctagagagagtgacatgtaaatccaaaaaatacagcaaacccagctaggcactacaaaaggtgactatccctaaggcacacagtca

SEQ ID NO: 98938 - DNA, 592 bp, Homo sapiens
caaaattagcccactagctaccaagcaatggttcttaatcagtctaaaataattgcaacagacatagaatacagaacctcgatggcagggaagctcatgaacattaaggagaaagttgaaaccctagccaagtaatccagtaaagcaatctaagtaagtgctgaaagatgaaattgccattttaaagaacagccacactgaatttctagagcagaaaaaattcagtataagaattttataatacartaagaaatattaacagaaggtaggccaagctaaggaaagaatctcagagctcaaagactggttcgttgaatcaactgagtcaaaagaaaattttaaaaaagaattaaaaaaagaaaatgaaccaaagctttaagaaatatggaattatataaagagaccaaatctacgactcattgtcattcctagaagagaaacaaagagaaaaggcaacttggaaaatagatttgagaatagagtctatgaaaatcttcctaacctcgctagagagagtgacatgtaaatccaaaaaatacagcaaacccagctaggcactacaaaaggtgactatccctaaggcacacagtca

SEQ ID NO: 98939 - DNA, 592 bp, Homo sapiens
caaaattagcccactagctaccaagcaatggttcttaatcagtctaaaataattgcaacagacatagaatacagaacctcgatggcagggaagctcatgaacattaaggagaaagttgaaaccctagccaagtaatccagtaaagcaatctaagtaagtgctgaaagatgaaattgccattttaaagaacagccacactgaatttctagagcagaaaaaattcagtataagaattttataatacaataagaaatattaacagaaggtaggccaagctaaggaaagaatctcagagctcaaagactggttcgttgaatcaactgagtcaaaagaaaattttaaaaaagaattaaaaaaagaaaatgaaccaaagctttaagaaatatggaattatataaagagaccaaatctacgactcattgtcattcctagaagagaaacaaagagaaaaggcaacttggaaaatagatttgagaatagagtctatgaaaatyttcctaacctcgctagagagagtgacatgtaaatccaaaaaatacagcaaacccagctaggcactacaaaaggtgactatccctaaggcacacagtca

SEQ ID NO: 98940 - DNA, 600 bp, Homo sapiens
gcgggtgcccctctgggatgaagcttccagaggaaagaacaggcagcaatattagctgttctgcagcctctgctggtgatacccaggcaaacagagtaaagagtggacctccagcaaactccagcagaactgcagcagagaggcctgactgttagaagggaaacgaaaaacagaaaggaatagcacgtccactcagggaccctatcctgagatcaccaacatcaaagactaaagttaaataaatccatgaagatggggagaaaccagtgcaaaaaggctgaaaattccaaaaaccaaaacacctcttctcctccaaaagatmacaacttcttgccagcaagggaacaaaactggatggaaaatgagtttgatgaattgacagaagtaagattcagaaggtgggtaataacaaactcctctgagcaaaaggagcatgatctaacccaatgcaatgaagctaagaaccttgaaaaaaggttagacaaattgctaactaaaataaccagtttagagaagaaataaacgacctgagggagctgaaaaacacagcatgacaacttcctgaagcatacccaagtatcaatagccaaatcaatcaag

SEQ ID NO: 98941 - DNA, 554 bp, Homo sapiens
gcccagctaatctttgtatttttagtagagatggggttttgccatgttggccaggctggtcctggtctcaaactcctgaccacaagggatccacctgcctcaggcccccaaagtgctgggattactggcgtgagtcaccgcacccggcctcagtcgtcttaatttggccattctaatacatatagagtggtatctcattgtggttttcatttctatttccctaatgactaacgrataatgatgttaagcatctttccatgtgcttattcatcttttatgtatcttcttcagtaaaatgtagattctaatctttttgccaagttttaatagggtcattttcttgttgagttttgagaattctttgtattttctagatacaagtcctatatcagaaatatatgttgcaaatatcttctcttaatctgtagcttgtcttttccttctctattagagcagaagttttacattttgctgagtttatgagtttgggttttggatttttttaatagaccaatgtttttggtgttgtaagaaatcattactcaaaaaaaggt

SEQ ID NO: 98942 - DNA, 597 bp, Homo sapiens
tctttactccttgtttcttttgtctcctctgactgcgtattttcawttagcctatcttcaagctcaccaaagttattattattattattatcttggagactgggtctcactttgtctctcaggctgctgttcagtggtttgatcataattcagcacaaccttgacctcctgggctcaagtagtgctcccacctcagcctcctgagtagttcaaactatagattcacaccaccttgcttgactaattattttatctttttgtagagatgaggtctccctgtattgcctaggtttgtttaaaactcctggactcaaatgatcctcctccattggcttcccaagggctggggttacagacatgagccaccatgctcatctgtaattcttgcatttgctgtatcaattctgctatttggagactctgatgcattcttcatcatgtcagttgcattttttcactctagaatgtctgctggattcttttttataatttcaatctcttctttaaatttaatagaattatgaattcattctctgtgttatcttgaatttctttgagtttccttaaaacagttgatttgatttttttttttttttt

SEQ ID NO: 98943 - DNA, 549 bp, Homo sapiens
tcatatccagattctacaaggaacttaaacaaatttacaagagaaaaacaaacaaccccagcaataagtgggcaaagaacacgaacatacactttcaaaagaagacatatatagggccaacaaacgtgaaaaaaagctcaacttttttgatcgttaaagaaatacaaattaaaaccacaatgagacatcatttcataccagtgcaaatggctattatacaaaagtcaaacaaaacaaaacaaaacaaacaaacaaacaaamaaaaaacagatgctggtgaagttgcagagaaaaaaatggttttacactgttggttggagtataaattacttcaaccatcatggaagacagtgtggcatttcctcaaagacctagaggcagaatggccatttgagccagcaatttccttactggacatatacacgttaagtcacaaagcaaatgttaacaaatttaagattgaaatcatatcaactatggtttccagccatctagaataaaactcaaaatcaatagtggaaataaaagtagaatagtcaaacttacata

SEQ ID NO: 98944 - DNA, 360 bp, Homo sapiens
aatgtgactgtcctagttgcctctggtgcacttttcatcacaccaacctctaacccatctctgacatttgaaatatatarggtgccctttggcaaagaaagaatagaaggagtaattaaggacttcgttttgacatggctggaaaatagaccatctccttcaaccatttggagattctatcaggagatggccaaagtaatcaaggacttccacatggtgtctcaggagatctgtgatggcgttcttaaaaaccaacagctgatggcaaagctaaagaaaagcaagtttgaagtcctggtgtctgatccagtatttccttgtggcgatatagtagctttaaaacttggaattccatttatg

SEQ ID NO: 98945 - DNA, 503 bp, Homo sapiens
ctgtctctctacacacatacatatatacacactctcacacacatcctgttggttctctttctctggagaaccctaacacactccactcagacagattgtctaaggtggcttcacttaagttttggatatcgactcttgccgtcactctcttgaaacaatgttcttagactctcatgtaaagaaactccatctagctgcaccctggcactgtcccaaaaaagtgaggataatacctgcaaggtttcttaaggattatgccttgaagtcatattttacttctgtagagttctattagatcaaacaagttacctggccaagcctagggtcatagtgggagaattttgagggccatatggcaaacagcccaccatacaatacattctcaaatggcttctcaaattttacattcttgtgaatgattctctcttcytgtgattaattttacacacattacttcaatataaatttttatctcattgcattttcagtttttttgtaatttc

SEQ ID NO: 98946 - DNA, 545 bp, Homo sapiens
gtcaattcattaggtactacctatgattctgtagatctgtaacacaggccattctctgctcctccccctcccaaaraaaagacagttatttacatgtcctgcttgatattctgccctttagaaggattttgtttaattttttcttttctgttttttttctttctttcttttttttttttttttgagatggagtctccctctgtcgcccaggctggagtgcagtggggcaatcttggttcactgcaagctccacctcctgggttcacgccattctcctgcctcagcctccccagtggctgggactacaggtgcccgccaccacacccagctaatttttgtatttttagcagagatggggtttcaccatgttagctaggatggtcttgatctcctgagctcgtgatccacccgcctcggcctcccaaagtgcagggattaccagcgtgagccaccgcgcctggcctgtttaaatatttttttaagagacactcctgagtaggactgtaaccctgtgttttgttttttaaattagaaattaccctatg

SEQ ID NO: 98947 - DNA, 638 bp, Homo sapiens
atatgcacaggaatgaagaaaaaggcatttgccaaatcaatggatgaataccaggtaccaggagatgtgttaatttgctcaagcaatgaaaccacatttgttacagcagctgcaattggagccaccacttggtgaagttcacaatcatttactgtaattcttcaagatctgtctgttttctgcataggccaagtaagagagttgaagggcgrctgtggcgggaatcaccacccctgcatcttgcaaatccttgacagtggcactaatctttgcaatccctccagggatgcagtattgtttttgatttactatttttctaggtagaggcagttctgacagcttccatttggtctttcccaccataagagccctcaccttactgatcaaggagccaatgtggggattctaccagctgctaagtatgtccattccaattatgcattctgacactaggggaatgaccactggatgagtccagggacatattagggcccctgtaatttggacctgagctaaaactccattaattacccgacctccataagcccctactctaactggagggccgctgtgacattttgtgttccctggaaccaatgtcagctcagagccattgtccagtaggccctgaaaattct

SEQ ID NO: 98948 - DNA, 638 bp, Homo sapiens
atatgcacaggaatgaagaaaaaggcatttgccaaatcaatggatgaataccaggtaccaggagatgtgttaatttgctcaagcaatgaaaccacatttgttacagcagctgcaattggagccaccacttggtgaagttcacaatcatttactgtaattcttcaagatctgtctgttttctgcataggccaagtaagagagttgaagggcggctgtggcgggaatcaccacccctgcatcttgcaaatccttgacagtggcactaatctttgcartccctccagggatgcagtattgtttttgatttactatttttctaggtagaggcagttctgacagcttccatttggtctttcccaccataagagccctcaccttactgatcaaggagccaatgtggggattctaccagctgctaagtatgtccattccaattatgcattctgacactaggggaatgaccactggatgagtccagggacatattagggcccctgtaatttggacctgagctaaaactccattaattacccgacctccataagcccctactctaactggagggccgctgtgacattttgtgttccctggaaccaatgtcagctcagagccattgtccagtaggccctgaaaattct

SEQ ID NO: 98949 - DNA, 638 bp, Homo sapiens
atatgcacaggaatgaagaaaaaggcatttgccaaatcaatggatgaataccaggtaccaggagatgtgttaatttgctcaagcaatgaaaccacatttgttacagcagctgcaattggagccaccacttggtgaagttcacaatcatttactgtaattcttcaagatctgtctgttttctgcataggccaagtaagagagttgaagggcggctgtggcgggaatcaccacccctgcatcttgcaaatccttgacagtggcactaatctttgcaatccctccagggatgcagtattgtttttgatttactatttttctaggtagaggcagttctgacagcttccatttggtctttcccaccataagagccctcaccttactgatcaaggagccaatgtggggattctaccagctgctaagtatgtccattccaattatgcattctgacactaggggaatgaccactggatgagtccagggacatattagrgcccctgtaatttggacctgagctaaaactccattaattacccgacctccataagcccctactctaactggagggccgctgtgacattttgtgttccctggaaccaatgtcagctcagagccattgtccagtaggccctgaaaattct

SEQ ID NO: 98950 - DNA, 638 bp, Homo sapiens
atatgcacaggaatgaagaaaaaggcatttgccaaatcaatggatgaataccaggtaccaggagatgtgttaatttgctcaagcaatgaaaccacatttgttacagcagctgcaattggagccaccacttggtgaagttcacaatcatttactgtaattcttcaagatctgtctgttttctgcataggccaagtaagagagttgaagggcggctgtggcgggaatcaccacccctgcatcttgcaaatccttgacagtggcactaatctttgcaatccctccagggatgcagtattgtttttgatttactatttttctaggtagaggcagttctgacagcttccatttggtctttcccaccataagagccctcaccttactgatcaaggagccaatgtggggattctaccagctgctaagtatgtccattccaattatgcattctgacactaggggaatgaccactggatgagtccagggacatattagggcccctgtaatttggacctgagctaaaactccattaattaccckacctccataagcccctactctaactggagggccgctgtgacattttgtgttccctggaaccaatgtcagctcagagccattgtccagtaggccctgaaaattct

SEQ ID NO: 98951 - DNA, 311 bp, Homo sapiens
cctcatgaatgggattagtgccattaktaaaacaaacccgaaacacctacaccccccatttccacctatgagggcaaagccactggaagagggtactcactagaacttaatcatgccggcactctgagttcacacttccaacctccagaagagtgagaaataaatgtttgttgttgattagccacctagattggcattctggtatagcagcccagggtggctaagacagaatatggtggtataagttaccagagtagaaagtaaagttagtgagttgtagaggggtcatgttatattgttctggacaagtt

SEQ ID NO: 98952 - DNA, 402 bp, Homo sapiens
atataaatccctatacaccaataatttctaagtattgcatcacacagagccaggggtccccaattctccctttgcataatatattcattagttctctcattaggggtttacttatcatctctcacatcaggaagtacctatttctcatcttcagtttgagtgacccctatcctaattctcctttctcctctttggtaaactgaggccttaatactatcttagggaggtctgggatcaggctaaatagtctaatttcttcctctagggaggcttgcttagcagcttcatctgcaagcctgtttcytacagcttctatagtgttccctttctgatgaccatttacattaagtatgattagttatctctgctggaaacaggaggctttctaaaacctgtttgact

SEQ ID NO: 98953 - DNA, 565 bp, Homo sapiens
gagttttgcaccacaccaggaggaaagaatgctgcacagagaggccaagaagaatctgaaccagcaggccttgctggtgtcccacctcagtctatccctgtcagatcatacccttttgtatgrccacatttctacacagctgcccatttatcatcaaacctaagcataaaagtagacagtttttcctaggtctttgagtcttcatttctgaaggcttccatgttatgtacaatgttgattaaataaatttgttatgcttttccctgttaacttgtcttttgttacaggagtgtcagctgtgacccttacgatgggtgatgaaaggtattgcacctttccactcctacatttgctaaaagtaaagatttttaaaactagttgattctgtttatttggtttccttttttcccattttcatttcttttataaattaccttagagtaaacatgatgtccatgttaagtgctttgattaggaaggctgaagaagaatattttccactaactctcccgttaagctctaaacttctttctcaattaagaggcacacaaagaattagggacat

SEQ ID NO: 98954 - DNA, 542 bp, Homo sapiens
tgtcacactgaccctctgcccttgtgaaaaggcagagggtcarttgagcttgttaaaacttaagccatctgtggacagcaaggctaaaacagcattgtaaaactggggctgcaggcatccacccctagacaatactgcaaggccagagcccaaagcactaaccccagcctgtcaggggtttgagcagtggtggccacccaacgggcgagccacacccctgtcacacgtcctgcaagggggaccagtgaactctcccatttaattttcaatgaggcttatcctgaacactacattaaatgaggcaaactgccctttccccctacctccatacaaacattcccaattccctcatccttgtcctatatataaaaaaaatttctctagcacttatctgataatactcaatttatttagatattatcgtgtggtaaagaatttaactttgcccaaagaaagctctggccattgccttcagccactgagaggtaatctctaaaccctttggagtattctgtttgataaaagtgtctttgtttacctgg

SEQ ID NO: 98955 - DNA, 626 bp, Homo sapiens
gctgacaatatgatattcagtggaacaaaagcaaagaactacatatacattaaaatctttacatttatgcaaaataaacccatttctctctaattatatttgtctgtctaatgagtgcagtaattcttttaaagcagttaacgcaatccctagcacattaaaaacactaagtaaatcagctactacccttatcagtgttattgttactagctatgcatacaaaaagataaaaaagaaatatgtcaacaggttraaaatgcttatttctcaatcgagaaattagcagtaattatattttatggttttcaatattttccaacattgccatgatgtgtatgtcttttagaataaaaacagaaatatatatttgtttgtcacacataatttgctgaatttgttatataaaacacagaatgaacatagattaaatgaaagataaatatttcatattgaggtaagacagaactttctatcagtgaggtaggtccagaaaggaaagaaatcgctaagaagacagtgagctacccatccttaaaaatgagcattgaaaaactgctcttgaaaaaatactcttgggtattatgctggttatctggatgacaaaattatctgtacaccaaaacgct

SEQ ID NO: 98956 - DNA, 578 bp, Homo sapiens
tagaatctatatgcgccatttctgagttgtaggctgaatctacaaagcactaaaggggctcaatgatttkgtctctctggtagaaaaataatgataaattaaatgaagtcaggtaaagcttttgtttgataaaatttatgagaacccaatttaagcattaacctttgtgtgtgtgtgtgtttgtgtgtgtgtgtgtgtgcctatctatatatactatccagaaatagacaagtaattgcaaaatcattacttgatggtccttgcaaacaacaggagggggtatcttttaagactcaccacacctataactgatgctccactcctgactaaagcctacattatttcctaaagaggaccaacatctatggataatattgttagcaaatgagatctgcaagggcctatttagaattcttttaaaaaacagatccatgcttgattcaacctccataagaaaaagtagttcctgagaaaaatgtgaaggagaaatttttgctaagtcatgtctctaccatatgattaatcccacagagaaaaaaggaagtccaacagaggaactgggccagttcattctaccc

SEQ ID NO: 98957 - DNA, 578 bp, Homo sapiens
tagaatctatatgcgccatttctgagttgtaggctgaatctacaaagcactaaaggggctcaatgattttgtctctctggtagaaaaataatgataaattaaatgaagtcaggtaaagcttttgtttgataaaatttatgagaacccaatttaagcattaacctttgtgtgtgtgtgtgtttgtgtgtgtgtgtgtgtgcctatctatatatactatccagaaatagwcaagtaattgcaaaatcattacttgatggtccttgcaaacaacaggagggggtatcttttaagactcaccacacctataactgatgctccactcctgactaaagcctacattatttcctaaagaggaccaacatctatggataatattgttagcaaatgagatctgcaagggcctatttagaattcttttaaaaaacagatccatgcttgattcaacctccataagaaaaagtagttcctgagaaaaatgtgaaggagaaatttttgctaagtcatgtctctaccatatgattaatcccacagagaaaaaaggaagtccaacagaggaactgggccagttcattctaccc

SEQ ID NO: 98958 - DNA, 536 bp, Homo sapiens
gtcataagtaatgctggtagttaaggcaacaggcaacagtttcttttcctccagctcaccactgcaagaaaacatgatgtagaaacttccatggagcctcacaccctgctctgcctttgcagcctggcactgtcatcctgatacactaaaaaactcagcattttactcacataactgtgcattattaggaattgtgtgattgaacccacatgtaatgagacgcataccccactcaccttaatayggttttttaaaaagtctgagtaaaaggaagtggccatttctgttgcaactgtgaaaatagaaattttattataacatctgacatctatacaataaatgggtaagaacattttagaaataactaaaagctgtgatcgtcttttttccccatacaaagctgttctcaaaagcaccaaatacccagtagctaaagtaaaaataaaactcaaaattgagcataaaatgataaatcactaacctttgatggaggaacggcacttaaagatttaacacaggaagcatcatggcattca

SEQ ID NO: 98959 - DNA, 548 bp, Homo sapiens
atttggaaatacccaggtttaagtaaaatggcttgagcaaaagcctacagaagcaagaagactagaaaatgcaacttgaatcccaatcattttattttactcagtttgaagaaagaggaaaatcaccrcatgggtttatacagggagccaaggggtaaggaaatgatgtcagtgtagcttcagcataacccagactagagggttctttgatgggcaaacttggatctccagttggcacatttatgtctattgatggaatggattgtagattatcctgttatgtcttgatctactccatgataaagaaaatctacttaattacatccctcttgctccatggtcatctggcaacttcttgatcaaaataactgaatccccatgtaaattttctaccagtggtgagaatgcaatggtaagctgacataaatttttggttggcctgggacttccactaagttttctatgccttagtctccgtgtttttctttttatcatattcagtggctaattattggaagtttccacatctttagagttaataacagtat

SEQ ID NO: 98960 - DNA, 605 bp, Homo sapiens
tcatcacaactactcaacaccaaggtgtagcatgacagcaaccacagctaacatgtaaactaatgagcttgcacgtttcaataaaacttgattacataagcaggttgcaatatgtatttgactcattggctatagtgtgttggcctctgctattgattaaagtatactgattccttctaaacccatgatataatttaaatttataataataaaaaagataaagtacaatcaggagatattgttaaccaatcacaacagaaattgagattattgagaatttggctcagacagaaaataccctgtaatacctatatccrtatctgcctatctatttatgaattagggaaacgtgaatactgactgaatatttgatattaaagaatttttgataatttttggagtgataatggtattttggttatgttttaaaacatgccgtctttcagagaaatgttctgaaatattttcagatgaaatgattcaatgcctgatatttatttcaaaagtattgaaggagaaatggagtgggaatatagataaaacaaaatgactcatgaattgatcattgctgagatcaggtgatgaataaatggtattcattatac

SEQ ID NO: 98961 - DNA, 579 bp, Homo sapiens
aaatgttttcagctttttgagccgtacaattttcatcacaactactcaacaccaaggtgtagcatgacagcaaccacagctaacatgtaaactaatgagcttgcacgtttcaataaaacttgattacataagcaggttgcaatatgtatttgactcattggctatagtgtgttggcctctgctattgattaaagtatactgattccttctaaacccatgatataatttaaatttataataataaaaaagataaagtacaatcaggagatattgttaaccaatcacaacagaaattgagattattgagaatttggctcagacagaaaataccctgtaatacctatatccgtatctgcctayctatttatgaattagggaaacgtgaatactgactgaatatttgatattaaagaatttttgataatttttggagtgataatggtattttggttatgttttaaaacatgccgtctttcagagaaatgttctgaaatattttcagatgaaatgattcaatgcctgatatttatttcaaaagtattgaaggagaaatggagtgggaatatagataaaacaaaa

SEQ ID NO: 98962 - DNA, 579 bp, Homo sapiens
aaatgttttcagctttttgagccgtacaattttcatcacaactactcaacaccaaggtgtagcatgacagcaaccacagctaacatgtaaactaatgagcttgcacgtttcaataaaacttgattacataagcaggttgcaatatgtatttgactcattggctatagtgtgttggcctctgctattgattaaagtatactgattccttctaaacccatgatataatttaaatttataataataaaaaagataaagtacaatcaggagatattgttaaccaatcacaacagaaattgagattattgagaatttggctcagacagaaaataccctgtaatacctatatccgtatctgcctatctatttatgaattagggaaacgtgaatactgactgaatatttgatattaaagaatttttgataatttttggagtgataatggtattttggttatgttttaaaacatgcygtctttcagagaaatgttctgaaatattttcagatgaaatgattcaatgcctgatatttatttcaaaagtattgaaggagaaatggagtgggaatatagataaaacaaaa

SEQ ID NO: 98963 - DNA, 489 bp, Homo sapiens
tacttatcaccagctgattattttatacactttacccgtttgtttgttatctacctcccccttgcaaaaatgcaagttccagaagtggttagaagtgttttgtaytttattcacctctaaatcctcagcatttaggagattccatggtatataattagtttccagtaagtatttgtagaataaatgggttcattctcataatttcaattgccatttttgcattatttccaaatttttttcactagcctaaagatctctttcccaggtttaaaatccatatattcaattgcctgcttgaattacccccaaacatctcaaactcagtgtactcaagactgaattcattatcttgccttctaacatcttcacatcacctactttacctcctataatctcatataatctcctctgtggtgaatatcaagcatccatccagacaccaagtgaaacattttgaagttatgccacaaattcttgttataagacttt

SEQ ID NO: 98964 - DNA, 611 bp, Homo sapiens
gtcatgtccctttctctcttagaaccttttagtaaaggtcatgactacaaacatttaataggtgtgataaagaraccttgctatgattcagcctctatacatctctacagcctaatttttctgttattttgagctcaatctcaatgtaaacttcttttccaaatcacaagtttcattatgtattaatgctcctacgtatgttcatctttaacaaagaaaaccattcttcaagttgcacactccaactcatcttttaagaccaagcccaagatctgcctcttctaatagttatattgttcttttctcagatggacttcacaatgctcatttctactgtttcctatacgtactgagtcacagcactatacattcattgtattcatttttacatatttctaccctgtgttggaccttgagctcttagacaacagggaatatatataatttgtcttgcaacttgaaagcccctcaatagtggggaatgcaaacacttaagtgaatgaagaactatgagtttgaatagaaatataaaacagtgagactgtagaaggaccataactgtttaaaatatataaaaacgagaatatagactcattataagttcatgaaca

SEQ ID NO: 98965 - DNA, 484 bp, Homo sapiens
ccttttctctgtttgtccttgcccagtcatataaatatccccacagagaaattctgtgcttcctaaagataacataagttcttgaagaaaaaaaaaaaaaaaagtaccggctaattttgaccaacacttgcacctataaaaaaatactttttaaagtatcactttttcagtccttctgttgctagtgattccataagcygctcccaaaccatttttatattccacttgttttcatagtctctaattgcccatccatttctcttgcagtgtactttattgtaaatcctcctattctgctttcttaaaaagtgtgactatcttgtcaccatcatcttagaacaccctattatgccttaattggattacttaattgtgtctcagccttttcttctgtaagtttaaatgcctccgtggatctctagcttcctcgaagagacttattttgcagaaatgttcccaggtattagaaaatcataatggtaaa

SEQ ID NO: 98966 - DNA, 575 bp, Homo sapiens
gaaatgtgctttcctgtgaattttatagtttagtgatttcccaaggcacactcattactgtcggtattattayccctttcatggtatttctggaattatcaaggaagagaagaagaatagatgctgaactcctcaaggaatagtacttatcactggcattttccagactgctggctaaatggagtcaacaaaggtttaaattcttaatagacatttcggaggcctgtgataaaaatctctgaaaaggatacgtgaatggcttataactgtttttcatttgtctctctaattcacctgtctgctttttaggaggaaatcagcattaaattgatttagtactttctaaatccaaagatgaaaataagtgttttgatgcttcctcatgacatcccaggcttaatgggaagaaaggaaataatttcccactacctaaaggaccctgagcatattaatggtcaatacggagggcaagaatccaccctgcagcctgaggaccccaggcaactaagtcagccccttccactaaaaagagcagtattatttccaatagagctaagaggctgaaataacagtga

SEQ ID NO: 98967 - DNA, 575 bp, Homo sapiens
gaaatgtgctttcctgtgaattttatagtttagtgatttcccaaggcacactcattactgtcggtattattacccctttcatggtatttctggaattatcaaggaagagaagaagaatagatgctgaactcctcaaggaatagtacttatcactggcattttccagactgctggctaaatggagtcaacaaaggtttaaattcttaatagacatttcggaggcctgtgataaaaatctctgaaaaggatacgtgaatggcttataactgtttttcatttgtctctctaattcacctgtctgctttttaggaggaaatcmgcattaaattgatttagtactttctaaatccaaagatgaaaataagtgttttgatgcttcctcatgacatcccaggcttaatgggaagaaaggaaataatttcccactacctaaaggaccctgagcatattaatggtcaatacggagggcaagaatccaccctgcagcctgaggaccccaggcaactaagtcagccccttccactaaaaagagcagtattatttccaatagagctaagaggctgaaataacagtga

SEQ ID NO: 98968 - DNA, 580 bp, Homo sapiens
acatggacacaaaaattctaacaaaatgttggtgaatgaaatacagcaatatatataaagcctaatgtattcatgattaagtaatgtttatgccaggaatgcagacttagtttaatattcaaaactcagccaatgtaattctccatattaacatgaaaaagaagaaaaggcatatcatcattttaattgatactaaaaaatttaaaagcattttataaaattcaataccctttcattacaaaaattcatagtttggaatggaaggaacaaactcaatctaattaagggcatctgtgaaaaacctatatagccaacttcatattcagtgaaggtcaatggtgaaaggttcagtgctttcagcccaagatcaggaatgaaggacagtcatccacccycacttttcttcaacattatactgaggtatctaactaatgggctcaaagaaataaataaaaccataataaagggaaaagaataatgaaaactttctttactgatatgatatgatcatgtatataaaaaattctgaggaataaacaaaaaaagaactaacaattgaatttaagaaagtcatagaaca

SEQ ID NO: 98969 - DNA, 524 bp, Homo sapiens
ataaaaagtataatttctcatctcattaaccagtgaatatagtcttcactcatacatgttctcatacatggcgggaaacaccatatatgaatagtgaacacttagcaaagaagtctctccgcaattgcactttgaaagccttcatgacttacaatgacaagattttctaaacagatctgctcttcgatagaacttcacaaaatagtggaatttgttcayggatcaatcttgcagtaaataagaaaaaaacacctaacttacttaacctagattagtagcatacttgctaaaataaaacttcatcacttctccacatttgagaatgttatatcagaaaattgcatactcatgctaatttgttaattttatctgggtaaaataaaggtattcctggggagatgacaagtagtacaactggtcattttgtttttaaactcaaggatcctggccttccagaatttgttcttctttacaaccttataacttttgtgtcccacccccataaccccatgttatgatcccaa

SEQ ID NO: 98970 - DNA, 614 bp, Homo sapiens
ggtcatgctcctctgcaggccctaggaaagaattcctttcttgccttttccagcttctgattgttgccatcaatccttggtatttttttggcttatagacatattagtctctgtcttcacatgtcattctctctgtatgtgactgtgtcttcatgggacctttctttaaggacactagtcattagatttaggacccactctaatccagtatgttctcattttacctaattacatctgcaaaaccctgtatccaaataaggctacattctgaggttctggatggacataaattttggagggatgctattaaacttcgtatagttataagaacacataatgtttctcacctttgtttatgttcgtttattccgtttctttagattgtaaagacttcctaatgaagcaagaagttwagaattgcaaagagcattttaaaatagctatttttacactacatatattaaaactttgttgctttctcaatatggtatacaattatgatacctattttcgatctattatgggttaagatgtaattttgggtttttgctatattttcaagatgcattttttttttaggactgcaacattcaagaaaaaatagacttagaaat

SEQ ID NO: 98971 - DNA, 617 bp, Homo sapiens
tggtgcacacctgtgatcctagctacttagaaggctaagccagaggatagcttgggcctgggaggtcgaggctgcagtgagctgtgatcacactactgcactccagcctggccaacagagcaaggccctatctcgaaggaaaaaaaaatacttaaaaattacatttctttaaaaatacattctttaattcagatttttcttcattaattcctacttggctcaaattaaatatagttaagaaatagttaatataagacataaaattaaaaaggcactataacagataatctaatttaacctattttttcagatgggaatactcagggttcaggtaagttaagtgacttgctgaaggccacacagccttgtaagaaggatggaagcttctgcctgctccctgtttatatggggtatttatgtgccttacatccagattactgactaaataaaagtattaatatatttagtcagccatcatatacctactagaaagtctgctcatgtaaaccagaaatattrcagaactctaccttacaaaggagtgatcacagcatgaaatttctgttagaaatacattagaattggaaatactctctaggaaatggccaaaaaacgat

SEQ ID NO: 98972 - DNA, 588 bp, Homo sapiens
gcaccccagcctgggtgacagagcragacggtctctaaaataaactaggagaaataactaacatgtcacaaaatactaacatctttacattatgaaggactcttaaaaacaaataaataaaaaaccctaaaatcccagaggaaaaaattaagacaaaaggcaaacttgggggcagttcacaaaagaaacacaacagatcaatgaacacaccaaaagctcagccttatcaataatgtaaaaaacccgaaatgaaagtaaaaacagagagttatatttctcctatcaaattggcaacaaaagtattgtttaatctaacttggcattggccaagacgaggaagagggtgcttgagctgcccgaagcttaaactggcacagtcatactgcaaggcactgcgacgacaggtacaaaaagcctgaaacacacacatacacaatgaccaaacgatcccatctaaaactgaacacagagttacagtatcaggtgaaccaacccgattattgtttgtatgtataggatgttcccaattttgttaaatgatgtatacacacgcaaggctgcccacagcagacaccaaagtgttaatac

SEQ ID NO: 98973 - DNA, 609 bp, Homo sapiens
tctctgatgattcatgatttcttctaggagttttgcagtttcagatcttacagttaagtctttaatgcattttgagttagtttttgtatgtggtgtagagcaagagtccaatttcattcttttgcatgtggatatccagttttcccaacatcatttaatgaggagacatttctttccccactgtatattcttggtaccattgtcaaaaactagttgaccatatatacatggattcatttctatggtctcttttccattccatttgtctatgtgtctgtttttatgccagtaccatactgttttgattactgtygttttgtaatatagttttaaatcaagaaataggatgcctccagctttattcttctttctcaatgttgctttgtctaattagggtcttttgagattacacacatattttaggacattttttctatttctgtgaaaaatgccattagaatttttataaggattgcattgattctgtagattgtttaggttatatgacattttaacaatattaattcttccaatccatgaacatgggatacatttccatatatttgtgtcatcttctatttcttttatcaatgtctcatagttttcagt

SEQ ID NO: 98974 - DNA, 542 bp, Homo sapiens
agcacagggtctgaaaaacgaagtagacctatcatcagtctccagggcatggaagaaaaaatcagtctcagggcctgctacggtagaagggacatggcaaattctccaggctttcagatgtgaccaattacataccaggagtaacgacgcatcaaaacaggcaaatgctacaaccactgaaacagagctacgagtaagctcaattcctcattggaataagctaagctttcctctggagaaagttagtattcagagtcacaaattactcccagcttttttttttttcttttaacacaaaaggactggcattcagtaaaaagtaacaatgataccagaatgtaaaattaaattattaaaaaccagaaaaaacataagaaacagtagaaatggacctccaggatagttgtataatagatgacaagayggacacttttattggaggaattgaaatccagaaaaaacagaaatagaaacttcagacattcctctgtagcagtaaaagtaaatatgatggatccaaacatattaatttggaaagatct

SEQ ID NO: 98975 - DNA, 596 bp, Homo sapiens
aatcttaatgttcatctagtttgacagtaatgtgttttagtgacttggacttatragtctttccacagcttttaactagtgttcataggggaaaaaaatcacttcatttgcagctacatttcatcagtttatctgatacctaaatacattacttaactacaataccagctacagctgaacaaatgggtttgggaacaagctggctcttggtaagcacataattcagccagtgggtgctgaagcgagtgggtatgacagagagcagcctgcctgcagtgcattcagcatgctgtgggcattgctcaagagtgtttcatccagggaactgaaaagtgttcatcactcctgtgagttggttaacaggaaggtggtaagagtttccactgtgtttcactggatttcattgggtttcaaattgaagtcccgggaggtgaagcatgtcagtgacaattgtgtggggtggctgaagtgacacaggtgacaagataggccttcattatacatcatcatgttggtgttcctgccaacacacacaccccagttctgagcttaaaagatagagtaagcataatctgctcttccttcacaccctctat

SEQ ID NO: 98976 - DNA, 589 bp, Homo sapiens
tcccccaatcttaatgttcatctagtttgacagtaatgtgttttagtgacttggacttataagtctttccacagcttttaactagtgttcataggggaaaaaaatcacttcatttgcagctacatttcatcagtttatctgatacctaaatacattacttaactacaataccagctacagctgaacaaatgggtttgggaacaagctgrctcttggtaagcacataattcagccagtgggtgctgaagcgagtgggtatgacagagagcagcctgcctgcagtgcattcagcatgctgtgggcattgctcaagagtgtttcatccagggaactgaaaagtgttcatcactcctgtgagttggttaacaggaaggtggtaagagtttccactgtgtttcactggatttcattgggtttcaaattgaagtcccgggaggtgaagcatgtcagtgacaattgtgtggggtggctgaagtgacacaggtgacaagataggccttcattatacatcatcatgttggtgttcctgccaacacacacaccccagttctgagcttaaaagatagagtaagcataatctgctcttcct

SEQ ID NO: 98977 - DNA, 524 bp, Homo sapiens
ttatgcagctgctaaggatatgctcagtaatgaagttaacaaaataaagtgttgtatggctattaatcagtattttttttcaacagccccagaatttgtataatgagttcattaacaaatggytacagtagaaggaatagaggtaatacgtagacacagaagcacaagctagccatcattgaagctgacttttctccaccaatttttacctgatttaatagcagtaattctggcgccaagccctccacatggctatacaattaagaaacaaaccacctcataccagatttccttgtaataggaagcgcattagaaggaaatttgttcttattgtagtaaacacatatgtggtatatagttataattttcttgcctactgcacttctaagaagagtaataactgtactcatatcttataaaatatttaataccatgatatttatttatttataatatttattctgattaagaaactcatcttgcaaaagtagtaaggcaatggagcttatgttcacagatttcgc

SEQ ID NO: 98978 - DNA, 612 bp, Homo sapiens
cttccccttgcggggaaatgtgctggtacacagccagcacatttcagtctccgaaggagttgtagtcaaggactcagctctccctgcctggccaygtccttatgcatagctgcatttttagcccaagtgccttcatttggaggtgtctttattgaggactttagcagggaccttcctcagtcgcctctattgagagcttatgggtaaaagaaaaggcagggaaacttgacatttttactctactctaactcagcttttttccactgttagccctttcttgctttccctctgcccttctccgtgtcctccacaccatctaggtcgataaaactatgggatccttttgttttaggctccctctgcagtggaattacccttatgtcttttctgtctatgctgatccacctgatcttgaactggtgctattccatggggaaaattggaacatggggcaattaacactttctccactttatcccatcaacagtaagtactgaaaggcttaaatgctacttccattttgactgtttgtcttaagcagctactctgacgtccagaagctaggttctctttcgagtttagctgagcttctgacacagagaagagtataca

SEQ ID NO: 98979 - DNA, 612 bp, Homo sapiens
cttccccttgcggggaaatgtgctggtacacagccagcacatttcagtctccgaaggagttgtagtcaaggactcagctctccctgcctggccatgtccttatgcatagctgcatttttagcccaagtgccttcatttggaggtgtctttattgaggactttagcagggaccttcctcagtcgcctctattgagagcttatgggtaaaagaaaaggcagggaaacttgacatttttactctactctaactcagcttttttccactgttagccctttcttgctttccctctgcccttctccgtgtcctccacaccatctaggtcgataaaactatgggatccttttgttttaggctccctctgcagtggaattacccttatgtcttttctstctatgctgatccacctgatcttgaactggtgctattccatggggaaaattggaacatggggcaattaacactttctccactttatcccatcaacagtaagtactgaaaggcttaaatgctacttccattttgactgtttgtcttaagcagctactctgacgtccagaagctaggttctctttcgagtttagctgagcttctgacacagagaagagtataca

SEQ ID NO: 98980 - DNA, 630 bp, Homo sapiens
tcttctcagataggactctggagatggcttagtgattcttctcttaatgctatttagataatgcaaaaacatgggcctcaacatggagcatctgaaggtggaatatatccaaacaacaggcagagtcctgcctaacacaggattaacaaacttgatacagacatggagttgttcttctgcagagctgcaacagacaagttagctaagtgattgtttgagagcttcttctgaaatagaaggaagattcactcattcgtctctgggctcaggggaggaagaatttgaacccaagttttactaataatccttccattttgttgaaaatattgaccattaaatgctacatattaaaattgttatcaggaatcaacatatagttcaagtcatcaagtttatcagtcaaagggtaaagagaataggaaagaaaggatcaaagagagactggagaagcactacaggagtgggaaattatgggctgtgcaggctaatgaatctgtatcagattcaacaacttcytagctgaatggcctagagcaaattccttaactatcgagtttcctttctacagtggtcaatggaggcaagacacctattgtaaagagtagtgatgcagaacaaatgagataaatt

SEQ ID NO: 98981 - DNA, 641 bp, Homo sapiens
ttaagtcagtcttttttttttttttaaattggcctttcttcaatgaatttcaatcttccctattcaccctgggtgccccggtggctgttgctttcattctggaacttgggtaaaatctacacccacatcgatttgttaacaatatctgttgaaagcctattgtgctttggcttagctgatcgctgctgtagccatgaaaatggacacctatatttaagggtgagaattataccacggatatgaaatgtctcttagaatggacaagggagagggacacattactagaaaacaaagaaaacacactgagttgaatatttgtggcttaagttgctagttatacttggagaattctgagttggtttgcattagaattcttattgccctttttaaggaggaaacccccccmaaaaaaactcattaaaaagtagaaagggttttttggatatcaagtatctctttccacatcacatttggctgactccagtgtgaagggacaagaaatgcttaaatgttcttttctttaaagcccacttgggattaagtaagaaatggaaaacatcctacaaaacccatgtgaattgttttggaactcaaacatttggagaggcacttataagaattcttttatgtttgagaatgcc

SEQ ID NO: 98982 - DNA, 641 bp, Homo sapiens
ttaagtcagtcttttttttttttttaaattggcctttcttcaatgaatttcaatcttccctattcaccctgggtgccccggtggctgttgctttcattctggaacttgggtaaaatctacacccacatcgatttgttaacaatatctgttgaaagcctattgtgctttggcttagctgatcgctgctgtagccatgaaaatggacacctatatttaagggtgagaattataccacggatatgaaatgtctcttagaatggacaagggagagggacacattactagaaaacaaagaaaacacactgagttgaatatttgtggcttaagttgctagttatacttggagaattctgagttggtttgcattagaattcttattgccctttttaaggaggaaacccccccaaaaaaaactcattaaaaagtagaaagggttttttggatatcaagtakctctttccacatcacatttggctgactccagtgtgaagggacaagaaatgcttaaatgttcttttctttaaagcccacttgggattaagtaagaaatggaaaacatcctacaaaacccatgtgaattgttttggaactcaaacatttggagaggcacttataagaattcttttatgtttgagaatgcc

SEQ ID NO: 98983 - DNA, 641 bp, Homo sapiens
ttaagtcagtcttttttttttttttaaattggcctttcttcaatgaatttcaatcttccctattcaccctgggtgccccggtggctgttgctttcattctggaacttgggtaaaatctacacccacatcgatttgttaacaatatctgttgaaagcctattgtgctttggcttagctgatcgctgctgtagccatgaaaatggacacctatatttaagggtgagaattataccacggatatgaaatgtctcttagaatggacaagggagagggacacattactagaaaacaaagaaaacacactgagttgaatatttgtggcttaagttgctagttatacttggagaattctgagttggtttgcattagaattcttattgccctttttaaggaggaaacccccccaaaaaaaactcattaaaaagtagaaagggttttttggatatcaagtatctctttccacatcacatttggctgaytccagtgtgaagggacaagaaatgcttaaatgttcttttctttaaagcccacttgggattaagtaagaaatggaaaacatcctacaaaacccatgtgaattgttttggaactcaaacatttggagaggcacttataagaattcttttatgtttgagaatgcc

SEQ ID NO: 98984 - DNA, 574 bp, Homo sapiens
accttctccaagtcacaatcactcttccttcctcaacacccaccagtttatttctcttgacagatgtttccttctctccttctctcatttattttttctttcaactcaattaactccagttcataattatttatttagtccttgttatgtgtaagacactataaggatttgaaatattaataaagcattgtaagtccactggaattagagatcctttaaaaggggaattcagtgaacataatatggatgggaatgaaaatgaggcttgtaagagactctgagaaagaaaytgagaaggaggaacctagataatgcgctccttagggacagggcctgtgccttcatattcacttgccaagcctggggccagactacaaattaaagtccatatgtagtatctctaaatacataaaagttaatcaagtagactctcagatggtgatttaaccatggtctaccctcttaatcttgacaaatatatttttgaatgacagaattaaaaatatataaaagttatgttttgatatgactaaaagtcagccaaattttaaaaataactaaatttacttattct

SEQ ID NO: 98985 - DNA, 574 bp, Homo sapiens
ccacaattatctgaaacaaagattaaacagataaagaaatccacagacttaccatgatattattttgtttcatattcctaggccaggaatttacaaattacgtgcctaaactaattggtataaagtttgagaaaacaaaacagttaagtaaaagaatggcaaagtatagagtctgagatttgctattttgtatcctacacagtctatcaaagtgattttacttcattttcccagatctggcacccagcttgtcttaagtatcttatgtgtgctaaccataccacacaccaaagaaactgtaatactgtattcagtattacaggctcctccccactgactcagatagctaattaccaccacctatctcactaccyagttactaagttgaaggcaaaataaatttaagagcaaagcatccaaaaagttgaccaccaataatttcactatctgaaaatatgccacataaaaatattttaaatgtcaaaagctctgtgatctaatttcagtagataataacttgagcagttttgaacgaacttatatttctagatttcccacacacctcacaaaggag

SEQ ID NO: 98986 - DNA, 560 bp, Homo sapiens
tttccctgagcccagtgccatgtgcccagaacaacaacggggaaaagccatggttcctttcccttcatctgagcattgactgtaatgtccttggctccaggatgccgtggtgagtgtggtctttagctgtgcgatggctgcagctgctcatctgctctaggaacccgagtgagacccttccatcccccacccgtggtccctccctctccaatgtttcagcatgaaagagggacactcactggtctcatggcctcacaggtggtcatgctgccccatctgaggtcctgtcggccctgcacagtgcctcctagccaggctcacaccatccctgtgttaagggagcctagctcacggtctcctcccagccctggttcagctgcctctagaatgacagtcttgctccctaaagactcctcccttgattttggtggrgaacctatcctgtcacctgcaacatcagggtgacccatccgatcaccttcttttctagggcaacctgtcctacctaccagctgccccatcagggggtaatccactgatcacctccctctgttggcaca

SEQ ID NO: 98987 - DNA, 244 bp, Homo sapiens
ctaccactgccaatatgccttcaaacacacacttcacaccagcaatttatcttttattcaaactcatattccaaaatatgataaaagtaatgcatggacatggtaaaaatatttcactcagtacagraagatgttaaatgaagagaaaaagttattcctccattccccctgctccccaccccacagtgcagagacaacctctgtaagcatttccgtttgagttcttcctggggctgtcattaca

SEQ ID NO: 98988 - DNA, 517 bp, Homo sapiens
ttgctcaaaagctgctcaaaaagcaaaccagtgttaaggtgatgattccttcgtgcgtattgttctattcactatacatttgtaagtgtcattattgttctgaaccatttcagtaagttgatttcactaagaaattgtttgaaattagattccatgtttttatcatttttgcmtccaatctcttggctggtttagaaaatttcatttgcttctcgtgaagtacaagactgaagattcatattgcacataaaaaattaattcttggtccattattattttcaacctgtgttaataatgtattagatgagtttattgcatagatgtgaatgtatagatgggcacattttgggttagactggtcagatgtgattctgagatcactcttattccaaaccaaatttaatgctattggtttaatgttttaagaaatatgactctcagttcataagaggggtttattcaaagtgtatgttgttttagtaaaggctatatttctgatattgattaagccatcttc

SEQ ID NO: 98989 - DNA, 561 bp, Homo sapiens
tagaatctccagacggtttatttaccacatgtaattccccataccatggaaatctgacagaacttcagaccaagrtctcctcagaaatacgaggtttgacataggctatataggttccaatcttgagataatttaccaagtgtactcccagcatttctatgttaatattttagccactttcacaaaaatgataagagaagggtttgagcactcacacatgatcaggagcaagcactagcaatcttcatcttttgtcctagcagttctcagatcccatctagcccctctgaactcttgttatcttaggattttccaaatgtgtactttaatcttaagtatctcaaaagtttaaatggtagatttttttatactattgagtagaaaacagaatttttcaactttcccatcataagacttctttttgtagagacttcatcctattctagttctgaaaggatattaatctgaaatgtttttattcaactagaaaatgtaaaagaaaagatatatagaccaatggaacggaacagaggcctcagaaatatcgccacatctacaacc

SEQ ID NO: 98990 - DNA, 561 bp, Homo sapiens
tagaatctccagacggtttatttaccacatgtaattccccataccatggaaatctgacagaacttcagaccaagatctcctcagaaatacgaggtttgacataggctatataggttccaatcttgagataatttaccaagtgtactcccagcatttctatgttaatattttagccactttcacaaaaatgayaagagaagggtttgagcactcacacatgatcaggagcaagcactagcaatcttcatcttttgtcctagcagttctcagatcccatctagcccctctgaactcttgttatcttaggattttccaaatgtgtactttaatcttaagtatctcaaaagtttaaatggtagatttttttatactattgagtagaaaacagaatttttcaactttcccatcataagacttctttttgtagagacttcatcctattctagttctgaaaggatattaatctgaaatgtttttattcaactagaaaatgtaaaagaaaagatatatagaccaatggaacggaacagaggcctcagaaatatcgccacatctacaacc

SEQ ID NO: 98991 - DNA, 561 bp, Homo sapiens
tagaatctccagacggtttatttaccacatgtaattccccataccatggaaatctgacagaacttcagaccaagatctcctcagaaatacgaggtttgacataggctatataggttccaatcttgagataatttaccaagtgtactcccagcatttctatgttaatattttagccactttcacaaaaatgataagagaagggtttgagcactcacacatgatcaggagcaagcactagcaatcttcatcttttgtcctagcagttctcagatcccatctagcccctctgaactcttgttatcttaggattttccaaatgtgtactttaatcttaagtatctcaaaagtttaaatggtagatttttttatactattgagtagaaaacagaatttttcaactttcccatcataagacttctttttgtagagacttcatcctatyctagttctgaaaggatattaatctgaaatgtttttattcaactagaaaatgtaaaagaaaagatatatagaccaatggaacggaacagaggcctcagaaatatcgccacatctacaacc

SEQ ID NO: 98992 - DNA, 479 bp, Homo sapiens
ctcacacgcacatttcacaatagggtttgcgctcctatcaaaatctagtgtcccctctgatctgacaggaggcagagaaacataaatataaaaaaagcaccaaagaaaaatgagctatcttttaacattaatgagattaaaatctaatatgcagcagagaaaaaacaattgcaaagaagatgcttaaaatttttaaaaacacaaatttaaaattaaaaaggagtacaataagtcagaaataaatcaacccargatctgctgctgccaatatcctttaaattcttggttaatgtagaaaaaccaatatgcagatgttttaggagacaatgttaaattagattaggcaatcgatacaagtttagaaggatgagcctacaaaatgcctctgtagaaataacatttagaaacaaggcacatgaacaccacacacacacacacacacacacacacacacacacacacaatgaggcaagtatgtg

SEQ ID NO: 98993 - DNA, 557 bp, Homo sapiens
tactggaggccgagatgagcagattgcttgagtccaggaattcaagaccagcctgggcaacatgacgaaaccccatctctacagaaaatataaaaaagtacctgggcatggtggtgtgcttgtgtagttccagctacttgggagtctgaagttgggaggatcaactgagcccaggaggtggaggctgcagtgagccatgatggcaccattgcactccagcctgggtaaccagagtgggaccctctcttaaaaaaaaaaaaaaaaaaagcagaattaaaattkgacatttttttatattcatgtttgggcccattaaaaaaaaaagagaacaatgaaaaattataggtgagagatttcagataagtggtaaaattacataatatgaatgccttgtttttttctgacattcttaaagttaagcaacttgaaaaataatttgttagtagtagtattatgttataaaattccacattgaaagtagatccttcaattaattttttaacttgtaaattgagaaatggtaacaaaccagaaaatttaagaattgttttttaaat

SEQ ID NO: 98994 - DNA, 558 bp, Homo sapiens
aaaagtcacttgttaagaacctctactgtgaagaaaaacaaccttgtatttaagtggctagtaggtgcttagaatagtatgtaattactgtctagaacagtgatttgtatagaaatcacctagttatctttgtaaaatgccaattccagtttaatagaaacctgagattatttttaagaagttcacaggtgtggaccacattttgagtagcaagtgtagagtgaggaccagtggttacttttgaaaaggacactttacagtcatatattaagtatggaaaatggtttctcccatccacaaaaataaaagacaccttttctacagtaatacrtggttaaattggtcaccaaagcacacaccgtcctgctgttggtcactgaaaattcttccctctcatagtgatagtttttagggacaagagcctgcaaaatggaacaaagagtaaaaaaggaaggtaatgaatatcataagcagaaaaaaacatgacagatcctactccagtggccagaggcaatctagcctagtggttttgagtcagactcccttagacttcagatc

SEQ ID NO: 98995 - DNA, 537 bp, Homo sapiens
ttgggacttatcttctcagccaagatcaaaatttcaggtagtctcattactttcctgatcattcttagagaactaaaaacatcctgtgatcacattaagttgccaaaatctcaaatcagacaatagaaggtctggtctcatgtaatamacatcgtcaaacaaagataagactcctttcccaccttgtttgttacagaacccagaaatgttgcctgtgtgtgtggaggggggtggggtgtgtatggttgatgtttctctcatttcttgcttgctctccctccactggctactttggactcctaagcatgggagagaagaaagctaagaggagcagcagtgttgtaggatggctttgcactcactagacctggcaggcgtttacagctgcctttattttctgtgagcacagtcatgggctcttaacagaattcttgccaaggaccatggctttttaccaggttggtaagacccatgaatctctggcttctttacaatgtccacagcccctggaaatttgctggtacatttccagcttct

SEQ ID NO: 98996 - DNA, 595 bp, Homo sapiens
tggggacgtggagctgcagaccaaagaggtgatttctgtagtggctttcagtgcggaagggcctacaaagtggtttaaagcaagccacaaaataggaaacccaatatttagctaatggaactctgataaaacctgctcaagatgtctgtctctactaattcagatggagccaagccaaagcatcattattattttaaaaaggcaccaatccctctgcaaaagcactgaattatatcatgatacaatcatcaattgtaccatgaatcaccatcagcggtggtcttttagggatatgaagaaggggttttcacaatacatcgcatgacacaccatcttccaaatctctaaacatttctctccacagcccagtcctctccatagttgtccaaatccctccctcttttctcttgttgtctccaaaactcaaaaccatgctctgactttctatatccygccctcctcttcttggaccatctgggaagccccctgcttccccagggtgtcccctcctccccttctgggatcagtcatctttcctcaaatggaccagttcggcctctcttagtttctccaactctgcatctcaacctttctc

SEQ ID NO: 98997 - DNA, 441 bp, Homo sapiens
ggcgagtcctgttcacacactcaggctgaccacggctggatcccgctgcaggtgtccgatgggcagcaccaggccatcacggtgctggaggtgcaggccttggagccttacctctgtgtggccaatggctccggcctcatggttcctcaaggaggccagggtaccatcaacatggccgagctccacctgggcaccaacctcaacatctgcagtagggatgaggcccactaccacgtcacagacagccctcactggggacagttgctccaagccactcagccagccacagccttctctcagcaggacctgctggttggggctgttytctatggccacaatggcagcctcagctcccgcaacaccctggccttctcaatggatgtgggaccagtgcacacagatgccaccctacaagtgaccattgcctagagggcccagtag

SEQ ID NO: 98998 - DNA, 605 bp, Homo sapiens
actcctctgggaaccagaacttatggtccccattttccaccaatggaagctgaggccctaaaagggtcagtctcttcctgcacccaaaggcagaacatgaagggtrctgctggggcctgactgccagccctgggcctgcccctaggtggaagagcatctgatccagtacctgcacgatgggagcaagacactgacggttttgtcctgatggctaatgcctctgagatggaccgccagagccatcctgtggccttcactgtcaccatcctgcctgtcaatggccaacccccgacctcatacaaactcaggcctgcaggtgagcatattcctgggaccaccccccatgtctgctttgagaaagaggccaatgtcccctacttcccggcacagatctcccccactctgagcctcagtttcctcctctgcaaaatgaggacactactgtgtgcctcacgcagttgttggaaggagagatgtgagattgtgctgaaatagaacacaggtgggaggttttgttattggacatttgcaagtacggtaggcagacttctgagcagccatgggtggctctgctgttccttctcctgtggcttaggaccagaaca

SEQ ID NO: 98999 - DNA, 605 bp, Homo sapiens
actcctctgggaaccagaacttatggtccccattttccaccaatggaagctgaggccctaaaagggtcagtctcttcctgcacccaaaggcagaacatgaagggtactgctggggyctgactgccagccctgggcctgcccctaggtggaagagcatctgatccagtacctgcacgatgggagcaagacactgacggttttgtcctgatggctaatgcctctgagatggaccgccagagccatcctgtggccttcactgtcaccatcctgcctgtcaatggccaacccccgacctcatacaaactcaggcctgcaggtgagcatattcctgggaccaccccccatgtctgctttgagaaagaggccaatgtcccctacttcccggcacagatctcccccactctgagcctcagtttcctcctctgcaaaatgaggacactactgtgtgcctcacgcagttgttggaaggagagatgtgagattgtgctgaaatagaacacaggtgggaggttttgttattggacatttgcaagtacggtaggcagacttctgagcagccatgggtggctctgctgttccttctcctgtggcttaggaccagaaca

SEQ ID NO: 99000 - DNA, 605 bp, Homo sapiens
actcctctgggaaccagaacttatggtccccattttccaccaatggaagctgaggccctaaaagggtcagtctcttcctgcacccaaaggcagaacatgaagggtactgctggggcctgactgccagccctgggcctgcccctaggtggaagagcatctgatccagtacctgcacgatgggagcaagacactgacggttttgtcctgatggctaatgcctctgagatggaccgccagagccatcctgtggccttcactgtcaccatcctgcctgtcaatggccaacccccgacctcatacaaactcaggcctgcaggtgagcatattcctgggaccacccccmatgtctgctttgagaaagaggccaatgtcccctacttcccggcacagatctcccccactctgagcctcagtttcctcctctgcaaaatgaggacactactgtgtgcctcacgcagttgttggaaggagagatgtgagattgtgctgaaatagaacacaggtgggaggttttgttattggacatttgcaagtacggtaggcagacttctgagcagccatgggtggctctgctgttccttctcctgtggcttaggaccagaaca

SEQ ID NO: 99001 - DNA, 605 bp, Homo sapiens
actcctctgggaaccagaacttatggtccccattttccaccaatggaagctgaggccctaaaagggtcagtctcttcctgcacccaaaggcagaacatgaagggtactgctggggcctgactgccagccctgggcctgcccctaggtggaagagcatctgatccagtacctgcacgatgggagcaagacactgacggttttgtcctgatggctaatgcctctgagatggaccgccagagccatcctgtggccttcactgtcaccatcctgcctgtcaatggccaacccccgacctcatacaaactcaggcctgcaggtgagcatattcctgggaccaccccccatgtctgctttgagaaagaggccaatgtcccctacttcccggcacagatctcccccmctctgagcctcagtttcctcctctgcaaaatgaggacactactgtgtgcctcacgcagttgttggaaggagagatgtgagattgtgctgaaatagaacacaggtgggaggttttgttattggacatttgcaagtacggtaggcagacttctgagcagccatgggtggctctgctgttccttctcctgtggcttaggaccagaaca

SEQ ID NO: 99002 - DNA, 484 bp, Homo sapiens
tcttccctgaaaggacttcagtgtgagatagagcaatgtaaaagggatattcagaacttccccttcccctctacctcgggagaattagctccacctctcttcccctgaagagaggtgtccctacgaggaggaggtattcactttgtaaatgctcctttaaccagctcggaggtccaaaacctaaaaacagagttcaagccacactattagacaactccagtggaatagcagatcgaattaaccaatttctaggaccacagttatatatacttgggctgagttaatgtccatcctaggcatccttttctcaggggaagaaagaagcatcatctgtagagctgctatggtascctgggaacatgaacaccctcctggccaaaacattcatgcagcggatcaaaaattccccaaccaagacccctgctgggacaataataacgcagcccactgaagaggatacgcaagaacttagggaaatgataat

SEQ ID NO: 99003 - DNA, 473 bp, Homo sapiens
tgaccacattctcatcaaaggtcagaaagaaaggaagctcaagcccacctgggagggacattatctagtgtttctaatgactgagacagccgtccacaccactgaaaaagaatggactcaccatacctgagtcaaaagagcaccacccactccagaatcatggacagctatttcagggccaattccaaccaagttaaagctaaaacgggtttgatcctcttatgctatatttcttttccccttctattgctagtcctctcgttattaatgtaactaggtcgagctcaccccaaactattacctttgatgcttgccttgttatatcctgtggagmtctccaaagtcaaaagcaactctcagcctcagagaagtatctccgtccctttcagacaaaagcctcccccattacgactcttgttccttaagaaatgtagggaaacaggcctgccacagctggaatgatattatgtgga

SEQ ID NO: 99004 - DNA, 510 bp, Homo sapiens
ttttagccagctaagatatatccaagaagctgtatcagttaaaaaccctcttgcctttgggcttggagtaccactattgacacatktaccactcaggtacacatgatatgactactagcgaaagacatataatacatctgtttaaatatataggtatgtcccttacatagtatcatttataataggaataattttaataggctgttcctaagatatgaaaacattaatgtgttactgtctgtattaggatttgtcagagaaacaaaactaataggttatatctgtctgtctgtctatgtaatctatctaaaaggagatttattataaggtattagctgacaattacaaaggctgacaagtccccagtctgctgtctgcaagctggagaccaacgaaagccagtggtgaatttctgtccaagtgtgaaggcctgagaaacaggataaattgacatctaagtgtaggagaagactgttgtcccaattcaagtaggcaggcagaaagaaaaaa

SEQ ID NO: 99005 - DNA, 582 bp, Homo sapiens
ttagctaagcagacaactggttctgcaaataatgttcatggcagacaatctacttataatgcaaaacaccaatataataaaaaaagtactgtggccagaataaaatgaagcaaacattaataataatcaggataaactctgaaggtgactcacgtttaatctccagaggckatcttcagtgagctggctaagcctgtccaccatttaagtcatgattttgaatgcttgtcttttgccaaacacatttgtaaataaatatatgtagcagtcgtggatcctgactcaagaagcttacaggataatatgactaacatgacatatacatagatgatttaaatagacagtagattgtgatggttaatattgagttcaacttaattggattgaaggatgcaggaattgtttctgggtctgtctgtgagggtgttgtcgaaggagattaacatctgagtgaatgaactgggaaaggcagacccaccatcaatctgagtgggcacaatctaatcagctgccagtgcggccagaataaaagcagccagaagaatgtgaaaagactagaccagcttggcctctgagcctaca

SEQ ID NO: 99006 - DNA, 685 bp, Homo sapiens
tactaactcaacccacttcttgcttttatatccatttgtagtgctagtgccctcgcctggaggacaagaactgaaatctttattttggtttagttcaggagtctttgtcataactactgaactctgttgcagaaagtagccattgacaatatgtaagtgaatgatgctactatacctaaggggtctgaacaccagcatttagcatatgccaataatagctgtttagaaggccaaggsaaagtaaagaaattaaaaaataaataaagccaacctttgtaaactaggaagttcaaattttcagagactctagtgagtagtgaatatgcccatgtgagtatgaaagtattcatgtctatgactcagagggtcttatcaaacaaggtctattggtttccacttcttacaataaccttaaaataacccctacaggatctgatccctaaccctccagctcatttccctgtttctgttacttctctaacaaatattctattactttcttcttcctccctcatcacagtggcattctgactgaaacggtgtatggctcccaaactttagctcaatcagaactacctggaagactttttaaaacacagattgctgggcctcaccagggtttctaattcagtagtctaggatggggtctgataatttgcatttctaactttggggtgtgtgtaga

SEQ ID NO: 99007 - DNA, 576 bp, Homo sapiens
aaaagttgccactttgtgtaatgagaattaacataaacaataccagcccagattctgtgtaattgacacatgtggaatggctatattagattgctgctaatattaactgggatatagaaaaatccagtagtatcttttaaggcctccagcaaaatcatagaagtgattgtcacatttttcagaacaatcattcatggcaattacaatcttcattaacakaaacatttacttttgtttttgttctgcatttttagagaagaatgtgaatgaaagctggtagagagaaagtgcttgagttcccactctgaagctgtgaaatctgagctctacatatttcttaggactcgcagaacttcagggcctctgaatgctctcattttctcccaagcagcaaataattccatggctaaattgaaatttattacataatgtaaatgtggatgcgaaagagaactaaagcagaaaaaagttctgatttattttgtctcccttttagttcacattggcctataaacttggagaaacacaacttcaaattcaaaacccaggccctacaaatccctgatcttatttctg

SEQ ID NO: 99008 - DNA, 577 bp, Homo sapiens
taaaaatgacttcactttatatttcatagaaacatggtttgtttcttcctctgagggtgtaagccagtgtttctctcttttttttctatcattactctcccacgaagcttttttagcctttttatcctaatcacctcctcgtgtaattttaataccacaaacattctgtatatatgtatatatttcatatatatatgagattttttaatgtgtaaagcttagatatacrtatttcatatatatacctatgtatgtacatatgcatatacatatgaaatatgtatatctatgctttacacattaaaagaatgagattcaatgccccaaccaatctgtcaacctcttatgggttatatcacccctgttgagaatgtatgttgtaaatattctttgattttttgtacattaccaaattctccttttgaaagatgttaccaattttaattttcatcatcaacataaggagacatgtttccccacctccccagaaaacatggtgtttgaaaataagtatgtaaattttcttaaaatgagagtttctcaatgcaaatcttaaaattacattagtttgcttgta

SEQ ID NO: 99009 - DNA, 575 bp, Homo sapiens
aatgattgtttttaaatgaattagaagtcacatggaaatgcagacattcccaagggcctctgattcagccacacttgagcgaagtctgagtccacacctctgcatctaagaataatgaacagttattgttatttccattataatacaactgcctttatgtttttctgttaacggcacctttctttggaaaactactcctcaaatccttccatgtggttccataatggatcctaagccctttccawccccttcaaaccagcaggaggtggaccatttgcagcacttcgccagcccattgttgagtccgagggtgggtatgcatcagaatccttccccagaatgtttcagtcttgggtgttggttgtgttgatgctatgtcctttcaactttagtggtaaagatgggaatctgacctgttcatagccatattctctgccacatggagactgttactgtataggagaaaaggatgaaagattttaacataagataattcttggttttattttctgccctctttcctgacttggggtgttgtttcgttcttcctttaattttgtgaccaccccttgttt

SEQ ID NO: 99010 - DNA, 575 bp, Homo sapiens
aatgattgtttttaaatgaattagaagtcacatggaaatgcagacattcccaagggcctctgattcagccacacttgagcgaagtctgagtccacacctctgcatctaagaataatgaacagttattgttatttccattataatacaactgcctttatgtttttctgttaacggcacctttctttggaaaactactcctcaaatccttccatgtggttccataatggatcctaagccctttccatccccttcaaaccagcaggaggtggaccatttgcagcacttcrccagcccattgttgagtccgagggtgggtatgcatcagaatccttccccagaatgtttcagtcttgggtgttggttgtgttgatgctatgtcctttcaactttagtggtaaagatgggaatctgacctgttcatagccatattctctgccacatggagactgttactgtataggagaaaaggatgaaagattttaacataagataattcttggttttattttctgccctctttcctgacttggggtgttgtttcgttcttcctttaattttgtgaccaccccttgttt

SEQ ID NO: 99011 - DNA, 575 bp, Homo sapiens
aatgattgtttttaaatgaattagaagtcacatggaaatgcagacattcccaagggcctctgattcagccacacttgagcgaagtctgagtccacacctctgcatctaagaataatgaacagttattgttatttccattataatacaactgcctttatgtttttctgttaacggcacctttctttggaaaactactcctcaaatccttccatgtggttccataatggatcctaagccctttccatccccttcaaaccagcaggaggtggaccatttgcagcacttcgccagcccattgttgagtccgagggtgggtatgcatcagaatccttccccagaatgtttcagtcttgggtgttggttgtgttgatgctatgtcctttcaactttagtggtaaagatgggaatctgacctgttcatagccatattctctgccacatggagactgttactgtrtaggagaaaaggatgaaagattttaacataagataattcttggttttattttctgccctctttcctgacttggggtgttgtttcgttcttcctttaattttgtgaccaccccttgttt

SEQ ID NO: 99012 - DNA, 367 bp, Homo sapiens
ttagcataaattctgagccagattaataaaaataatttcataggctcatagaaataaaaaacaaattatraatatttatatacatattttaatataaatattataattttacataaatatttatatataattttacttatattatttttatataaatatatattatataagtatataatatatatttatttaatataaatatattatttatatataaatatttatattatatataattatatatattatattaatataagtagatatatacaaaaaataattctaattaaaaatgtggccaaaattaaaccattttcagaaaaagaaaaacggggtcattttgctgctagcagatctgacagaattc

SEQ ID NO: 99013 - DNA, 565 bp, Homo sapiens
aaataaatgaaagcacattttatattcatagattagaggaaaatattgttaagatggcaatactcaccaaattaatctacaaatttaacgctattcatatcaaaatcccagctacctattttgcagaaagtgataaattgactrtaaattttatatgaaaatgcaagagactatatgccacacaatcttaactagaaaaaaaataaagttggagaactcaaacttccaaattttaaaacttactacaaagcaaaagtaagcaagatagtttggtactggcataaggatagctatatacatcaatggaataaaattgaaattccaacagtaagtcttcatatttatgttaaattaattttcaacaagaccactagacaattttattaaggaaagaagccttttcaacagatggtgcttggacaagtgaatatccacatatgaaagaatggaattgcacccttacttaataacatatataaaaattaagataggtcataggcctaaaggtagagctaaaactatgaactgttagaaggaaatttagaagtaaatcttcatgacctat

SEQ ID NO: 99014 - DNA, 620 bp, Homo sapiens
atttgctcttgggtagcagtttttgaggtaggtgttatgcttaccattgacaagttctttacaggagaaataaatagagttactgtgagaaatactattatgttattcacagtgactaatacttgaaataagaagcaggtaattttgaaaaaagataaacagtactcgaaagcgtaagtggacattaaatgttttataattactctccacactacctttttaaagaaagcttttgtgaaagaaagaaaaagggaaagaatatgttttcatcacttgttaaagaggtttccatggaaaagctgaatctcagtttagggcttactgatggtgaaattactagagtgtgcttcagaaacatatcctaatttctgaagattagtgtccctgtggaattagagccaatttcttatgactacgtatttttttaggatatctccacatgcagagggaagccttctaagaggcatactttatatagtctgggtttttttcagttgttttttgytttttttatcagccactttggctaatagacacttactaggggaagactaaaagcaaaacagtacagaataagcttcaaatatagtgagcattaaattgatgtgttcattacatat

SEQ ID NO: 99015 - DNA, 562 bp, Homo sapiens
tttgaacaagtagaagaaaggacttcagaattcaaagacaaggcttttggattaacccattcagacaaatacaaagaaaaaagaattaaaaaaatgaactaagcctctaaataatttgggattatgttaagtgaccaaacataagaataattagtactcctgaggaagaagaaaactcagwcaagagaaagaaataaagagcatccaaatcagtaaagaggaagtcaaatggttgctgttcactgatgatatgattgtatacctagaaaaccctaaagactcacccaaaaagctcctagatctgataaatgaattcagtaaagttttaggatacaaaatcaatgcacacaaatcagtagcactgctacacatcaacagcgaccaagctgagaatcaaatcaagaacccaaccccttttacaatagctgcaaaaaaagaaataaagtacttaggaatatacctaaacaaggaggtgaaagacctctacaaggaaaactacaaaacactagtgaaagaaatcacagatgacacaaacaaatggaaatgcatctcatgctcatag

SEQ ID NO: 99016 - DNA, 525 bp, Homo sapiens
attttctaaaaaaaaaaaaaaaatctacggaagagattattctacgttatactatacaaagaaccttaaatggactaaaataataaatatcattttagacaaaacctaattattatacttggtcaaaagaggaagaccatttcaaagacagacagcttggattattgtttttctgcaatttaaatttttaagagcttcaaaaagtggctcagacattttttatcacaatcaaaactcaatttggtcaataatattaatattttttgagtgaagataactcaggaccagaatagtgattatgtctttgataaataagtttattccgaaacccagactgtaatttcattttgtgctaaagctgttaggaagaaggagtgttcatgctaaagaaagacagagatttttaattgcaaacgctatctttttggcatattamaaatgcaccttttattgtattaagttttagtcacataagatctgcaggctaaacattccctgaaaagtagttctctgtatttcagaagc

SEQ ID NO: 99017 - DNA, 455 bp, Homo sapiens
aagccggccctgtaatacgactgtgagtactggagactggtgaactggggacctcagtccagacagcagccaccagtcaaaggcttgttgccacatcagtatgtgagctgcctagtgccagatcttccaacttttttgagagcagtcagaaatatagacttgatttttaaaacactgtgcaaatcaaacagagctcattgtctgaggactgcttgttttgtgtacttgagttccagatacagttagcacctctctcactatctgtttcctaataatgtgatagttaagagctagataaactgggatcaaatcatagccscatcacatacattctaactgtgtgacttcagaaagttacctgctatctcatttatgaagtagagatgataatagctcttatcttattgggttttagggaagacttatatgagctgaaatacagatgtgcttagaat

SEQ ID NO: 99018 - DNA, 455 bp, Homo sapiens
aagccggccctgtaatacgactgtgagtactggagactggtgaactggggacctcagtccagacagcagccaccagtcaaaggcttgttgccacatcagtatgtgagctgcctagtgccagatcttccaacttttttgagagcagtcagaaatatagacttgatttttaaaacactgtgcaaatcaaacagagctcattgtctgaggactgcttgttttgtgtacttgagttccagatacagttagcacctctctcactatctgtttcctaataatgtgatagttaagagctagataaactgggatcaaatcatagccgcatcacatacattctarctgtgtgacttcagaaagttacctgctatctcatttatgaagtagagatgataatagctcttatcttattgggttttagggaagacttatatgagctgaaatacagatgtgcttagaat

SEQ ID NO: 99019 - DNA, 596 bp, Homo sapiens
tatagaattcaaaataatggctctagggattcctaacagaaggacaatattaggtcacagccatcatatttctggtaaaatcaagtatgttcttttggaagaggcttaaattttttaatttgtaaggtcacaatagtctgtctcctttttcattttcacctgaygccttgctaatgcctatcgttttcgctatggggcttttcttaggtaaactgatgtgacttgtggtgggtggtatacttactaagttagtgaagaatacttaaaactagaattttcacacttaggatcagacaggctgcgggccactattccttattcttatctctctacaataggaagaacaaagaaggccattcaaactccaggctccacacaaactcaactcttccacttaccacatttgtgaccttgagagagtccttcaatccctttttacctccgtttcttcacctttaaaaagggatagtaacagtacccaatggtggagttgttatgaatattaaatgaattaatctatgcaaacacttagaccagcctctgacatacatgaagccgcatataacagttgttgctcttgcgacagttattggcgc

SEQ ID NO: 99020 - DNA, 610 bp, Homo sapiens
tcatcctattacatccaaattgccacttaaatgctggttttaaagtaagaagagcaaggatcttcctggcaactataatagtcaaagaaaaccagcagtgactgaagaaaaaaatgaactgctgagatgaaactatcactgtaactcccagcaaatgtcaatgctatccttatcttatacctgtgattctggaagctttcagagtttctctttgagacttgctccagtaaccagatctaaacttttccttccctctccagttagccagtcatgctctagatataaaaatgtggaatattgtttgcatgaggaaggtagacaagctggaggaagatggggctgagaaatctccagaaacactatcatttcaataggtaactctttttaataacacatgctgtctataagcttaatttctccagaaacaygatcatttcaataggcaactctttttaataacacatgctatctgtatgcatgtcacaaaatgtctccagcttttttcaatttttgccaaaatattatgtttttagaactcatttagaataagggaataaacaaaaagagaatgtgtcacatctaacaggtcacaaaacagatgcaaaactaa

SEQ ID NO: 99021 - DNA, 581 bp, Homo sapiens
cttcaaccttttcccatttctggtttctctgactttcccccagcctatcaaaaagagactgggcatcagtaaagctgaaaagataagtgtttcatcaaggaaatcagaaatcgtacgcttccgttagatctataaactttgatttgattagcagtatgggctatataatatattgcaaaaattgtcccaatccttcacccctccckgtagccatgccctttgccttgagtcctcacagtgccccactctaactctcaactcacccatgtgaaattgttttggccaacggaatgttggtaaatgtgacagaaacagaggctcaaaagaacacttgtatgtttctgcttgtgcccttgtcctccaccaatgtcattaaaaggacatgcccaggttagcctaatggtaccaggaggaagatgacagcaaatgttgagtagccccctgagctaaagccatcctacttcagctgacagacagccaacacctccacagaggaatgcaagttcaatggagaacagaaaatcacccagcccacccagactatatcagaagagccacctgatgagcattccaatgcatgt

SEQ ID NO: 99022 - DNA, 581 bp, Homo sapiens
cttcaaccttttcccatttctggtttctctgactttcccccagcctatcaaaaagagactgggcatcagtaaagctgaaaagataagtgtttcatcaaggaaatcagaaatcgtacgcttccgttagatctataaactttgatttgattagcagtatgggctatataatatattgcaaaaattgtcccaatccttcacccctccctgtagccatgccctttgccttgagtcctcacagtgccccactctaactctcaactcacccatgtgaaattgttttggccaacggaatrttggtaaatgtgacagaaacagaggctcaaaagaacacttgtatgtttctgcttgtgcccttgtcctccaccaatgtcattaaaaggacatgcccaggttagcctaatggtaccaggaggaagatgacagcaaatgttgagtagccccctgagctaaagccatcctacttcagctgacagacagccaacacctccacagaggaatgcaagttcaatggagaacagaaaatcacccagcccacccagactatatcagaagagccacctgatgagcattccaatgcatgt

SEQ ID NO: 99023 - DNA, 581 bp, Homo sapiens
cttcaaccttttcccatttctggtttctctgactttcccccagcctatcaaaaagagactgggcatcagtaaagctgaaaagataagtgtttcatcaaggaaatcagaaatcgtacgcttccgttagatctataaactttgatttgattagcagtatgggctatataatatattgcaaaaattgtcccaatccttcacccctccctgtagccatgccctttgccttgagtcctcacagtgccccactctaactctcaactcacccatgtgaaattgttttggccaacggaatgttggtaaatgtgacagaaacagaggctcaaaagaacacttgtatgtttctgctkgtgcccttgtcctccaccaatgtcattaaaaggacatgcccaggttagcctaatggtaccaggaggaagatgacagcaaatgttgagtagccccctgagctaaagccatcctacttcagctgacagacagccaacacctccacagaggaatgcaagttcaatggagaacagaaaatcacccagcccacccagactatatcagaagagccacctgatgagcattccaatgcatgt

SEQ ID NO: 99024 - DNA, 408 bp, Homo sapiens
taagttaaccagattttttgtttttcctgtctgcaacaaaaacctgagcaagccctaacccctaatctcagtatcctcattcctcgagccacaagtggaacttgatctctcagggccctccaattttataaattgcaatttacaaaatttcaaataagccaactgaaaactcaagaatcgaattatayaacaagtcaaaagaagccctttgatataactaaaccatctttcataataggactgggaaaagcaagtgaatcctttcactttcacagaaccatttttttcagtcctcttttcctcatttgtgtgtgagcacatgcacacaactttttacaaaatgctggaatggctcaacctgccccaggggtgatttcgagtgtgagctacataataaacacatggaac

SEQ ID NO: 99025 - DNA, 616 bp, Homo sapiens
ttaaattctggatggctattgcatatgatgaaggcaaagtttgttctcccacagaagttcatagaggtaataaakaagttccatgcactcttccctccaacattttatatattttttttaatttttattttttgtagagacaggctggtcttgaactcctggcctcaagtgatcctcccgccttggcctcccaaagtgttgggattacaggcatgagccacttcatctggcccttcatactttttgatgtagtaattatagttactgttctgtgcatgacataagtatgatctgtaccatattttattgttaaccactgaaaaacaaattcacataaatggaggaataactgtcatatttttaaatgcagacagagagaatctcaaatttctcagtgaaatccatatgaaatgaaaattgggatagtaaatgacataccagtttttcctccagttgtatttccttcttatattctgttagagtaatcatatagtcaactcactggttttctgactgagacatgtcctagcattttctaacttgcctagaagagacccacagctggccattactgctgataagggagttatcaagtagagagtatggtgaccaggcc

SEQ ID NO: 99026 - DNA, 616 bp, Homo sapiens
ttatctttttttattatacgcgttaaataggatttaaagacattcaaggaaggtctgaatcttcactacgtgtaaaaaatgcccactgaacttactgaaaactcctcatcctcctgaaagacgttctggttcagtggatctgaggtagagccccagaatctgcttttataacagtgccctttatatctttatgatctaggtggtttgagaatcacagctcaagaaattctgccttggcatttcttgttttcttccaagtctctgaaacaaatacacacatgatgcagtatttttgctccatagcttaggcctgggttcttgtctcaccaccaggaaggattgggcacgcacacactcgaagagtgagttaggcgagaagtttgattgagtgmtgcaatagctcttggtggggaggggatgcaggggtggtccccctacctgaaggcaggagagttcccaatatcactgagccatatctagtctaagaatgctcttatctttttttaatgtaagcattagataggatttagagacattggaggaaggcctgaatctttactaagtgtaaaaaatgcccacagaacttaatgaaaactccttgtcctcctcaaagagg

SEQ ID NO: 99027 - DNA, 358 bp, Homo sapiens
ctttataaattacactgtctcaggtattctgttatagcagcacaaaacagactaagacaagtggctaacagactaagacaaggatccagtgtggctggatgttaagaaatggcgaataaccactctaagaatataaatatattctggatctttcccccaagcaaggaaaatgaagaaaactggggaaggcttcattaaaaaaaatagaaccccaagaaaccagaaaaaagcagaggaaaaaagatagcaaatagaaaataaagtggtaggaatgattatataagttatyataataaatttaaatgtattatacccatcaattaaaagatggattatcagtttggaataataggaatgc

SEQ ID NO: 99028 - DNA, 570 bp, Homo sapiens
tatagcaggacctctggttttaaatatcctacaattcaaatcctggcttagcctcttctagctgtgtaactttgagcaacttacttaatttttgtgtctaggttaggagaagcaagcggggaagctaggaagtccatttccccatctggaaaatggtaataacaataatttttactttactgaattgctgtaagtattaaacgacctgattcacatcagtcatttagcaaagtatccattacattcttaaatatcaatgttaccatcttctaacaacttcaccgtctcccactacaaggaatttcctatacctaccatatctccacatcctccacctaatccattccccattatccttcaaacgttgtctccaatgccttcagggaattayccaaccatcagcctaccttggggtcctctacagaatttcagggtcccatgtagcctttattcctagcgtttatcacagcaagacttgagtcttaccatgcacaactcttacattaccaaaacaattgcttatccaacaatggacacattgaaaccctggaatttcttctaatggaattt

SEQ ID NO: 99029 - DNA, 479 bp, Homo sapiens
aaatgatatggtttgaccttttgtcctcacccaaatctcatctcaaattgtaatccccatgtgtcaagggagggacctagtgggaggtgattggataacaatggtggtttaccccatgctgttctcatgatactgagtgagttcttttttttttttctttttttttttttttttttgagatggagtctcactttgtcacccaggctggagtgcaktggggcaatcttggctcactgcaagctccgcctcccagattcatgccattctcctgcctcagcctcctgagtagctgggactacaggtgcccgccaccacgcctggctaattttttgtatttttagtggagacagggtttcaccatgttagccaggatggtctcgatagatagtgagtgagttcttatgagagctgatgattttataagtgttgaccatttctcctttgctggctttcttctctctcgccaccttgtgaagaag

SEQ ID NO: 99030 - DNA, 479 bp, Homo sapiens
aaatgatatggtttgaccttttgtcctcacccaaatctcatctcaaattgtaatccccatgtgtcaagggagggacctagtgggaggtgattggataacaatggtggtttaccccatgctgttctcatgatactgagtgagttcttttttttttttctttttttttttttttttttgagatggagtctcactttgtcacccaggctggagtgcagtggggcaatcttggctcactgcaagctccgcctcccagattcatgccattctcctgcctcagcctcctgagtagctgggactacaggtgcccgccaccacrcctggctaattttttgtatttttagtggagacagggtttcaccatgttagccaggatggtctcgatagatagtgagtgagttcttatgagagctgatgattttataagtgttgaccatttctcctttgctggctttcttctctctcgccaccttgtgaagaag

SEQ ID NO: 99031 - DNA, 613 bp, Homo sapiens
gaattccatccagtgactccactatctccaggaactaggcrttctctactggatctctgcgcccacgatccagggaagaaagcagtcattaggcagggtgccagaggcttcaggatctgaatgaaagtagtgtatacccacttccatctatttggttagaactcagtcaccaggccccacctaactacaagggatgctgggaaatgcattccagctgtgtgttcaggaaaaagaaatggatttgatgaacgtttagctggtctttgccacagactgaccgcattttcttgtattattatggaggacaaatgtttaccatacataaactgcccagaggtgctgataatctgagaacctgtctccaacaagtcccctgggaagggcagcatttaaagacagtcgtgctggtttggaacaatttatctgcctacttgtttaaatatatttaaaaaattagcctgcagtctgaatctacttcccacatgttgtgtgccatttaggcattttggcgttctaaaatgacagatctatctcagagtgagtaagtttaggaatacatacttaagaaatgttgcatgcagtgacattttccttcccaaagtgatctacgtgt

SEQ ID NO: 99032 - DNA, 613 bp, Homo sapiens
gaattccatccagtgactccactatctccaggaactaggcattctctactggatctctgcgcccacgatccagggaagaaagcagtcattaggcagggtgccagaggcttcaggatctgaatgaaagtagtgtatacccacttccatctatttggttagaactcagtcaccaggccccacctaactacaagggatgctgggaaatgcattccagctgtgtgttcaggaaaaagaaatggatttgatgaacgtttagctggtctttgccacagactgacckcattttcttgtattattatggaggacaaatgtttaccatacataaactgcccagaggtgctgataatctgagaacctgtctccaacaagtcccctgggaagggcagcatttaaagacagtcgtgctggtttggaacaatttatctgcctacttgtttaaatatatttaaaaaattagcctgcagtctgaatctacttcccacatgttgtgtgccatttaggcattttggcgttctaaaatgacagatctatctcagagtgagtaagtttaggaatacatacttaagaaatgttgcatgcagtgacattttccttcccaaagtgatctacgtgt

SEQ ID NO: 99033 - DNA, 613 bp, Homo sapiens
gaattccatccagtgactccactatctccaggaactaggcattctctactggatctctgcgcccacgatccagggaagaaagcagtcattaggcagggtgccagaggcttcaggatctgaatgaaagtagtgtatacccacttccatctatttggttagaactcagtcaccaggccccacctaactacaagggatgctgggaaatgcattccagctgtgtgttcaggaaaaagaaatggatttgatgaacgtttagctggtctttgccacagactgaccgcattttcttgtattattatggaggacaaatgtttaccatacataaactgcccagaggtgctgataatctgagaacctgtctccaacaagtcccctgggaagggcagcatttaaagacagtcgtgctggtttggaacaatttatctgcctacttgtttaaatatatttaaaaaattagcctgcartctgaatctacttcccacatgttgtgtgccatttaggcattttggcgttctaaaatgacagatctatctcagagtgagtaagtttaggaatacatacttaagaaatgttgcatgcagtgacattttccttcccaaagtgatctacgtgt

SEQ ID NO: 99034 - DNA, 506 bp, Homo sapiens
ggccacgccctgtcctcactcacactgttcatggctgggcttggccacctgagcactccaattgcttagggacaactgttagcgaacaacgactagccccataataagctaaaatcaactctaagttcccccgtgggcagggattttatctgtctctacatggacggacacacagaatkaactcaatacatgctcactggattgaactaaattggaggttggctctggaaaacaaacatggctttgctgtatgggacaagtgaaaaggcttgtggctgagtctacactcttggactgagatggtcaaagggctactggtgtctgctcagaaggtctggagcacagacccgagggtggacgtgccagagtcagggaggggccacttctgggaggagggtgtccatgcagaacccctacccctggtgtacatgaaacccagaactctgcagcagcaattgggaaatgggcaaagacagcggattctaggagacaggagggcaaacagg

SEQ ID NO: 99035 - DNA, 622 bp, Homo sapiens
ctgggattacaggcacgccacactatgcccaactaagggttttttggtgggtttttttgtatttttagtagagacggggtttcaccatgttggccaggctggtcccaagctcctgacctcaggtgattcgcccgcctcagcctccygaagtgctgggattgtaagtgtgagccactgctcctggcctggcctctctttttttaacagacaaggtcttgctctgttgcccacgctggagtagctgtggcaagatcatagctcattgtagcctttaactcctaggcttaagcaatactgctgcctcagcttcccaagcagctctgactacaggtacacaccaccacacccaactaatttatttaatttaatttttttttttttttttgaaataaggggtcttgctatgttgctcaggctggtcacaaacttctgggctcaagtgattctcctgtctcagcctcctaaagtgctgggattacaggcgtgagcccctgtgcctggcctgtcctctcttattgatggttatggtttaaaaatactgattcttatgttctcatttgtagctaaaataatacatttaaaaggatactttattccaatattttataaatttccttttata

SEQ ID NO: 99036 - DNA, 622 bp, Homo sapiens
ctgggattacaggcacgccacactatgcccaactaagggttttttggtgggtttttttgtatttttagtagagacggggtttcaccatgttggccaggctggtcccaagctcctgacctcaggtgattcgcccgcctcagcctcctgaagtgctgggattgtaagtgtgagccactgckcctggcctggcctctctttttttaacagacaaggtcttgctctgttgcccacgctggagtagctgtggcaagatcatagctcattgtagcctttaactcctaggcttaagcaatactgctgcctcagcttcccaagcagctctgactacaggtacacaccaccacacccaactaatttatttaatttaatttttttttttttttttgaaataaggggtcttgctatgttgctcaggctggtcacaaacttctgggctcaagtgattctcctgtctcagcctcctaaagtgctgggattacaggcgtgagcccctgtgcctggcctgtcctctcttattgatggttatggtttaaaaatactgattcttatgttctcatttgtagctaaaataatacatttaaaaggatactttattccaatattttataaatttccttttata

SEQ ID NO: 99037 - DNA, 544 bp, Homo sapiens
ccattcaataccaattgatgatggttatttttgattccatttgatgatgattacattcgattccatttgatcataattccattcgattccactcgatgattccattcgattccattcaatgatgattccattcgagttcattgactgttccattccattccattcgatgattccattcgagtccattcgatgattctattcgattgcattcgataattccatgcgattgcattcgataattccattcgattccatttgaggataattccatttgagtccattcgatgattgttccattcgattctattcggtgattccattcgattccatttgataatgattccaatcgagaccattcgatgattccattcaattccattcaataatgatccctttcgagtcgattcaatgattccattccagtccattcgatgattccatctgattccatgcaatgaatccattcgattccattctatgaygattccattcatttccatctgatgatgattccattcgattccattcaatgataccattcgat

SEQ ID NO: 99038 - DNA, 566 bp, Homo sapiens
gtatctctagcacccggcatagggcctgaaacttagtaggtgttcaacaaacatatgcttaaggatgaatgattggtgaataaggttgtcagaagagacttgcccatcaaactagggaataatagaagacggtatgtaaccaaatgcaagttctggtaggctctcccttttgcaaggtgactttgtcacttctccccttaggaggtgaagtttatttcttcatccatagaatccaagcttagtcacgcaatttgtttggccaaggggatattagcaaatgtgatacaagcagagggtgagaagtgtttgtttgagctggttsactggataagtggcgttggcttgctatgattgtatggtgattgtcttctcttactgatgggaacccatccaccacgtgaagaagcctaggctaggctaatggtgagcaacaacagggggagaggatctggtcatcctgccaaggccccagacatgtgagtgagaccgtcctagaccacctggcccaagccaagtcagccaagacaagaagacctatccagaattataatgaataataaatgtct

SEQ ID NO: 99039 - DNA, 513 bp, Homo sapiens
atacaaaagataatccaccatgatcaagtgggtttcacatgaaggatatagagttggtttaacatacrcaagtcaataaatgtgatacaccacataaacagaattaaaaacaaaaattatataatcatctcaatagatgtagaaaaagcatttgacaaaatccagcatccctttatgattaaaattctcaacaaattcagcatagaagggacataccttaaggtaataaaacccatctttgacaaacccacagctaacattatactgaacggggaaaagtttaaagcattccccatgagaactggaacaagacaaggatgcccactttcatcacttctattcaatatagtactggaagtcctagccagagctatcagacaagagagagaaataaagggcatccaaattggtaaagaggaagtaaaactgtcactgtttgctgatgatatgatcatatacctagaacaccctaaagactcattcaaaaagctcctagatctgatatatgaattc

SEQ ID NO: 99040 - DNA, 522 bp, Homo sapiens
ttctcattgttcaactcccacttatgagtgagaacatgtggtgtttggttttctgtttttgtgttagtttgctgagaatgatggtttccagcttcatccatgtccctgcaaaggacataaactaatccttttttatggctacatagtattccaaggtgtatatgtgccacattttctttatccagtctatcattgatgggcatttgggttggttctaagtctttgctattgcgaacggtgctgcaataaatatacgtgagcgtgtgtctttatagtagaatgatttatartcctttaggtatatacccaataatgggattgctgggtcaaatggtgtttctggttctagatccctgaggaatcaccacactgtcttccacaatggttaactaatttacactcccaccaacagtgtaaaagcgttcctatttctccacatcctctggaggaggaaagtttttgagtttgttcccctaagagatggcacatagacaggttcaagaagaagttaattctacagca

SEQ ID NO: 99041 - DNA, 661 bp, Homo sapiens
tggggcttccatctccccccaccatggcaactggtcttaatcaatcaaraaatatcagatcctaggacacttatcaccagcaatagtagacaagggttttgcaatgattttaattgattcgattcaacctgttgggtctgtgagaagttacagaaccagcctcatgaaatttgcagtagcaacggcaggtcaggggttgagagttccccatcaaaatactctggggctttcctctgaaaatgacaacatgatcccctcgaggccggatgaatctgtgcttagtgacaccttctcctggggagactcagttgcaaagcagggtctagttctttgaaaccaaatgatcttgtcaagcccagctcagcccacctgagaccaggaggagaagagtttcttcttccccagagactagcccgaacggctgctctactaaacacacagcttcctgcagcaaaaccaagccccagactctgtgagtctaaggagctcactttccatgaaaacacagcctcacataccatataattagaagccctcatccccaggatagtctctgagatgtgtcctcatgtgcacgcatgcctgaagaaccaataaacacattcaagttctgtacatacaggtgttttacaacctgggatgtggttcttaagaaacaata

SEQ ID NO: 99042 - DNA, 661 bp, Homo sapiens
tggggcttccatctccccccaccatggcaactggtcttaatcaatcaaaaaatatcagatcctaggacacttatcaccagcaatagtagacaagggttttgcaatgattttaattgattcgattcaacctgttgggtctgtgagaagttacagaaccagcctcatgaaatttgcagtagcaacrgcaggtcaggggttgagagttccccatcaaaatactctggggctttcctctgaaaatgacaacatgatcccctcgaggccggatgaatctgtgcttagtgacaccttctcctggggagactcagttgcaaagcagggtctagttctttgaaaccaaatgatcttgtcaagcccagctcagcccacctgagaccaggaggagaagagtttcttcttccccagagactagcccgaacggctgctctactaaacacacagcttcctgcagcaaaaccaagccccagactctgtgagtctaaggagctcactttccatgaaaacacagcctcacataccatataattagaagccctcatccccaggatagtctctgagatgtgtcctcatgtgcacgcatgcctgaagaaccaataaacacattcaagttctgtacatacaggtgttttacaacctgggatgtggttcttaagaaacaata

SEQ ID NO: 99043 - DNA, 669 bp, Homo sapiens
accgtgcccggccatagtagactacccttgcattatgggtacaattgcctcttggtctctctgaggacactatttacaattttttaaaatgttcttactagtttctcgaattatgtctgattcttccagggctagctggcttttatttacgattttagtgtccctcaaatgtcaagagaaagtaggcagaagggtgtgagttcagaaaacacacttgaatttcaaaacaggggcacatgtacagtttggaaactatatgtatccatgaagagataaacataccccacagtttgaggaaactccaaaggtgattctgttgcaagtcatgccctaccccctaccaacactccatctccatccacacactttgagaatcagtggcccaaatcrgtgatctgaaagaacattgaaatccactagagaaattttataaagtatctgggcctaggcatcccgaggtaaagctagtgcatgctcaagattgtgaatccctggaagagactctccgtgaggccttgtctttgtaactgtggtccatggaccagcagtgtcggcatggccgtggaacgcattagatgtacagaatctcagccacctcccctgaccaatgttccaaatcagactctgcgtttaaaagagttctcagcgactggtaggcacattaaagat

SEQ ID NO: 99044 - DNA, 669 bp, Homo sapiens
accgtgcccggccatagtagactacccttgcattatgggtacaattgcctcttggtctctctgaggacactatttacaattttttaaaatgttcttactagtttctcgaattatgtctgattcttccagggctagctggcttttatttacgattttagtgtccctcaaatgtcaagagaaagtaggcagaagggtgtgagttcagaaaacacacttgaatttcaaaacaggggcacatgtacagtttggaaactatatgtatccatgaagagataaacataccccacagtttgaggaaactccaaaggtgattctgttgcaagtcatgccctaccccctaccaacactccatctccatccacacactttgagaatcagtggcccaaatcagtgatctgaaagaacattgaaatccactagagaaattttataaagtatctgggcctaggcatcccgaggtaaagctagtgcatgctcaagattgtgaatccctggaagagactctccgtgaggccttgtctttgtaactgtggtccatggaccagcagtgtcggcatggccgtggaaygcattagatgtacagaatctcagccacctcccctgaccaatgttccaaatcagactctgcgtttaaaagagttctcagcgactggtaggcacattaaagat

SEQ ID NO: 99045 - DNA, 616 bp, Homo sapiens
acgacaacctcactagggcacaagggtcaggatgactcagctcaagaaagcttctatccgtgtgtcatttcattcacatactaggacagctcctgattggtctagggtaaacatgtgacccagaatcaaccaatcaggacacctcttaagcgcacagccattgcaggaaatattcacaccaatatattacacctggtatgctaccttcatttgtttgcccttcagatatttactgggtacctaaattgtgcccagtgctagagtctgggatgaaaaagaccagtgcctgtttgtggtacctaacagtccaacaatgactgaattagataggaccttttggccctagagtataaattgggatcgttgtctcatcaaaacaatgtgcagaggccgggcgcagtggctcactcctgtaatcccagcactttgggaggccaaggcaggtggatcacttgaggtcaggagtttgagaccagcctggccaacatggtgaaacccctgtctctactaaaaatagaaaaattagccgggcatagtgttgcatgcytgtaatcccaggtacttgggaggctggggtgggataattgcttgaacccaggaggcagaggttgcagtg

SEQ ID NO: 99046 - DNA, 507 bp, Homo sapiens
gagttgttctctttttttcatttttagagaataagcaaacaacatggggaaagaaatcgctccccatatattcatatgactagattccttagagtcaggaatgatctgtgagcaccttttctagatcgtccagaaatatcttttgtttcccgggatggatgagtctagcttcacaaacattgactgagtgatgactgtaacagtttaaacctttgctgtacatcaccaccacttgaggagctacttaaaaatacagatttgagagatggtttgggktggggccaaaactgtctctcaaggaggtgtggtcctgggagatatattttaaataaacttcacagatagctaggattgagtgccaccagaatgtgtgccttttactgtgctaagtgtctggaatatggagatgaataacgttcaatccttgcccttcaggagcctgtggtctcttggggaaaaacactcttgaacagagtgttgcaatatcaatcaacacaaggagctatc

SEQ ID NO: 99047 - DNA, 502 bp, Homo sapiens
ttacaaattcctctgtctacaattcacctatgtcaggattgcctcattgaggataatattattttatgcctactttgggtattggtgatataattattcaatgccttatgcgctgtgctggagcactgaagccttcaccttgctggcatagtcttcctcaagctctctacagggctagatcttcctcaccctacaggtctcagcttaaatgtcacatcctgctttcctctcctcctccttcaaaattaatatctaaaatcccagcttgtttcttgatttatgcatttattgtctgtcttccctagaagtaagctccatgagaccagagacctattttgttcgtttcacattcctcagtggcagacagtaagcactyaataattgagcaaatgaatgaacaaacgaatgatgaagtgacaagatcgctctgccatccagggagaccctgtgccctttgtcctttctttccatgacatgatataatgataaagacactgaattc

SEQ ID NO: 99048 - DNA, 612 bp, Homo sapiens
gggtcttgaaattgatagactctcctgggttctctgttttttttccagcagatcggctatagtttctaaataagtgaaaaaagaagaacccgaaacaacctttattgatctgctggtggtcatttggtaccatatacagaatgccaaaaaattttaaattggttgttttgtcatcacaaaatggaataatcgatttgaatactaagcaagccctggaataacagaatcatggttttgtaaaaagactgggcaccagaagcagacacacctttgttagaatcccacttctgccaccattagctgtgaggccttagactaagtacttgactgttctgagctgcagttgtatcatctgtaaaatggtaacattattaaatgaataataatacctaccttacaggcttggaggtgaggctcagaggtaataaatgtcaagcatctagtacttagaagcttaataaagatggagcccgtcttaagggtggcagtagtaacagtatcatgtagattcaaattttcctccccaatacactttcttagaccttctttgataagaaraatgagtctagggctcttgatatttcaaaggaagtttcaggagaaacaatgaaa

SEQ ID NO: 99049 - DNA, 507 bp, Homo sapiens
ttagaaaaacacaggaatatcttgaggaatcaaaggacaaagatggagctggaaacattctcttgacttctatgtatgctcctctctgcatttctgattcattcccttcctcttaaccaacagttttcctctgcttcttactacattgatgaaaacatggccaagactgctcccaagtttatatgtcataggtccagttaycctgagaaaaacaaaatcaatcccaattctttcttagctcccttccccactcactattccaaattttcagaattatcagatgttcaccttggcacaatcatctgggtccaagggctgatgtttgatgaacatggctgccacgttttaacctatggccatgcaagtgatcaggagaggctgttcagaagtaaaggagaggatggacaaacaacctataaatactatcacattctcatcacttacactcattcttttggagatatttgttgcaataaattggtacagttaaactagtaaaaggaaatt

SEQ ID NO: 99050 - DNA, 533 bp, Homo sapiens
ttaaactttcttgccatacctaaagatatgttgggggcagggttcgggagacggattgaattgaacactatagacctccatgctacatcttccaattctccaaaatgtcatttgtgaaagaaaatatcagacaatagaggttttcctccatcaccctcatctagtcagtgacagctatgaccttggtagggttcttagtttctttcttcctctcctcaccccacatcctgtcgccatttacaataactatattttggggtgattcattcattaaacccttcctgcctgctttctgtaagcctcctgtcctggggcccagggaattgttttttgttttttgggtttttttctctgattgacaagaatgactttggtttctgcaagactaatgactacattcttaaacaaacacaaatgaaagaaggggcttcagcccakaaaataatttccctacaaaccactgaagaaactggcagtgcagtaattttaaagtttaaacaattgatgagttttcaaatgtaaggagacaccta

SEQ ID NO: 99051 - DNA, 565 bp, Homo sapiens
gagataagaatagaaaccagcccccttgattcaggagatgccccggcagcaatttctagttatctctgcctcatgggggaagcagagccttcctgagatagcaggcagccagggagcatgagtgctggcagaccactaataacctccgggcctcctcctctgaacagtgtatggagaactctggagaggcagggggcttttatcgagtttcccactaagaacgtgcaacctagtcaacccagtcttctgcaaccacacttaatggcaaaataaataggcttgagcccccatcacctactttgggggggggggtcttgagaactcccgaggggcatgttatattctcccaatgtcccttacgccaattcctkgtcccttacaccagttctccacctggagctggattagtgacctccactagcttttctgccctaggctgtagccctctctctgccgcctcctcttccttcccagctcctctcctgaggaccatggcgtgtaacagatttgtcctcaaggtttgggctgggggacaggggggctgtcttaaagggaggcccttaga

SEQ ID NO: 99052 - DNA, 648 bp, Homo sapiens
acactttcccaagatcatacagtcagcagcaagtggcagaattgggatgcaaatccaggtctatctgacttcaaaacatcctgtctttagttactgtcatgttcctttcacaggataggatggggccatgagaaaagtcctcagctgtgagtcctgggttctgatccctgcactgcctccaatttgcatgtgacaattataagccacttcccacctgtgggcctcaggcttctcatctgtgcagggagaattggactcctgggtcttgcatggcagtcccagctttaggattctggggttttgagggtctgtgctgcatcctcaggrcttgttggtcactgacctgctgcttcactcagcatgtcagccgagtgaagcatatcagcatgtcagagccctccaaggggcagtagcctctgttcttcctctttcccttccctcttagcaacactctgctttgctcccgtggctgctctgtttacccagtctctcctccattttccagtaaccagtaagaagtactttaggtctctcctcctcaacaggctcccctgagtggctgattttaatcttgactctgaacttcacagaggctgagaccaacatctttttatgagtcagtgcatatcagtatttgctgagctttgc

SEQ ID NO: 99053 - DNA, 633 bp, Homo sapiens
tccagcctttctgcattctgacttcagaagctgattacagatgcagaaacatgaagggaggtgaaatctatttcccaagatggactatggattggttctaaagatcaaaagggtgtggcttttcaatacaaacaacaaagtctgggagtttttgcacagtggaagagaaaggcaagtagtaagggtggcaaagtgctcattaggaagaaaagttaacrggaaaacttggtttaaatcaaggcaagtatgaagagaaggttatcaactttatgaaaaagaggaccagagaaggcgaagtggcaagctgagtggcgaatgctgcttatcatatatccagttaaaatttcttggtctcattcttcaccattgttaaaatactttaacatattttatatacacttaaatatctgctcctttctagtaatatattttatgtcttttaccatctttgagccacaatgatctcaactgtgaaatgggagcagtaacaaattgcaccataagattgttgtgttaaataatggcatgaatgtgcttagcctgttgcttgtcacatggaatctgcacagttaatgctcatagcctgtaactcttcccatcctcttcagcaagcttttatttaatgacgcagtt

SEQ ID NO: 99054 - DNA, 558 bp, Homo sapiens
aacttttgtagcacacttagcttcctttaaaaaaaatccctgtttccctccctctctttagaacacaattagcttctagctaaaacaggatctcccaaattgcaattcctaagaccccaataaatgccttctcttaccaaattgcagtctggtttttcgcttcttcttggctgacagtctgaattctcacgccaccacttactgatggtgtgtgtgacttttggcatgctatttaacttctttgtgactcagtttttacttatgcaaaaaggakcagaattatagttctatctcatcaacatgttgtgaagagcaaataagaatgcaaataggggctgggtgtggtggctcacacctgtaaccccagcactttggaaggctgaggagggcagatgcctgagcccaggagtttgagaccagcctgggcaacatggcaaaaccccatctctacaaaaaaatataaaaattatctggatgtggtgatgtgtgcctgtagtcccacctgcttgggaggctgaggtaggaggattgcttgaatctgggaggtcaaggctgcag

SEQ ID NO: 99055 - DNA, 575 bp, Homo sapiens
cactattcattttccttagagttctttggctgggagctattagcagtgcctagagaaaacatctgacccttgccagtatgtgtctctggcctgcacggggtgggagggttgatttcactagagccaacaggatgagtccccatagggcagcatacacagtagctgttgtagcagaagaaatgagaaatgcaacaggtctgcaggttagaatgcttgttcttgtcctctcttcttgttgaatgatcagtaacacatcctttactaataatataatgggtagcaggttaaaactcaaagttaacttggaaatcagctatttgggttcatttacagtttagaggtaaaaacccaagatccagaaaatataaaagactcctctcaacatattctctatatttatgtttaaatgtcagtatggggcttgatagcatttcagactgaataagattcactgatgtgaagacctgcatggagaaggactaatgcaagtggaatatgcatgctcaatatgtgtgcattcrgctccttgactggaacatctcctagagacaaaaataggcaatagcagccttcct

SEQ ID NO: 99056 - DNA, 386 bp, Homo sapiens
atcacattacattatgggtttttattttgagataagttcagctacatagcataaactaggtttttttttataaccatgaaggacagtcttgaattatttcccccattaacaaagtctaattggaatccagtattttttctcaaactgtaatttcacttgtcccaggacacataaataggtaaaaattagaataatatcgtggtagaagttaattgtccagaacaagtgcattatataaatataatgcaagcacatgtcatttaagattttctattagtcacattttaagaaaaatagatgaaagtatagtatttttaatccaattcatccwaattattctatcgatatatagtcaatattaaaatttaatgtgatattttgaattc

SEQ ID NO: 99057 - DNA, 615 bp, Homo sapiens
gcacaatagggtgactctagtcaataataattgtacattttaaatagagtgtaattggattgtctgtaattcaaaggagaaatgcttgagtggatggataccccattccccacgatgagcttatttcaaattgcatgcctgtgtcaaaacatctcatgtatcctataaatgtatatacctatgtactcacaaaattaaaaaataaattttaattaaaaaactttcttactgagggacaattgggtccaactattaagaaatcagttcagygcatatgattgtctgcatagatctgtctgctctttgctgcaccataatgctgactgaaacctctagtcacatgaagtgtagaaataaataaattccaggtcccccaaacactttctcaagaataacaaaatagttaacccaagttagaattgcttcacaaacatccaatcattttattttaccttttattattattcgtttaaaaaaatgtccaaggtaagacagactagaaacatggctattgttcaagtttgtaatagagaagtgaattgctcacattatcaattacaattgccatattcagagtgtaaaatccaaaaacaacttcaattgatttaagttact

SEQ ID NO: 99058 - DNA, 615 bp, Homo sapiens
gcacaatagggtgactctagtcaataataattgtacattttaaatagagtgtaattggattgtctgtaattcaaaggagaaatgcttgagtggatggataccccattccccacgatgagcttatttcaaattgcatgcctgtgtcaaaacatctcatgtatcctataaatgtatatacctatgtactcacaaaattaaaaaataaattttaattaaaaaactttcttactgagggacaattgggtccaactattaagaaatcagttcagtgcatatgattgtctgcatagatctgtctgctctttgctgcaccataatgctgactgaaacctctagtcacatgaagtgtagaaataaakaaattccaggtcccccaaacactttctcaagaataacaaaatagttaacccaagttagaattgcttcacaaacatccaatcattttattttaccttttattattattcgtttaaaaaaatgtccaaggtaagacagactagaaacatggctattgttcaagtttgtaatagagaagtgaattgctcacattatcaattacaattgccatattcagagtgtaaaatccaaaaacaacttcaattgatttaagttact

SEQ ID NO: 99059 - DNA, 615 bp, Homo sapiens
gcacaatagggtgactctagtcaataataattgtacattttaaatagagtgtaattggattgtctgtaattcaaaggagaaatgcttgagtggatggataccccattccccacgatgagcttatttcaaattgcatgcctgtgtcaaaacatctcatgtatcctataaatgtatatacctatgtactcacaaaattaaaaaataaattttaattaaaaaactttcttactgagggacaattgggtccaactattaagaaatcagttcagtgcatatgattgtctgcatagatctgtctgctctttgctgcaccataatgctgactgaaacctctagtcacatgaagtgtagaaataaataaattccaggtcccccaaacactttctcaagaataacaaaatagttaacccaagttagaattgcttcacaaacatccaatcattttattttaccttttattattattcgtttaaaaaaatgtccaaggtaagacagactagaaacatggctattgttcaartttgtaatagagaagtgaattgctcacattatcaattacaattgccatattcagagtgtaaaatccaaaaacaacttcaattgatttaagttact

SEQ ID NO: 99060 - DNA, 601 bp, Homo sapiens
ggagaggaaaatgtactatattgttattaagaacagattagacaatgcagaaaaaaaggcttgtaagcttgaagatacaacattagaaatcaacaaaaagaaaacagaaaaaatattctgaagaaaaaaatgaagagagcattagtaagttgtgggacttcatgcagcttataagaaatggtaaaattatgaaaaatgagaagaaataatggaaataatcttgatttgataaaaactataaacccatagatacaaagatcttggtggatctcaagcacaagaaacatgaaagacacataaaaacctttttttaaagttccatctctgcattcgagtctaaccattactttcatttccaaaaaaatacagttttgttcttatttgttttatttccatagcattctttattcttagagtgctggttatcccttcaagtgcttcaacaccttctaatatctctgagggtcaggtcctttgtggagcctggtcatgaccatctctgytcggtccattcctccaccctacttccaagtgaatatggtctctttagtggttctctacttaattgtgtataactttaattacatttttttcacctgtt

SEQ ID NO: 99061 - DNA, 567 bp, Homo sapiens
ctccttttgtttcctctgcatattaaagtagagaaaatgtcacacttatttatggttctccttcatttctctttatgcccctgctacaattttgaaaggagacagaatggatagagtagggcgtgagcaagttaaggaaatggacggggaaggtatcttctccctgggcctaaatatttcactcctagcaaagaaaagttgggctaaacaaattgtcaatttaatatgtttaaactctacttatattaatatcagttgattctttcaatatcctatgaagttcatactttctgaggcctacacttctcagagacattaaaccaagaatttgaactgccatctctctaactccaaactctgatttctagcatctcactcaattcaaggtcatatgtcatatgttttttgtttttttttctgattcttgcatcagggaaggtatacacaatttttattaagcatgaccaacaattctatktttaacccattctttatatttgagcccatgtgactgacctggcaaagagaaatttagctgggaaataaagggcttaagtgtgggagaaa

SEQ ID NO: 99062 - DNA, 614 bp, Homo sapiens
tatttctaaatgaatggctacaaaatcacccaaggaggggatactaatggaggcataattaaattcttcttaccctttggtatatttctaatgagactatcagccaaaataaggccaaggtagtccactaggctgctctcaagtctattcaatgtaaagttcccatgaaacataaggaaataaaaaatttgatcccttaaagagcaggatttcaggagagttcacattgttaaagaatgccagtgatgtttacttattttcytgaagatccgatttctaactacttcccttcatggagataataaaagaaaatgcaaatgcagtttttaaagcattatttaaaaccaaggcccacgttaaaaacctcatcacagcctggatttccatacacagtccatcaagagaaccaaagtcctatttttcccaggaaaaaaaaaaaaacaacattttttactcacttgattttgaaagttcctttgcaaggctacttatctatgactctgtgacaggtttgcaacattcagttcatagaatagaaaggtgtattcaaagagtgctaccagaacctggtttgaaacgtttgaacaagacaacacagcaagttagctatgatc

SEQ ID NO: 99063 - DNA, 457 bp, Homo sapiens
aaagaattccatgatatgttcttggagttattaataaaaataactgctggttgacaggaaaggcatatggcaaatttaagatgcatggccacagtattttatttaaaaaaaaaattctttcctacaccaggggtgagagtgtgtgtgtgtgtgtgtgtgtgtgtgtgtgtgtgttttaygcaccagaaaaaccttcaactctgacaagccattgacgaggtgtttcagtcttcactagcttcctatttcattgctctgccattgagcccttgtaatactacgatgaataaagtaatcaaagcaattggctgcctgagatcttttttaatgcactgcttcggacgcagtacatatgctgtgcaaataaatacagaattagtgttcctgttggaagcatttggtgagaatgagtgatttgtcttgcttatgaaaggtgcatacatttccgctcatagct

SEQ ID NO: 99064 - DNA, 564 bp, Homo sapiens
aattttttctttgaaagagatttaatattttctctgaatcacaagataacaatttaataatcgtctttcacaaggaagagaatacagcatgatgtcgtctgaacctactgttgcttgtcaaagaaagatttttaatgttaatattactaattaaaagacataccactcagcacgaaatcacaaactgtatctgctgcttgtttaatacactttaagtgtgtgtaygcaggaggaaatttggggaaaattatgaacaaaatcaaacatttttcatctagcttttaggcttttatgtttttttttagagtgcaattagagaattaattaattaaggtcaccattctcaacctcatcatctgctttgaatttgaatacaaaccggttctgcatgagtagtgtctgatataatgttaatcaagaaaatgctgtgtttaactgaatatgaaacagatataagcacaggttctgtctaatggattaataatataaacaaggttgaggactaagtaacaaaaaatggagtcaaatacactttcagaatctgtagtaatagagttttatggt

SEQ ID NO: 99065 - DNA, 564 bp, Homo sapiens
aattttttctttgaaagagatttaatattttctctgaatcacaagataacaatttaataatcgtctttcacaaggaagagaatacagcatgatgtcgtctgaacctactgttgcttgtcaaagaaagatttttaatgttaatattactaattaaaagacataccactcagcacgaaatcacaaactgtatctgctgcttgtttaatacactttaagtgtgtgtacgcaggaggaaatttggggaaaattatgaacaaaatcaaacatttttcatctagcttttaggcttttatgtttttttttagagtgcaattagagaattaattaattaaggtcaccattctcaacctcatcatctgctttgaatttgaatacaaacmggttctgcatgagtagtgtctgatataatgttaatcaagaaaatgctgtgtttaactgaatatgaaacagatataagcacaggttctgtctaatggattaataatataaacaaggttgaggactaagtaacaaaaaatggagtcaaatacactttcagaatctgtagtaatagagttttatggt

SEQ ID NO: 99066 - DNA, 305 bp, Homo sapiens
aaatgctaatattattcccttttgtcttgtgcattttaaagtttgggattgaattctaccatctactcrtgcaactttaacctgctgccaaagccttaacagagtggttaaaacagtaattttgtctgcctgaaaagtggaatagggccagtcatggtggctcatgcctttaaccagcactttggaggctgtggcgggaggatcacttgaggccaagtgttcaatactagcatgggcaacgtagcgaaaccctgtctctacaaaagaaaaataaaaacattagccaggtatggtggcacatgcct

SEQ ID NO: 99067 - DNA, 533 bp, Homo sapiens
gttagttgcttgacttggtgcaagcctgcacaactgcattctctgcacagtagtctccagatgttccagtagataacctcaaggagcacagcaccagggagtractgcactcagcataccttctggtggcaggcacagatgtgagtttgcccacatcctgcattcatgataaactgtttgctgtttgatcatacacccttcagtgtaatgctgagttagtcaggatcctgcagcttttgtctctctacaatgtagtaatgcaaagaattaaagtgagacataaaaaagaacctcccttttttaaggctgcaggcaggacctgaacaatgattgacataagaggcaaagacaatacttagaaaggagctgggagaggaccaggataacagatcaagtgcctctgatactgctgatgtaggttgaagtctaggatacatcagaggaggcagctttaagacgtatggttgatggcagcatcatttgccatggatatctacttaagacaaagagcaggattctgaaacaaggtcaaa

SEQ ID NO: 99068 - DNA, 548 bp, Homo sapiens
tctaacttctctgtagccctcctgaaaacaaagactatctctatctgctcatctacataacagaatatttactgatgtgggaaccacattggcctgtatggtttctcgctccattccactggatgtcattgtagaactaggacaaatcaccctagacccaaatatctacaggggccagagacagaaaatgggggtatgactgtaagctgaagtagtccaactcattcaaaattgtgggttttttcccaaatattataatgattttgtactaagttacactaagaggcttcaatactggtctgattggcttatttattcatgtgttaattcatcagttatttattaagaatttaccacatgctaagcagtgaaaataaaagcagtctctgctgtcacagaacttaaaatatgataatgaataagccagaatattacttaaaataaaatatgaacattrtaatagcacatgtacaggctgctttgactgctaataatagagagatactacccagtgacaggaaaatatcgtggatatgacaaagttccct

SEQ ID NO: 99069 - DNA, 552 bp, Homo sapiens
ggtgaaacaaaagtatttgtgtagctgtgtccccagtgggaagaatgcatggatccaaacagcaaactatagcaggaccccaaaccagaaatagctgtgcaacagtctaaactgtaattaaatattcttgctgcttaatccataaaatccagcagactctgtggtactgattacatcctagaggcaactaaatgtatcaattttgtggcaaaacccagtaggagaagaacatctcaggccaaaggagactagagtaaggctatgctgtatgtggtaaagaactatatgcacattgagaaaaaaacaacccttggcctgctactgagcactgataaagttggaatttcagaccatgagcccatgtgcctagaactggcaaaccctacaactgaaaaggtctggccaagcaacaatccactcgaagayggaagtgagaaattcaagattgagcataacaggattagaaggcccaagcaaatgttatgatcaggtaacccacacccacaacttctgcgtcactgctgcttccctcagtgtatgtctatgactaca

SEQ ID NO: 99070 - DNA, 316 bp, Homo sapiens
aaaaaaaaatcccactttaaagttggcactaattctgggtgtatgcctaattgtcaaatgaagagaaaaatcagacactttgtrcttaaaaataccctttatatgaaattccctttatccttaactaaatcccttataatctaatggaggaggtagatgtatttccctgcaatatttgaggcaaaaaaagaggatgtttagacaatagttttaaagctaatattaaatatattacccatataggaaactatcttggaaagtgggcagatagaatacgtaactaatttgtttgactgaaagaatattcagtcaactg

SEQ ID NO: 99071 - DNA, 592 bp, Homo sapiens
ctcaaaaacctatgaagagttgcatgttattcttccaggtctcttgtgacaatacagacttagatatatcataattaattatatcacttcctttattatgaaaacccaaccctacttttctgagctgagctgtaaaagataccatcatctctagtggttcagtgagtatggcaagtgctgtgataaataaagttttacttaaggacttctcaaagcctttgccatgataatgctatgtgagactctaagaggagaaagttaaaacacacaagctccccaatttattttaaaactaagccattgtaccttctggytcttagttttgttttttcctctcaaattcttatggaatggatattcttcttcagaacagacgttaagaaccttagccctaagtttgtaaaaataactaggaccatttctgagagttatgttcctggagttcactagggcttacttcttgcacattgatttcaattagctccagtttcagagggcaatgtttttatctgattagttctcaatgtaggtgacatttgagcttaaaatggagttttctgatcttgtttctaatatctaagaatctgtttgg

SEQ ID NO: 99072 - DNA, 598 bp, Homo sapiens
caacactcttctatgacctcctactttctaagtgaaaatgaaattttcttgattcaaattctaarcatgatttttgttctgttaaattgtgtactggtagttggaaaattacttctaaaagcgggcagatggcaggtatcgatcctcttgaatgcttgggttcaggaaattaaaagggtttgagctgagggtcaaggggtgtaaacaaagataagtgaaattgcagagtatagcttcatggtatgtgtggcagagattacttattgtctattctaatattatcctcttagaaacagaaccctgtgtgcttagctgaatgcatggccacctgaataaattctctgttcctcaacctcccttgcagagaggtgcagcaatgtgtttaagttctggtgtatgagttgtaagcagagatgtcttatgacagcttctgggaaacctctgtaaagaaccttcttttttatcccttattcatttctgctacttggcatgcagatgaaatggcgtgagcctcagcgacattttggaccaggcagtgatgttaagagtgtcactcttgtagaacagtaagaacaaaagtgtctgagccctggcatca

SEQ ID NO: 99073 - DNA, 413 bp, Homo sapiens
ggtcttatccaaatcaatggcagcttcctcctcatttcaccacttcaccaaggatgaaagcagccatgggtatgttctctcctagcaggagctcactattttctggactttggttcttctggatttctttgcaacccaagatttttaatggcctccacaaaactgcgattttgtaggtcactgtcctattctttttgttagaatggcaacaacactcttctatgacctcctactttctaagtgaaaatgaaattttcttgattcaaattctaagcatgatttttgttcwgttaaattgtgtactggtagttggaaaattacttctaaaagcgggcagatggcaggtatcgatcctcttgaatgcttgggttcaggaaattaaaagggtttgagctgagggtcaaggggtgtaa

SEQ ID NO: 99074 - DNA, 426 bp, Homo sapiens
gccaggcacggcgttcgaccctctatatacatacactctcttcctaaatctatagatccatcgtcatatattggatactgactttggtcatgatctgtgctttgtgttttatgttatatcacttaattgtcactcaaactccatgagtctttagtatctttcyccatttttcagttgggaaaatggtggctcagacaggataaataacttgctcatgtttgtaagactagtcgtggagctgggatttaaacccaattgtagttccaaagcttgtgttcagaacctgcctttttgtgggctgcttcttttccctccaccttctattatttcttgttcctattctcttctgtatactatctcttcttttttctatataaattcttttttcatctttcactcacagttgtaggttttacttcttaacac

SEQ ID NO: 99075 - DNA, 597 bp, Homo sapiens
caatatatcaacgaaaaaatgttgcagatagaagaagcattctagatttaaagagaataaggaaacataaccacgtgcagtatatcaacctagatttcttcctggggaaattttactctagggttggtattaatatcagaaggaactagagaattattgttagttttcttaggcaagataatgttatgtaattatatgggagactgtccttttgtaggacatacatgctgaaatatttaaggtgaaatatctatgtctgtaatttattattaaaaagtttatcccctcaatatatatgcctatataataaggtatgcatatatggtacacaaagtaaaaatgaaaaaaaaaatgttcacaatgcttgatggctgcttatttgactattcctccaatttttgtatgtttgaaatgtttataataaaaattgaagagaaattatgctcttttaaaaaatttacattccaagcacttgggagttgggaaaaaaaatattcacagacacctaggtttgcttttttgcattttcacttagaccctagtgtatyctgaatctttttaggagtagaatttatatcctatctgtctgatgtcatt

SEQ ID NO: 99076 - DNA, 521 bp, Homo sapiens
aggcagtatgaggaaggcaataggggtaaaaaacaagacatggataaactgcaagctgagtaattggctggagtaaaatgagcactttcaaatactcagctctttcaggaaacaaaaygactgcataattgtctaaaaccgcagtctgacaacctgaaaaccactgcacctctatttaatttacattccaggaaaactcagtcaaagatccaattacaatgtattaccttggatggaatttgaatactatatatgctcattgcactttccaattagtagtcaacaagcatgttatttttaccccagaaatattcgtctaataacaacttcccatttggtgcaccaacagttctggttggtaccggagggggagcaagacacaaatctgaaccatttaggagtttctctaaacacgttttaggaagccctacccttaaagcctatatgccatgcacaataccaaccttatggtcattcgccttgtaatcgttgaaccgaggctggccgcctgccaaggtgta

SEQ ID NO: 99077 - DNA, 521 bp, Homo sapiens
aggcagtatgaggaaggcaataggggtaaaaaacaagacatggataaactgcaagctgagtaattggctggagtaaaatgagcactttcaaatactcagctctttcaggaaacaaaatgactgcataattgtctaaaacygcagtctgacaacctgaaaaccactgcacctctatttaatttacattccaggaaaactcagtcaaagatccaattacaatgtattaccttggatggaatttgaatactatatatgctcattgcactttccaattagtagtcaacaagcatgttatttttaccccagaaatattcgtctaataacaacttcccatttggtgcaccaacagttctggttggtaccggagggggagcaagacacaaatctgaaccatttaggagtttctctaaacacgttttaggaagccctacccttaaagcctatatgccatgcacaataccaaccttatggtcattcgccttgtaatcgttgaaccgaggctggccgcctgccaaggtgta

SEQ ID NO: 99078 - DNA, 624 bp, Homo sapiens
atcaaagtccttgttttttaaaaagatatatatatatattatcatggtaatctgtacataacatagaatttaccattttaaccctttctaagtgtacaactcagtgacattaagtgcattcacattactgtgcagccatgaccaccattcatctccagaacgttttcttcttcccaaattgaaactctgtatccattaaacaatgactcttcttctcccctgcccccagcccctgccaaccaccattctacttgctgtctgtatgattttgactactctaggtacctcaaataagtgcaatcatacagtatttgtgtttttgtgactggcttatttcatttagtataaygtcttcaagggtcaaccacattgtgcatgtgtcaaaatggccttccttttcaagactgaataatattgtgttgtatgtacataccgcatcttgtttatccattcatcagtctatggacatttgggttctttccacctttaggcaattgagaataatgctgctatgaacaatgttgtacatatatctgtttgagttcagagcccttgctttgaattattgcacttaattgctacccaatgtggtctcatagccaatatttactaggaagtgtttta

SEQ ID NO: 99079 - DNA, 515 bp, Homo sapiens
tttctagagtcacacctattgttttttaggaatccagtagtttgaatgaatcgtctgagaccaatataatttaaatttttcaagayttctctaatttatatacagtaacaaattaatacctttaacaatttggggaatatacttctcatttctacaaaaataagctccaggatagtgcgttactctgaagttccaatcattttatattattccatcaaagaaataatgtcttgattagttaattctatagttggacaatcataaaatttagtgaggaaggaagataaccttgccataccaataaagttgaaggagcaattattttccttttgatgccaattggagctctaggaatagaaggaatgctaactccaaattaaattttgtgagtatgaaaaaagtaaaattgcacgcataagttaaattctagaagaatttacaagtggtcatcatctagaaaatgcaacaacactatcgtgcaggatccatagtatggggtggagaatggtgatgat

SEQ ID NO: 99080 - DNA, 556 bp, Homo sapiens
ttggtacttaataagtatttgcttagttaatgaatgtgtgaacatccctggcaaatgcaatataactttggtcttcttgtattcctgtcggtcttctagcacagcacctgtgatgcctcagtcaaaaggagaaggctgtcaatataagtaataataaaytacatctaaataatattttaagatgcaattttataaacatatctttattttcacagtaagtttggtaattgttcttatttataaagataataacactgacaatctggaagtttgagatttgctaaggatttgaaaactcataaattgtagcattggctctaaagattagacctttgactccttctacaaggttatttcttctacagtatgctgttttctgagtcagctctctaacagtgcagagaccagtggttgactccttattctcatgttctctcactcattctggttaggcagcatcagcagtcttgaccatctcccttctagctcccatctgctctcttctccacttcctgcttcagccacctctaggaaaactattcctacttctaatgtc

SEQ ID NO: 99081 - DNA, 556 bp, Homo sapiens
ttggtacttaataagtatttgcttagttaatgaatgtgtgaacatccctggcaaatgcaatataactttggtcttcttgtattcctgtcggtcttctagcacagcacctgtgatgcctcagtcaaaaggagaaggctgtcaatataagtaataataaattacatctaaataatattttaagatgcaattttataaacatatctttattttcacagtaagtttggtaattgttcttatttataaagataakaacactgacaatctggaagtttgagatttgctaaggatttgaaaactcataaattgtagcattggctctaaagattagacctttgactccttctacaaggttatttcttctacagtatgctgttttctgagtcagctctctaacagtgcagagaccagtggttgactccttattctcatgttctctcactcattctggttaggcagcatcagcagtcttgaccatctcccttctagctcccatctgctctcttctccacttcctgcttcagccacctctaggaaaactattcctacttctaatgtc

SEQ ID NO: 99082 - DNA, 503 bp, Homo sapiens
atctttgattttgaaattttaaacgtattaaayatgaaaatgtttcattttggttcactggcaaagataatcaccccgattttgtagctaagacgctcaaagaaggaacaatcattattaaaactttttcaagaatcagaaacttgataaaacacgactaagatgtatataaaagatatatcatgcatatatcattacataaataagattttatttttcagtgctcttgtgagtttactatttgagattagatataattagtttagagattagatataatttggacattagtaaagatataaacagtttatcatgtaacatatatttattgccaaatatacatatcctttatatgaagaaattctatgtaaaacttatgtataattcatacaaataaagagttttagtatataatatatattaatgactatgtataatggtaaatgacaaaagaataacagaaaaacttatcctatctatatttttatcctacttctaccaag

SEQ ID NO: 99083 - DNA, 503 bp, Homo sapiens
atctttgattttgaaattttaaacgtattaaacatgaaaatgtttcattttggttcactggcaaagataatcaccccgattttgtagctaagacgctcaaagaaggaacaatcattattaaaactttttcaagaatcagaaacttgataaaacacgactaagatgtatataaaagatatatcatgcatatatcattwcataaataagattttatttttcagtgctcttgtgagtttactatttgagattagatataattagtttagagattagatataatttggacattagtaaagatataaacagtttatcatgtaacatatatttattgccaaatatacatatcctttatatgaagaaattctatgtaaaacttatgtataattcatacaaataaagagttttagtatataatatatattaatgactatgtataatggtaaatgacaaaagaataacagaaaaacttatcctatctatatttttatcctacttctaccaag

SEQ ID NO: 99084 - DNA, 627 bp, Homo sapiens
gctactaccaacatttatgcataagaaacaaagcatctgtacatgaacatgggctcttcccaggctatttgttttgcaacacatatttggatgagaaggatgttcctaatagctttttccatgatgtcaaaagtaggctattctctcatgttcatgatcttccttctgctaccaccattggagctacgggtactatgatgggtgagacccacgaaactccacctggctgcttcccttcctcagatgtccatagtcttctacgattggctctggagtctcttgcaagtttccctcattcacctcactcccaacctggaatcttcttcaaaacataacttactgatcttataatttgttttgaccaatcactactataggtcaaagctttctgttcctccttctattttccatttgggaaatrcagtctctctttttttctaggctaagttacctgactgtggtcaacaataacaccagtatttctttttcaagacctcctggaaagtcagttctctccaatcctgttctaaagtaaccaattttgattgattcaattacaccagaatgattgtgttgatttcagcccagtatttcaggctgatgaaacaagttttaatctaatgcttc

SEQ ID NO: 99085 - DNA, 366 bp, Homo sapiens
tcccaagactttttttatattttacacaaaaatacacgcaaatatcccctaacatttgaatacattctatttcttatattggatgataaagttgcaggtagtgatggataccggcacatamgcatatgcatttattttaaaaagaatacaatcagctcacactcttctataatttatttttaatttaagtatatatttatactcatccatcaattttttattgcatatctactaaggggaaggaatacagtggtaagtaaaaacagttgaactctactattgtggggtttatgatgtaacaaggaaggaagacattacagaaataagtcaactaatattaatgtagactctcaaacgaagttaagt

SEQ ID NO: 99086 - DNA, 588 bp, Homo sapiens
gtatatagtactcccaaccaaagccaccttgggtaatcaaattaatacaaggcaatagaaagggaatgggagcgcatatagcattaacagcaaygactacaattaatacaagtacataaaataatccaatgggaccactgaacaaccctgggcaatgaaagcatttttcaagatataccatttaatgtggttgtacagcagagtaatataatgggggtgaatagtatttactaaggaaagaaattgatgcaaagagtgaatgctcaacaatggaggtttgtctgtatgcttgacttggaggtaatgttcttttctttacctctgatcaaattgcagtcctaaatggctagccagtggaacagtagtatcactgttgtcaaagctactgtaaatcttcaactgaaagagaatgtcaaggtcattgctatcaaaaagcacaatgataatacagaaaaatggctgcagtaagttgagaaaatcatggtagacacacacacatacaccactcacgtagaaaacatgcttgtttgcaacattgcctataggcaaagtgtgaagcacttgaatctcattgtacactcacaatcc

SEQ ID NO: 99087 - DNA, 588 bp, Homo sapiens
gtatatagtactcccaaccaaagccaccttgggtaatcaaattaatacaaggcaatagaaagggaatgggagcgcatatagcattaacagcaacgactacaattaatacaagtacataaaataatccaatgggaccactgaacaaccctgggcaatgaaagcatttttcaagatataccatttaatgtggttgtacagcagagtaatataatgggggtgaatagtatttactaaggaaagaaattgatgcaaagagtgaatgctcaacaatggaggtttgtctgtatgcttgacttggaggtaatgttcttttctttacctctgatcaaattgcagtcctaaatggctagccagtrgaacagtagtatcactgttgtcaaagctactgtaaatcttcaactgaaagagaatgtcaaggtcattgctatcaaaaagcacaatgataatacagaaaaatggctgcagtaagttgagaaaatcatggtagacacacacacatacaccactcacgtagaaaacatgcttgtttgcaacattgcctataggcaaagtgtgaagcacttgaatctcattgtacactcacaatcc

SEQ ID NO: 99088 - DNA, 565 bp, Homo sapiens
gaccaggctgggcaacatagggagactccatctctaccaaaaaaaaaaaaaaaaagttgagtgtggtggcacacacctgtagtccctgctacccatgatgctgagtcagaaggattgcttgaatccaggaggcagaggctgcagtgagctgattgcaccactgtactccagcctgagaggcagagcaagacctcattaaaaaacaaaaaaaatcaagcaatacccaacgtggtcaagttctgtctcttcttggctctaacacacgtcctaggtatctgatcgcaggatagaaatcagtacagaaagtatttcacaccctgccccacccccaaacaaagccaaagcaggtctgtctacagcttactccatggcactgcatcattyttcaccccacagcctccccccagcccccacacctttcctccaccgtgctccctggataagcatcccactcatgctttagactgcccagagggagtaatttggcaccacacgggacaccttattcttggagtgctaaacagaagttaagactcgtgactcttctcagctctaatcacacact

SEQ ID NO: 99089 - DNA, 405 bp, Homo sapiens
ggtgacaaagcaagactctgccataaataaataaataaataagagttaagtaggtctctagatggaaaatataaacatttcttttttctagagctttctaatcttctaattcaagggttatttgagcaataggtagttgcatttctagttaccaattttaattccaagtttatgctattgtgcatttttgttttaaataattgcggatacttttttcctcatttatgatgattattttctattcttggtattaactccctgaagctaatttaaaccagagcatgcagtttgtcagtataaaaacaactgaragtctaagattgggttataacatttagaattatattcatgtactgatgagagagattgtggcttctggtcaattctatgtgagtgtgatgatta

SEQ ID NO: 99090 - DNA, 496 bp, Homo sapiens
gaggagctcccaaggagctcagtcaattgaggacagatacagaaagatcaatacaaagaacagagtatatccaatactgatgatgagtgtgtgtactgggttcaaacccaggaactctggctctagacaccatccagttcaacactatactacacyatttcccacagattcagcttgagggaaaagaggctctccaaaatatcaagatggtggtacaggaagaggaggaatggattctaggcaggtgaaagtccatgaggccaggatgatgtatgtatttggaaaaagtggagaagggccttccaggcatagagagagcatttattatgaactgtgtctgtgccacagtatcactggggccactcttcactgacactcaggtagcttgctagcactaaaaacccaaaactatcaaaagtcaccactacccataagcactgatcacaaacaccatattcctccactggttggtgtgtttttgtacataaaagaccaa

SEQ ID NO: 99091 - DNA, 496 bp, Homo sapiens
gaggagctcccaaggagctcagtcaattgaggacagatacagaaagatcaatacaaagaacagagtatatccaatactgatgatgagtgtgtgtactgggttcaaacccaggaactctggctctagacaccatccagttcaacactatactacaccrtttcccacagattcagcttgagggaaaagaggctctccaaaatatcaagatggtggtacaggaagaggaggaatggattctaggcaggtgaaagtccatgaggccaggatgatgtatgtatttggaaaaagtggagaagggccttccaggcatagagagagcatttattatgaactgtgtctgtgccacagtatcactggggccactcttcactgacactcaggtagcttgctagcactaaaaacccaaaactatcaaaagtcaccactacccataagcactgatcacaaacaccatattcctccactggttggtgtgtttttgtacataaaagaccaa

SEQ ID NO: 99092 - DNA, 525 bp, Homo sapiens
ttatgatttttacccaagatcatgcagccaaagggtgaagccaaggtttgaacccaggctgcccagattcagagccactaccttcactattccaagtactgccacatggtgactgaggtgacctgatgcagtggccccgggcagcagcagaatctgttggaagccctaacataccaaaacaagtgacttggtataaaagtctgcaccctctttcttgcccttgggggccttcmtctctgtccccacctctgcctctgggacagccaatgaaaagagcctagtcctcactccctgttttcaatgatgaccaatgattccaggctgcctcttggggcacaagattttcagtgcaaaaacttggatcatccagggcaaattggaagggttggtcaccccagttgagaacaggaactatagagccattggctggtgtcaaatcctggctccaccatgaacccaccctgctactttggccaaattacttaacttttccatgcctccatttcctcacctataaaacaggaa

SEQ ID NO: 99093 - DNA, 525 bp, Homo sapiens
ttatgatttttacccaagatcatgcagccaaagggtgaagccaaggtttgaacccaggctgcccagattcagagccactaccttcactattccaagtactgccacatggtgactgaggtgacctgatgcagtggccccgggcagcagcagaatctgttggaagccctaacataccaaaacaagtgacttggtataaaagtctgcaccctctttcttgcccttgggggccttcatctctgtccccacctctgcctctgggacagccaatgaaaagagcctagtcctcactccctgttttcaatgatgaccaatgattccaggctgcctcttggggcacaagattttcagtgcaaaaacttggatcatccagggcaaattggaagggttggtcaccccagttgagaacaggaactatagagccrttggctggtgtcaaatcctggctccaccatgaacccaccctgctactttggccaaattacttaacttttccatgcctccatttcctcacctataaaacaggaa

SEQ ID NO: 99094 - DNA, 505 bp, Homo sapiens
atatgagtaaaaagtgaaaacccctctttccaaaagtgtaattcagttacacacctgaagaacttaatttgaaagcaaacactagcttgtttaacaatatggatatcttctgttaaataaatcgagcttgtgaaagtgaagtcacctgttaacaagcctaaaagctttctaataactcctcctccctcctgctgaccccctacccctgtcgcctcgcccaacacacacacacacacacacactcactcacactcacacttcttcatagcatatacccagcaatgatcctcctgacccactctgagaccacaataggctaatraggaatgccatttaagatatctttgggtctgagacactctaatatagatatggacattgagactttgagaaatacacctgcctaaaactagctagctgcttagtaacaaggatggaaattcaacataatcattcatttacacctgttccttccacaaacatttcgaagtcattaagtcatgac

SEQ ID NO: 99095 - DNA, 505 bp, Homo sapiens
atatgagtaaaaagtgaaaacccctctttccaaaagtgtaattcagttacacacctgaagaacttaatttgaaagcaaacactagcttgtttaacaatatggatatcttctgttaaataaatcgagcttgtgaaagtgaagtcacctgttaacaagcctaaaagctttctaataactcctcctccctcctgctgaccccctacccctgtcgcctcgcccaacacacacacacacacacacactcactcacactcacacttcttcatagcatatacccagcaatgatcctcctgacccactctgagaccacaataggctaataaggaatgccatttaagatatctttgggtcygagacactctaatatagatatggacattgagactttgagaaatacacctgcctaaaactagctagctgcttagtaacaaggatggaaattcaacataatcattcatttacacctgttccttccacaaacatttcgaagtcattaagtcatgac

SEQ ID NO: 99096 - DNA, 547 bp, Homo sapiens
ttatctttctggtatcaatttctaccttaattctactatagtcagagaatgtactttgtatatttcattccttcaaaatttgttgagatttgctttatgacctcagcatacagtcaattttagcaatgttacatgtttacatgaaaaggaggcatactctgtaattattagttgcagtttgattgaagtttgttaataatcttgtttaaaatttttcaattcttactgatatttttgtctgcttgttctcccaawagatttgtctatatccttcttagttctttaaatttaactttatatgtagaacaataatatgtatttataatatattagaaattatgttactagatgaatataaattaatatttgttatattttttgtgtgtattgaccctttaatcattatgctttttttttcctctggtaatacttcttggcttaaagtcgttgttattagttgaactacatcagatttttgttttagtgttagtgtgcatatacatgtgtatgtgtatatatatatgtatttataactatatagacatac

SEQ ID NO: 99097 - DNA, 547 bp, Homo sapiens
ttatctttctggtatcaatttctaccttaattctactatagtcagagaatgtactttgtatatttcattccttcaaaatttgttgagatttgctttatgacctcagcatacagtcaattttagcaatgttacatgtttacatgaaaaggaggcatactctgtaattattagttgcagtttgattgaagtttgttaataatcttgtttaaaatttttcaattcttactgatatttttgtctgcttgttctcccaaaagatttgtctatatccttcttagttctttaaatttaactttatatgtagaacaataatatrtatttataatatattagaaattatgttactagatgaatataaattaatatttgttatattttttgtgtgtattgaccctttaatcattatgctttttttttcctctggtaatacttcttggcttaaagtcgttgttattagttgaactacatcagatttttgttttagtgttagtgtgcatatacatgtgtatgtgtatatatatatgtatttataactatatagacatac

SEQ ID NO: 99098 - DNA, 547 bp, Homo sapiens
ttatctttctggtatcaatttctaccttaattctactatagtcagagaatgtactttgtatatttcattccttcaaaatttgttgagatttgctttatgacctcagcatacagtcaattttagcaatgttacatgtttacatgaaaaggaggcatactctgtaattattagttgcagtttgattgaagtttgttaataatcttgtttaaaatttttcaattcttactgatatttttgtctgcttgttctcccaaaagatttgtctatatccttcttagttctttaaatttaactttatatgtagaacaataatatgtatttataatatattagaaattatgttactagatgaatataaattaatatttgttatattttttgtgtgtattgaccctttaatcattatgctttttttttcctctggtaatacttcttggcttaaagtcgttgttattagttgaactayatcagatttttgttttagtgttagtgtgcatatacatgtgtatgtgtatatatatatgtatttataactatatagacatac

SEQ ID NO: 99099 - DNA, 547 bp, Homo sapiens
ttatctttctggtatcaatttctaccttaattctactatagtcagagaatgtactttgtatatttcattccttcaaaatttgttgagatttgctttatgacctcagcatacagtcaattttagcaatgttacatgtttacatgaaaaggaggcatactctgtaattattagttgcagtttgattgaagtttgttaataatcttgtttaaaatttttcaattcttactgatatttttgtctgcttgttctcccaaaagatttgtctatatccttcttagttctttaaatttaactttatatgtagaacaataatatgtatttataatatattagaaattatgttactagatgaatataaattaatatttgttatattttttgtgtgtattgaccctttaatcattatgctttttttttcctctggtaatacttcttggcttaaagtcgttgttattagttgaactacatcagatttttgttttagtgttagygtgcatatacatgtgtatgtgtatatatatatgtatttataactatatagacatac

SEQ ID NO: 99100 - DNA, 557 bp, Homo sapiens
ttacttggaatccagtttactcatccttacaattacagggtggatttagttattcttcaaggtatcatacagattttttgtttcacatattaaaattttttcatattataaatgctttataacattattgtgatatatggattctgctgaaacatacaattttatcactgcttccatcaaatatattagctatcaaaaaaagaaagttaaaaagactaaaatcaggaggtataaattttatatacagcaaaatgtcagggagaagaaaaagatttaaggagcacaggcttaaaatcagtagtcctagaatctagtctgggctttacgacttactagctgagtgatcttcacaaataagtcaattaactccttaggctccatttcctggtctgtaaaataaagattataatacttgctttatctccttctcagggttgttgtgaggtccattaagataatatatrtgaaagcagtttatatagtgctgcataaaggaatgttgtagttttacccctcaataccaatgttttaatggcattaaactatgtattgttatg

SEQ ID NO: 99101 - DNA, 545 bp, Homo sapiens
gcatgctaagtaaatatactgtgctagattataataataatgtgttatgggaaaaaataatacagaacagaggtcgacaggaaggatccaggtggtgttgtgattttagatctgagaaagcctaagtagttgctatttgattaaaggctgatgcctgggggggaaagcgtgccagggtagtgaggaaatagtacaagagctccacagtgagcacagacgtccaagttccaggaacttcagggagccggggaggctggaggaatgagtgagctaggacagcagccaamgagagggcagacagtaatgggagggcagtgtgtgcagaccatgctgtgctttttaggccattttgcattgatttaagcttttactcagagtgggtaggaagccacaggaggagttgagaggggcagtgccctgatctgacttagcttttaacattttactctgactgctctagtaaaaggagaagactgagcataagggtggaattaagcggactggtttggaggtcactgcaaaaatccagcttggagatggtagcg

SEQ ID NO: 99102 - DNA, 505 bp, Homo sapiens
ctgtttgtgttactagaacttttcagccactgtggcagattttctgtctctggaagttggtcgctctgctggggagtggctcattttgtcttttgaaacacaaatgtctagaaattattttctgtgatagtcttatgttagaataacttttcaatcattgtatcaaattccacagtctttaccctggtatcttatcccctggataagtagcagatgaagaagagtcaaggctaggcggaatattttaatggtaaagtgtgctgacctggcctcagaggagcctggaagcaggaggaggtgatgcatagaaagtcaagtagatgcagaartgagagaggaacatggctgagcaaagtgtgtctgggtgtagggactctatggcctttatgggtacggaggtgtatatgcaaaaggttttgggcaaacttcctgtgtctttcctttgctattgtacctggccttaaagcacattcagccctttgggagaacttcaaccctgtgttgg

SEQ ID NO: 99103 - DNA, 511 bp, Homo sapiens
taaagagctgacgtcttaaatttattttttctttctttctttctttctttcttccttcttcttctttttttgtctgagacagggtctcactctgtcaccctaggctggagtgcagtggcacaatcatagctcactgtaactttgagctcctggaataaaatgatcctcctgcctcagcctcctgagtagctgggactacaagtgtgcaccactatgcctggttaattttttattttttaatttttttgtagagacagggtctcactatgttgccagggctggtcttgaactccttgcctccagtcatcctcctgccttggcctcccaaagtgctgggattacagacatgagccaccacacccagccaaatttacttcttaaaaactatttaaaatataacaaaaatgaycacaaattctagagaaaaataggcaaaaatacataaacagacaatccactaagagctatataaacacagtcttaaacatatataaaaagatgttcaacttta

SEQ ID NO: 99104 - DNA, 562 bp, Homo sapiens
ataacagacatacagcacctagaccctgtcatacctagacaaaagcaatctacagatcactgtatgctcaaatctaactctgagggatgctgctgcttcatctctgtactatgctatccatgtttccctcattaactactgtatccataaatccctccttcctctttcttctccagtgcccatactacaagcactatgcaaggctctctgctaaacaatctctacccaaagtccctaggagaactcatttattttcaaggcctcaacttagctaataaccctcaaaataatatcaaccactatcacctgcaccatgcatgttcagcatctatgatcacttctacttgtatgttccatatcacctcaaattcaacatggcccaaattaaactcattttatcaacccataccaacattccctataagtagtttcaccatctcracttcagcttccatcaatatcaccacatgcaagtcccaaaacggcagatatcctccttatatttctaatttatcactttctctcatactgacccttcacctcactattccacttccaccac

SEQ ID NO: 99105 - DNA, 597 bp, Homo sapiens
ccatcacttcacacttatctttttttttttgcaacatttaagatactctctcagtaattttcaaatatactatgctttttgttaactacagttaccgtgctgtacaatatatttccagaacttattcatcctctctaactgaaactttgtaccctttgactagtatctccccattcccaccctgcacctctcacccacccctttctcctctctaagttcaatgttttcagattccacgtgtaagtgagatcatgtggcatttgtctttctgtgcctggcttatttcacttattaataaataaactaagattcaaagctgttggggttttgtagctttcttgtaataaataatagccaattagttatcctgcaatgggcgttaggactcagacatttctctgtccatacttgaactcctataaaccttattacccagcacgttgtcttttcacagcctgatttatgctgtggatttgattgtttcctaggtatagtggaaaaagagyatctcttaataccattcatttattcagtgcatctttacttagaattttcttcaaacacggatattaagctgccctaagtggtctgtgtggc

SEQ ID NO: 99106 - DNA, 533 bp, Homo sapiens
cacacacacagcataaaaggacacaacagtgtgctggagcagtgtgctggaacaggttggcaggagcttcattctgctctggggctctctcccccgtagccagcctcttccttccatgtacacacgtaccagcaagccatcatgaaaagccacttcctagcagggactggcagtcatgargttatgtagcaaagaacagcatctttagtaggttaactcagtcggaaagcacttctgaacaaagcaatcaggtggcatattgttactgccctccctgaagaactcatttaatgactcttagaacggtacaatttcctttaaagatccagatgcctactgtgctttaaactgcctgcacggcccatggttgacagcctcaacaagcatttcttgagcacccactgtgtgcctctcactgtattgggcctggtaagggctttatagcacacagcaaagacagcctgtgccaggcagggtgtagagcccatgtcactagttattacgggagcaactatgatgcaacttgcttttgc

SEQ ID NO: 99107 - DNA, 575 bp, Homo sapiens
caatttaattttctaaataaatgtttaattcagtgcccaactttttttcttactacaagtcacaaaattgaaactactgagcttttcacctgtagagttgctattctggcatagtctacagattaaacattaaacactcaactacatagcaagaatctggagctactgtttggagctgagtgagtatggactcactcagatggatgagggaagtcaatacagtttagttgtgggatacgggtttttaatcagaaaaaaacctggcttggaatactctgtcatgtattagctgcatgcattcattcatttatttcacatacctcaggtgccagtcacgtgtcagatattgagtttggctgtaggagtacaatagcaaccaagacagataaagaagaatgaaggaaartcacctgctttagttctctctgtcactctctgcccagcattcatacttgaaatcatttgattaaatatataatgagacctactatatactcaaagagatagaacttcctctgagtcgtcaaaaaaaaaaaaaacggtggtaacatgtggttagaattttcttttttttc

SEQ ID NO: 99108 - DNA, 557 bp, Homo sapiens
tggtagcatcctctttgtcatttctaattgtgtttattcagatctctctcttttcttctttattactttagctagtatcctatctatcttcttcatgttttcaaaaacctaacttctgggttcattgatcttttgaatgtttttttgtgtcttgatttccttcaattcagttctgattttggttatttcttgtcctctgctatttttggggttgatttttttcttgcttctctaattctttcagttgtgatgtcaggttgttcatttgagatctttataactttttgatgtgagcatttagtgctatgaatttcctctcaatactgcctttgctgtgtyccatagatcctggtatgttatatctttcttctcattagtttcaaagaacttcttgatttctgccttaatcttattacttacccacacatcattcaggagcatattttttaatttccatgtaattgcatgactttgagtaattttcttagccttgacttctgtttttattgcatcgtggtctgaaagtgtgtttgatatgattttagttcttttgcatt

SEQ ID NO: 99109 - DNA, 648 bp, Homo sapiens
tggatgaataatggatgaagaatgggactttcagcatatatcaaaagcaggacatgtcattataaggtcaactgtctctagtcatgcattccctgatactcagaggctcctcagtctttcttgtcaacttacacccttcctagtaggaatgatcrcaaacaatactatttacagcttcctgatgtctcagcacagactgggaactctaacacctcaaaccaagtaggattttgctgtttctgctcatagaacgcctgccatttaaagcttattatctgatagtatgttctgctgcacagctccaagcattgcatagtttctcctgaccccgtacggaaacttgattccttcaatgactttaaattctgactcctggagccttgaagactaaatttctcccttcacttttacaataatcccacaggtgtttaaggataaatgtggaaatttcctgagactttgcttctccaggcaaaacatcccttgttgttttgctcattcctcatgggtcatcgtttgtgatcctccgtctagacatgttccaaagaaagaattccccagccctgttcatgaggtttcccaaacactacaacagtgctcatgagtgagtgaatgaatgaattgaaaggaacaggaagaaaggaaggg

SEQ ID NO: 99110 - DNA, 540 bp, Homo sapiens
gatcacaaacaatactatttacagcttcctgatgtctcagcacagactgggaactctaacacctcaaaccaagtaggwttttgctgtttctgctcatagaacgcctgccatttaaagcttattatctgatagtatgttctgctgcacagctccaagcattgcatagtttctcctgaccccgtacggaaacttgattccttcaatgactttaaattctgactcctggagccttgaagactaaatttctcccttcacttttacaataatcccacaggtgtttaaggataaatgtggaaatttcctgagactttgcttctccaggcaaaacatcccttgttgttttgctcattcctcatgggtcatcgtttgtgatcctccgtctagacatgttccaaagaaagaattccccagccctgttcatgaggtttcccaaacactacaacagtgctcatgagtgagtgaatgaatgaattgaaaggaacaggaagaaaggaagggagggaagagagaagagtacagccaaaaaatgatctctggctg

SEQ ID NO: 99111 - DNA, 648 bp, Homo sapiens
tggatgaataatggatgaagaatgggactttcagcatatatcaaaagcaggacatgtcattataaggtcaactgtctctagtcatgcattccctgatactcagaggctcctcagtctttcttgtcaacttacacccttcctagtaggaatgatcacaaacaatactatttacagcttcctgatgtctcagcacagactgggaactctaacacctcaaaccaagtaggattttgctgtttctgctcatagaacgcctgccatttaaagcttattatctgatagtatgttctgctgcacagctccaagcattgcatagtttctcctgaccccgtacggaaacttgattccttcaatgactttaaattctgactcctggagccttgaagactaaatttctcccttcacttttacaataatcccacaggtgtttaaggataaatgtggaaatttcctgagactttgcttctccaggcaaaacatcccttgttgttttgctcattcctcatgggtcatcgtttgtgatcctccrtctagacatgttccaaagaaagaattccccagccctgttcatgaggtttcccaaacactacaacagtgctcatgagtgagtgaatgaatgaattgaaaggaacaggaagaaaggaaggg

SEQ ID NO: 99112 - DNA, 577 bp, Homo sapiens
gcacaacttcaaagaaactccacatttattgtctcatctagtcattatcataacacagcaaggtgggtggggatggttacatttttctcattctacagctctggatttgtgggaaataaatgcaccatcatcctactcaccttggaaaaatgaaggctgtggggatgcataacaatgataatagctaacgctcatgaatgcttaccacgtgctaagcacttttctaagcattatctatgtattaatccaattaatccccacggtcactgcatcaggtagcacagcagttatttgtgctgttcaccaaatacttccaggcacatggcagaattgcacttccctgcccccttggagtgaggtgcggccatgtggcttgctttgactgatgcagtgtgagcaggagagacatatgtcacttccagtgatggattaccagcttcatggctcagctttgctgtgctctctgctatgacaaccagaacagttccmgtgtctctccctatctcacctgaggtgggcaggacataccagcaattgggcaagttgagggtgatgctggcctgggtgtctgacccaa

SEQ ID NO: 99113 - DNA, 568 bp, Homo sapiens
ccatcaattatttaggactccatgatgatctcaggcactgacacctccctyggtctttatggcttttctgaagggaaaccatctggccttccttaacttgttcgtccctgggcttctctccctgctcgttaaggtgtggcggccacggagagagccaaaaccatcaatatttcacagccgtaattaaagtaagctgagagctgtcagcctcttgcaactgactcccttttccaaaacaagcacgtggcatcttgagcagggggcacagagggagaaatgggccgtttggctaaaattggggtggaggagtgagagagcccagcatttcatttaacaggacctcctgtggttataaacctgccagactggagcagcaaattccttggccctgcagggctggcagagaaggggggctggcctctcaggctctcttttgacaactcttgaaagggattagaagttgggcaatggggaactgctgcagctgatctgcatctaccagtctagtgggaattaatcctgggacctcagcaaatgcttcccaaatcaaggggcagggaatgggtgg

SEQ ID NO: 99114 - DNA, 578 bp, Homo sapiens
cttttcatttaaatgtcctttattccaagagatagagctaaaatttaataacaactaattgggattttattcctacattcactaagtgtaagtttccacattttcacaaaatattgaattcagtagtgaacaaaacaaaacagattcatggttttatctaccatatacttagctatttctattttattctcacataaaggaggttgacaacacaggaattttaaagctgaaagttagtggtrgactgaagtgggtaagggggagaacacaaaataaatagatggatgcagaagaggaaatagatcacctcatttgcagttgtaccctaatcaagccacttttgagtaaccacacattttgttctaaacaaaagagattatttgcttcccttctggcccaaagtcagattcttcttcctagtatgaactttcagcactttattttgattagttaagagaagtccaaaaatccatgctaaatatcaagataattcttagccttggcaattcaaaacaattaaaacttacgatgtttcctatggaggagttaagaaattaatctacttttcctaagtacag

SEQ ID NO: 99115 - DNA, 578 bp, Homo sapiens
cttttcatttaaatgtcctttattccaagagatagagctaaaatttaataacaactaattgggattttattcctacattcactaagtgtaagtttccacattttcacaaaatattgaattcagtagtgaacaaaacaaaacagattcatggttttatctaccatatacttagctatttctattttattctcacataaaggaggttgacaacacaggaattttaaagctgaaagttagtggtggactgaagtgggtaagggggagaacrcaaaataaatagatggatgcagaagaggaaatagatcacctcatttgcagttgtaccctaatcaagccacttttgagtaaccacacattttgttctaaacaaaagagattatttgcttcccttctggcccaaagtcagattcttcttcctagtatgaactttcagcactttattttgattagttaagagaagtccaaaaatccatgctaaatatcaagataattcttagccttggcaattcaaaacaattaaaacttacgatgtttcctatggaggagttaagaaattaatctacttttcctaagtacag

SEQ ID NO: 99116 - DNA, 578 bp, Homo sapiens
cttttcatttaaatgtcctttattccaagagatagagctaaaatttaataacaactaattgggattttattcctacattcactaagtgtaagtttccacattttcacaaaatattgaattcagtagtgaacaaaacaaaacagattcatggttttatctaccatatacttagctatttctattttattctcacataaaggaggttgacaacacaggaattttaaagctgaaagttagtggtggactgaagtgggtaagggggagaacacaaaataaatagatggatgcagaagaggaaatagatcacctcatttgcagttgtaccctaatcaagccacttttgagtaaccacacattttgttctaaacaaaagagattatttgcttcccttctggcccaaagtcagattcttcttcctagtatgaactttcagcactttattttgattagttaagagaagtccaaaaatccatgctaaatatcaagataattcttagccttggcaattcaaaamaattaaaacttacgatgtttcctatggaggagttaagaaattaatctacttttcctaagtacag

SEQ ID NO: 99117 - DNA, 331 bp, Homo sapiens
tagcaatgcatatatgcttgatggagcaagattcagtgaaggaattgaagaatgtttagtgcagctgaagaagaaagtagggagaagcaggaggggaaaaatgagactggagaagtggaaagaggccagatctcaagagctttgtagatttgttctgaaagcastggggagccactgaagagtacagagcaggagggtttggcaaggggaagtttgccttttagattgttcattcggtgtggcggatggatggaggggtcaggcctggaggcagggaggcttgcaatgagaccgctgcagtgatctggatgaaaggaggcgaatggcagaa

SEQ ID NO: 99118 - DNA, 584 bp, Homo sapiens
ctgcctctcctgggacttttacaactttgacttctgaattctgtgggatgtctgaaaaagtacagggtatgggtcttggctccaaaagtggcattaaaatttcaggagataccacagcataatgggaggaagctgcaaagtgtgggctctggagacagactacctggattgggtccaggctttaccatttcttttctgagtgaccttggacaagttgctttattcctctgtggctcagtttctttatctgtgtgacatgatagcagtayctaccccactgaattattgttctgagggatttgtttgcaccttgaaacatcatttattatctcatagtgtttgtggggcagaaatctgggagtggcttagctcagagcttctggctcaaagcctctcatgaggttgtagtttaacagttggctgtggttgccatctcatatgaaggcttgactgagttaagtgagtccaaactcactcctagggttgttggaagtctttggtcccattgagtcgtttttgaagtttttgtgtgcaaaatgttaaggagtacctggcacgtaataaatgacaagtcatatcaatat

SEQ ID NO: 99119 - DNA, 584 bp, Homo sapiens
ctgcctctcctgggacttttacaactttgacttctgaattctgtgggatgtctgaaaaagtacagggtatgggtcttggctccaaaagtggcattaaaatttcaggagataccacagcataatgggaggaagctgcaaagtgtgggctctggagacagactacctggattgggtccaggctttaccatttcttttctgagtgaccttggacaagttgctttattcctctgtggctcagtttctttatctgtgtgacatgatagcagtatctaccccactgaattattgttctgagggatttgtttgcaccttgaaacatcatttattatctcatagtgtttgtggggcagaaatctgggagtggcttagctcagagcttctggctcaaagcctctcatgaggttgtagtttaacagttggctgtggttgccatctcatatgaaggcttgrctgagttaagtgagtccaaactcactcctagggttgttggaagtctttggtcccattgagtcgtttttgaagtttttgtgtgcaaaatgttaaggagtacctggcacgtaataaatgacaagtcatatcaatat

SEQ ID NO: 99120 - DNA, 575 bp, Homo sapiens
aaacctgtaacttcactaaagtatgcccatatatagggttcagtactttctgcagcattaggcatccactgaggctgttggaacatatcccccagattaggggatagagggggctactgtatctctctaatcaagtgatcaaagttaacatcaccaagagtagaatgaacagacatcctatatmtctctctctctttgtttttttgtttttgtttgtttgtttgtttgtttgttttgacagaatctaactctgtcgcccaggctggagtgcagtggcatgaacttggctcactgcaatctctgcctcctgggttcaagtgataagtgattttcctgccttagcctcctgagtagctgggactacaggtgcatgccaccacactaggctaatttttgtatttttagtaaagacggggtctccccatgttggcccggatggccttgaactcccgacctcaggtgatctgcctgcctcagcctcccaaagtgctgagattacaggcgtgagccaccacgcctggccctgtgtctccttaacatcatgcactcaaaaggacacagcatcacttctgagg

SEQ ID NO: 99121 - DNA, 554 bp, Homo sapiens
ttccagtatgaaagaatgaactaaatttgtaaagaaagttcttagggtatacaaaatcatcagttaagtaataggcctataataaataagatatattcaccctgmtttttttcttctctctctctcctttttgtagcagcctccacaatgtactgtatatattcaaaaggaagttttctttttatttgtcctgacaaaaactaatgcaatcatctcagtgggctgagagtttccccaacagatatattatgacagtctgctgtcaggcttatgattgcaataattagtctattaatttaaaaaccaaaatggacaaatttgtatcttatatcctattattgtatctttatatctcttgcatatacattcttagggattaactttccagttaggatattttaacatctggattttatatttagatgtcttaaaacatatttgtaatgcataccttgatggatatatgtatatacgtatcttgcctttttatgaagagctctttacctcctcaacttttaaatccacttttgctacctagttgaacaaagttaata

SEQ ID NO: 99122 - DNA, 595 bp, Homo sapiens
tatgtattataaaaccttatcaattatgccaatggattaaatattcaagtaatatgataatactgatatttctgtaatccaaagcaccatggcttgatactgtgagagacactatgattaacacaaccaaagtttccccatagcttccmagaaatcaaacagtcaactattcttggaacaaaattgaactttgaatgcccttccttaatttatcctgtacaatctttaagccgcctcccatgttgcaatttttaataaaggcttgaactattgactttggttgatgtttctccttccacaatccttgtagatggttattcatcctgaggattcaagtgccatcttcaactgaatccaagtgtcacttcttttcatgtagaatgtatctataaccccttctggagattggcaaatttaccgagaatcattccagaagagaaaacaaatcaaaaacaaaaaatccaaccaagttttatatagggaatctaagaaacagatccttagaaaaagtgctgctaacctggtgtggctttcctgaaagtctgcaaatcacaaagaaacaaaaagcctaaccttctgtcacagcgagtttatc

SEQ ID NO: 99123 - DNA, 531 bp, Homo sapiens
atttagtggccttaaccaagggagagtataacagggtatggaaggttattaatggtgtaaagaatgctgacaaaggagctttttctctttaataacaatgcctaaagaagtgggtttcaagtaatttaaataaataatactgatatgtatttggagaactaccagaaatgatcttttgtagacataaagtctgatcttagttgaatctttgmtttctttttacccactcaccattctctccccttgtttcagtaatctaaataccatgtaagggcatgttctgaagcctgcttacctacccttctcaaatagctgcctactgctcttgctcttgtgagctcattttctgccttcactcatgttcttactgagggtatatgaggaagacctcattaaaacagaatcattatgtataagaagaaagaatcattaaatttaaagaaggaagcagagaagggaaggggatttattgcctcgcgtaactaagaaacccagtgggcattgtggcttctgacatgactgcatctggaa

SEQ ID NO: 99124 - DNA, 599 bp, Homo sapiens
agtgaatgttttcatgtttatgttaatcagaatgggaatcacctgtgatatctatggttctaaaagaatagaaataaatactaaagcatcacagattttattttataagtttatcctgtgtgctaatatttgaaaatttttttcaggtttgactagctttctctctacaattaattacatgcagacataagratgtattgatgatatttgctcaaagatttactccttaattttaactggcttttagtttaatatctactacattaaaatatataataattctctattatatgcaatatgctgtgggtaagttcagggtggaaatcaagatatatgagccaggtacttaggagcaactaattccaatttaggaatcatggaatgaaagagaaaacaaatcccttcttaaaagagtctcagggtttcaatatgtaaagaacaggcataaggaatagcaagaggctatacagagatcggtggggatttgttcagagtctaacatgcctggaaggtaggccagtgggctgtgagagggagtagagctagagtggacatcagagagaaaaggaccaaagactgaagataaaattggttacatt

SEQ ID NO: 99125 - DNA, 599 bp, Homo sapiens
agtgaatgttttcatgtttatgttaatcagaatgggaatcacctgtgatatctatggttctaaaagaatagaaataaatactaaagcatcacagattttattttataagtttatcctgtgtgctaatatttgaaaatttttttcaggtttgactagctttctctctacaattaattacatgcagacataaggatgtattgatgatatttgctcaaagmtttactccttaattttaactggcttttagtttaatatctactacattaaaatatataataattctctattatatgcaatatgctgtgggtaagttcagggtggaaatcaagatatatgagccaggtacttaggagcaactaattccaatttaggaatcatggaatgaaagagaaaacaaatcccttcttaaaagagtctcagggtttcaatatgtaaagaacaggcataaggaatagcaagaggctatacagagatcggtggggatttgttcagagtctaacatgcctggaaggtaggccagtgggctgtgagagggagtagagctagagtggacatcagagagaaaaggaccaaagactgaagataaaattggttacatt

SEQ ID NO: 99126 - DNA, 683 bp, Homo sapiens
aagaatgttaaatttgttattattattattattattattttagatggtgtttcactctgtcacccaggctggagtgcagtggcaacctccacctctagggttcaagtggttctcctgcctcactctcccaagtagctggtattacaggtgcccaccatcatgcccagctaatttttgtatttttagtagagacagggtttcaccatgtwggccaggctggtctctaactcctgacctcaggcaaactgcctgccttggcttcccaaagtgctgggatgtgtgagccaccatgcccggccagggatgttaaatttgtttttttaaaaaagcaagtttaagcacatatttactgaacatctactatatgcaaagcacttagacaagccctttcatactaaagtcttgtgtgtataaatggaagccaacagaagtcctgcaatgactttttggtggagggacatgggttcaactataaatagtatatattctatatacttatcaaattacattatatataattcattatcaaagaacagagattataacctggattggaattatatttgaggcaactatattcatggaaaaattttgcaaacccttttaaatggaataaaaccctaccttatctccaagccatttctagtagaatcaatgcttaatacagctttaaaaataaggtg

SEQ ID NO: 99127 - DNA, 574 bp, Homo sapiens
tagttttagggccctggggccagactgcctggcttcaaatcctgctgtgaccattcattagctgctgtatgaccttgggcaagtcacttaatctctttgtaccccagttgcctcatctataaaatggtgataatagaagtacctactttaaagggctatggggagaattaaataggttaacgaatgcaaaatgctcaaaagatttcctgacacatggaagcactccagaaatttgagagcttatttattattgtccattggacaatatggaacagtgtttgggagccctagctggatccagccctggctggatcccaaacctgtgtttcatcagctgtgtgatcttggggccgtcagattayttctctgagtttcactttcctcattcatggaacaagggtagtaatacctactcatagccattttgtgagggttaagtgagataatgtatggcactggtaatgtatgcagtgcctggccccgcaagagctcagtcgggaccagctgtgatgattaacacaggaatgaacacccagcacctagtaggtgcctggtcaatatttgtccctccacc

SEQ ID NO: 99128 - DNA, 585 bp, Homo sapiens
cacacccacacacacaaacatacacacacacatttggtcctcaaggtatgaggaggtatactgatcactttccagctgtgagaccttggataagttattttgcatttttgcacaatgcgactaacagtagcccctacctcctaaatgcatcaatataaagagtttgataaaggcagctattatatactagtcctgtggtcagatgaaaacaccaaggctcagagagtttaatctacctgcccrccttccacagctgataaacaaacattactcagtacctgctgtgtgcgggccacagtgctaggggctgggccatattcagagcaaacatggcccctttctcagacggccgaaacagcccagtatccaactctaaaggctatgactttgccccagcatgggcagcagagcatggacaggtcatgggagacttccctagggaaattcctccatctggcttacaaagcacaaagacgggttttgcagatggaaaagttgagcaggagtgtttcaggcagggagaacaatgcacgccgaaaacgagggcacggacctttttctttcttgttctgtctggggaggagc

SEQ ID NO: 99129 - DNA, 599 bp, Homo sapiens
caatatttatcaaaacaatcaccgaactttaacattgctcataccctttcacctggttaattgtaataacaaaaattataaatcacttaacgatctaacaataagaagttgataatttttaaaactatttttaaatggtgaatattagaaaaaatcacattcagaaagctgcttggtggtttcagtggacacagttcttcttgtatatagagaatttaataattyataaaccacaaatatcatatcacttgtgactctacctgctcagggaaaggtaggactgagaatgtacccattttgcaaattttgaaatattctccataagtttagaaagtctgcctgtagaaagaatctggtaagcagttgtgactggaaaaattctaaggcagccctcaagaatcccacagcctggtgtacgcatcctctataatcatctcccttgagagtgagttggacttatgtatgtaagataaccctccatgattatgttacattatatggcagaagggatttttcagataaaattaaggtccctaatcagttaactttgagttaataaaaaagaagcctatcctaagtgggcctgacctaattaggca

SEQ ID NO: 99130 - DNA, 508 bp, Homo sapiens
tagaacatgatttgagatatatttgccatctctggtcacaattraagagaaacagtaacttcatattactaccagatattcatggaaaaagcccagttttgtggtacaagctgtaaggcagcaggaattcagagggaagcttcacggaggaagggacttatactggctgtgaacattcatgcagaatttaaaagagaaatagtgaatttggtagtgaaacaactacttttaaaaagtatttatttatacactccctaaaataatctaacttgtctccattaataagtctttattaatacgtgccacaccagcattagtgattaggaggatgggtcttgaaagcaaggtagatctgaatcctaaccccgacttcatcactgaatgtctgggagaccttgggccagttaaccagcatctctaaatttcctcatttgtaaaactggcaagtaacagaacccaatgcatagtgttattccgaggactaattgaagagattcctataatgtgc

SEQ ID NO: 99131 - DNA, 508 bp, Homo sapiens
tagaacatgatttgagatatatttgccatctctggtcacaattgaagagaaacagtaacttcatattactaccagatattcatggaaaaagcccagttttgtggtacaagctrtaaggcagcaggaattcagagggaagcttcacggaggaagggacttatactggctgtgaacattcatgcagaatttaaaagagaaatagtgaatttggtagtgaaacaactacttttaaaaagtatttatttatacactccctaaaataatctaacttgtctccattaataagtctttattaatacgtgccacaccagcattagtgattaggaggatgggtcttgaaagcaaggtagatctgaatcctaaccccgacttcatcactgaatgtctgggagaccttgggccagttaaccagcatctctaaatttcctcatttgtaaaactggcaagtaacagaacccaatgcatagtgttattccgaggactaattgaagagattcctataatgtgc

SEQ ID NO: 99132 - DNA, 508 bp, Homo sapiens
tagaacatgatttgagatatatttgccatctctggtcacaattgaagagaaacagtaacttcatattactaccagatattcatggaaaaagcccagttttgtggtacaagctgtaaggcagcaggaattcagagggaagcttcacggaggaagggacttatactggctgtgaacattcatgcagaatttaaaagagaaatagtgaatttggtagtgaaacaactacttttaaaaagtatttatttatacacyccctaaaataatctaacttgtctccattaataagtctttattaatacgtgccacaccagcattagtgattaggaggatgggtcttgaaagcaaggtagatctgaatcctaaccccgacttcatcactgaatgtctgggagaccttgggccagttaaccagcatctctaaatttcctcatttgtaaaactggcaagtaacagaacccaatgcatagtgttattccgaggactaattgaagagattcctataatgtgc

SEQ ID NO: 99133 - DNA, 574 bp, Homo sapiens
tagccctgcttggtattaagatggtttttcaaacctacaaaacttttaaaatgtggttttggtatttttttattatactttaagttctagggtacatgcgcacaacgtgcaggtttgttatgtatgtatacatgtgccatgttggcatgctgtacccattaacttgtcatttacatcaggtatatctcctaatgttatccctcccccctccctctaccccatgacaggcccgggtgtgtgatgttccccaccgtgtgtccaagtgtaaaatgtggtatcggtatttgaagagacagaaggacaaatggaacaaatagaaaatccagaaatagatctgatcacatatgaaaatttagcatttaataactgaaaagtgtaaaattaatattttttattaattcagattcagcatctgaaattagttgggaaaagatgaatgttttaataagtggtattgagatacctggtaagtcaaatggaaaatgatcaractggatctattcctcactccatataccaatataaattccaaatgtgtcagatttaaatgtaagactatggccaggcacagtgg

SEQ ID NO: 99134 - DNA, 574 bp, Homo sapiens
tagccctgcttggtattaagatggtttttcaaacctacaaaacttttaaaatgtggttttggtatttttttattatactttaagttctagggtacatgcgcacaacgtgcaggtttgttatgtatgtatacatgtgccatgttggcatgctgtacccattaacttgtcatttacatcaggtatatctcctaatgttatccctcccccctccctctaccccatgacaggcccgggtgtgtgatgttccccaccgtgtgtccaagtgtaaaatgtggtatcggtatttgaagagacagaaggacaaatggaacaaatagaaaatccagaaatagatctgatcacatatgaaaatttagcatttaataactgaaaagtgtaaaattaatattttttattaattcagattcagcatctgaaattagttgggaaaagatgaatgttttaataagtggtattgagatacctggtaagtcaaatggaaaatgatcagactggatcyattcctcactccatataccaatataaattccaaatgtgtcagatttaaatgtaagactatggccaggcacagtgg

SEQ ID NO: 99135 - DNA, 647 bp, Homo sapiens
acagcaacaatttctaaaaatcaataaatgacctgtaaatcattatctttttaatgaactatgtgcatttcagcttgtatcacttggtaagcagtttaataatttagattagagaattataaaatatacattgaaggccgggcgcagtggctcacccctgtaatcccagcactttgggaggccaaggtgggcagatcacctgaggtcaggagttcaagaccagcctgaccaatgtggtgaaaccctgtctctactaaaaatacaaaattagccgggcgtggtggcacatgcctgtaatcccaggtactcgggaggccaagacaggagaaatgcttaaacctgggaggtggaggttgtggtgagctgagatcatgccattgcactccagtctgggcaatgagcaaaactctgtctcaggaaaaaaaaawatatatatatacacacacacacatatatatatatttaatgtttttattaatatattgatttatacattagcgtattactgtaatgcttaagtatttttaatgccatccctataaacacttataaaaaggatattttcataagtatgtatgagagtgagctagcaaatttatgatcatctgagtatggtgttcaagcaccactactttgcacaaaacagc

SEQ ID NO: 99136 - DNA, 554 bp, Homo sapiens
tcagaggaagaaggtgatcagcaacacagacccacaaagctttggctaacctggcagggcattctggaatgaatattccctatcagagtctcttgcaggctgccctggaggagcaagaccagcgaaatggcttctgcagctgaagctgatgctggagctgatactggctgctagcttcactcactctctgcagctggccctacgtccctctgggaaggggggtctgcacagcacatttccacamcgcccaccttccctctcctcagacaactcagaagacctcatgaaacagggcagtggcattgcacaggatccgatgtggtcattccctccacctaggaggacaaactgagccctctgtgttcccactatgtggtaagggggaagatggcagggaagacccaaagaataattgtgtgtaaattagagggtaaaagataaaagcaccacaacaacctaggaagaaaaatgacagcttgcccctttccagatatctcttctattgtcttttcttcccatctttttcagtccaaactccacaataagaacaccag

SEQ ID NO: 99137 - DNA, 537 bp, Homo sapiens
ctgtctagtagagagaatgctaaaatggatgacagtagttcattctgggcctttactgtctgacctttgtcacctacctcttttctttcccatttccttatattatatatacttgamcttgtctattccaatctgacattgcagttttaaaataaaaatgaaatgccattctttgaactcataagcagaatttcagtgtaacattgtgagaagaatatatagtctttgagataaaataagccagagctcaaagcaagaccctaacaactctctagcagtgtgatcttgggcaagttattaaatttctctgagcctgttccctcatttgtggcatagggcaaagaactcacttaatcccctttatagctcagaaaactgtgttaaagcacccagtacacagcttggtacataaatgtggtcaatattgttttagctacatatcaatataaatcaattttatgcttattactatcattattttatacactcagaaatgttcatttagattattgttcatcagcagcataataaaatacc

SEQ ID NO: 99138 - DNA, 582 bp, Homo sapiens
acatttacctatgcaacaaacatgcacatcttgcacatgtactcccgaacttaaaagttttaaaaatgtattttcataattttctactattctaaaatttatgattaataaccacatgaattggccaataagaatcacataaaattatcattcttgattcatttttcctargaattgtgggggcttcaggtcaactacatatcctataaactcacacacacacacaaaaactggaatttaacactaatatggagaaatggaaaacaagaaagggattaaccactccaatcctttaaaaaaatgttcctgtaatgtgttcaaccacaaatcttttgggaaaaaaataaaatgaaaatacagtttctttaaaaaaaatacaagtgtaaatgttttacataaccaggaattgtcagtattattacttatttacacacgaaactgatatgtgccactatacaataaaacctgaaatacaacgaaatgcattttccttcaatcattcacagacattttccttcaattattacagttgtctgccaaatttgatgaactcaatttcactcgatatcaactgtttcaatc

SEQ ID NO: 99139 - DNA, 605 bp, Homo sapiens
gcagtgtgctcaaaaataaactgggaattacaactacccaagcccctgtaacaagccaactgaaggtggaccctagtgcagacccagcagccttgtgataaagctgcaacccctcttcactacaaattcagagggcatctcatcactctaagggcccaacaaaagaagatctttaccttrtaaaatcagtatatgaaaccctgaagaggtgtttgctccatcaaattcagacaccaatacaaagctatattgtgcctattgccaatgcttctattttaatgtagcactggaagtatgtggccgaagaactagtcaaagaaataaaaaaatccattgaaattgaagaaaaataattaaggtgctgctgtttgtagatcatacaatcttatatttaaaaaaaaccataaacagtacattaaaacctgtctaaactaataaatacactcagtaagttagcaaaatataaaattaacatacaagtatatgtatggtttcacacacttaaactatctaataaaatagaggaagaaaataatcttatttatttatttattttgagacagtctcagtctctctccaggctggagtgcaatggtgcgatctcg

SEQ ID NO: 99140 - DNA, 605 bp, Homo sapiens
gcagtgtgctcaaaaataaactgggaattacaactacccaagcccctgtaacaagccaactgaaggtggaccctagtgcagacccagcagccttgtgataaagctgcaacccctcttcactacaaattcagagggcatctcatcactctaagggcccaacaaaagaagatctttaccttataaaatcagtatatgaaaccctgaagaggtgtttgctccatcaaattcagacaccaatacaaagctatattgtgcctattgccaatgcttctattttaatgtagcactggaagtatgtggccgaagaactagtcaaagaaataaaaaaatccattgaaattgaagaaaaataattaargtgctgctgtttgtagatcatacaatcttatatttaaaaaaaaccataaacagtacattaaaacctgtctaaactaataaatacactcagtaagttagcaaaatataaaattaacatacaagtatatgtatggtttcacacacttaaactatctaataaaatagaggaagaaaataatcttatttatttatttattttgagacagtctcagtctctctccaggctggagtgcaatggtgcgatctcg

SEQ ID NO: 99141 - DNA, 555 bp, Homo sapiens
ataaagtacccagaaacattccacaaaaaagggaaataaaacttttagggtatattatgaattatgtattaaagttatactcacaaaggaagaccaagtttctgtagttctgaaacttcacatccctatataaattccgctgtgcagtgtccaggcaatgccactcctccagagagaattctatggccacgtctctaaactgcaatggtccctggaaaacacacacacacacatttttaccaagtggccataggtggaatttttaatttgacttaaggtgaaatgaaagatwaaagacaaatggttctgacttataagactcactaaaattatccaataaaataattttcatcacagaaatattatttaatgtattctctaactctgagaaaaaacagcagcataagatacacaacatcagttcatatgtgatatttttctagataataaagtataaaattaaaggcataaacgtacatttttgagtgctatttcatcatatgaaatgagttgtgaatatttttcaaaaggaaaagatgagttagaaggcacctc

SEQ ID NO: 99142 - DNA, 635 bp, Homo sapiens
acaggccctgtgaccaccctttagtgcaaaggtggaacttaactctcatgaatgtgttttgaagcaatcatacttgattctggtctcaccttagagccatatgaggcccttcgttaaaacaacatggatgcttccacccagaacaataaacaagctgtggagagggcataagagatttctgcaaattrgccatgtgatcctaatgagaagcctgggctgataatcactaagttaatcattgcctctcaagctttaacgagcttctaaatcacttggtaattttggccccactttatgtaaagtgattctggaagcttgaaaagggtccaggaatggttgttttatacaagtcccctgtgaatgctgatgttgctcccccgggctcattattagcattagtcagagaagcaggcacagctcagggtcccttacccttagcacttttgtcacaaccaaatgcttctggcacaaataaggacaacccatctccatcctaaagttttatattatttgctggctctttaaagtttacagatgaaacagagacctggaatctacacttcaattagcagcaattacaaaaggatttgtaaagacaacaagagagggacagagagtgggctgatacaaagttg

SEQ ID NO: 99143 - DNA, 635 bp, Homo sapiens
acaggccctgtgaccaccctttagtgcaaaggtggaacttaactctcatgaatgtgttttgaagcaatcatacttgattctggtctcaccttagagccatatgaggcccttcgttaaaacaacatggatgcttccacccagaacaataaacaagctgtggagagggcataagagatttctgcaaattagccatgtgatcctaatgagaagcctgggctgataatcactaagttaatcattgcctctcaagctttaacgagcttctaaatcacttggtaattttggccccactttatgtaaagtgattctggaagcttgaaaagggtccaggaatggttgttttatacaagtcccctgtgaatgctgatgttgctcccccgggctcattattagcattagtcagagaagcaggcacagctcagggtcccttacccttagcacttttgtcacaaccaaatkcttctggcacaaataaggacaacccatctccatcctaaagttttatattatttgctggctctttaaagtttacagatgaaacagagacctggaatctacacttcaattagcagcaattacaaaaggatttgtaaagacaacaagagagggacagagagtgggctgatacaaagttg

SEQ ID NO: 99144 - DNA, 537 bp, Homo sapiens
ggagtgctcaccaggttgattttctgcctgttgaaaagggagtaagtggtgactagaggctttttcactttcaccttattcacaggaattctcttccatgaggattctgccatatataggaagcacatgatcatgactgacatgtgtaccattttcagtasgtgcgtatgacttttgccctattagctttttcgagttgaataagctcactcctctgtccaaggctctattccttcccagcaaagggcttctttaatacagtttttctaatactgagtgaagaatgaatgaattatgtactaaatacttaactctaaaatcatatttacatagatgtttacttgtggttattctctgtgagccagcaagtgttaacctaggtttacagatttctccaatttcatgaaaatcaaactccaaactctcccgagacagctttctggtgaaagcctggtgcctgaattcttacccctgctttgggtgctgatgttttaactcattcagattcccagacttctactacaaagaccaggaata

SEQ ID NO: 99145 - DNA, 642 bp, Homo sapiens
gtgctttacaatgttacactggctatgtcattaggtgattggaattttttagcactaytaaaatgttatgagagcactgtcacatatgtggaccatcactgaccaaaatgtctttacacagtgcatgactgtactgccaaccaagaatgttttacctgccaaaaatggccttcagaaatgaaggagagataaaaacttccttggacaaacaaaagatgaggggcttcatcagtaatggagctgatttataggaaatagtaaattcttcagcttaaaagaaaggacacttagtaacatgaaaccatatgaaattataaaacccactggggtaaaggtaattatatactcaatccagattaccctaatactgtaacagtggtatctaaataacttatctctagtgtaaaagattaaaagataaaaatattaaaaagttataataatttgttaatatacaatatagaaagatgtaaattgtgacatcaaaaacataaaatgtgggaaatggaagagtataaattgtttgtatgcaatcaaagctaagctgttaacagcttaaaacagactattaaaactacaggatgttttaagcttcatagtagccacaaagcaagaacctatattatggagaaaagagaaaga

SEQ ID NO: 99146 - DNA, 642 bp, Homo sapiens
gtgctttacaatgttacactggctatgtcattaggtgattggaattttttagcactattaaaatgttatgagagcactgtcacatatgtggaccatcactgaccaaaatgtctttacacagtgcatgactgtactgccaaccaagaatgttttacctgccaaaaatggccttcagaaatgaaggagagataaaaacttccttggacaaacaaaagatgaggggcttcatcagtaatggagctgatttataggaaatagtaaattcttcagcttaaaagaaaggacacttagtaacatgaaaccatatgaaattataaaacccactggggtaaaggtaattatatactcaatccagattaccctaatactgtaacagtggtatctaaataacttatctctagtrtaaaagattaaaagataaaaatattaaaaagttataataatttgttaatatacaatatagaaagatgtaaattgtgacatcaaaaacataaaatgtgggaaatggaagagtataaattgtttgtatgcaatcaaagctaagctgttaacagcttaaaacagactattaaaactacaggatgttttaagcttcatagtagccacaaagcaagaacctatattatggagaaaagagaaaga

SEQ ID NO: 99147 - DNA, 473 bp, Homo sapiens
atggagtaatagatcacatactttattcatcagaaagctgggaggcgccaggtgcccacatgttaaatattaactgtgctaaattcgatcatgtagaagtttgtggccaatagtattatattaaaataaatttggtactgtaagcaacttggacaaaagttgtggaaccgaggcagaaactcactcttgagtggtcagtttcttgcacactgggttatgtgtcactggcattttagggcattttcactttrcatctgcctttgtttggtgagaaactttgcagttttctgggctgcagggggcattggagggactgagaggacactcgactttggagctggggatggggaggcctcgttacaagccttgctttgctaccagtggatttagaaaaggttacattgccactctgggcctcaggctcccatttctaggaggtaaagtagtctatggctgtcttactctgacgtttg

SEQ ID NO: 99148 - DNA, 581 bp, Homo sapiens
ctaggaaggactggaattcccaagggaaagggtgtggctgagagtcctcccagggctgtgaaagaggagacactcactcccttctcccctcagagtcctggaagctgagcacctcccctctcctctggcccccagctccggacatccgagaaccgcaacctagaatccatgcacacttgcttcatcggtcctaaaatacactttttttggcgggggtgaaggggggaggatatccttattcaaagtggaggctagagagatgtctaagacgtactgcattagctaaattagtactgatttgtcctggggcacaattacaaggtttaaggttacagtaccaggagtttkagaggcaattataattcaaagacagctagctaaggggtggctgggagttacaatcagaacaagggaaagtttagtggaagatgctgtttgtcagtgaatttgaaagcatgtttttctttttctgtgtgtgcctttacctttttctctctttctcttggtctttctcagatcgctctgtggtctatcctggactttatcattctttacaattaagcgccaggaataaagttcac

SEQ ID NO: 99149 - DNA, 560 bp, Homo sapiens
ggataacaattaaaacaatattatgatactctttcaagccatcaatggcatacatttttaagaaatgcaattcccagtgccagcaaaggagactgagtgtggagttaggggaagaataaatagtcaattaagaagcaatttcacaatatgcatcaacagcttttaaatgcttatatttttgatttaatgactttacttttacaaataaaactattttcaaaatgtactaaattgcattatagaaataacacaaaacgtgggcaagatttaagctcagaggttcccacaaaatcgttcataaaaccataargagagcaagaaacttctaagtgtccaacaatagctagaggatggtgaatcgatatcctcccacttgggaatattttgcaggcattaaacatgtttacaatgaggcttgacagatgtgggaaattgtgtgtgacataatgttaaacagaatgagaaaaatatttacaacgcctgacagatgaacagttaatatgcatcatatgcaaagagtatttacaaatcaaaagaagaaaaagacatgttacccaatt

SEQ ID NO: 99150 - DNA, 560 bp, Homo sapiens
ggataacaattaaaacaatattatgatactctttcaagccatcaatggcatacatttttaagaaatgcaattcccagtgccagcaaaggagactgagtgtggagttaggggaagaataaatagtcaattaagaagcaatttcacaatatgcatcaacagcttttaaatgcttatatttttgatttaatgactttacttttacaaataaaactattttcaaaatgtactaaattgcattatagaaataacacaaaacgtgggcaagatttaagctcagaggttcccacaaaatcgttcataaaaccataaagagagcaagaaacttctaagtgtccaacaatagctagaggatggtgaatcgatatcctcccacttkggaatattttgcaggcattaaacatgtttacaatgaggcttgacagatgtgggaaattgtgtgtgacataatgttaaacagaatgagaaaaatatttacaacgcctgacagatgaacagttaatatgcatcatatgcaaagagtatttacaaatcaaaagaagaaaaagacatgttacccaatt

SEQ ID NO: 99151 - DNA, 716 bp, Homo sapiens
tatacacactttttttactacatggcacgggttggggraccagtacccctaacccccatattgttcaggggtcaactatatttactaatacaaatattcctcttactattactttagcttgatctcataaatttgatatggtttgtttttattttaattttgttctactttttttttttttctgagacggggtctccctctgtcacccaggttggagagcagtggaaagatctcagctctttgcatcctttgcctcctgggttcaagtgattctcatgtttcagcctcccaagtagctaggattacaggtgcacaggtgtacaccaccatgcccgaccaatttttatatttttagtagagacagggtttcaccatgttggccaggctggtctcgaactcctgggctcaagtgatttgaccacctcggcttccaaaagtgctgggattacaggtgtgagccaccatgcctggcctgtgttatgtatttttaataagacttcctcttgagccatggattatttagaaatgcattgtttaatttccaattattggaggttttcctgttgcctttctcttataatttctagtttgattccatcatggtaaaaaaaatagtctgtatgatttaaaagaatttaaaatttaaaattcttttaaatttgctgaggtttgtttcatgactcaagatatagtctaccttggtaaatttttcaagg

SEQ ID NO: 99152 - DNA, 710 bp, Homo sapiens
gactgagtgatatgatggactttggagattagggggagggtgggaagtggggggatttaaaaacctacatattgggtacaatgtacactactcgggtgacaggtgggtgcactaaaatcttagaattcagtactatagaattcattcatgtaaccaaaaacctattgaaccccaaaagctactgaaatgaaaaaacaataatgatcrtcctttgactttgaatccaatggacatggctcttcattggataaggaagcctttgaaatccaaatggcagagttgcatgaggccctccttccccacctctcctccccactaggacctttggactcttctgcctgtgtccagtgcaaatgctttgtaactctgcctcttggcttaatgcctgccttaattagctagtctgcctcatcactgtctgtctgtgatgggcccataactctgtgatggggaccttttgtctaacagactcactctgtcccaggcctaaatgggagctctatgcagatggagtgcttaataaatggttttgatgatggtgggatggaggcctagaaatgacggctgcaagaagagagttgctaaacccgcagctcttctgtttggccacagtccctgtcttgataatttttgacagtaaaagctgcccttattcagctgctggttgacttcatgggaccttctctaaggtgcaggccagtgtccaagtt

SEQ ID NO: 99153 - DNA, 710 bp, Homo sapiens
gactgagtgatatgatggactttggagattagggggagggtgggaagtggggggatttaaaaacctacatattgggtacaatgtacactactcgggtgacaggtgggtgcactaaaatcttagaattcagtactatagaattcattcatgtaaccaaaaacctattgaaccccaaaagctactgaaatgaaaaaacaataatgatcatcctttgactttgaatccaatggacatggctcttcattggataaggaagcctttgaaatccaaatggcagagttgcatgaggccctccttccccacctctcctccccactaggacctttggactcttctgcctgtgtccagtgcaaatgctttgtaactctgcctcttggcttaatgcctgccttaattagctagtctgcctcatcactgtctgtctgtgatgggcccataactctgtgatggggaccttttgtctaacagactcactctgtcccaggcctaaatgggagctctatgcagatggagtgcttaataaatggttttgatgatggtgggatggaggcctagaaatgacggctgcaagaagagagttgctaaacccgcagctcttctgttkggccacagtccctgtcttgataatttttgacagtaaaagctgcccttattcagctgctggttgacttcatgggaccttctctaaggtgcaggccagtgtccaagtt

SEQ ID NO: 99154 - DNA, 589 bp, Homo sapiens
ctttatctatggctactgttattagaacaatgtaaatgtatttgctgaaagagagcacaaaaatgggagaaaatgcaaacatgagcagaaaatattttcccactggtgtgtagcctgctacaaggagttgttgggttaaatgttcatggtcaactccaaggaatactgagatgaaatgtggtaaatcaactccacagaaccaccaaaaagaaaatgagggtaattcagcttattctgagacagacattcctggcaatgtaccatacaaaaaataagccaactctgacatttggattctaccatagactctgtcattttgtagccatttcagctgtcttttgattaatgttttcgtggcacacatatttccatccttttatgtttaatctgtttaaaacaagttcctagtagacaccatctggttgagtcagttttttttatggtgtattttgaacccattctgatagtctcttttaactggaagatttcaattacttacgttaatgtaatkattaatatgttaggatttatcctcagtcagccagtttgttatgtcttttctattctactgttatcacatttgtaccac

SEQ ID NO: 99155 - DNA, 563 bp, Homo sapiens
tgttttgtggtataatgaaatgttatatttctgtagttccaagttaatagttggaattagcagtgaaagaattatttactccttaaggcataggggtaaatgtttctatacccagtckccccacattttgtaagctatcttctctgaaagctcttggcctatagcccaagatgtcttttattcccaagtgtgcagttaaaatagatgactctggatttaagggaggttccaagatggccaaataggaacagctccagtctacagctcccagcttgagtgacacagaagatgggtgattttctgcatttccaactgaggtactgggttcatctcactggggcttgtcggacagtgggtgcagcccacggagagtgagccgaagcagggcggggcaccacctcacccgggaaatgcaaggggttggggaattccctttcctagctaagggaagccatgacagatggtacgtggaaaatcgggacactcctaccctaatactgtgcttttccaatggtcttagcaaacagcacaccaggagattatatcccacgcctggctcggag

SEQ ID NO: 99156 - DNA, 405 bp, Homo sapiens
tttgtggtataatgaaatgttatatttctgtagttccaagttaatagttggaattagcagtgaaagaattatttactccttaaggcataggggtaaatgtttctatacccagtctccccacattttgtaagctatcttctctgaaagctcttggcctatagcccaagatgtcttttattcccaagtgtgcagttaaaatagatgactctggatttaagggaggttccaagatggccaaataggaacagctccagtctacagctcccagcttgagtgacacagaagaygggtgattttctgcatttccaactgaggtactgggttcatctcactggggcttgtcggacagtgggtgcagcccacggagagtgagccgaagcagggcggggcaccacctcacccggg

SEQ ID NO: 99157 - DNA, 598 bp, Homo sapiens
tctgagaagcacgggtaagttggtgagctgtgctggagggaacgaggcccgccttccacgtgctcccctttcagctggtggcaggaggctgggccccggtgactccccaggagtgcctccagctctgggcttctgcagcatttcattcctccctcatggggcttgttggaatctgtgtgtccactgaatgggggtcatcatttcaaccacagcacccaagcacctcctcagcagggagctgtctttgtgcaggatgatgctggatacgctgctctgcactcagcgggagaggcaggtgctgctgggcgggtgctgcagggtggcaggtgccgctgggcaggtgcacaggccccctcctcagagccyggcatgctggccctgccagaaggatgccaggaagcaagaagtgggggcacagaaacgtgtggctgtggacaggcagagaggagtgcgagggcgttctaggtgagcaaaggctggaagcagaaatgtgctggtgatgagaggcccatggacatgccggggaggagggctgagtggaaagggcttggacaccaggctgggaggtagaggaaggagaaaaaaatgggcctggatt

SEQ ID NO: 99158 - DNA, 585 bp, Homo sapiens
ttccatttaacagttagcttatgttgtcaaaagatgattaacgcactttcctcttttttgagcttcccaagastcaaagatgtcttcagaacaaagtgtaaatcttttacattggcatccaggtttttctaatagaaacctagcctctaggatacttccaagaacttcttaactcattctgtgctccctaaaaataacctattaatgtggcagcaaaagcatgttgtggcatatctcttttgtttttgatactgtttgccacttttgtttaattcttacctcctctccatatagatagaacatacaagtattttaatattcagaataatttccacctcttattgaattacacccaaggttatgttgtgtctatttagggggaaataataagattttaataattattttgtgacccatatatggactactaacaaaaattgagtttttctcctatcttaaactctgtagcattaaaactcatgctagcaaaatgaataataaattttggtctgaaaatccaaagtgaattctggctgcatctgttatagagatttggagctataattcatcaaaaacgaaacaaca

SEQ ID NO: 99159 - DNA, 585 bp, Homo sapiens
ttccatttaacagttagcttatgttgtcaaaagatgattaacgcactttcctcttttttgagcttcccaagactcaaagatgtcttcagaacaaagtgtaaatcttttacattggcatccaggtttttctaatagaaacctagcctctaggatacttccaagaacttcttaactcattctgtgctccctaaaaataacctattaatgtggcagcmaaagcatgttgtggcatatctcttttgtttttgatactgtttgccacttttgtttaattcttacctcctctccatatagatagaacatacaagtattttaatattcagaataatttccacctcttattgaattacacccaaggttatgttgtgtctatttagggggaaataataagattttaataattattttgtgacccatatatggactactaacaaaaattgagtttttctcctatcttaaactctgtagcattaaaactcatgctagcaaaatgaataataaattttggtctgaaaatccaaagtgaattctggctgcatctgttatagagatttggagctataattcatcaaaaacgaaacaaca

SEQ ID NO: 99160 - DNA, 662 bp, Homo sapiens
tggccgttctcactggtttgagatgatttcttgttgtggtttttcttttgcatttctctaatgatcagtgatgagcatttttttatatgcttgttagccacatttgtstcctttgaagaattttttcatttcttctagatttttttttatgtgcatagcagacttcagtatatttttgtgaggttagtggtaatgtctctttttctcatttctaattgtgtttattcgtatcttcattaacctagctagtagtttatttccttttttttttttttaaatagatttaatgccaggatttcttgatattttgtagtttttcatgtctaaatctccttcagttcagatccgattttggttacttcttgcctttgctagcttagggactgatttgcttttactgctctcagtcttttatttatgatatcaggttgttaaactgagatctaactttctgatgtgaggatttaacgctatgaatttttcttttaacactgccttagctgtattgcagggattctggtattttgtatttttgttcttatttgtttcaaaacacttcttggtttctgctttaatttcattatttaccaaaaagttattcaagtgtaggtgtaggccatttaatttttatttaattgtatggtttccagttgttttattgg

SEQ ID NO: 99161 - DNA, 471 bp, Homo sapiens
tttttaggcaaaagttagaaagacttttgtggtttgataggctgttcctatagcatatgctccagaacaaaaaatgaacttgtctcataaaggaactgtttagattccttggacaatgctgaggttcacatggagagaaaaaaaacaaaccaaatgcaaaggaggktatttactcagggtgaaatattctctcatacagtgccatgaatgtttattactgggggacagaaaggcccttactaagtaaaaatttagagagagactttgaaatctccctgttgataggaaattacaaaacaacaactctgagttacatatctgattactaagacactgactgactttactcagtatgattatatccataggctgtaaaaacgttcacaacattgcatacagagaatggataggagaaatgatagccacaaaaaaaagaagaagaaaatgaaatgaaaaaaaagactagaagtt

SEQ ID NO: 99162 - DNA, 471 bp, Homo sapiens
tttttaggcaaaagttagaaagacttttgtggtttgataggctgttcctatagcatatgctccagaacaaaaaatgaacttgtctcataaaggaactgtttagattccttggacaatgctgaggttcacatggagagaaaaaaaacaaaccaaatgcaaaggaggttatttactcagggtgaaatattctctcatacagtgccatgaatgtttattactgggggacagaaaggcccttactaagtaaaaatttagagagagactttgaaatctccctgttgataggaaattacaaaacaacaactctgagttacatatctgattactaagacactgactgactttactcagtatgattatatccataggctgtaaaaacgttcacaacattgcatacaragaatggataggagaaatgatagccacaaaaaaaagaagaagaaaatgaaatgaaaaaaaagactagaagtt

SEQ ID NO: 99163 - DNA, 595 bp, Homo sapiens
ttatgcaggatgcataagaattgaaatttcctgtaagaccttagtgctgatataagctcatgatcttacccattgccctaagcctgagagtcaacatatcttctgttgtctgrgtccaggtatgagagtcatccctgtgactgtgagctgggttcaaaaatgtgtcaacacctaacttgtggccagatccacatatgacattcataattccaactgtggaccgtgtttccactttagattctagacctcaccagtaggctctgttcctgtttgagggtgacaatcctaactgctggctgggtgtgtttaagagagccacaatctcacctgtgtgctgggtcctgctgtgacactctctgtgccacccaaggcctttatattataagcatgtgtagtaatcctctgtgaccttcgtacaagtaggggaaccaggaccttaccatttgccctaagcctagctatgtgaattaatatatctttttttttttttgctgattccagatacaagattcatcatcatgcctgtgagctgggtccaataatgaatcaccatcctacctgtggccaaatgcatatatgacagttacaactctaa

SEQ ID NO: 99164 - DNA, 430 bp, Homo sapiens
gggtctaagttcatgagtaacaatctcaatagctgacagaatttttgcaaaagagctaccatttcttctgcagactgtgttctgttagtgcagtcacagcctcatatgtgtgctgaattcttggtctgaagttcaccagcccacctgtggcccaggccatataggagagtcaattctccaactttcacagcctccatgtctgagattcagaacctcaacagtgggatatgtttatgtgggagaatgacaatctttactgtcacttgggcatgcattcaagacacattatctcacctgtgtgctgtgmactcctatgacactcaccatgtcacctgagggctttatacaatatgcaagagtggtgatcctctgtgaccttcgtacaagaagggaatccagaatcttttctatggttctaagcccagagtca

SEQ ID NO: 99165 - DNA, 559 bp, Homo sapiens
atggcagacatgtgtttgttatgtgatggtaaacatgcatgtcactaagctgttacaggtgacacattcatatgtaacttgttacaccayccaagtgactgcttgatgaaagagttttattttaagtctcttcaggcagactcctgaggtcttatttgcatctgacacaggcacagcatgtagaaggagaaaaaatacaccttaccttattagtcctgcattagatcaatagctgtttattaagtacctggtgtatgccaggcactgcacagcataggtgtcctggtaataaatggctggtaataaatgtagttgtcagaagaacacagtggctcatgcctgtaatcccagcactttaggaggctgaggtgggtgaataacctgagatcctgagtttgagaccagcctgaccaacatggtgaaactccacctctgctaaaaatacaaaattaacaggacgtggtgtcatgtgtctgtaattccagctattttggaaggttgaggctggacaattgcttgaaaccaggaggtgaagtttgcagtgagctgagattgcacc

SEQ ID NO: 99166 - DNA, 559 bp, Homo sapiens
atggcagacatgtgtttgttatgtgatggtaaacatgcatgtcactaagctgttacaggtgacacattcatatgtaacttgttacaccatccaagtgactgcttgatgaaagagttttattttaagtctcttcaggcagactcctgaggtcttatttgcatctgacacaggcacagcatgtagaaggagaaaaaatacaccttaccttattagtcctgcattagatcaatagctgtttattaagtacctggtgtatgccaggcaytgcacagcataggtgtcctggtaataaatggctggtaataaatgtagttgtcagaagaacacagtggctcatgcctgtaatcccagcactttaggaggctgaggtgggtgaataacctgagatcctgagtttgagaccagcctgaccaacatggtgaaactccacctctgctaaaaatacaaaattaacaggacgtggtgtcatgtgtctgtaattccagctattttggaaggttgaggctggacaattgcttgaaaccaggaggtgaagtttgcagtgagctgagattgcacc

SEQ ID NO: 99167 - DNA, 597 bp, Homo sapiens
ctctcatctggagaatgtcccttcctcaaaggctctactcttctctcttgctcttttctgtttcttcaggactcatgggtggacagtgagttccctatcactgaaagaaggtatgtgatatggtttggctctgtccccacccaaatctcatcttgaattgtagttcccataatccccacatgttgtggragggaccaggtggagataatcgaatcgtgggtgcagttatctccacgctgttctcatgaaagtgagtttacatgagatctgatggttttataaagggtttcccccttcacttggctctcattctctctcctgccgccctgtgaagaggtgcttctgccatgattgtaagtttcctgaggctccccgagccatgcagaactgtgagtcaattcaacctctttcctttataaattacccagtcttggttatttcttcatagcagcatgagaacagactaatacagtatttgatgatttgttgcctacctggtggcaatgtggtgaagggaaaggtgtttaactaaactctgcttttccttcccctctaatctaagaccttatatcagtatctaatgggaaccttcccatc

SEQ ID NO: 99168 - DNA, 628 bp, Homo sapiens
ggctgtgcttctgacccctgacagactacctaccatagagacatgattcgttcaccaaaaaaatactaactgaaaacctcctgtgtgcagagttcttcctgttaggcatatcaagggaaaagatgggcacaccaaggaaaaagtataaatgtkccaggacagggttctggtttccagaaataaatcacagcttacctattcaacagctaattttagctaatatttgacaatgtaagttagaacttccctcctgtgatggtcaggaatggagattcctgttctgtggactgaggggcttgcagaggtcatgttagtgcatgaactgactgatttggatttgtgtgcccttaaagagggggggttcaacaagacactaaagcagaatgctggcagactgagacccagtgaaaaagtagagtgaaaccctgaacaaaacctgccaagtatcaaatttttaccatgttctcattggaaagaatagtatgtgaaaaagtggtggtctttcacatggtgggaaatattcccacaggtgaaaaagaatgggcatggactctgtgattctgctggtcttctgtgtggtgggtagtgggagactttcttatctcttgaaaccttttgtgtggacacc

SEQ ID NO: 99169 - DNA, 594 bp, Homo sapiens
agctatcctgggctgtaaggcaatttaatggaaggtacaataaaacaagacacaaggttggggggttccacgttaaccttgaattgcctacttcgagaggcagtgaaaaacaaatacacatctatctcttacttgcagccaaaactattcccaactattaaaatgctccaacataaataaactcacaggggcaagttcacataaaaataggatattctccttaccaaaatgcagcaaggcatttgcttacaaaccagcaatgtgatcctcagtccaacagctactcttgattagtcattactagygtatgtcatggtggggctccagccacttactagtgtatgtcatggtgaggttccaacactcaagggcctattttcacctggtatcccactacatttcagtgtctgtctgtcttccgttcctgacggtctgccttccctcacagtgaatttcatttcaaggtgtctccagtgtttattctatttgagatgttatataatgtctggctacctatgcaacccactctccaccatttcagtatctgtttacaggtccttagagagttttcccagctgttcacacatcagtcta

SEQ ID NO: 99170 - DNA, 416 bp, Homo sapiens
acttttcacttggtttctctctacacccaagtcctgtgcccatacgtgggttgtgaaggtctggccacagttgattttcatccagcctcaataacaaatactgtgccatctctgtaaccaaatgcaaggagacaagaggcgggaagcctcatgaacccactgggatttcgargcaccttggtgcccactccagaatgagagtctcagagaatgcttgttggctgcggggcttgaacgcatgaaccctgcttagtgaggcttccctcccttaaccagcactccgtggttatctgatgcctttctccacaatacctggttctgagaaatcaaattaaatataaagtccctctgccgctgagcagttcattggaaccctcctaataaaaattcttttgaatgtgccactcagcggaatt

SEQ ID NO: 99171 - DNA, 416 bp, Homo sapiens
acttttcacttggtttctctctacacccaagtcctgtgcccatacgtgggttgtgaaggtctggccacagttgattttcatccagcctcaataacaaatactgtgccatctctgtaaccaaatgcaaggagacaagaggcgggaagcctcatgaacccactgggatttcgaggcaccttggtgcccactccagaatgagagtctyagagaatgcttgttggctgcggggcttgaacgcatgaaccctgcttagtgaggcttccctcccttaaccagcactccgtggttatctgatgcctttctccacaatacctggttctgagaaatcaaattaaatataaagtccctctgccgctgagcagttcattggaaccctcctaataaaaattcttttgaatgtgccactcagcggaatt

SEQ ID NO: 99172 - DNA, 575 bp, Homo sapiens
ctgggtattttgtttcttattcatttgcatttgagtttgctttcttgccatagacaatatttatttttatgcaaatttgttaacttttttcagctggcttctgggtgtgttttcctcagagtatatatttttaactacttggctaaattttctctggtacttctaattctctgtttttctaattttttctgtttttctaattctcaaacttttgatccatgtggagtttattttgttacagggagaaaaggtctcacttggaaatagagaagctggagaagtgtgtctttgctcccttgataatgattggggctggggtgttgccttaggtacgacctggcccagctgcccttcctgaccatgtgcgtgaaggagagcctgcggttgcatccccctgttccgtacacctcccgccacygcatctgggacattgtgctcccagatggtagggtcatccccaaagatgctcacagcctcatggggaggagccccccgggtaggaagaggggtccttcagggggatccttgtcctgactgccaccttctctcccacaggcattatctgcatcatcaac

SEQ ID NO: 99173 - DNA, 575 bp, Homo sapiens
ctgggtattttgtttcttattcatttgcatttgagtttgctttcttgccatagacaatatttatttttatgcaaatttgttaacttttttcagctggcttctgggtgtgttttcctcagagtatatatttttaactacttggctaaattttctctggtacttctaattctctgtttttctaattttttctgtttttctaattctcaaacttttgatccatgtggagtttattttgttacagggagaaaaggtctcacttggaaatagagaagctggagaagtgtgtctttgctcccttgataatgattggggctggggtgttgccttaggtacgacctggcccagctgcccttcctgaccatgtgcgtgaaggagagcctgcggttgcatccccctgttccgtacacctcccgccaccgcatctgggacattgtgctcccagatggtagggtcatccccaaagatgctcacagcctcawggggaggagccccccgggtaggaagaggggtccttcagggggatccttgtcctgactgccaccttctctcccacaggcattatctgcatcatcaac

SEQ ID NO: 99174 - DNA, 588 bp, Homo sapiens
tccatttttgtttgtgaactggtcaattcttgcctgggagcatttctgacttacgattttttaaaagcagcaggaagtagccagaatacatcaatatcctgccttttaaaaaccattcacccacagacatatagatcaatggaatagaattgagattccagaaatgaactctcacattcatggtcaattgattttcaacaagagtgccaagatcatttaatgggggaaggartagtctttttaactaatggtgctgggataattggatatcaacaagcaaaagaataaagctggaaccctacctcacaccatatacaaaaattaactcaaaacaaatcaaagacctaattgtaacagctaaaaatatacaatcttagaagaaaacatagagtaggtcttgatgatcttaaactaggcaatggtttcttaaatatgtcatgaaaggcataaactactacagaaaaaaatagataaatgggacatcatcaaattgtaaaactttcacactttgaagggtaccatcaagaaagtaaaaagacaacaaactgaataggataaaatatttgtaaattatatatatagtaagag

SEQ ID NO: 99175 - DNA, 525 bp, Homo sapiens
aagatacaaacaacagactgcagctggcccttgcagaaaaaaaaaatgacaaaaatcctggggaaatttttactaactgcactgatgaaaggcatggatggaaaggcacaatttttgaaatacacaccatatgtactaccctttcattcataacagcataaatgccstccaacacacacaaaggtaggcaacacaccagcccctcagtctgttaaattttacttcatgcccttattcctgcacttctcaggaaagaaatggaagccaacctccaggaacacccttctgagatacccagaactagggtcagggcggtccctttctccttccccatcaattgctcttccttatctccattcattttaagaaaataacactggcatgtgctgtgatgataattaggtttcattttaagatacttcactacctgaggaaaggtccttttggtagcaatgtggtttctcatgcccacattgtacaatgaaaaactgcaaagagtctgagaaaccaagttgaaggaagaag

SEQ ID NO: 99176 - DNA, 559 bp, Homo sapiens
gcctctctgctctatgcagcctccaaacatggtcccctgcattccagctgtttcaactccagccatggctaaaagaggcaaatgtacagctcaggctgttgcttcagagggtgcaagccccaactcttggtggcttacatgaggttttgggtctccgggagcacagaagtccagaattgaggtttgagaacctctgcctagatttcagaagatatatggaaatgcctggatgtccaggcagaaatttgctgcagcagcagagccctcatkgagaacctctgccagggcagtgtggaagggaaatgtgggattggagcccccacatagagtccccgctgggacactgcctagtggagctgtgagaaggtcaccatcctccagaccctagaatggtaaatctaccaacagcttgcactgtgagcctggaaaagccgcagacactcaatgctagcccatgaaagccgtcaggaggctgtactctgcaaagggagaggggtgaagctgcccaaggccatggacacccacctctggcatcagtgtgtcctggatgtgagacata

SEQ ID NO: 99177 - DNA, 559 bp, Homo sapiens
gcctctctgctctatgcagcctccaaacatggtcccctgcattccagctgtttcaactccagccatggctaaaagaggcaaatgtacagctcaggctgttgcttcagagggtgcaagccccaactcttggtggcttacatgaggttttgggtctccgggagcacagaagtccagaattgaggtttgagaacctctgcctagatttcagaagatatatggaaatgcctggatgtccaggcagaaatttgctgcagcagcagagccctcattgagaacctctgccagggcagtgtggaarggaaatgtgggattggagcccccacatagagtccccgctgggacactgcctagtggagctgtgagaaggtcaccatcctccagaccctagaatggtaaatctaccaacagcttgcactgtgagcctggaaaagccgcagacactcaatgctagcccatgaaagccgtcaggaggctgtactctgcaaagggagaggggtgaagctgcccaaggccatggacacccacctctggcatcagtgtgtcctggatgtgagacata

SEQ ID NO: 99178 - DNA, 594 bp, Homo sapiens
atgaacataatgatctttttaaatgacctctcattattctcttagaagaaatgacttagttaagaagaagagtcttggaaagatactgcctatgctagcactcaactcatgaaatgcttctttctccagtgaaagtcagctgtttggttccctttccaaagaatttctgaacttagcaccacttcaatttgctgctctaagaatgttgaccttaattcccatttaagagagtgaagggttaggattaatgtttcttttttatatatgctgccttgcaaaaccctttccatttactcataaaaagggcttgccaacctttttttattgaatggataaagcccaggttatttccatcctaaaagtatgatcaaatatagyagtcgtaagaaaacaggagaccagaagagccaactgcaatagactgtaatataatgctatagactagtttatcagatatctttatcaggaaattattataagattagaaagtataatatttacatttaattgtattttacacaatggccgttctcatgaggaaatataccttaaaagaagaaaaacaaattaaactaacatgttcacatgcactgt

SEQ ID NO: 99179 - DNA, 507 bp, Homo sapiens
ttattaaataatcaaatgtggtttcagaaaactaagtgctaatccatcccgctttgaaagaaagatttcacctggtttctcagcctgccctggcattttgtcttcctgttgtcatagtcccactttgtatctaatctggtcccttttaccaggcttcatttcatccacaaggaaagaaaaatgcctgggtgaccatgccttacttagcctttcatattcttgatttagcaattctatttcctgaagcaaaaakgttcctctttaacctttcccatcaatgaaattaatccagcaattaatcatttctgttcttttcaagcttgcttcaaaatttcagttcctcctaagatcctatccatgcacgttcagtttaattgggtggaaaaatatctaatgtggactattaaatggatgtcttggtgtatatgagcagtaggggaagaaaatactgcttttccaatgtttaaggaatgatattggctggctgaataaaaacagattcattga

SEQ ID NO: 99180 - DNA, 547 bp, Homo sapiens
gagcctccaaatattgtatgtgtgtaagtaccagatacaatttctttttcttttggtacgctattatttataaactcatgtaaatatttataattgtggctatgcaaaaaatacataacaatgtctcgaataaatgcctccttgtgagaaataagctayggcacttacattacattatatacatttgagtctgttatatggcatacagaagaatataaaatgtcaggaagtaaacgaacttcctaagaaatcacctttaaaatatatttgatctaagctgcatgcaatttgaagaatactgctgatccatcattctagttataatgctgcctcttccatgaacatctcaattcaccatctggaagtaatctcatcctcctccaagctgcctcaaaattttattttcatttcctctctccatgttctcactatcatgttatataccactaagattaatttggaaaaatccaccttttgctagactataaactccttgagggaaaatgatgcaacttgaaaatatttgtaaataccatccacacacatc

SEQ ID NO: 99181 - DNA, 421 bp, Homo sapiens
taaatgcctccttgtgagaaataagctacggcacttacattacattatatacatttgagtctgttatatggcatacagaagaatataaaatgtcaggaagtaaacgaacttcctaagaaatcacctttaaaatatatttgatctaagctgcatgcaatttgaagaatactgctgatccatcattctagttataatgctgcctcttccatgaacatctcaattcaccatctggaagtaatctcatcctcctccaagctgcctcaaaattttattttcatttcctctctccatgttctcactatcatgttatataccactaagattaatttggaaaaatccaycttttgctagactataaactccttgagggaaaatgatgcaacttgaaaatatttgtaaataccatccacacacatccatt

SEQ ID NO: 99182 - DNA, 633 bp, Homo sapiens
agctatcacacaatacaattcttttatattttaaactggtggttttcccaaagtaggcagataataatttcatgctttcatgtggctgaagtctcagttaagactttgtctgaaacataaaatcaaagttcaaatattcctctcctagttagtgattctttccacccaaattgcataagccaaggtcaacaagaataaaatgtatgagtgaatggagattttgaaacaacaaattatttgtactgtggttatgattaagatataaaatagggaaggaaaattaaattctacaaacttgctttatgaaagctgacagtttgttaaaatccagaaactagaaawtccaatcggaacaaaacttttcctagttctaaagcattagtaaactgttaagaagtctgactttctctaatggggagaaaagtaaaagataaatttaagccaggttatcttcctcccaaggtatacttttgatatttccattggggattaagtaaacaaatctagcgagctatttctatgttcccaatacatctaccagagaagatacaaattttatcctctaaagttaataacttaggtgaaccaaccaagcataagaaagataactgaggaataccagaacacaaaata

SEQ ID NO: 99183 - DNA, 576 bp, Homo sapiens
tggttttattttgttttggagctgggttaaaagtgaaatataaggccaggcacagtggctcatgcctgtaatcccagcactttggaaggccaaggygggcagatcaccagaggtcaggagttcgagaccagcctggccaacatgatgaaacctcttctctactaaaaacacaaaaattagctgggtgtggtggcaggtgcctgtaatcccagctactcaggaggctgaggcaggagaatcacttgagcctgggaggcggaggttgcagtgagcagagatcgtgccactgtactccatcaagcctgggcgacagagtgagactccatctcaaaaaaaaaaaaatgtgaaatacaagattgatagcaagttgggtcagagattataggagagttaacctgttaacacatgctgtgatctgaacatttgtctcctcaaaatttatttattgaaatcctaaccccaaaggcagtggaattaggatgtgggaccttttggtaggtgataaagtcacaagagtggagctctcatgattggattagtgctcttataaaagagacctccaaaagctagctagcc

SEQ ID NO: 99184 - DNA, 576 bp, Homo sapiens
tggttttattttgttttggagctgggttaaaagtgaaatataaggccaggcacagtggctcatgcctgtaatcccagcactttggaaggccaaggtgggcagatcaccagaggtcaggagttcgagaccagcctggccaacatgatgaaacctcttctctactaaaaacacaaaaattagctgggtgtggtggcaggtgcctgtaatcccagctactcaggaggctgaggcaggagaatcacttgagcctgggaggcggaggttgcagtgagcagagatcgtgccactrtactccatcaagcctgggcgacagagtgagactccatctcaaaaaaaaaaaaatgtgaaatacaagattgatagcaagttgggtcagagattataggagagttaacctgttaacacatgctgtgatctgaacatttgtctcctcaaaatttatttattgaaatcctaaccccaaaggcagtggaattaggatgtgggaccttttggtaggtgataaagtcacaagagtggagctctcatgattggattagtgctcttataaaagagacctccaaaagctagctagcc

SEQ ID NO: 99185 - DNA, 602 bp, Homo sapiens
tttacaagccacctagtttactagtatttgttaaagcagcctaaatggattaatgcagtaagaattcaagaaagtggtcatttgttgtcacacataattttcaaaatcttaagacaacataattctcatgtagatgcattgtcaaaattttattaaatttgttaagggaatcagcaagatgtaaagggcattattttgctggtcattatactaaaacatactgacacatgtttacagagtcactgaaagaaaagaagaaatctggaatgggattgctaaattagaataacaacaataaaaaaagagagtattgtctgacagggccagagacatgaactttgaggtgatctttyttactgggctgaaaccattcgcattactatcagaaaaataaacacatgcaacctcttggctttctgcaagttaagatctgtgctaacaaagctataaaatgttgccatggataccagtaaatagcaagtcaaggaaagttacattcttaagacagaagacctttaggtgagcttgttagacaatgccatcacttaacaatgtaagtcacacagttatcttttcccatacttccaagttttggataataa

SEQ ID NO: 99186 - DNA, 602 bp, Homo sapiens
tttacaagccacctagtttactagtatttgttaaagcagcctaaatggattaatgcagtaagaattcaagaaagtggtcatttgttgtcacacataattttcaaaatcttaagacaacataattctcatgtagatgcattgtcaaaattttattaaatttgttaagggaatcagcaagatgtaaagggcattattttgctggtcattatactaaaacatactgacacatgtttacagagtcactgaaagaaaagaagaaatctggaatgggattgctaaattagaataacaacaataaaaaaagagagtattgtctgacagggccagagacatgaactttgaggtgatcttttttactgggctgaaaccattygcattactatcagaaaaataaacacatgcaacctcttggctttctgcaagttaagatctgtgctaacaaagctataaaatgttgccatggataccagtaaatagcaagtcaaggaaagttacattcttaagacagaagacctttaggtgagcttgttagacaatgccatcacttaacaatgtaagtcacacagttatcttttcccatacttccaagttttggataataa

SEQ ID NO: 99187 - DNA, 615 bp, Homo sapiens
cagattaggtccatctggataatctaggaaaacccccctcctaaggtccttaacataatcacatctgcaaaatccctttagccatgtaagatagctgagatagggtggccagagaagatctctttaaagtgacatttgcatagacactgactcagggaatcaccaatattctcagattctgaggattaaagtgtgagccatttcaaggaccattattctggctaccacaccttcactctgattcttgtagccacattgtcagcaggaaaatcctgagcatgtacaaatggcataatttaggacttgccttccgtgccacttgctccatcttccaagtatgtcagtctactcagtctctttacccttgctattgctgtatgtttatgatttatttaataaattcactatccaagcatctttatttggtctgacagtctttctgtttcatgagctctggattacctgcctggtagcacacctggaagctaccaytgaattaaggtaattccccaaagatttcagtcttggttggtccctatacagaacctctgtattagtcagggttcactagaaggacagagctaataggatagatatatatataaaggggggttt

SEQ ID NO: 99188 - DNA, 656 bp, Homo sapiens
cgacaaaaacaatttaaaaaatatttgtagcatgggaatattgatccatatcccatatttggaacgaatctgatacactttcgataggaatttgtttcagagaaggattcagggcagaagcgatgcatttttaaagcagaattaaaacagcgcaaagagcccggctctttagggaaatgcgcgaaacaaacaaatcgaaagcaagcgttccagccaagtggttggggagcaccgttgtctggcactaggaaaggaagtgcttcttgaaagtgytctcttaaaaatgattttccagacttattttattgcattttaatcacaaagtgaaacttaaagcaaagaaacaggacattcccgctaccgaacagaacctatcgtctattgcaggaatgactgctacttggaccacagacctttagaaaaaacagagaggcaaatgattaggctaatttaacgcggagatctgcttagcagaaaagacacccaaagtagcatctgtcagaggaaaacatcttttgcttccacacaaggcactcgatttggtttccaaccttgagtcctcaacattcaactttcaagtgcaacaatgttggaggcacaagagaatagtagattacctacaagtgaacacaattgtacggaaaagagacttacat

SEQ ID NO: 99189 - DNA, 590 bp, Homo sapiens
agaaactaagatccacaggttggaaactactttagaataactaaactcataaaaatagtaagtaattaaatcatctaaccattttgaatgtgtgccaaattaatggcaggaatctgaaaacagatgaaattaagtgttcccctacttttttaagatcaagtatattttgaatacaaatagtataaagaaactgaaaactaaatacttgactggcattgagacaaaagagacttcacatttaacacaggaaaggatgtcattaaaaattaatccttgcctgaaaaaaatgggttttttttcctccccttttctcttttattctggaagaaaaggaaaagataggaacatatagatgataaggtagcagaatcatgtggtggctaagagcccagttttcagagccggacaaagttgggttgggtttaaaaccaggcctcaactaaaccaatatataggaaggaycttgacaagtttcttcacacttctgagtctttttcaaaagtaaaataaaaatatctatatacaaaaatacctattgtattattttgttctcatgctgctgataaacacctaccagagactgggtaatt

SEQ ID NO: 99190 - DNA, 551 bp, Homo sapiens
gtcatgctaataaatatattaayactccgagtaaacaaaagtaagacttgaaggattggagcaaattgtgataaaaatgtttataaatagataaatatgtacagacatgtaaatatattccataataaaaatatttatgataaaataaaaagtagatatagaaaacagttttaagaaatacaaaaacatcacttaaaagcaggtaacattatttaggttacttaaatatatctgaatcatttagccattatccacatgttacttaagaagcagttacagaatagtccaaagtacactttaattagacaagaacattaatttttatccaaaaatgtgctcctccttggtcacattgtcattgtcatttctgttgaagggtcttttaaaagtgaattatgctaacaacatgcaaaatgaagtttcatgcagagtttttatcatataccatataaagcatttatagtttacagtgctcttagtgcctcagtaattttttcaaggtgcttgtgaccagaaaaaaaaaatacctacaagtttcgtttattaggcag

SEQ ID NO: 99191 - DNA, 551 bp, Homo sapiens
gtcatgctaataaatatattaatactccgagtaaacaaaagtaagacttgaaggattggagcaaattgtgataaaaatgtttataaatagataaatatgtacagacatgtaaatatattccataataaaaatatttatgataaaataaaaagtagatatagaaaacagttttaagaaatacaaaaacatcacttaaaagcaggtaacattatttaggttacttaaatatatctgaatcatttagccattatccacatgttacttaagaagcagttacagaatagtccaaagtacactttaattagacaagaacattaatttttatycaaaaatgtgctcctccttggtcacattgtcattgtcatttctgttgaagggtcttttaaaagtgaattatgctaacaacatgcaaaatgaagtttcatgcagagtttttatcatataccatataaagcatttatagtttacagtgctcttagtgcctcagtaattttttcaaggtgcttgtgaccagaaaaaaaaaatacctacaagtttcgtttattaggcag

SEQ ID NO: 99192 - DNA, 536 bp, Homo sapiens
attgtgtatctatttctgcaactatagttatttttagtgtttttaatgcttcccttcatggtggatttttttccttgctctattgcaatctgcaatgccctttctactttctccaaatataaaaatggcattgcctcaccatctttccagcctaacctcaaayaccattttttttcccgaatgttttatgtaggaagaaacccctatatgagataacatttcccttttctgcactcctctctattttgacatgcttctatttctgtccaatgttgcaagtgttccttctactagtcagaaaacttattgagaaaataacccatatatggccagcagcatttggcacactaatgattgctaatgattgctaatcacaatgggtagtgcaaatattcaataatgatttggtaagtaaacaaataaagttataatttggtaactaagatcacataaataccatcagtagatatttgctgctacattttatagataacctatgttaatggaatatttatttgattttatgggatcctgat

SEQ ID NO: 99193 - DNA, 653 bp, Homo sapiens
aatttgaacgcttcctggatagttgatattattaaagggatgttaatttttagatggtcatgtttaataataattattattagagatacacagtgaaattatttaaataaattaatttgaagtgtggaatttgcttcaaaatagtataaaaggttggatggggacatggatgaaataagactgaccatgagtaaacaattgttgatgcaaaatgactgatacagcagyttcattacactctttttccagtgtgtgtgcatatttgaaattcttcacaataaatagttaaaaaacaaagtagggtctaaatcttatttatctctgtatccccagtatgtatcataaagccttcctatggcatatgcttaagaatatttgctgaataacaaacttcaagaaaggtgaccattttagtctcagtttcttcctttataaaatgggggaaacagtatttcctttccagcgtcatcgtgagttaaaagacaagaaatggaagagtatttcgtaaactgtaaagtgccacacaaaggtggcagccttaagactgaagaaccagaactagaattcagcatcacgtgccatgcatctatattctgaccttgatttgttccctacattgagctaataaactcatgtacagatcccagcacatt

SEQ ID NO: 99194 - DNA, 653 bp, Homo sapiens
aatttgaacgcttcctggatagttgatattattaaagggatgttaatttttagatggtcatgtttaataataattattattagagatacacagtgaaattatttaaataaattaatttgaagtgtggaatttgcttcaaaatagtataaaaggttggatggggacatggatgaaataagactgaccatgagtaaacaattgttgatgcaaaatgactgatacagcagtttcattacactctttttccagtgtgtgtgcatatttgaaattcttcacaataaatagttaaaaaacaaagtagggtctaaatcttatttatctctgtatccccagtatgtatcataaagccttcctatggcatatgcttaagaatatttgctgaataacaaacttcaagaaaggtgaccattttagtctcagtttcttcctttataaaatgggggaaacagtatttcctttccagcgtcatcgtgagttaaaasacaagaaatggaagagtatttcgtaaactgtaaagtgccacacaaaggtggcagccttaagactgaagaaccagaactagaattcagcatcacgtgccatgcatctatattctgaccttgatttgttccctacattgagctaataaactcatgtacagatcccagcacatt

SEQ ID NO: 99195 - DNA, 653 bp, Homo sapiens
aatttgaacgcttcctggatagttgatattattaaagggatgttaatttttagatggtcatgtttaataataattattattagagatacacagtgaaattatttaaataaattaatttgaagtgtggaatttgcttcaaaatagtataaaaggttggatggggacatggatgaaataagactgaccatgagtaaacaattgttgatgcaaaatgactgatacagcagtttcattacactctttttccagtgtgtgtgcatatttgaaattcttcacaataaatagttaaaaaacaaagtagggtctaaatcttatttatctctgtatccccagtatgtatcataaagccttcctatggcatatgcttaagaatatttgctgaataacaaacttcaagaaaggtgaccattttagtctcagtttcttcctttataaaatgggggaaacagtatttcctttccagcgtcatcgtgagttaaaagacaagaaatggaagagtatttygtaaactgtaaagtgccacacaaaggtggcagccttaagactgaagaaccagaactagaattcagcatcacgtgccatgcatctatattctgaccttgatttgttccctacattgagctaataaactcatgtacagatcccagcacatt

SEQ ID NO: 99196 - DNA, 589 bp, Homo sapiens
caaaaaatgtcccgtgactaatttccctcctgggagacacacccaacgaaagtatcttccaagaccatgttatattttttatcctttttaaaaataaactttctattttagagtagacttagagttacagggaagttgcaaagatagtacagtgagtcaccatacctagtttcccttattcccttattaagatctgatggtatgtttgtcacaattagtgaactaatactgataaattattgttaactaaattctgatttcttttagtctttactcagtcttttttctgttccaagaaatttgcctcttctttactcaaccttcacctaaataccccttcaactcccatggctcagctgtcatgttaccktaattgcaaactatctttccacttcacagcccagccctggtcgtataatgtagtagcatgtatccatgccctcatccatactattccttctggaatatccagcccacctcttacctttcataacatacctaatctccaacttacccattaggactcaactcaaacacaaatttactgtatctttttataacataccacttcttcaagcagaatgaattc

SEQ ID NO: 99197 - DNA, 514 bp, Homo sapiens
caaactgatgtcttaaccctcttaatgcctcaaactaaatcctgttcagacatgttataacaagttagtataattttttttggtgcaagagaaattgaaattcatrcatagttttttcatagtatgcatttttcgtgaactttttgaagacccctcgtacatggtgattgaagagttgcaggaagagttcacatggtgacaataaaacagtgaaaacaccaacacttaaaggatcggcagaaggaaaatttaaaaattgaatgataatggggtagagaagaaccgagagagaattaatgaaggtgagagttttctcaattgaacattctatttctgatagtcaaacatgtgagttccttaggaatcaaacaccaaacaccacatgttctcagttataagtggcacctaagctatgggcaagcaaaggcatacagactggtataatggacattggagactcagaagtgggaggatgggaagagggtaacagatgaaaatctatctactggataca

SEQ ID NO: 99198 - DNA, 626 bp, Homo sapiens
tatcttaacttttgataattgaattaacacaccactgcattgggacaagagagatgggaaaatgaatttatgcaagttgttttaatatgggaattctatgcctaagaagttcacatacctttggctgcaaaacattttttttcataattacagctttatcatttaaattttcacatcaataaacagtttggtatcctgcaagtaagcttgcactagccattggaagatctggattstgataaaagattcaccattaactagatgcccaagttaggatatgtctagccatttctacaactcactttcccagatcttttccaatgataaacaaatttaaaaagacaccatttgaactacaaaatcttctattattatgaagaaataatcctttctggaaaatccaaagcttttgaggatgaattaattcaacaggtttctattaagtatctaacactaaaccaaggaaatttctaagaaatttgggaatacaaagaaaagaaaaacctgccttctagtctagtggaaacaacatttaggcaaataattactttagaatgtagtaggtgctatcttttctgaataatacaaagatctgtccttgtcacatagatagtctgcatgtgcaa

SEQ ID NO: 99199 - DNA, 595 bp, Homo sapiens
gtcctctcattgttcttattccacccccgacccaccagaggttctgtcaatggtggagccagggagctctgtcctctgggaggacaggagagaggcagggagtccagtcctctgcctctctcaggggttctgtgcattttattcaggccaagagttcagatatcaaggcctcgtgacagaaacaggtggtagagttgagcaacctgtattcatctccctgaaatgctcataataacataattttttagattccattgttctgcctgtaagtatctaaatgaggttatatcggctgggcatggtgggtcacgcctgtaatcccagcactttgggaggacgaggtgggcagatcacttgaggtcgagagttcaagaccagcctggccaacacagtgaaaccccatctctattaaaaatccaaaaattagccaggcatggtggcaggtgcctgtaatcccagctacttgggaggctgaagctggagaattgcttgaaccaggyggcagagctgcagtgaaccaggatctcaccaccaaactctagcttgggcaacagagcaagactccgtctccaaataaataaataaatgaggtcat

SEQ ID NO: 99200 - DNA, 595 bp, Homo sapiens
gtcctctcattgttcttattccacccccgacccaccagaggttctgtcaatggtggagccagggagctctgtcctctgggaggacaggagagaggcagggagtccagtcctctgcctctctcaggggttctgtgcattttattcaggccaagagttcagatatcaaggcctcgtgacagaaacaggtggtagagttgagcaacctgtattcatctccctgaaatgctcataataacataattttttagattccattgttctgcctgtaagtatctaaatgaggttatatcggctgggcatggtgggtcacgcctgtaatcccagcactttgggaggacgaggtgggcagatcacttgaggtcgagagttcaagaccagcctggccaacacagtgaaaccccatctctattaaaaatccaaaaattagccaggcatggtggcaggtgcctgtaatcccagctacttgggaggctgaagctggagaattgcttgaaccaggcggcagagctgcagtgaaccaggatctcaccaccaaactctagcttgggcaacagagcaagactccrtctccaaataaataaataaatgaggtcat

SEQ ID NO: 99201 - DNA, 626 bp, Homo sapiens
agaattacaaaggaccacaggtttataatcagaaaatatgcaatccacaagataaaaaataatatttttaaagtaataaaataagtaaagttgtatatctagaaaaatgctttttwaaaaaaatagaattttcagacaaaaaacttgaaataatattttcctggagaacttcaatacagaaaaggttaaaatagtttttgggtgttaaattaaaggatgttggatggaaacttggactataaaaagaaatgaagagtgagagaaaagagaagtatatgtgcaaattttttaaagtgtttttaattgtgaaattatgagctacttgataatttaaaacaaaaataagaacaaggtttaaaggcttacaatatatgcataaatataatatatgcagaaataaaatatataatatttgcagaaatataaaataatgggagagggaaaatgaaagtacacaatgtaagcttatattttgtgtgaattggtggaatacgatttgaaggtagaaagtgagatattagaatacacattagaaaccttaaatcaactacaaaaagagatgtaattagtaagataataatacagtaaaattatttaataatacatttaatgtgaaagaagagaca

SEQ ID NO: 99202 - DNA, 560 bp, Homo sapiens
cccaaaccaacagagcccagtgccaatcatccattgccaagccggcctaattttcatgcaaagaaaatgaatccagaaagtccattcctagcattctcaacatctcttctgactctatattttgctaatcagtagattttactgatttttgcttggagatttttagagacccagcagattcactctaggaaatcaaattcattcagcaaacaggcaagtcctgtttaatcattggccaggctcaaaatcatctcaacagtaactcactttacctgagttaaattgcaccttttctggaaaagaaattcctaacattgagctgtcttgaaaattccataccattgttggaactcccaatccaaaaatttataattggtcctgctggttaaccactaacaaatcagytaaatgtgaagttgaccatatcaaccctatttttccataaattggaaatttcctctggaatctcatctttcttaaccatgaccttgcctgccccactccgtaccccctgccttctgctacctgaagagtcactcactgaaagatgaaaaggtact

SEQ ID NO: 99203 - DNA, 638 bp, Homo sapiens
atgtgcagccaaggttatgaaccagggctataacaaaagtgataattgttaatgaaaaagaggcttctcctttggctatgaatataagataaagttcagcatgccaaaagagtcttctggttttgtagcagaattttcataactgcttatttctaattgcccttgtgtaactggtggtagggaccagacttagaagctgatttttaacccaaactagccaaccttcaacagaccgtaatgatatatatcatttatgttaaatgattaactcatacatttgaacatctggagaaccagggtaaagaattgtgacaatcctactattaattaaaatagggtttaggcaattaggttctttcaatttatgatgacaattgtacattatttctcactctttaaaatatatcaacatcaaaatgaatgtaacaaaattcatatgtaactaataattgagttgtagctcacaggatgacacagtgctgtgttggcagaaattacataattttttaaaattttatttttttcatatttttgagtcattatttttcccccagatctcagatacatgtatattttttggccactrtgaaaggagtgattgctagatcctaggtcaatagggtttaatgttaaaaaga

SEQ ID NO: 99204 - DNA, 644 bp, Homo sapiens
attataagtaaaaatttgaattgtaattcccagggcaccactaagaaaataactcaaaaatattataaaatataacaagataattaaaatggcaaactagaaatatgaatttaacacaaaagaaagaatttggaaagaatacagaaaccaaaacaacataagaaatacaaagaagaagtagcaaaatgagtggcataagtcctatcagtaattacattaaatgtaaatgggttaaacactcaaatcaaaaggttgagattagcaaaatggataaaataaacacaatggtctcatatactgtatatagagataaactggattcaaagtcacaaataacttgaaagtaaaagaatgaggaaaaaaaataaaatatgcaaaaagtaagcataaaaggcctgaagttgatgtactaatacmaaatcaatgcactttaaatcaaaaagtcattgatttacaaaaacaaaggaccgtatacattgataaaagcgtcaattcttcaagaaaatacaacaatttttaacatgtacatccactaaaaacagagcttcaaaatacatgaatcaaatactaaaaaactgaaggaagaaatagacgactcaaaaataatagttggaaatttcaataccctaccttgaataatgggc

SEQ ID NO: 99205 - DNA, 621 bp, Homo sapiens
acagagtgctcttatttacccttttattttctgacctgtttactgcatgactctcgggcttctgctccgaaaataccattaaactgctctctctcaaaagttactaataactgctaaatttcaaaacccataracatttttcaggtctcttctattgccatctgacggtatctgtcacttctgtcttcttgaaacaatggaattattgggctgtagttccacttctacctctcggattgcttttaatttccttagacattaatttctcattctgtgtcccttagtttcttatttctttattataacatctgattatttcctcatctaatcctacaactttaactatgtcaaatagattggtgaccgtgctatataaatttattttttaggtgtggcttctagatccagatccttatttctaatctagacattagacagaccccaaaaaacttagactccttcatgattctctttttccccccacaacatacttgtccttttgtaatgttagtcttggcttatgtatccagtcgcaaaaccaaaaacctgttggtcaccatttcattttttaatttattaacttaccaagtatttttgggtgttaattgtacactatgcatg

SEQ ID NO: 99206 - DNA, 621 bp, Homo sapiens
acagagtgctcttatttacccttttattttctgacctgtttactgcatgactctcgggcttctgctccgaaaataccattaaactgctctctctcaaaagttactaataactgctaaatttcaaaacccataaacatttttcaggtctcttctattgccatctgacggtatctgtcacttctgtcttcttgaaacaatggaattattgggctgtagttccacttctacctctcggattgcttttaatttccttagacattaatttctcattctgtgtcccttagtttcttatttctttattataacatctgattatttcctcatctaatcctacaactttaactatgtcaaatagattggtgaccstgctatataaatttattttttaggtgtggcttctagatccagatccttatttctaatctagacattagacagaccccaaaaaacttagactccttcatgattctctttttccccccacaacatacttgtccttttgtaatgttagtcttggcttatgtatccagtcgcaaaaccaaaaacctgttggtcaccatttcattttttaatttattaacttaccaagtatttttgggtgttaattgtacactatgcatg

SEQ ID NO: 99207 - DNA, 621 bp, Homo sapiens
acagagtgctcttatttacccttttattttctgacctgtttactgcatgactctcgggcttctgctccgaaaataccattaaactgctctctctcaaaagttactaataactgctaaatttcaaaacccataaacatttttcaggtctcttctattgccatctgacggtatctgtcacttctgtcttcttgaaacaatggaattattgggctgtagttccacttctacctctcggattgcttttaatttccttagacattaatttctcattctgtgtcccttagtttcttatttctttattataacatctgattatttcctcatctaatcctacaactttaactatgtcaaatagattggtgaccgtgctatataaatttattttttaggtgtggcttctagatccagatccttatttctaatctagacattagacagaccccaaaaaacttagactccttcatgattctctttttccccccacaacatacttgtccttttgtaatgttagtcttggcttatgtatccagtcgcaaaaccaaaaacytgttggtcaccatttcattttttaatttattaacttaccaagtatttttgggtgttaattgtacactatgcatg

SEQ ID NO: 99208 - DNA, 630 bp, Homo sapiens
ccatcaaggacccgaggtcacagctaatcaaataatctgaattccaaagacaaacaagacactacaaggaaatatgaatggttccttcaggaagcgtaaaatcgtgtcaagtaaacaaaggtatgttcaacctccactgaagagtgaagcactgcaacttaagcaaaaatatgtcatctgttacaaaaawatatagctgtcaggctacgaagctggaatgggttgggttcctatataataagcgaacctaagcccaactcaatgcaaacagtaagatggaatttatgcttaaccaatcagaagctgccaaactaatctcttactagggactttccacttttatcaatcaaatatattttcatttgcgttttataaaattttccattctaccctcctcagtggagggctaaagcatttgaggtttggtactgccaggctcgtgactagttgaatgctcaaataaaccccttaaaattccaatgtacataagtttatcttttaataaaatttgtacacataagattggtaacataagaaagctgaataacgacaagtattgacagagaagtatgagaggtagaaacctcaggtactgcttctgggcgtttaggcagaaatagctacaccaga

SEQ ID NO: 99209 - DNA, 641 bp, Homo sapiens
tctatcatgactagtgtaaatagttccaaatggctttgtaactgcattgttcctcaaaaattcaaactgttggatatgcagttggctgagcctaggtcatttgtctatgattctgtgatatgagagggrtctctggtgccagggttggatagcttttaaatgaacaacttccctacatatgtcagccaaggtttgcaagttttgtctcccccaagatccctgactgaccacagtgatgttagttttatagctgttaaaatatcttcacttacttatttacttgggaaagaggcttactctttgcatataattttggcagtattcaagaatgatatggtttttccatggaatctatggtaattacagttgacaactttgaaaaaaaaacttgctggataacaatagcaataagttctactattacattttaattttccatttcctagcctcttgataaagattgtccaatatttctttaacttttttttttttggtggggacaatagggtttgctagaatttttagaattttatttttttctattttttaactctattttaggtttatggatacatatgcagatttgttatataggtaaactcatgactcaggggattggtgtacagattattatgtcactc

SEQ ID NO: 99210 - DNA, 641 bp, Homo sapiens
tctatcatgactagtgtaaatagttccaaatggctttgtaactgcattgttcctcaaaaattcaaactgttggatatgcagttggctgagcctaggtcatttgtctatgattctgtgatatgagaggggtctctggtgccagggttggatagcttttaaatgaacaacttccctacatatgtcagccaaggtttgcaagttttgtctmccccaagatccctgactgaccacagtgatgttagttttatagctgttaaaatatcttcacttacttatttacttgggaaagaggcttactctttgcatataattttggcagtattcaagaatgatatggtttttccatggaatctatggtaattacagttgacaactttgaaaaaaaaacttgctggataacaatagcaataagttctactattacattttaattttccatttcctagcctcttgataaagattgtccaatatttctttaacttttttttttttggtggggacaatagggtttgctagaatttttagaattttatttttttctattttttaactctattttaggtttatggatacatatgcagatttgttatataggtaaactcatgactcaggggattggtgtacagattattatgtcactc

SEQ ID NO: 99211 - DNA, 641 bp, Homo sapiens
tctatcatgactagtgtaaatagttccaaatggctttgtaactgcattgttcctcaaaaattcaaactgttggatatgcagttggctgagcctaggtcatttgtctatgattctgtgatatgagaggggtctctggtgccagggttggatagcttttaaatgaacaacttccctacatatgtcagccaaggtttgcaagttttgtctcccccaagatccctgactgaccacagtgatgttagttttatagctgttaaaatatcttcacttacttatttacttgggaaagaggcttactctttgcatataattttggcagtattcaagaatgatatggtttttccatggaatctatggtaattacagttgacaactttgaaaaaaaaacttgctggataacaatagcaataagttctacwattacattttaattttccatttcctagcctcttgataaagattgtccaatatttctttaacttttttttttttggtggggacaatagggtttgctagaatttttagaattttatttttttctattttttaactctattttaggtttatggatacatatgcagatttgttatataggtaaactcatgactcaggggattggtgtacagattattatgtcactc

SEQ ID NO: 99212 - DNA, 617 bp, Homo sapiens
ggaggatagaatttgacgatagaaaaatatcctctacatttttcctatttaatctaacagtgatagatgcctttcaacaaccttacctcacatcagtgctgtgataaatgtgcttcttgttgttgttgtgtgttctaagcaagacatttttttagttgtattcagtaacaacaytggtaagcaataggatacatgcagccaaatttattatgtaccaaagactcttctccctggagctgttgtgccagtttacatgcacattagcagaatataagggatctcatgtcccaacatccttggaacacttgacgttatcacgctttctgatttatgctgatctaatgggtaaaaagtgatatcttactgcttttttaagtgatattttctgcataccacattttgagcttttctgcaaattgttagctttcttggtttataatttctataaacattttccggtattgttattaatcctttattaattagaattcctgtctgttcttgttgatttacaagaattctttgagatcatagtttggcaaactttgttctgcacaggaccagataacaaatattttaagcttcgtgggctatataacctttgtcataaatactta

SEQ ID NO: 99213 - DNA, 617 bp, Homo sapiens
atactggaggaggaaagagggaagaaaagaagatttcacaaaaagaggttagtatatgcaagagtttagaaatgagagcatatgygacttaaaaaaggagaaaagggaagtttggcatggtcaggggtgatgaggagaggctgagagagagagttggaaatgcaagcaggaggacctggagggcctgggaaactgtgtggtgagctgctgatgggctacaaacagaaaggtaaaagaatctaagcttgtgatttagaagcttccctaagtgcacagaaaagcaagctcagagcatacctgctcatgcagaaggctagtgaggcttctcctatctctaatggatgggaaggagcttacaggaactgctcaaaaaaaggcctgggaggaaacaggggtcatgcaggcccccagcctcccccagtggctccacatcaatagaacttatttgccccttgctccgagatataacacccaggggattgcaggagacctgagatgccagtcatgtgggaatcacatgtgaggagtctccacactgcatagcccacggggatagggtcaacgggagtggctggaaaggaagaggaggcaatggccggtgctggggccagggatca

SEQ ID NO: 99214 - DNA, 659 bp, Homo sapiens
ctggcacttagtgggcactcagcaagtatttacaaaggaagaaaagaaggatgaaaggagtaaggaaagaagacagggaagacgaggtggctgtctgccctttcttggttgactccctcatttgtttttcagttttagagacaaggtctctcccactatgttgctcaggctggagtgcagtggtgcaatggtgcaatcactgctcactgcagcctcaacctcccaagctcagaggatccttctgcctcagtctccagagtagctgggactatgggcgtgcaccaccatgcctggctaattttttaatttaatttaatttaatttatktatttatttatattttgtagaaattaggttttgctttcttgtccagacttgtctctaactcctggccgcaagcagcccttccaccttggcctcccaaatcactgggattacagacatgagccactgcacctggccgactccctcattttgatggagcaagtcttccttagcttctgatacatagaaagtaaattggttaagagcttctatgactgaaaatgtcattattctagcctcatacttgattgatagtttggctaagtagagaattccaagatgaacaatttggaagatgccttctagtttccagtgtttgtgaaaaaatagaactc

SEQ ID NO: 99215 - DNA, 659 bp, Homo sapiens
ctggcacttagtgggcactcagcaagtatttacaaaggaagaaaagaaggatgaaaggagtaaggaaagaagacagggaagacgaggtggctgtctgccctttcttggttgactccctcatttgtttttcagttttagagacaaggtctctcccactatgttgctcaggctggagtgcagtggtgcaatggtgcaatcactgctcactgcagcctcaacctcccaagctcagaggatccttctgcctcagtctccagagtagctgggactatgggcgtgcaccaccatgcctggctaattttttaatttaatttaatttaatttatttatttatttatattttgtagaaattaggttttgctttcttgtccagacttgtctctaactccyggccgcaagcagcccttccaccttggcctcccaaatcactgggattacagacatgagccactgcacctggccgactccctcattttgatggagcaagtcttccttagcttctgatacatagaaagtaaattggttaagagcttctatgactgaaaatgtcattattctagcctcatacttgattgatagtttggctaagtagagaattccaagatgaacaatttggaagatgccttctagtttccagtgtttgtgaaaaaatagaactc

SEQ ID NO: 99216 - DNA, 733 bp, Homo sapiens
  misc_feature (1)...(733): n = A,T,C or G
catgttcttttcaagcatccttgaaaaatttaccaaggtagactatatcttgagtcatgaaacaaacctcagcaaatttaaaagaattttaaattttaaattcttttaaatcatacagactattttttttaccatgatggaatcaaactagaaattataagagaaaggcaacaggaaaacctccaataattggaaattaaacaatgcatttctaaataatccatggctcaagaggaagtcttattaaaaatacataacacaggccaggcatggtggctcacacctgtaatcccagcacttttggaagccgaggtgktcaaatcacttgagcccaggagttcgagaccagcctggccaacatggtgaaaccctgtctctactaaaaatataaaaattggtcgggcatggtggtgtacacctgtgcacctgtaatcctagctacttgggaggctgaaacatgagaatcacttgaacccaggaggcaaaggatgcaaagagctgagatctttccactgctctccaacctgggtgacagagggagaccccgtctcagaaaaaaaaaaaaaagtagaacaaaattaaaataaaaacaaaccatatcaaatttatgagatcaagctaaagtaatagtaagaggaatatttgtattagtaaatatagttgacccctgaacatntggggggttagggggtactggtcccccaacccgtgccatgtagtaaaaaaagtgtgt

SEQ ID NO: 99217 - DNA, 525 bp, Homo sapiens
cacgcatatttatggcagcacaattcacaattgcaaaaatctggagccagcctaattgcccatacatcaatgagtggataaagaaattttggcatatatatatacatacatatagatagatagatagatagatagatagatagatagataaaggcactgggtcaccagagggagtgcacagtcaggctagatttggttttcaagctgctatttgccactcctattgtatgtttatagggcacctgataagtgtcagaatatatatatatatatatatatatatatatatatatatagwggaatactactcagccataaaaaggaatgaattaatggcattcacaacaacctggctggaactggagactattattctaagtgaagcaactcaggaaaggaaaaccaaaaatcgtatgctctcacttacaagtgggagctaaggtgtgaagatgcaagggcataagaacgatgcaatggactttagggactcagggaaagggtgtggcggggggtgagggataaaag

SEQ ID NO: 99218 - DNA, 579 bp, Homo sapiens
atgtaagaaccatgtattgctcagtattacaaggtagtaaggaaaaataaagtcagtatctccctaagtcacaaaaataaaattatatgaaggcaacactatcaccatctttataatatataatatataaatatattgaatattgtatgtatrtattagacaaatttgtacacagacacacaggatgaggtagaaaaagaagataaagccaattggagaaactataaccagccagagaatctggtcaaaggatataggagagtccgttctgctactctaacacattttttatctgtttgaaattatgcttctcattttttaaagagttggggtctcactctgtcacttaagctggagtgcagtagtaagatcatagctcactgcagccttaaactcttgggctcaagtgatccacctgcctcagcctcctgagtatctgggactacagacatgcaccaccactcatggttaatattttcattttttgtagatacagggtcttgctatgttgtccaggctgatctcagattcctgggctcaagtgatcttgctgactccatctcccaaaacaatgggatt

SEQ ID NO: 99219 - DNA, 574 bp, Homo sapiens
gtctttttgaaccactcctatataatatcacactgaaagtcctagctactgcaataagacaataaaaacatataaaacatatacagattgggaagaaagatttaaagcagcatttctttgaagattattgacctgattttctacgtagcctatctaaagaaagggcaaaataactcctggaactgataagcgaatataccaaacaggcaggatactaagttaatataaaaaagtcagttcttttttttaatattcaagyaatgaacaactggagtctgaaatttttaaaagagtaccattctaagtagtaccaaaataatgaaatacttaaaggtctaaatctaacaaaatatgtcaaggaaatagatacagaaaactacaaaactctgatgaaagaaatcaaagaagatctaaataaacagaaaagtatttcatgttaatgtggtagaagactcgatgttgttgagtaattctgctcaactttatgtattgaacacaatctcaatcacaatttcagcaagctattttgtaggtatcaataaaatgactcaatgctttacatgaaaaggccaaa

SEQ ID NO: 99220 - DNA, 574 bp, Homo sapiens
gtctttttgaaccactcctatataatatcacactgaaagtcctagctactgcaataagacaataaaaacatataaaacatatacagattgggaagaaagatttaaagcagcatttctttgaagattattgacctgattttctacgtagcctatctaaagaaagggcaaaataactcctggaactgataagcgaatataccaaacaggcaggatactaagttaatataaaaaagtcagttcttttttttaatattcaagcaatgaacaactggagtctgaaatttttaaaagagtaccattctaagtagtaccaaaataatgaaatacttaaaggtctaaatctaacaaaatatgtcaaggaaatagatacagaaaactacaaaactctgatgaaagaaatcraagaagatctaaataaacagaaaagtatttcatgttaatgtggtagaagactcgatgttgttgagtaattctgctcaactttatgtattgaacacaatctcaatcacaatttcagcaagctattttgtaggtatcaataaaatgactcaatgctttacatgaaaaggccaaa

SEQ ID NO: 99221 - DNA, 607 bp, Homo sapiens
aagctctcaaaaatgaaatctccaggcacagatggttttaatggaaaattctaccaaacatttaaagatgacaacatcaacaaaatgcaatttcctctaaaacatagaataggaaagaacagtttccagcttactttatgaggccagtattaccatgataccaaaatcagatgaggaaaatatatacataaactacataaaaatatatctcatgaacttagacaaaaatcttcaacaaaatatagcaatccaaattcartaatgtacaaaaagaactatataccataaccaagtgggatttgttctaggtatgcagggctggttcaacatttgaaaatcagttaatgtaatttaccatgtcgataaactaaagaataaaatcataaatcatatcaattgacacagaaaaaggatttacaaaacccacatccattcattatgaaaaacaagacaaaacaggccaggtgcggtggctcacaccataatcccagcactttgggaggccgaggcaggcggatcagctgaggtcaggagttcgagaccagcctgaccaacatggtgaaacccagtctctactaaaaatagaaaaattagctgggtgtggtgg

SEQ ID NO: 99222 - DNA, 571 bp, Homo sapiens
cagatgtgcagatatcaacataagaacacaagaaacatgaaaaggcaaggacatatgacatctccaaaggaacacaattctccagcaatagaccttaatcaaaaagaaatttttgaaatcccagagaaggaattattaaacacactgatattaaagaagctcagtgggatacaagagaatttggaaaaacaataaaaagaaatcagaaaaacaattcagaatataaatgagaaatttccaaagagatagatattttttaaaagaaccaatagaaattctgaaactgaacactcattgaaagaaatacaaaatacatttgaaagcttcaacaatagactagatcragcaggagaaagaatctcagaacttgaagacaggtcttttgaaataatccagtcaaaagtttttaaaaagaatgagcaaaagcttcgtgacatttgagataacacaaagcaattgaatttatgtattatcagtatccctaaggggaaagaaagaacagaaggactaaaaagcctatttaaccaaataatatgttaaaacatcctatgtctagcaagatatttagaca

SEQ ID NO: 99223 - DNA, 481 bp, Homo sapiens
actgtaacaaagtgagaacatagaatcttacctattgtcctcaktgctacaggtattatatccttatatatgtggcgtcagcctcagtccccagatctttttgtacctaataagctaggaaccggtaatatcatggtcagcaagagagagaacatccttaacctaatatttgatcacttactctctttgggaatattttttcaatcttagtagtgatggtgtttctgaaagtccagtagttaaaggtagaattgaaagtgtttaccattcaaaagtacttcagtattttagtaaaaacatacattatagtaaacaatgataaatatgattttcagggaggaaaaaaagcatgagattctttataatagcaaaatagtctgtttacttagggtacataggtccgcaaccgtatcacttcgtcatattaacattccttcaccagtagctgcagggacccatatagtcttaataattaaagtac

SEQ ID NO: 99224 - DNA, 653 bp, Homo sapiens
ataagtaactaacctgcacattgtgcacatgtaccctaaaacttaaagtataataataataaaaataaataaatttaaaaataaataaataaatacaataaaatgcacaaaaggagtgttatatttgctgaaggagtatttatttgctaaaaatttcatatattttaattcatkttgaatgatgtattatttaattatgtgaatgcacgcctttaaaaattattttaaatcattatcttgtttttgaatgcttgatttttttcccagaatttgcttttaagaatactgagctatgaatatcatgcacatatctcatggaacacatgtaaatcatatcctttgagtatatacctagaagttaaattgctaaaaagttggacatgtataagttcataattatgattatgctaaactgtactacgaaaatttttcaaattgaatatgtaattttcactctcacaaagaatgaatccaggtagactggcatcttcccaaacatttcttattgtcagatttgttattcgtgatacattttttgttcattaaaatgggtatacaatattattccattgtggctacaattttatttctttgaacactaataaggacaaacatttcttcatatattcttgcctataccattacctcctttt

SEQ ID NO: 99225 - DNA, 551 bp, Homo sapiens
ttctagttggtgttaacgtgatatgcctagcttttcaacagtacctcagatatccttgtcctcaggcttcaaatttcccacttcaggattctaactaaaaacccatttttaactgctcatgaatgtaaatattctaacctaaaatcacatttccttccacatgaagtaagtgatcagctccacccactgggaagattttctcttcttatgtgcttttcctgttaaccctagatgtgtgtgtaatacaatcactatcaagtttaaggattgcacttgtatattgagctgacccatccccaaatcaagttctttcattttcctccttctgatcacatgggactcctgtaggttcagaggtggatctggaacagagatgttgacayagaccttagtaagtgatacagagttctgggccacctgctcatgtagcttattcatgccctctggtcctcttggaccaaattctaaatctaccattttcatctgatcgtggagtactgctgggtccatctgactttatgatttggaagttcccaagaagccatgctcct

SEQ ID NO: 99226 - DNA, 583 bp, Homo sapiens
actttatgatttggaagttcccaagaagccatgctcctaatgaacagttctaccatgctatggtttggatatggtttgttggtccccatcaaaacttatgttgaaactttatcctcaataacatgactttgggaggtggggactagtgggaggtgtttgggtcatggaggtagatccctcatgaatggctgggtagtaagggagttgtcactctcacagattagattagttctctgagaatagactagttcccaagagagcaggttgttataagtcaagtttcctcctcatatttggcccccatttgcatgtgtctgcttccactttgaccttctccacaatgtcaagacacactactaaagccttcaccagaagccagggctatgctcttcaatgtctcagcctgcaaaagagtgagctaaataaacctttttctttataaaaatgacacggtttcaggtattattttacagcaayacaaaacagactaagacacacagttatggttgcttagtgcctagtggtcaaacatttcatttcagtgtcacattaggacctgcttctcaaaaagtatagaattctc

SEQ ID NO: 99227 - DNA, 592 bp, Homo sapiens
tgggtctaattataaacctgcactatctttagactgcatgaaactaacatttaggagcaaatgtaaatagctacagaaactcataaaatttattgaaattatattcttaacttaccagattcaaaaatttaatgcaaaaaccagttaagaaagttmtaaagaatttttttctgaagatttagttaattataatctcccatcagagaaaattgccttcatttattccttacaaaggtttgactctttttgtgtgttgttctatattcctgcatggttaagagtttagcagcacaatgtgaagctaaatcttctgaggaaagcatttcgaagtttaatattattacctgcagatttaaattacaatcatttcctaagagtttcacatttatttccatattctttaggcaaattacctatcccaatgtttgaatgagggaaaacaagatatgaaaaagacaaggaaggacaaacttagcaaagatcttcctcatacagaagaaaaatctccctttttccatggatggccatccccgaaatggtgtttctccaaggaagtagtaaaatagagttaccaaaatgtaggcatatgtgt

SEQ ID NO: 99228 - DNA, 643 bp, Homo sapiens
aatagctacagaaactcataaaatttattgaaattatattcttaacttaccagattcaaaaatttaatgcaaaaaccagttaagaaagttctaaagaatttttttctgaagatttagttaattataatctcccatcagagaaaattgcyttcatttattccttacaaaggtttgactctttttgtgtgttgttctatattcctgcatggttaagagtttagcagcacaatgtgaagctaaatcttctgaggaaagcatttcgaagtttaatattattacctgcagatttaaattacaatcatttcctaagagtttcacatttatttccatattctttaggcaaattacctatcccaatgtttgaatgagggaaaacaagatatgaaaaagacaaggaaggacaaacttagcaaagatcttcctcatacagaagaaaaatctccctttttccatggatggccatccccgaaatggtgtttctccaaggaagtagtaaaatagagttaccaaaatgtaggcatatgtgtcctgccgtttagttaactgctatttttcttcaactcagctgttactttcttaggaaatactttcctattctctgtgactatattatgttcttgaatattgttctcttataacacca

SEQ ID NO: 99229 - DNA, 531 bp, Homo sapiens
gttaagaaagttctaaagaatttttttctgaagatttagttaattataatctcccatcagagaaaattgccttcatttattccttacaaaggtttgactctttttgtgtgttgttctatattcctgcatggttaagagtttagcagcacaatgtgaagctaaatcttctgaggaaagcatttcgaagtttaatattattacctgcagatttaaattrcaatcatttcctaagagtttcacatttatttccatattctttaggcaaattacctatcccaatgtttgaatgagggaaaacaagatatgaaaaagacaaggaaggacaaacttagcaaagatcttcctcatacagaagaaaaatctccctttttccatggatggccatccccgaaatggtgtttctccaaggaagtagtaaaatagagttaccaaaatgtaggcatatgtgtcctgccgtttagttaactgctatttttcttcaactcagctgttactttcttaggaaatactttcctattctctgtgactata

SEQ ID NO: 99230 - DNA, 642 bp, Homo sapiens
atggagattaaaaacatcctgtcttttgttagtgtaaatgtaattagtacaatttggaatgccatttagccacatctatcaaaattttaaatgtctacacctgttcaatcagctctttgacttccaggaatttttctttcaaatacatttgcaagtgtgcttaatgataaaatgaataaacaatgttgtgttgagatgtcaccacctaccacataacctaaaaagatgttttgttatattagagaaacaagacctagttaatagtagggggatattggtggccatagccaacaagaagccatcaaatttgtgtcagacaaaaaagagaaaaaataaatagaactttctgttaaaataatagaaaaaagttacgaagtcttactaataatcccatgagtttgaagggcatatcaggacaaacacaggaaagatttttctttttttctttattatctttgatttccacaccttttaatttctatgctgaaatctgtagacagaaaagctactgaaagtggctgcttatattttgggaagaaaatttagttttaactttaatttgatgtgatgtctstgtgcatgtgtgtgtgtgtgtgtgtgtgttgtggggcagtgggggggtcaaagaactatagattgaga

SEQ ID NO: 99231 - DNA, 639 bp, Homo sapiens
tggactttcaactgatgttataatgggatgagacccttagaaacctcgaaaaagggagaatgtattttgcatttgtaaaggatatgagtagttaagagccagagagtggactatggtaggcagaattctgaatctccaggatttctactgtctgtatacttgccctgcataatatcctcctctttcatgtaaacaagacttataaaaataataatgataaatcttgtgattatgttatattataaggtgaaggaattttgcagatctaattgagatccctagttagttgactttaattataagaaaaattatcacctagccaggtgaatttttaagagacaaraagcaacagattttcctactgaacttaaagttggacttaattcaaattaaaacctgttctgcaaaagacatttttaggagtcttaaagacagcctcagactaagagaaaatatttccaaaaggcatatcaactataagacttttatttttaatgtacaaagaactcctaaaagtgaacaaagtgaaaaaaattcaaaaagttaagaaatgggcaaaagttttgaaaagacactataacaaagaagatttatagatatcaaataagcatattaaaccaaaaatgagatagatataca

SEQ ID NO: 99232 - DNA, 596 bp, Homo sapiens
ttgctcttgctaacatgaccttaatgtctctctacattcatttttcatggtatgtgatcatttcctccatgaaatactctctatgacactaattttatgattatcttctgacttttttggcctgtcttcaatctcttttgctactcttctctctactccttaagccaggtcttcacattcgtatcagaataatttcagctgttctgtggtctcagcatctacttgwtgatgcctcccaaatcagtatctccagtccatctctgtctaatgagttccagacctataggccaagtgtctactcagtatttctctggtctccttttagttacccagattcattatctatattaacaaactgcccttccccaaacttacccccacttcctgtactctgcttctcagtaaatgaagatctacccatctggaaacttggaagtcttcctcccttgacttctcaccattaccccttgattagattattacagtaggctcttaactggctcactgcttccatccatgcactcctaggcactcttctgtaatcaatagtatgttgctaaatatttaataaatgttctctagggagggggaaaagc

SEQ ID NO: 99233 - DNA, 538 bp, Homo sapiens
tcacagtcactggaatcaaacagacccacatttgcattctggctgtaaaatgttttagttgcataatatcatctaacttctctaagtaaaaaggaatttgcgaagatttgttgacattgttgacaagattaaattggttgccatatgtaaagtgcctagcacaaggcctggaatatagcaagcacccaatatgcttcctaacaattcctctttcatctcctctcttcttcccttccttccttaaagacatatgtatggatttaagagaaaggaakcctgaaaaaataagatgacaagtattttctacttcaaagaaaaatggcaagtctgtgcaagttttcccatgtttgccttaagaatagattttagttacggaaaatttattgtaccaaacccttggcctagtttgtaaaaccaaaggacaaaattgaatactttgcaggcattttagttatctactgctgtatagcaaaagaccctcaaatttagcagcttaaattaaaaaacacttattatctcacaagacaattgatgaggg

SEQ ID NO: 99234 - DNA, 538 bp, Homo sapiens
tcacagtcactggaatcaaacagacccacatttgcattctggctgtaaaatgttttagttgcataatatcatctaacttctctaagtaaaaaggaatttgcgaagatttgttgacattgttgacaagattaaattggttgccatatgtaaagtgcctagcacaaggcctggaatatagcaagcacccaatatgcttcctaacaattcctctttcatctcctctcttcttcccttccttccttaaagacatatgtatggatttaagagaaaggaatsctgaaaaaataagatgacaagtattttctacttcaaagaaaaatggcaagtctgtgcaagttttcccatgtttgccttaagaatagattttagttacggaaaatttattgtaccaaacccttggcctagtttgtaaaaccaaaggacaaaattgaatactttgcaggcattttagttatctactgctgtatagcaaaagaccctcaaatttagcagcttaaattaaaaaacacttattatctcacaagacaattgatgaggg

SEQ ID NO: 99235 - DNA, 368 bp, Homo sapiens
tagggataaatgtaaccaaggagataaaagagctgtacgcagaaaattacaaagctttatagttgaatgctttataatcctttgggtatacacccagtaatgggattgctgggtcaaatggtatttctaattctagacccttgaggaatcaccacactgtcttccacaatggttgaactaatttaaactcccaccaacagtgtaaaagcattcctatttctccacatcctctccagcatctgttgtttcctgacattttaatgatcatcattctaactggcatgatggcaycattgtggttttgatttgcatttctctaatgaccagtgatgagctttattcatatgtttgttggctgcataaaagtc

SEQ ID NO: 99236 - DNA, 632 bp, Homo sapiens
acattctaccagcttagtccagccctgtctcgtgggcccttcttctgttgtatccccattacacagagcaagtataagtgataataagaccaataaataaaacatggaatgaacctcatgcataaagatttcctaaattttgtaaaacttttcaggttccycagaaaagaccttactattacataagttttaaatcacatattctctgtttcttggtccacatcactccctaccttgccatcatgacaccttaattcctcaggaaaactgattgcccatttggatcaggagaaaatgctaatgtacatgaacaaatcaagaaatatcggcaccttttaggatcctctgttaagttcttggggcacaagcagtgaacctctgatgatgtttcatagaaatctatgaatgtaattctatggacttgtaatagtttaccataataaccatgagccaagaattctgctctttggagccattcatggaataatacatcagagctagaagaggaattaaagaaaatatattctaactctgttcttttaaagatgagaaaactgaagttcagaaatattgtcaccagcccaaggtcatacaattcattagttagaaagatggaatcaaatacaggtctt

SEQ ID NO: 99237 - DNA, 582 bp, Homo sapiens
ctcagaatgaaggtttgagtcacacaatccagtaagccaccaaggcctgatgaggtagtatctgagggtgcgggggattcagaatgaagagtggaggaggacaggttgactagttattgcctctagatcaatagcagggatacagcctattgttcaaactactaactttcttattttagatgtctctaaaatctaaaagattgtggtatgacaggcctaggcctacaagaaccatggaggagctgctcctggaacatgcatggagggatagatgtgtgaaaacatataaggagatgttgacacaaagtgtctagtcataaaagaaagataataagagactgcaagaaaaggaataatgattaacaatagagattataagggatttttacacagttatatatttttactccttgtaaaattgtctagagagagcaaatatttatgtaattaaataaatccatggaatagaaatgtttayagaaagattgaacagcacgtccaaagacccatgggcagaagaattttaggtgaggggaaggaagattctaggggatagccctagggcaaaatactttccaatct

SEQ ID NO: 99238 - DNA, 423 bp, Homo sapiens
atctacaaaaaacgcaaaagttagccaggcgtggtgatgcgcacctgtagtctcagctactcgggaggctgaggtggatggcttgagcctgggaggtgggggttgcagtgagcttggattgtgctactgcacttcagcctgggyaatagagccacactttgtctcagatagacagacagatagatagatgatagatagatagatagatagatagatagatagatagatagatagatagatgaaaaatgttgagaacaaacgtaagacaaataaataaataaatgagaaaaatgtgcagagagagcaccggagttgatgagaattagggtggagcagtggttctcaaagagtagtccagagacccttaaaggtgcttgaaaccctttcaggggatccagaagatcaaaacagttttcacattca

SEQ ID NO: 99239 - DNA, 600 bp, Homo sapiens
ggtaggcacttacttttggtaagttatcttgccatcccatccacgtttggtctgttaaaagaagggtctgattacattgttgaggtgacagccatcccacattatggttccagtttggtggtgactgttgtgccttttaawacatagaggtgctttgcctgatacctgcactcaaacagctgtcatttgcccaagttcattatgtatagcataacctaaagttggggtggagtttagctgttttttaattagattaaaaaggtgctgttttgtttcttcataggagtggaaggggctaagtcccgtgtggctatgatacatgggaaaagaggggctatgtttataatgtttcgttttccaatcataataaaatccccataaacttaggttggccagttgaatatgccagggccacccggaagtggaggaaaggagcaattttccacatacccgacagtttgattttgtagagaggccaaagtctgtgcccactcagtaaataaaatactctctgcgtgattccaacttatacccaaaagtagaatgccaatccatatctttatgttacccatctcttgtattttttttgaacaggagttg

SEQ ID NO: 99240 - DNA, 600 bp, Homo sapiens
ggtaggcacttacttttggtaagttatcttgccatcccatccacgtttggtctgttaaaagaagggtctgattacattgttgaggtgacagccatcccacattatggttccagtttggtggtgactgttgtgccttttaaaacatagaggtgctttgcctgatacctgcactcaaacagctgtcatttgcccaagttcattatgtatagcataacctaaagttggggtggagtttagctgttttttaattagattaaaaaggtgctgttttgtttcttcrtaggagtggaaggggctaagtcccgtgtggctatgatacatgggaaaagaggggctatgtttataatgtttcgttttccaatcataataaaatccccataaacttaggttggccagttgaatatgccagggccacccggaagtggaggaaaggagcaattttccacatacccgacagtttgattttgtagagaggccaaagtctgtgcccactcagtaaataaaatactctctgcgtgattccaacttatacccaaaagtagaatgccaatccatatctttatgttacccatctcttgtattttttttgaacaggagttg

SEQ ID NO: 99241 - DNA, 633 bp, Homo sapiens
ttccttatagaggtctttcgactcctttgttaggtatattctgaagtattttatgtatttatttatttttgcagctactgtaaaagggattgagttcttgatttgattctccacttggttgctgttggtgtatagaagagctactgatttgtgtacattaatcttgtatctggaaactttgctggattcttttatcagttctaggagctttctggaggaatccttagggtttttaaggtaaacaatcatatcatccacaaacagtgacagtttgacttcctttttgcctgtttgaatgccctttatttctttctctggtctgattggtctggctaggatttccagtactgtaaagaagagtggtgagagtgggcatccttgtcttttcccattctcagagggaatgctttcaacttttctgtgttyagtattatgttgtctgtgggtttgtcatagatggcttttattacattaaggtatgtcccttgtatgctgattttgctgagagttttaatcataaagggatgctggattttgttgaatgctttttctgcatcgattgagatgatcatgtgatttttgtttttaattctgttcatgtgctgtattacatttactgacttgcatatgtta

SEQ ID NO: 99242 - DNA, 490 bp, Homo sapiens
gagtcctgtgatgtgaaccatctatggggctctcagccatggatactagtgcctgttctggtggaggttgcagaggatacagtggactccatgagggtccttagctttggtggtttaatgctctatttttgtgctggttggcctcctaccaggaggtgctgctttccttaaatgacctttatcttctgctactacggtggatagggaaggaccatcaggtgtgggtgggggtaggagtgtctgagttcacactgtccttgggcaggtcttgctgtggctgctgtgggggatggaagtgagattcccaggtcactggagttgtgtacctaggaggattatggctgcctctgctgagccatgcaggttgtcagggaagtgggggaaagccagcagtgaaaggcctcacacagctcccaagcaaacagaagggccagtctcactcccacygtgtgtcccccaacagcccggagtctgtttccaagcagagggc

SEQ ID NO: 99243 - DNA, 446 bp, Homo sapiens
ggaattccaagccattgggtctcaacctgtgagatgccatggaaatggggcctgcagaatgatgccacttggctccccagactcagcccccttcctagggacatgcacagatgaatcttctgccttgccacagatcctggggctggagtatgcaaaactcctgggtgtctgtgtgtgcctgagtggccactstgccaagactccacacaggccatgtatcgagcccaagaccctggtattgtggctcatgaggggatctcctgatccacagcttgcagagatccatgggatgagtgtaatttctggggaagggtcacgcattgactcaccacttcccttggctgggggtgggggttcccttggcttggtgctgctcccaagtgggtcatcaccccaccccacttcttttcattctctgtgggtcaagctatttgcttagtcagtcc

SEQ ID NO: 99244 - DNA, 577 bp, Homo sapiens
acttaaaccaccttacttccagtcttgttacacagtggctctaattgcaacagtgtggtattgtcaggacrgacacatatattaatggaatcaaatagataccaaagaaatatacccctgtgtgtacagtcaattgacttctgacaaaggtactaacgaatcccatgaaaaggaaagtttttcaacaaatgatgttgaaataacaggatcgatatgagaaaaatgaacctagactagcacctcacagtatacacaaagtttaactcaagacaattaatacatttaatggcagaagctaagaatataaagattttagcagaaaatataggaggatatctttacaatttgcataggcagagatttcttaagacagtggtaccaacatttttggcaccagggaccagatgcgtggaagagtttttccaagaacagtggtatgggggatgcagggatggtttggggatgattcaagcgcattacatttattgtgcactttatttcaattactattacttactatgatgactaatattgagtgtcaacttgattggattgaaggatgcaaactgttgttcct

SEQ ID NO: 99245 - DNA, 468 bp, Homo sapiens
ctctgatagaaaattccttattgccataatctgatttctgagtcaaatgcaaaaactgtctttactttttggataatcttgtagaatgaacagattatacatttctttgaagaatttgaactgagttatgatgtatagatgggagataaacccggaacaaggcttgcatcagagacgtcctgaaccgtgatgttcttttggtatctaagcatccctgtttctttctccatgcaatgcaactttttcattctcttgcattaagtaaaaataccaatataaataaaattcgtttgaagatttacctagctaagttaacccttgtatgcatttgtatttaktcagtaaataataaacaattttatttttattattttttattttctttctttttttttttttttttgatggagtctagctctattgcctaggctggagtgcagtggcacaatctcggctcactgcaacctt

SEQ ID NO: 99246 - DNA, 620 bp, Homo sapiens
ctattctataagtaaagatttcaggcaacctgctcttaatgtcattgatcaattcctaatttagctagatatcagaaattggagcctctttaaggctaaattcagtccatagacatgttatatctgccccacattatattttaacatccacaaaaagatctaagtgtctgcttttgcagccctggacccaggtttactgcagcaatcagctggagatgagcatacccttcagctcaccacaatgcccagccgagggccaggtgccatttattctcccactgggctactgccttcccataactaccccccrcactttacactccacctggtccctgggggcatttcaagtcaccacctgaggtctccatgatgagagaacttcatatttaactaggaaaactatatgtggtctaggcagagcaagactggctttctgggcaagtgttaccagaaagaccatgagaaaattggagctcaaaatttccagatcttttactatttgaatcatcttcagacacagaacctactctttatctagaatgtggcttattgagctagaagtgacatctcttaaatacacagacattagggaaggataatgacaggaaaggaaggaaaag

SEQ ID NO: 99247 - DNA, 595 bp, Homo sapiens
cagggtctgaggccatctgagagatgaactgggccaaatgagagagaaaacagattaaacaggccttgatttttttaaccacgcttggataattatctttagaatttgattttgctctttttacttagtccaaaatgcatatatcattaaattcttatgatttgaccatactttacaacagtgacatttgcaattacagttttgagttcttctctaccaacaatggagcaagttttggtactataactcagraatagcctatttggttgagataattacgctgcctatttaaaataaatgaagatgacttgggaattaggatcaggaagaaggatttagtctttagttcaatttaatcaccaaacatcatctctgtatatttaaaagaacaagatataaaaatacaataattttcactgagtgtttttatctcaaacattgttgatatttttaatctggatttccacttaacttcaagtatctattaggcagcctgctctggcgaagagctttgcaatcaggcagacctaggttcaaatcctggtcctaccacttcctacatatgcaaactcagacacaggggtcacccaggaca

SEQ ID NO: 99248 - DNA, 506 bp, Homo sapiens
agagcacaatgagaaggtccatatgcatctaatacaagattcagatgatgaaaacagagatacggtgttagtttgggtcctccaagaagcagatgctgagacgagatgttgggaaaaacacctgtgaaggaaaaagaggaggaagcaggaggaggcagggagagccttcagaccatggtgtaggtatgatggagagagaaraaaggagtactgggtaggaagagactcagagtgagacgcagatgtaagaaagtttggtcacactgatggggagtccaggagccaatgtcatccatgaaaggatcctacctcctgcagcagtgggccagcactggtacccctgtcatattctgccatcagctgggagcagcccaggagaagcgtgagtgaatctgagacatggcctctggggctcagtcaactatgcttcctccagcaagacaaccgagcagcatgattttatggctgccccagtgaaggagaagcaacattttaaaagataatag

SEQ ID NO: 99249 - DNA, 602 bp, Homo sapiens
ttacaagtaattttatgaagcttttcagtttaaaatgaataaaataccataaaatatacatccaatgacttaactggtaatatatggtaatttatttttactttttagtaacagccttctgttcattcatgctgaatactggagggaatggtgataacttctttctgaggtaagggaagaggtggagggtcagagtagactgcagaggaggtgacatattggttgagttggacttaaccaaattgaaaaggggagaaagttcatttcagacagagcaaaaagcataagcgaaagtatagagacatgaaaatgtatgcatractagaaaattatggctcatctgttaaattcagtgtatgaaaggtatgtgtggcagtagttgtgtgtatgcaggagatgaggttagaaaggcagactgagatgagattataaatagtcttgaacactacacaatgggatttgaacttaattccataggttgggaggagtcatagccagtttcctagcaggacgacacataaccctatctgtgacttagagaaacaactttggtgacaagataatgaatgagtgagataagagaaaggttggaggccagaaga

SEQ ID NO: 99250 - DNA, 594 bp, Homo sapiens
gaggccctgcactatacttagaggccaagaagaatctgaacgactaggcctgtgttaatccattttatattgctataaaagaatgcctgagactgggtaatttataaagaaaagaggtttatttggcttatagttctacatactgtacaagcatggcaacatcatctgctcggcttctggtgaggcctcggaagtttacaatgatggtggaagacaaaaagggagtaagtgtgtcacacggtgagagagggagcaagatgaagaagaggaagaaaagcaagatgaagaagaggaggtgctgggcttttaagmaccagaactcctgtgaactcattactgtcaggagggctctaagccattccagaggatccagtcccatggtggcaggccaggtttccattagcaaccagaacagtttccaataacccttcactataattttgatgaacacataagttaaactttgaagaactggagaaactggtgcctgagtacaagggctggaatgccaaaacaaacccattaagaccatacccgggttttctcagaccctaaagtctgatcgaataataatagcattcttacacaccttgt

SEQ ID NO: 99251 - DNA, 526 bp, Homo sapiens
agaagaaaaggcccagaaattctggcatccccagttcaaattccactcttcaccaacttcaccttgcatttccacaccacagacttcccaggagcttggtctctcattcacatcgatatttatgcttggaatgtgaaggatcccaaattctacgtccaatcacatgktcacatccctgaatgctctgaccaccccagacatttctgaaatggcttagctcctgcctgcccctccaaacttgaccaatgccctctgcctcccttcatgaaggtctgtccacagggagcctttctcaggccctcaaaggtgccgagtttgttctccacttcacaacccccaggtaggactgtgtcctcgacttagaacactcttcccctcacctcagctcctcacattctttaggtctcagagcaaacattccagccttccattctgagtagacccccaaaacttgattatcctctatttcaaaaccctacttatttatttcaaagccctgataactgtttattattttatttatttg

SEQ ID NO: 99252 - DNA, 644 bp, Homo sapiens
ccccttcacttcctccaggcctggattcactttcttttttaatggctggggccagtgatttgttcccatcgatcactattgatgtttttcaattgtatccgtgacacttttggcaatatgtttgtaaacacagagccttctgggatctcacttcttgtcaccacgtacaggcaccgtctccttgtcactgagtattagctgtcaatcaaagggttgggaagggagctctgtgtccttggtcctgggacttgcttctttttgtctttctgcctggaagtgaacattcctcattcattcccagagggaaaatggaaaccttcctctttaagtgggagaaaattgggcgagaacaaggaaaggtttctacctggggccaggyatcgtgtcctgggcagaggaaaccacagttcttctggggagaaaaatgcagcagagaatcttgtacccaccagtttagcttggatctgggctgcaggagcagagaactgctcccttgaccacaggtagctgagcagcctgcatccaaatttcatcccagataactgggtgaacaactagaaatttcctgggttcacctagacaaggagctttccaacttttttgatcaagacccataagtaagataaataattcagctcatgact

SEQ ID NO: 99253 - DNA, 584 bp, Homo sapiens
cacacgtatgaagatgaaaaacattttcgatgaattgattttttgttattatccaatagttatttgttgttttgttttgtttttgacatcaaacagttttgagattcagaaaatttctgctttggagtatcttctttgtcttttttttcttttaacttttaaatttgggggtacacgtgaggggttgttacatagataaacacatgtcacagggatttgttgtrtatgttgtttcatcacccaggtatagttttttaaaatgttgagcagagctacaagaaactaatcttcatgttgacatttctatgattcaacatttcattcaaaattacttggcctttacatttttgactcagaaaggctgaaaactaattgctgaaaggggagctctacacatcaccttttctgatgtttgctgaggtctagcaaaggttgcaaaaataacttggctacaaatactaatatttatgttaggatacttgcataaactttacagaaaccactttcacatacatatttctttcaatgttcatttacaaccactgtgtaagataaagagtgtatatgttaaggacacatagatt

SEQ ID NO: 99254 - DNA, 584 bp, Homo sapiens
cacacgtatgaagatgaaaaacattttcgatgaattgattttttgttattatccaatagttatttgttgttttgttttgtttttgacatcaaacagttttgagattcagaaaatttctgctttggagtatcttctttgtcttttttttcttttaacttttaaatttgggggtacacgtgaggggttgttacatagataaacacatgtcacagggatttgttgtgtatgttgtttcatcacccaggtatagttttttaaaatgttgagcagagctayaagaaactaatcttcatgttgacatttctatgattcaacatttcattcaaaattacttggcctttacatttttgactcagaaaggctgaaaactaattgctgaaaggggagctctacacatcaccttttctgatgtttgctgaggtctagcaaaggttgcaaaaataacttggctacaaatactaatatttatgttaggatacttgcataaactttacagaaaccactttcacatacatatttctttcaatgttcatttacaaccactgtgtaagataaagagtgtatatgttaaggacacatagatt

SEQ ID NO: 99255 - DNA, 565 bp, Homo sapiens
aacaggtgctatagcaagtagccataggaagctgtcatttatttctttggtatatgttttaaacattttctcttatgatgtccctgaaagaaattttatttcttagtacctgtgtaagctcatatgctacccaagaaactgatatctatatttttatcttattaacattgtggatcttttaactgattccatgtcttttttgctgcaaaattttttatgtatttctctaaagaacattttccttgattcattttacttccacttttaaatgtttatcctgatatttttatttttccctattatcatttttagataaattatttcaatgtgagtrgaataagaagaaaggaaggaagggaggaaagaaaaaaggaaggaagaagagaaaaaaatacagagaagggagggaaaaaggaaaaaagaaggaataaagattaataaacaaaatttagaacttctggaattataaaagtaatagcatctggtaagaaatcagcattaatttttccagtttttagcaatattctaaaaatatctacaatttttttcatttatctgcaacaga

SEQ ID NO: 99256 - DNA, 566 bp, Homo sapiens
gatttcaaagggtaattttagaatattaaagaagaggtttttatttaacattttgtttttaaaataatgtattttctataaattaattaggaaaaacacatttaataagtcagaataaaaataaaaaaattctgaagacagttatgagcttccctgatcagaatataaaacaaattcaggacacatagaattactgacattactgaccatactaatgtattgagaaaataaagctggaaattcctgtgataagtttaagcaaaatrttatgacgatgtaccccagagaaaagataaacaagaaaagctataaaataacttacctaataaacaccctagaagtccatattggacaagaccaggttaaaacgaacaaattgttttatatgctttctaatttacagtgaaaaagtcagagactctaatacaaccagaatctatgattaaaaagggtaaatatatatggagatatatatatatataatatatatatgtaaaataaaacatacatggctgactttctaaaacaagtggcataagtacagggtaatttaatattttttgctg

SEQ ID NO: 99257 - DNA, 566 bp, Homo sapiens
gatttcaaagggtaattttagaatattaaagaagaggtttttatttaacattttgtttttaaaataatgtattttctataaattaattaggaaaaacacatttaataagtcagaataaaaataaaaaaattctgaagacagttatgagcttccctgatcagaatataaaacaaattcaggacacatagaattactgacattactgaccatactaatgtattgagaaaataaagctggaaattcctgtgataagtttaagcaaaatattatgacgatgtaccccagagaaaagataaacaagaaaagctataaaataacttacctaataaacaccctagaagtccatattggacaagaccaggttaaaacgaacaaattgttttatatgctttctaatttacagtgaaaaagtcagagactctaatacaaccagaatctatgattaaaaagggtaaatatatatggagatatatatatatawaatatatatatgtaaaataaaacatacatggctgactttctaaaacaagtggcataagtacagggtaatttaatattttttgctg

SEQ ID NO: 99258 - DNA, 468 bp, Homo sapiens
aattccaagccagtgtgtcttaacttgtgaggtattgtggaagtggggcctgcagaatgatgctgctcagctccctggatttagctcccctcttaggggatgtagggacagatctcttaccttgtcagaaatcctggggccacagtatgcaaaactcctgggtctctgtgtgtgccccagtggctgctctgcagggacttcacacagctctctgtatcagacccaaggccttggtggtatgggcttagaaggggatccctgatctgctggttgcaaagatctgtgggagaagcatgatttcccaggtggratcacacaatcactcaccacttcccttggctgggggtggtggttcctttggctctatgccactcctaggtgggccatcaccccatcctgcttttcttcattctctgtgggtcgagatgtttgcctagtcaatcccaatgtgagaatctggatatttca

SEQ ID NO: 99259 - DNA, 596 bp, Homo sapiens
ggcaatcatctccctctaggtaaggatatatctcagccatacagaactgatggatttcgaggggtatttaatttcaggtttcactttttatttagcttctagctccctatctagtctgctgtactgctccaaatgccaaaaaataatttttttcgtattgactacactggacatatttagggtgagatttaaaagtggctcctcckccatttaacaccaatactataatagaggaaagggcaggatacagcccagaacacactcagtattcctttccttaccactcaattccccatcattctgtttccatcagtggtacataagttcctcttaccaggtgactgtgaacaatttccttctagtaaaatgattatgtcttaacattgtatcttcacccttttccccactgaaccatatattcgaaccatatattcagtaattgaggttaaatacatttccttaaacatttacaagtataatcctttgtattttaccctccaatgtaggaaagtacccccccaaaaatatggaaatgagaaaaatcaaggaattagctttatgttactacattcttgttggattttttttttaaccta

SEQ ID NO: 99260 - DNA, 536 bp, Homo sapiens
  misc_feature (1)...(536): n = A,T,C or G
ggtcttacagcagcccgtagtagggtactgggtattgacctagatgtgcattgggaagcctggctttcctatacctcyttaactgggcattagctgaagccatgtcaagtcaaactcatctcaagggcaggggacaaccaagcattaaactctcaaaatggcaccttgagtctatagtcagggagggtgggtctcctcccatgcaggcagtgtgggcatgaagctgtggagaatacagtccacttgtgtctcaatctcacagcagcctgttgcagggaagtaaatattgtcttagatatacataggatacctttgtcttcttgttcctccttggccagatggcagctacaaccacatcagcctgaactcaggcntaaggtgacatatggctcagccttaaactctcaaaatggcactcaccctgggcctgggacccagggtgggcagagtaccttccagtctagcagtatgggcaagaagctatggggaatatggtccacttacatctcagtctcacagcagcccacagcagggca

SEQ ID NO: 99261 - DNA, 536 bp, Homo sapiens
  misc_feature (1)...(536): n = A,T,C or G
ggtcttacagcagcccgtagtagggtactgggtattgacctagatgtgcattgggaagcctggctttcctatacctctttaactgggcattagctgaagccatgtcaagtcaaactcatctcaagggcaggggacaaccaagcattaaactctcaaaatggcaccttgagtctatagtcagggagggtgggtctcctcccatgcaggcagtgtgggcatgaagctgtggagaatacagtccacttgtgtctcaatctcacagcagcctgttgcagggaagtaaatattgtcttagatatacataggatacctttgtcttcttgttcctccttggccagatggcagctacaaccayatcagcctgaactcaggcntaaggtgacatatggctcagccttaaactctcaaaatggcactcaccctgggcctgggacccagggtgggcagagtaccttccagtctagcagtatgggcaagaagctatggggaatatggtccacttacatctcagtctcacagcagcccacagcagggca

SEQ ID NO: 99262 - DNA, 536 bp, Homo sapiens
  misc_feature (1)...(536): n = A,T,C or G
ggtcttacagcagcccgtagtagggtactgggtattgacctagatgtgcattgggaagcctggctttcctatacctctttaactgggcattagctgaagccatgtcaagtcaaactcatctcaagggcaggggacaaccaagcattaaactctcaaaatggcaccttgagtctatagtcagggagggtgggtctcctcccatgcaggcagtgtgggcatgaagctgtggagaatacagtccacttgtgtctcaatctcacagcagcctgttgcagggaagtaaatattgtcttagatatacataggatacctttgtcttcttgttcctccttggccagatggcagctacaaccacatcagcctgaactcaggcntaaggtgacatatggctcagccttaaactctcaaaatggcacycaccctgggcctgggacccagggtgggcagagtaccttccagtctagcagtatgggcaagaagctatggggaatatggtccacttacatctcagtctcacagcagcccacagcagggca

SEQ ID NO: 99263 - DNA, 549 bp, Homo sapiens
actttgtttactatcatgccacatattcgtttcaccacaaaacactttttttaagaattcttattaataacacttcttggaaattttgcttcataaagctctcctagggagacaatgatgcagagtaaataaatttcaggttatgcaggacataccattgaatataagatttacaccagaagatattttctttccatgaaaagccacaaacatttataaaacatatttcgaggcaggtctatttaggaccttgctattcaaaatatggttcttggaaaaggaaggttagcatcactgtggatcttgttagaaatgtggmaactctggtcccacctcagagctattgaatgagaatcttgcattatctgcaacatccccagctgattcctgtgcacaaaaagtttgagaaagtctattgtagaagactcaaacttctaaagttatgaatatcacacatttctgcatgtaaattagaaaacacaaactagaaacatgtaattaaggttaattgcacttatcttttaaaacgtgacgattaaaacgtgagca

SEQ ID NO: 99264 - DNA, 649 bp, Homo sapiens
aaggccagggaagttttcttcaattattcccccaaatatattttccaaacttttagatatctcttcttcctcyggagcaccaattattcttaagtttggtcatttaatataatctcagacttcttggaggctttattcatattttcttactcttttttctttgtcttcgttggattgggttaattcaaagacgtctctgattagcttaataactaacatcctgaattctttttcaggtaaatcagggagttcttcttggtttaggtccattgctggtgagctagtgtgatttttggggggtgttaaataaccttgttttgtcatattaccagagttggttttctggttccttctcatttgggtagactctgtcagagggaaggtgtagggctgaaggctgttgttcagattctttttgtcccattcagattcttttgtcccacagtgtgttcccttgaggtagtactctcccccttttcctatggatgtggcttcctgagagaatagctgtagtgattgttatctttcttctggatctagccacccagcaagtctaccaggctctgggccagtactggggattttctgcagagtcctgtgatgtgaaacatctgtaggtctgtcagccgtgaataccagcagagtattt

SEQ ID NO: 99265 - DNA, 567 bp, Homo sapiens
tagtactctcccccttttcctatggatgtggcttcctgagagaatagctgtagtgattgttatctttcttctggatctagccacccagcaagtctaccaggctctgggccagtactggggattttctgcagagtcctgtgatgtgaaacatctgtaggtctgtcagccgtgaataccagcagagtatttggcatgtctcctgggtcctgcaggagcaatccgcttccttcaggggtctgtgggtcctttcaggtttcctgatttattcctgcagttgttstggagcagaaattcataatgcaagcctccacatgctgctctgtctgagttagagctgcagtctagtcctgcctcccatctgccatgattccctaggagttgaaaacacatgtcttcttttgagaagtgtctgttcatgtgctttgctcacgttttaatcgggttgtatgtttttttctggtaaatttgcttaagttccttatagactctggatattaggcctttgtcacatggatagattgcaaaaattttctcctattttgtaggttgtctgttcactctgatgag

SEQ ID NO: 99266 - DNA, 569 bp, Homo sapiens
atatattaactcttttttcctcttagatacatgttaatattatcaaacattttaggtgctgtcagatgtaggaaacatatgataattctaatattgcacaacaaatttttatggtacagaaatggcttttgctgtaggtcaagtagccattaagaatttgtcttcataaccaccagagggcgccagtgcctgcaatattattagctgtagaagtaatctaaccagtttaggtgatayttgactttggacattgccaagctataaaaagattttaaaaagaaaataactcccaaagaaatatatttacactctgtaacacctaaataatgttggactgttgaattaaaacaacagagttaacttgcctgtttttggtaaagattaatttaacataggattttattgatatttctgaatcaggaatcaaatggataacactaaatttagcaatgaataaaaggagcattactaaagccatcaacactaacaattcatttagcaccatacatttagcaccagaatagatactgacagttcacactgaataaaaaaactttaattgctaagaa

SEQ ID NO: 99267 - DNA, 569 bp, Homo sapiens
atatattaactcttttttcctcttagatacatgttaatattatcaaacattttaggtgctgtcagatgtaggaaacatatgataattctaatattgcacaacaaatttttatggtacagaaatggcttttgctgtaggtcaagtagccattaagaatttgtcttcataaccaccagagggcgccagtgcctgcaatattattagctgtagaagtaatctaaccagtttaggtgatatttgactttggacattgccaagctataaaaagattttaaaaagaaaataactcccaaagaaatatatttacactctgtaacacctaaataatgttggactgttgaattaaaacaacagagttaacttgcctgtttttggtaaagattaatttaacataggattttattgatatttctgaatcaggaatcraatggataacactaaatttagcaatgaataaaaggagcattactaaagccatcaacactaacaattcatttagcaccatacatttagcaccagaatagatactgacagttcacactgaataaaaaaactttaattgctaagaa

SEQ ID NO: 99268 - DNA, 444 bp, Homo sapiens
ggcttatctcaggaatgcagttagtttaactttagaaaatcagtgtctgtaatttacaatattaacaaactaaaaaagtgattatttcaatagatactgaaaaagaatttgacaaaactgcaatgtgaattcctgacaaacactctcagcaaatcaagaacmaaaggaaacttcctcagtgtgataaaaagcatcttttaaaaacttacagctaatttaatggttatatttaaaaaacttaatattttccctctaatatcatgattatgagaagttatctactcttacctgttcgaattgtatagtgcagattctagccagtgcaacaacaaaaaaaagaaatacagtattgagcatgaagaagatatatttatttaaagatgacagaactgtctatgtataaattccaatgaaatctacataaatatctaatagaaataattg

SEQ ID NO: 99269 - DNA, 562 bp, Homo sapiens
ggggagggacgatggaaagcattaggagatatacccaatgtaaatgacgagttaatgggtgcagcacaccaacatggcacatgtatacatatgtaacaaacctgcacattgtgcacatgtaccccaaaacttaaagtataatttaaaaaatcaaaagataaaaaaataaataaaatcccaacagatatatatacacatagacaaaactattctaaaaattgtatagacagccaartatactacaatagctaaaactactttgcaaaataataacgtaggtaaagttactctacatgacttcaaaacttagtatatagcaatagtcctgtgtggtatggcagaaagacagattaaagaaacagaacaaagaacccaaaaagacgctcaaatttgcccaaccacctttggtcaaaggttcagaaacagtaacaacttaatggaggaataataatcttttcaaaacatgcttgagaaatcggacaacaggtaaacaaacagaatgaacctcaatcttaacttcaccctttatacaaaaattaacttaaaatgaacaattgattta

SEQ ID NO: 99270 - DNA, 556 bp, Homo sapiens
ctggagtggacagacatttcacaagactacagaagatgaatctgagaaagaacatggttgtctatattttgcatctgtagtgataaccaactttggtagatttctttaagataagctatagtttttgcacagattattttcawtatttactcaaattgtttatttttcttcaatgcaatctttacattgagaccttgagtccattgtttttatctacattgtatacctaaagagaaaaccatgatcatgtatctaaatgcccaagaaaacagaaagcaatgaaatcaaaactggacccagggacttctttgcatacaaactaatatgttggttttgaaagtcatcctgttacttctcattggaacagctctccacagcccaagcccactactcaggcttctttagctgagtggttttttgtttttgctgttttgcattattgtactatgcctttttttttccatgtttaccactttcttctttctctcttttttgacttttaccttagaattgtggagaatatgcacaggtttgttacaaaggtatattttgtgat

SEQ ID NO: 99271 - DNA, 432 bp, Homo sapiens
tccttaaaatgtggataatattattacctgtctcatagaattgttaagaaaattacaaaagtggtctcatgtagtatattaarggttttcaaaaaatattagcttctgttataaagtttatttgcttttagcttgacctaggatttagaatatataaattctatttttcttccactagaggtcctctctgtatttgtaaaaagcacacaaaccaattttctctgattcttaaacaagatttcctcattaattcctaagggtggactgagattgagcctcataccctttctcatttcattcatataggaggcatcaaacatcgcaatctcagagaacattctggtctacaagccttaagtctctctatgtagtgtctgagatatcagaacagtcgttgaaattggggtagggtcagtgttgggacaaattaca

SEQ ID NO: 99272 - DNA, 432 bp, Homo sapiens
tccttaaaatgtggataatattattacctgtctcatagaattgttaagaaaattacaaaagtggtctcatgtagtatattaagggttttcaaaaaatattagcttctgttataaagtttatttgcttttagcttgacctaggatttagaatatataaattstatttttcttccactagaggtcctctctgtatttgtaaaaagcacacaaaccaattttctctgattcttaaacaagatttcctcattaattcctaagggtggactgagattgagcctcataccctttctcatttcattcatataggaggcatcaaacatcgcaatctcagagaacattctggtctacaagccttaagtctctctatgtagtgtctgagatatcagaacagtcgttgaaattggggtagggtcagtgttgggacaaattaca

SEQ ID NO: 99273 - DNA, 432 bp, Homo sapiens
tccttaaaatgtggataatattattacctgtctcatagaattgttaagaaaattacaaaagtggtctcatgtagtatattaagggttttcaaaaaatattagcttctgttataaagtttatttgcttttagcttgacctaggatttagaatatataaattctatttttcttccactagaggtcctctctgtatttgtaaaaagcacacaaaccaattttctctgattcttaaacaagatttcctcattaattcctaagggtggactgagattgagcctcataccctttctcatttcattcatataggaggcatcaaacatcrcaatctcagagaacattctggtctacaagccttaagtctctctatgtagtgtctgagatatcagaacagtcgttgaaattggggtagggtcagtgttgggacaaattaca

SEQ ID NO: 99274 - DNA, 577 bp, Homo sapiens
  misc_feature (1)...(577): n = A,T,C or G
cttatattattctgatgaatcatattagcaaatgaggggtcacctatgtcactgaatcttttggggaccactgggcaatnagcgcgctaaataaaagaggcaaaatgattaaaaagaaaaaaaagacttctataaaaagccaccagccagctagagcaaccagaacagaacctcttcgtgtctctattcccttttttctccctcctaaccctggaagtctttcctgaggactgagtgcagacccggtgcaaggatgttgggaagtaastttgtctgtgancttcantttctttttttgtaacatgggagtcataacattgacctaaaagagttgtgtgcaattgaagagacaaagaatgcaaaacatagtctgtgaacctacaaaaggtgctcgctcagctcagtttcaaccactattcccctctccttcttcctcactgactgcctttgtccagcctccaggagcagccagcctccaggagcgggcagcctccggcctcctgcctcctttctgtgccagcccancaacctgagtcacactctggattcagtcccagtctgcttggctgaagtctgg

SEQ ID NO: 99275 - DNA, 577 bp, Homo sapiens
  misc_feature (1)...(577): n = A,T,C or G
cttatattattctgatgaatcatattagcaaatgaggggtcacctatgtcactgaatcttttggggaccactgggcaatnagcgcgctaaataaaagaggcaaaatgattaaaaagaaaaaaaagacttctataaaaagccaccagccagctagagcaaccagaacagaacctcttcgtgtctctattcccttttttctccctcctaaccctggaagtctttcctgaggactgagtgcagacccggtgcaaggatgttgggaagtaagtttgtctstgancttcantttctttttttgtaacatgggagtcataacattgacctaaaagagttgtgtgcaattgaagagacaaagaatgcaaaacatagtctgtgaacctacaaaaggtgctcgctcagctcagtttcaaccactattcccctctccttcttcctcactgactgcctttgtccagcctccaggagcagccagcctccaggagcgggcagcctccggcctcctgcctcctttctgtgccagcccancaacctgagtcacactctggattcagtcccagtctgcttggctgaagtctgg

SEQ ID NO: 99276 - DNA, 656 bp, Homo sapiens
ctgctacctttattaatatttttatacctaaaatcccactgattgtggcaataagtaagtaacccacaaaccagcaggaagaacaaggagaagggagttgcaattctggttctgccaccagctcactgtgtggccttcattgccagacacttgctccccttgcctcttaattcccgcctctgtaaaatgagaatgtaagactagttcattcctaaggtcatctctatctcttgtaaggtccaattctcatatggggcatcggttggatttatgacaaataaagcttgagggagacatgagacactgccaccctctaccttctcatggactgttgaaccagtgcatcgtagactatcagagttggagacccttattccaaccttctcagggtattgcctaggaaatggagccctcaaagaacattactgaagtgacagaggcaggaaatgagttataacttcttagcaatgtcaccaaaacaagcttattaggtcatgataacctatcactctgtcacccaggttttaatccaattctgcctcaaagaagcatttgggcctgacttttgtgtctttgtttttctcccagtcacacacayacacacacacacacacacacattttctcctttactccatcacaccactttatttattg

SEQ ID NO: 99277 - DNA, 545 bp, Homo sapiens
gtagtacttcaaccccactaggataactgtgataaaaacaaacaccccaccccctgcaaataataagttttggtgagacagtgaagaaattggatccctcatatactgctagtggaaaaataaaatgttttagccaccgtgcaaacaatttggtggttcctcaaaaagttaaacatggaattactacatgaccctggaattctactcctatgtgtatactcaacagaaytgaaaacacatgctcaaacaaatacgtgtacatgcatgtttataggagcactattcacaatagccaaaggtgaaaatagcccaaataatcctcaacagaagaatggataaacaaattgtggtatatatgtacaatggaatattatttagctataagaagaaatggagttctgatttttactacaacatggatgaatcttgaaagctttatgctaagtgaagaagctggatgcaaaaatctacatattgtttagttccacttatatgaaatatctataatagataagtcgttagagatggaatgaagattgatggtt

SEQ ID NO: 99278 - DNA, 602 bp, Homo sapiens
tttattagtctgttttcacgctgccgataaagacatgcccaagactgtgtaatttataagaaaaagaggtttaaaggactcacagttccatgtggctgaggaggcctcacaatcatggtggaaggtgaaaggcacgtctcacatggtggcagacaagagagtttgtgcagggaaactcccctatataaaaccatcagatcttgtgagacttattcactatcacaagaacagcacaggaaagacagcacaggaaagacccrcccccatgattcaattaccttccactgggtccctcccaggatacatgggaatcgtgggagctacaattcaagatgaggtttgggtgggaacacagccaaatcatattcacactcagggcccaggatattgtttctagacagagggaaaataacaggaggaggagaatggctccaagtggatgtttctcattttttcccttagctcccatctctaaatctctgtccctccaaattaagggatataatgtttccctccaaatttcttccattttatgccatcacactgcgcaattatttcaggaacagtgatatgtgggtttaatagttgttaaggttgaaaca

SEQ ID NO: 99279 - DNA, 695 bp, Homo sapiens
tgcaggcaggtgttgcaaatacggtcattttctaagaatgtggtctatttgggcctcatgaagatccacctgctccaggagtctacaaccttgctttgccaggaatgcctttcttctcagacagctagtacttatcttctaaatgagcttaattactaaatccctaagggtgttgaacatcaaggactttatctcttggtgtagataaattagctcactgaagtgttgtacaccagtttggacctgggaggggtctagagagaggaaattattattatttgatacataacatttgtacatatttagggcatacagatgatgtttcattacatgtgtagaatgagtaatgattaagtcacgatattcagagtatccatcacttgaagtatttatcatttctatatgttggaaacatctcaaatyctctcatctagctgttttgaaaaacacagtatattgttggtagctatgattatttttaacttctttgttatttaacattgctgctatgcccctttgtgtaaaccttcatatgggcatttaataccatcttctttaacccctggttcactggggtcttccagatacatgcggtttaattcttcacttttctaagggagaaaagtctgcaaatcttttttcctagtgttttcctttggaagcttcgtcccactgttatcacagagtatttgaat

SEQ ID NO: 99280 - DNA, 617 bp, Homo sapiens
tcatagaatgagtgaatgctgtggtacaccatccatttcctcctctggaaagcactgaagcatttcttccctcactgtcctgtgtgctgcctgctgctggctcatagctgagttcttccctgggcattgctctgggtgtagggattaccttacctgagattactccccctctctgtgaccagccagcatttaatgggttatgggttgtaatgggtgggtggtgtaccaaggccagtcccttgtcttaatttgggacactgaagggcccccaactgtatagcccccatggactggctgaggtcatttggcaactgcatcacagtttaagttccttctatccaacctagcttttcccacttccttacaggggctgttcccgagagggctccytgagaagtttcctgcatgcagttctccatcttggattctgtttcccaagaaaccaaatatatccccctatacttgactgattcccagccttgcagggtctgtaggtagggcctctatttcacaggtgacttgcccaagaccacccagattctgagtgctgagcagggaagatagctatttcaaagggctgatggtttaaatgagaatttaaaaaggtaaccacaagg

SEQ ID NO: 99281 - DNA, 574 bp, Homo sapiens
gtgatgggggcgtgcggcaggatccaaggcacaagtggaggagttgacctaagactacaaacagctcatccttagttataggtgggcaggcaagcacatggcacagatgcaggtgagttggtagttatggtaacggttttcttcttgttgctcagacttaagaaattccactctttgccagccagtgtttggtccagatcacatgtttgagggttctgggaaagattttctttcctatgaaaagaaaggcccaaaaggagaaagcccttttgcttctaatttttccttcctgttttggatgcttttctatgaagatgtgatgcttagaattggtgcagacatcttatgaccatgagaagaaatctacratgtgctaggaactttgcaatataggtagaatgtaaggttcatggggcagaggtatttatattcttacctgatgtatccaaaatgtccaaaagtgtgcctggcacatagtagacattgaataagtatttgtagaataaatgaactaccaccaagatgtgccatgtttgtcagaaactcatagtggtatataccagcatgtaaatag

SEQ ID NO: 99282 - DNA, 525 bp, Homo sapiens
tgcagttagagcaatggatgagttaacagaagtgaagaagtgggtaaaaagtgtataagattgtctataagggtagggatgagggatagcaaaaaagtgaaagaagccaaagatgacactaaaaaaatttaatttggctgattggaaaaagagtggtacaactagtaatagtagtagggattcaggtctgggaattattattatgaagaagaaaatacagttaatttgggtcgctactggttttaaggaaactttaaaaagagagytgaaaatgttagcttgaagctagagttagaaaaatgaaattgggaaatatttgtaaagaagtgacctcacggaagtcttttcaaaactcagtaaatcaatatatagcatgaatacagattttaaaaaattcagatgtcaactgggagaaatagaacaaagacggccgactagatacagccaggaaaaacctctcccattgagacagaccagaatattgagtaaactagcatagtccacacagaccctctgacagatgca

SEQ ID NO: 99283 - DNA, 596 bp, Homo sapiens
attgagaaggaagatacacattgaaattgttccatgattactgtacaatatttttgttctataaaaaatgcaagaaactcagaaagttaaacagttataatgggcaagaaggagaggtaaatgttgaaataattctttataaatgcttatgaaaataattatccctcaaacatactattatatttgattctacaaaaatctataaacatattaagaggacaatagaattttgagcattaagcagcatgaggtttattaagaatagacatgcaacagaagcttaatagcttcttttgattcattgttaattacaaaattagggcatgctgtgawtcggctccatcgtcaatatttgtactctaataagcattttggattactgtttttaaagcacattttgccattgtaactttttgcttgtttgtttatttgagacggagtctcgctctgtcacccacgctgaagagcagtggcacgatctcggctcactgcaacctccgcctccaaggtcaaagcgactcttttgcctcagcctccagagtagctggaactgcaggagcgcgccaccacgcccgtctaatttttctatttttagt

SEQ ID NO: 99284 - DNA, 603 bp, Homo sapiens
tggattttgaaaatttgaatattctttttaaatgttagaatatggttcaagatgaatatttaaaactataatacacaaaagtatataaatcacctaaattcagtagttatagacacatatgctgaaatagtattacataattcgatataagtaaaactcaagtctactaccaccattggttttaatttagtgttaaaaggcatatttaaataataactagcaagatcagggctgtttgggggcaaacccactaaaacaagtaaaaaaaaactttttcagatgttgcaagtcagaaaagtatgatggactattcacgtcaaattaaaagcaaagtattcacaggttttaaaatctcacatacttctttaaggcttaaagaaaaacattttctatcctgggcaacatagcaagattctgtctccaaaaaatgttaaaaaatgtagccaggtgtggtgctgcaaatgtggtcccaactactagggaggctgaggcaggaagagcacttgamcacaagagttcagggctgcagtgtgttacgaactctcacactctactccagcctgggctagagtttgtgttgtttctcctgagttataaatggct

SEQ ID NO: 99285 - DNA, 554 bp, Homo sapiens
cattgaggattaagttaccaacccctgctcttgggggaacatattcaaaccatagcaattggacttcatcaaaatttataaatgttgagcattaaagaacactatcaagaamgtgagaaggcaacccatggaatggaagaagatatttccaaatcacatatctggtaagggattagtagccagaatatgtaaagaacattgacacctcaacaaaaaaatacaactcaattaaaaattgggcaaataatttgcatagacatgtctccacagaggatacactaaaagcaagtagacatatgagaatatgctcaaaatcgcttattgggaaatgcaaatcaaactcatagggaggtatcactttacagccattaggaaagctcttatcatgaaaatagaaaataacaagtattggtcaggaggcagagaaattgaaacacttgtgcattaatggttggaatgtaaaatagtgcagccactctagaaaatgttgtcgtggtttctcaaaaaactaaacttcattaccatgtgaccaagcaattccattcttacacgta

SEQ ID NO: 99286 - DNA, 630 bp, Homo sapiens
aaaaactttagttatttagagtcttactatatccccatagttaagaatgtaacttaagaatgtaacatagttaagaacataattacttccccttccatagttttctccctctcctgtgcccaagagtttctagaggttactgattttctagatactttttttatttctggtaaataataattatacatttaaccacatcctctaggtaagaattaactgtcactttattggttgggataaaatgtagctactaactggattaaaatgatgttctagccttactgagatagttaattttgttttccarttagttttgagaaattctgtagtttgaaggtctttaagcattgatacttcatagaattccattttgtgattaaaaaaatggactctttaagtaaaattatattgtttcactggtttttctctgaaatgaattcatgtctttatatagattttctgtaatcactggtgtctcctgataaattttctgctctaatttaatcaaccctatgttatttattttttcaacagataacaaaaataattcaatccaacactcacaatcgtgacatttaactggagatatcactcaactcattagttcactgacattaatcaacactcttc

SEQ ID NO: 99287 - DNA, 566 bp, Homo sapiens
caagttttatgactggacatcataaaattatgataatgactgaatctatttcctgaaaccatatgtcttacagatatgtaattttgaaatacaaaaaattttaacatgtcagtatcttttaattcagggtcacatccaggcatatttcaggagaattttattaaatgctaggaagactagaatatccatgtctggaataaaattatagtcagtttaatgcagtgattcttaatctttttgcacattaaaatcacctgggaagctgttaaaaaatgccaatgtctgtttcccaccccaaattaataaaatcagagtctagaaataggatcaggcatttttaaaaaaagtttttggttaattttattttacagaaaatcactgtcctaatgtggagaagmaattaagtcattgtctaaggcagcaaatagtttaattccttggtctaaaattagaaggtccagcctgtgtagaccaacatattcttgtcagccaacttcatatgaggtgcaaagctcactgaagtgtcaagacaaatcagtagtcaaaaggaatcaaacattactgag

SEQ ID NO: 99288 - DNA, 615 bp, Homo sapiens
tggttgtaggtatgtggttttatttcagtggtctccatgctgttccattggtctatgtgtctatttttgtaccaataccatgctgttttggttactgtagacttgtagtgtagtttgaaattgggtaatgtggtacctctggttatattcttttttgcttaagattgctttggctatttgtgctctttttgcttctatatgaattttagacgagttttgtaaagttgtgtgaaaaatgaccttggtaatttgataggaatagcattgaatctatagattgctttgggyaatgtggacttattaactatatcaattcttccaatccatgagcatggcatgctttttcatttgtttgtgtcatctatgatttcttgtagcagtgttttgtagttctttttgtagaggtctttcactttgctggttagatattttcttaggtattttattttttgtgtgtggctgttgtaaatggaattgcatctttgatttggttctcagcttgaatattattggtgtatagaaatgctactgatttttctatgttgattttgttttctgagatttgctgaagttgtttatcaggtctaggagtcttttggaagaatctttagagtt

SEQ ID NO: 99289 - DNA, 421 bp, Homo sapiens
atgacttacagaagctatccacgggtagcttcagaccattgttctaccacgtttgggctcagtccacaycaagctttgaccacccctggcatccttgtggcctcccttgactggccatcctgaggtctctgaggccctctgctgagagcagccgcactccctgcccccatgctgggctgctccagcatccacagtgaggaccctccaatgatctggcttcttagacattcaacctaagcttccccaagtctggacctctccccctgtctccaccttggctgcctctgctcatcatcctcctaatttctcagacatgccaccttcaaaattgagaaagctggcattcccttttgttgcctggcttctgttgctccaaccctttctcctccccgatctcttgggaacctggcttttgcgctca

SEQ ID NO: 99290 - DNA, 573 bp, Homo sapiens
ctctctgttcctgttccctcccagtccaaggctcagagctggctctggtcgtctgtctgtaatggtggctgtattgttagggtctcgcgtccatgtcccccaagagcaccctgaaggcagggagcatgtgcttctctgggtcaggccagggctgtgtccacacaagctgcccagtgcctgccacttgcccttgcctggctgggtcccactgggtgttgggctgagagagagcccagagccctggtgctctgtagccctccctacctgggctcctcttgcccagagggaagctccttttcttcagatgggggcatgawgacgtactgctgtttaccggaagcacgtgagctggctcttgttttcacgggttttgatctggaaacaagggaaggtgttgacaaagagtcaaactgtgtaaaatatttgaagagatttattctaagccaaatattagtgaccacggcctgtggcacagccccagcagatcctgagaacatgtacccaacgtggtcaggctacagtttggttttatatattttagggagacatgagacatcaatcgatacatgtaag

SEQ ID NO: 99291 - DNA, 372 bp, Homo sapiens
gaattctctcagcatttgtttgtctgaaaaaggctgtatctttccttcatacatgatgcttagttttgctggttacaaaattcttgacttataattgtgttgttgaggaggctaaagatagggccccaatcctttctagcttgtagggtttctgctgagaaatctgctgttaatctgataggttttcccgtattggttacttggtgctctgtctcacagcacttaagattctttccttcrtcttaactttggacaacctggtgacaatgtgcctaggtgaagatctttttgcaattaatttcccaggtgttttttatgcttcttgtattgggatgtcaaggtctctggcaaggccattgaagttttcctcaa

SEQ ID NO: 99292 - DNA, 610 bp, Homo sapiens
cacccttaatatggtggtcacaatctaatcagcttccagtaaatataaagccggcagaaaaacatgaaaagcagatgatgggcctagcytccccagcctatatctttctcccaagctggatgcttcctgcccttgaatatcagactccaagttcatcagtttttggtcttggactggctctccttgcccctcagcttgcagacggcctattgtgggatcttgtgattgtacaagttaatacttaataaactcccccatatatatgtatacatgtatatagaagatatgtccctctgagagaaccctgaccaatgcaataggcaatgttcctcaccttcagactttagggaggacacacgcctgaaatagccaagagaattttttgaatggggaaatgactggagattgcacaattgctaataaagctggacccaaagtaattgttctgaaactatttaactttattaatataatttacactaattttatctttaggctggttgaggccaggaaaatatgcattatattattttacagaattttagagttgaaaagaacataaatatcacctatgctcaatcttcctgcttatttgtaggatttctttaac

SEQ ID NO: 99293 - DNA, 565 bp, Homo sapiens
acttttttcagttaatagttttttttttttgagacggagttttgttcttgttgcccaggctggagtacaatgacacaatctcggctcattgcaacccctgcctcctgggttcaaacgattctcctgtctcagcctcccaagtagctgggattacaggcgcccagcaccatgcccagctaagtttttttgtatttttaatagagatgaggtttcaccatgttggccaggctggtcttaaactcctgacctcaggtgatctgcccacttcggcctcccaaagtgttgggattacaggcatgagccactgcgcccggccayatttttaagttccgttcattttgctacatgtgactatagtttgtttcactttgtgcaggaaattctatcatatgaatgtataagactgttaggcagagagtgtcagcttaagtagagactgaaatcaagtccaagctactgcttacaaactccaagtgtcagtccagtggagggataccttttgtaatcatcgacccagggggagaactcttcttggattttgtgcaaaggttccatatagagtgag

SEQ ID NO: 99294 - DNA, 609 bp, Homo sapiens
tgtccccttcctctcctctgagtaactcgttgtagagcccaacagtgcaagatgtaggataataggagggattatttccagggagtaccagtaatgatactgagcatgaaaatagttaaacaggacaaaagaaatacctcaaacagatcaattgggcagagagctgatgtacatataaaagaattcccatctggaaaccagagggttgaagttctgaagaaaacttcagggccccagccagacagtgtctgtcatgcaaaaggcctcagtgatggaaggaacaggaaatgtcatcaaaaactaatgagactgtcaagtttcagctagaattagataaaagcctgcttcacttgcaggggacagtcctagttagaagatgaggagccagaacaaagcttgaagaattggatgtttaagatagatttttaaatctcctcttattcacctatgccttctatactacatttaaggacaataacttcaaagtactcagcaacccagaatagttggcatttctctttggrgaatgactattttaaaaaggcacctggaacctcccatttcaagggggaaagatcacatacaacttgagaaactggtgcccgtata

SEQ ID NO: 99295 - DNA, 380 bp, Homo sapiens
cagggggccagcatggtggctcacacctgtaatctcagcactctgggaggctgaggagggtggatcacctgaggtcaggagctcaagaccgtcctggccaaaccctgtctctactaaaaatacaaaaattagtctggtgtggtggcagccacctgtaatcccagctacttgggaggctgaggcagragaatcacttgaaaccaggaggcggaggttgcagtgagccaagaccgtgccactgcactccagcctggatgacagaatgagtccctgtctcaaaaaaaaaaaaaaaagacgtaaatgtgggagagatcatgatcagcaattcaagtatgtattagtgtcatacctcttattggaaatctgagcacctaagggta

SEQ ID NO: 99296 - DNA, 583 bp, Homo sapiens
ggggccagcatggtggctcacacctgtaatctcagcactctgggaggctgaggagggtggatcacctgaggtcaggagctcaagaccgtcctggccaaaccctgtctctactaaaaatacaaaaattagtctggtgtggtggcagccacctgtaatcccagctacttgggaggctgaggcagaagaatcacttgaamccaggaggcggaggttgcagtgagccaagaccgtgccactgcactccagcctggatgacagaatgagtccctgtctcaaaaaaaaaaaaaaaagacgtaaatgtgggagagatcatgatcagcaattcaagtatgtattagtgtcatacctcttattggaaatctgagcacctaagggtaatatggcacaacgcacacacacacatactcacaggagtcagggtgaaaagaaagacataaaggtggcattgttaagtgatttatagtctgcctgatcaggaagtggtatgttcagagctttcctaataaggattgcaaaggcagcatcgcagaagtgagaggtagtaggaatggcgaactttagcatgtgctgaacgtagcattca

SEQ ID NO: 99297 - DNA, 432 bp, Homo sapiens
agcttaacttccctttctttctttctttttcaaaattttgttagctattgtgaagtctataagctatacttttcccatataacttaccaatactacccctcgatacttactcaagagaaatgaaaacttatatccacattaagacctctacaaaattgtccacagcaamtttaatcataatagttttgaactagaaacaaccagaatgctaattcaatggaaatgaaaaatttcaagtaaatggaaaaaacaaattgtggaaaattaatacaatagaatataattagcaataacaagtatcaagttgaagtctataagagaaattaacaaattcgtttatacattttagaagttggttgtattcctcagaattttctacagcgttaatcatgtaatatatgaatagagactgatgtacatcttcctgtccta

SEQ ID NO: 99298 - DNA, 432 bp, Homo sapiens
agcttaacttccctttctttctttctttttcaaaattttgttagctattgtgaagtctataagctatacttttcccatataacttaccaatactacccctcgatacttactcaagagaaatgaaaacttatatccacattaagacctctacaaaattgtccacagcaaatttaatcataatagttttgaactagaaacaaccagaatgctaattcaatggaaatgaaaaatttcaagtaaatggaaaaaacaaattgtggaaaattaatacaatagaatataattagcaataacaagtatcaagttgaagtctataagagaaattaacaaattcgtttatacattttagaagttgrttgtattcctcagaattttctacagcgttaatcatgtaatatatgaatagagactgatgtacatcttcctgtccta

SEQ ID NO: 99299 - DNA, 631 bp, Homo sapiens
cctattaccgtgactcctattattaatacctctcctgcttctcctattacttttgctttttaaaaaagccacccctctttctaaaattgttaaaccatcccttgctggcattaaattctttagctttagatcctcatctttcatttgctttaagttgttatacaatgactttgctttttcttcaattatattagagtctacatatatgcttttcttacagcaaatctgcacccacattaaagctgcattttcagtatgaaataaaaatgtttttttttaaaaaagtacaagtttttcgtgtctgctggcattggtccttaacgccaaatttatttatcttgaaatgtcttgaaatggtagccaccacaactgcagacttcaatctgtggaacctatcaagcaattcaaccttttcttgtaatgtcatgactctgctctgcttcttgggagcactcctagcatcactagtggcactatgtatgggtctcatgatattatctaaggtttacgatattgcagtaaacacaataaaaatakgtaagaactgtgagacatctctttttattgcaatacacaatttactggagaggctgctcacctggagatgattagcatcacaaggattttaaac

SEQ ID NO: 99300 - DNA, 361 bp, Homo sapiens
gctggggaaactccccgacactcctaaaccacagcttctctcttttatctttatgaatgttagagccctgtctcaaacagctgttgagaaaatacaaaagaacaacaaaaaaaagyccttaatatcaaccttgatgtggaaaaaaataatctttcttcaaaagacaagagcaaatatagttctctccttcccctcgccacatggagacattttgccatctgcgatctcccagtgccatctctcctgaccatccacgtggaaaaaaggaagcagtttgggaccccatctccattcccacctgcttctgcccctagtttcttttcctgacagccctggcaatagcaatcgctgtcaggctgta

SEQ ID NO: 99301 - DNA, 596 bp, Homo sapiens
tgcccataactagatggaattcatatttgtcccagcaaatgctggggaccatgactcagcacttcctgggagtctcaatgctataggcaatagcagatccttaagagaaataagcagccctaaaaaatatgctattttaaatttcttgcaagaagagagaccaacrggttctagtctcctgtattgatcttacttctaagcattgtttctcatcatcttttggttgtacagctttggcccacatcctgagtggattcatcatccaggctgttgctttccttagctctctcagaccctcagaagtcagcgtgtgtggtgctgctgagcctgggtgctgaagacatcttatctaccaagggaaacccagaaaggcaaaagtgcagtcattacccaggctgtgaggctactgcagtgataaatcccactttatttccattcggaggaaaaatcttcaattaaataagaattgattttctaatgattttttttttctcctgctggccattggtggaacacttgaaccagctccagctctgcctcatagggggagagtaattaagttgctgctgctgacaaaagggttggcctcaagtatg

SEQ ID NO: 99302 - DNA, 518 bp, Homo sapiens
ctaggtgttgggaaactatcagtgaacaaaacaggcaaaaaaaaacaaaaaacaaaaaacaaaaaaacaacccaaacaaactctgacctcagggagctgacattctagtagacagagagaaagacaattaacagtaatcataataaatcaatgatattgtctgttgrgcaataaaaatgcactggggaaaaatggagtggagtaacaagcctggggaagcccgcagtgttgataacgtgatctgggatggcctcgctgagaacgtgatattggaacagggacctgaaagaggcaaagcagctagcatataaatatctggaggaagagcatccaggcagagggaacagccagtgcaaaagtcctgaggcaggattccccttggcagatttgagaagcagtggggagcccagattgtagagtaagaatggggagtagaaggagacaaaacccaagaggtgaggggcagattgtctggggcctgtgagccatgtgaggactttgactacatgaggtgggct

SEQ ID NO: 99303 - DNA, 518 bp, Homo sapiens
ctaggtgttgggaaactatcagtgaacaaaacaggcaaaaaaaaacaaaaaacaaaaaacaaaaaaacaacccaaacaaactctgacctcagggagctgacattctagtagacagagagaaagacaattaacagtaatcataataaatcaatgatattgtctgttgggcaataaaaatgcaytggggaaaaatggagtggagtaacaagcctggggaagcccgcagtgttgataacgtgatctgggatggcctcgctgagaacgtgatattggaacagggacctgaaagaggcaaagcagctagcatataaatatctggaggaagagcatccaggcagagggaacagccagtgcaaaagtcctgaggcaggattccccttggcagatttgagaagcagtggggagcccagattgtagagtaagaatggggagtagaaggagacaaaacccaagaggtgaggggcagattgtctggggcctgtgagccatgtgaggactttgactacatgaggtgggct

SEQ ID NO: 99304 - DNA, 557 bp, Homo sapiens
attgttgtgtcatgtgacaatgcatgtcagagtttctctaggtcaccctgcctcatgtccatggcatcacctggcctcaaggacagagtcatggctggtcaatatcaaaagcccaaggccaaccaaatcttgggtcaaccatgccataggactgctcccgtgatattgctgacatcccaaaccaacaacaatttagaattagccacatcagttagcaaagtcatgatagccagtggtgtctccagtcagggttagaatgtcactccctgcattagtgagtcctgagcactgctggatyattacttcagagcatcctgacatgaaggaaagagaagtacatttcagcttgtggccgtgtgatcctccctaaattctccaccctggaagccagaacaactgagggatttgacccacttaattgtttcaccaagtccagaaaaacttagtgatgggtgacaggtctctgaaaagagccacacagaccacaagtagcatagaaatgactgaggacataagggaggttcctttgaagccaaccgtatgaacattatggaatt

SEQ ID NO: 99305 - DNA, 557 bp, Homo sapiens
attgttgtgtcatgtgacaatgcatgtcagagtttctctaggtcaccctgcctcatgtccatggcatcacctggcctcaaggacagagtcatggctggtcaatatcaaaagcccaaggccaaccaaatcttgggtcaaccatgccataggactgctcccgtgatattgctgacatcccaaaccaacaacaatttagaattagccacatcagttagcaaagtcatgatagccagtggtgtctccagtcagggttagaatgtcactccctgcattagtgagtcctgagcactgctggattattacttcagagcatcctgacatgaaggaaagagaagtacatttcagcttgtggccgtgtgatcctccctaaattctccaccctggaagccagaacaactgagggatttgaccyacttaattgtttcaccaagtccagaaaaacttagtgatgggtgacaggtctctgaaaagagccacacagaccacaagtagcatagaaatgactgaggacataagggaggttcctttgaagccaaccgtatgaacattatggaatt

SEQ ID NO: 99306 - DNA, 563 bp, Homo sapiens
acagcctgcaagagagaaggggcctcagttctacaacttcaaggaactgaattctgccaacttagaagtagatattcccctagaatcaagcctacagataagaattccttgacttcagctgtgtgagaccctgagcaaagaagtcacagaaactgcaaggcagtaaacctgtgttgctttaagccaagttcctgctaattcattatgcaataacaaaaaactaacacatacccagaagtgtgaattcatttcagactgaaagaaggaggcagawaactgcttagaaagccagaggagaaggacaatgaactcctaggaaatgaatctaggaaagagagactgagagaaactagacccaggtatgtcgatgacatgtgtttcctaagcctgaagtagcctactctgtagctagcctgagtacttagggtcactgatctctttgaatcttgtgctcttgtgtgtggccaaggccacaaaataatgatcgtgctgctgctgcgtggcaatgccttgtgtttgcacagccctttaaagttaacaaagctggcatattggttggcttg

SEQ ID NO: 99307 - DNA, 270 bp, Homo sapiens
aatgcttcaccacttacatactgtgtccaagtagatgtgcgtcttaggttttccagacggtcctttgggggaggtggtagtgttctcattcccgtttgacagatgaggaggctgagattcagagaagcaaaatcccttgttcaagattgctcagctagcagatggtggggccaacatttraaactgatcttcaaataccaaatgcaaacatcatcatggcttctttttattgcataaacatactctcagcagcatactctgtactgaaca

SEQ ID NO: 99308 - DNA, 621 bp, Homo sapiens
ataaattttgcctgttttaagacacttttgtggtaacttgctacaaaagcaagagaaaactagtatagcaaataatgattaaactaagttaccaataagaatgactgttcatgagctaggtaaaactctcaatgagctaggagggtcgggaggagatggggattaaggctgagaggtagccaaggtccagatcaaacagagttttgtaggaggtttgaattttaaccttagggcacggaagtagcactgaagcagacgtgacctgcccargatttgcatttttaaaggatgagtggcttcttcatggagaacagaccagggaactcaatgttagaagtggaacactgtcagtcgctttattccaggataaaagtaagaaggcaataattggccaggcatggtggctcacacctttaatcccaacactttgggaggccgaggcaggcagatcacttgaggtcaggagttcaagaccagcctgggcaacataacgaaacccccatctctattaaaaatacaaaaattatccaggtgtagtggcaggtgcctgtaatcccagctatttgggaggctaaggcacaagaattgcttgaacctgggaggtagaggttgcagtgagcc

SEQ ID NO: 99309 - DNA, 419 bp, Homo sapiens
aatttcaaaaccacttccacatttttaggtttttcttttttcttttttyttttttttttttttttgagacagagtcaacctctctcaaccagactggagtgcagtggtgcaatctcaactcactacagcctctgcctaccaggttcaagcaattctcatgcctcagccttccaagtagccacaactacaggcacatgccaccatgcctggctaatttttgtatttttagtaggaacagggtttcaccatgttggccaggctggtcttgaactcctgatctcaagtgatctgcccgccttggccgccgaaagtgctgggattacaggcatgaaacactgtgcccagccaatttgtagatattttttatagcagcattccacttcccagtaccaaaatctgtattagattcctagaattcc

SEQ ID NO: 99310 - DNA, 624 bp, Homo sapiens
tctcaatacaaagttaacatcgcttattcatttagcaaacagttctatagcacttacaatgtgtcatcttctgatgtaaatgctttaaaaatattagcttgcttaattctcattacaatcctattaggtgggtattacaatccttactttargaaggaaactgagcaaaataaggctaaacaacttactcaaattcacacagctaaataggcagtctgattcaagtccatgatcttaaccgctactgtaatatatatatacgcacatatagatagctatatatctatatatgtatatatagacagatattactaataggaaatccactacttatattcaaatctggcaaggaagtgttataagaaagggttttagagaaaactgaaatgaagaatgaaatgagaaatgaatatagatgtaatagacagaagaaaaacaaaagacggtcaccctggagaaaaaagaaatgattgtctttccttctgaatatttgcaggagttttacttgtggtctagaataagtaagcagggaaacaagatatgcaactgtcatccctaaaatatttgaatatgaaacttaaaaatgtatgccatgactagaaaggaggggaaaagagggaaaag

SEQ ID NO: 99311 - DNA, 624 bp, Homo sapiens
tctcaatacaaagttaacatcgcttattcatttagcaaacagttctatagcacttacaatgtgtcatcttctgatgtaaatgctttaaaaatattagcttgcttaattctcattacaatcctattaggtgggtattacaatccttactttaggaaggaaactgagcaaaataaggctaaacaacttactcaaattcacacagctaaataggcagtctgattcaagtccatgatcttaaccgctactgtaatatatatatacgcayatatagatagctatatatctatatatgtatatatagacagatattactaataggaaatccactacttatattcaaatctggcaaggaagtgttataagaaagggttttagagaaaactgaaatgaagaatgaaatgagaaatgaatatagatgtaatagacagaagaaaaacaaaagacggtcaccctggagaaaaaagaaatgattgtctttccttctgaatatttgcaggagttttacttgtggtctagaataagtaagcagggaaacaagatatgcaactgtcatccctaaaatatttgaatatgaaacttaaaaatgtatgccatgactagaaaggaggggaaaagagggaaaag

SEQ ID NO: 99312 - DNA, 624 bp, Homo sapiens
tctcaatacaaagttaacatcgcttattcatttagcaaacagttctatagcacttacaatgtgtcatcttctgatgtaaatgctttaaaaatattagcttgcttaattctcattacaatcctattaggtgggtattacaatccttactttaggaaggaaactgagcaaaataaggctaaacaacttactcaaattcacacagctaaataggcagtctgattcaagtccatgatcttaaccgctactgtaatatatatatacgcacatatagatagctatatatctatatatgtatatatagacagatattactaataggaaatccactacttatattcaaatctggcaaggaagtgttataagaaagggttttagagaaaactgaaatgaagaatgaaatgagaaatgaatatagatgtaatagacagaagaaaaacaaaagacggtcaccctggagaaaaaagaaatgattgtctttccttytgaatatttgcaggagttttacttgtggtctagaataagtaagcagggaaacaagatatgcaactgtcatccctaaaatatttgaatatgaaacttaaaaatgtatgccatgactagaaaggaggggaaaagagggaaaag

SEQ ID NO: 99313 - DNA, 624 bp, Homo sapiens
tctcaatacaaagttaacatcgcttattcatttagcaaacagttctatagcacttacaatgtgtcatcttctgatgtaaatgctttaaaaatattagcttgcttaattctcattacaatcctattaggtgggtattacaatccttactttaggaaggaaactgagcaaaataaggctaaacaacttactcaaattcacacagctaaataggcagtctgattcaagtccatgatcttaaccgctactgtaatatatatatacgcacatatagatagctatatatctatatatgtatatatagacagatattactaataggaaatccactacttatattcaaatctggcaaggaagtgttataagaaagggttttagagaaaactgaaatgaagaatgaaatgagaaatgaatatagatgtaatagacagaagaaaaacaaaagacggtcaccctggagaaaaaagaaatgattgtctttccttctgaatatttgcargagttttacttgtggtctagaataagtaagcagggaaacaagatatgcaactgtcatccctaaaatatttgaatatgaaacttaaaaatgtatgccatgactagaaaggaggggaaaagagggaaaag

SEQ ID NO: 99314 - DNA, 584 bp, Homo sapiens
gcttccaccaacaatcaactctttctggtttaactgactgtgggagcctacagtgaagattccaccctttggctagccttagccctccctccagtctccatcctccatagcagctccaccagttactttttgttagacttttagaagtgtccagaatttaatatattttacttctcttccttccaatatacctgcaaggtaagtattctttcttagcttctatttamccatgagaaatgtgagcattaaggagatttgctcacttgcccaaagttaaacgtacaatatacaaaaatctaaactcaagactctagttcaagagaaaaaataacaacaacaaaagcagtgctaattattttgccccttgttttagagaaataaaagccataacacagagctatgaacaccaagtaaaatagatggtaccccaaaaaggactattccttgagacatgagatctatttctcttttttttaaaatttattttgctattttttttgtatctgtttatggattgatgccctacctccactcatttcaaaaatcttactgtgcattcaaaattcttcagctctcatctctct

SEQ ID NO: 99315 - DNA, 539 bp, Homo sapiens
agtgtttgggtagctgctagttgatattgcagactgtctgtcaagtcaagggtccaggaaccccagtaattttattcaaccaaggcagttcattggggtgaatggaagatggttagctctggtattgacagggagcctttttattctctcaccagggattgttaggatagtctcattgccaatgcccctcttgattatagtagtcacactgattctggccyaggggccagcaagctggggactcttgtctgggcatcccagatgctgatctcatgacactttctcaagatagataatcctgaggtagcaaggggcttaaagcagatgttaatgattgtacttttggggttttgttttctctgtttttttttttttttttgctttgttttgttttttgttttttccatctctattgttgtaagtccaaaggccatgtttaagagtttgcttataggggtttagagtcccactgctgctctttttaggttcctcccaacatcaggggtagattgagtaataaaatgcacaaccaggagagt

SEQ ID NO: 99316 - DNA, 645 bp, Homo sapiens
atcacaagagacacgaattagctaaagcaatcttggggggaaaaaaagctagagggatcacactacctcatttcagattatactacaaagctatcataaccaaaacagcatggtactggcataaaaatagacacataagccaatggaataaaatagagaatgcagaagtaaattcacatacttacagccaactcatttttgataaaggtgctaaaaatatacattgaggaaagtatagtctctttaataaatactgataggaaaactggatattcatatgcagaatgaagctagatgcccatcttttaccacataaaaaatcaatacaaaatgkattaaacaattaattgtaagatctgaaactatgaaactactagaagaaaacgttgggaaacactacaggacatcagtctagagaaggagtttttgggtaagctcttaaaagcacaggaaacaaaagcaaaaatagacaaaagggattatataaagctaaaaagcatctgcacagcaaaggaaacaattaaccaagtgaagagacaacctatacagtgggagaaaaatatttgcaaactattcatccaaggtgttaataaccagaatatataagacactcaaataactcaacagcaacaaaagtaaataaat

SEQ ID NO: 99317 - DNA, 544 bp, Homo sapiens
tagtgaggattgttttgaacatgtttagtatttccctgaggcggtaacaactatctaattcttctcagaattcaatgtacataggggaaatgcagattcctgggggccccattctagatcaaacccatatattgcaaaccataggcctggaggagagcagaagagaagcccaagagatttaattggacttagtctggaagaggcttttcatggggtccagatcatcccaagtctcccactctcttcccctcatcaggggcactaacaggagcaatatctgacatgtgtaatttattcactgctctctacatgggaagttctggcrtaggagttagcagtatacttggtctatatatatttgactccaggcctcatccttgtcactggttctttttgtgtttgtttttttttgagatggagtctcactctgttgtccagcctggagtgcagtggtgcgatcttggctcactgcaaccctcaccttcagggtttaagccattctcctgcctcagcctcccaagtagctgggaatacaggtgcccac

SEQ ID NO: 99318 - DNA, 581 bp, Homo sapiens
  misc_feature (1)...(581): n = A,T,C or G
ggatgacagctcccgtgagtattgcaaggcactgtgttagcttctcactcacagtctcagaataccctgtgaggggaggccccgtctcactagagcacaggaggttcctgagctcttcccaraaaatggtcatcaaacgatggagcagggggaagcccagacagaacaagtgagtccctagggtctccttaacctccctcagctcctccacatgggtccctgagggaaagtgagcagcctcctaatccccttgatagggttccagtcctgcaagtctggactctctcattttatgctcccataacgggatgacaatgcaaccccaggctccttttttgccatccctcaatgccaggccaggcccagagccatttgctgatacagcccaggggatgctcaaggccacctcggcacagtcacctgtantgtactgagataagcaggaggtgcaagtagaccaaatccccatgggcttggcctcagctatgttccacaggcccagggcctcgcagatgagctcacagccctccttcaggaatcctgcagatcacaccctcagggagcagtgctcagatgagcag

SEQ ID NO: 99319 - DNA, 581 bp, Homo sapiens
  misc_feature (1)...(581): n = A,T,C or G
ggatgacagctcccgtgagtattgcaaggcactgtgttagcttctcactcacagtctcagaataccctgtgaggggaggccccgtctcactagagcacaggaggttcctgagctcttcccaaaaaatggtcatcaaacgatggagcagggggaagcccagacagaacaagtgagtccctagggtctccttaacctccctcagctcctccacatgggtccctgagggaaagtgagcagcctcctaatccccttgatagggttccagtcctgcaagtctggactctctcattttatgctcccataacgggatgacaatgcaaccccaggctccttttttgccatccctcaatgccaggccaggcccagagccatttgctgatacagcccaggggatgctcaaggccacctcggcacagtcacctgtantgtactgagataagcaggaggtgcaagtagaccaaatccccatgggcttggcctcagctatgttccacaggcycagggcctcgcagatgagctcacagccctccttcaggaatcctgcagatcacaccctcagggagcagtgctcagatgagcag

SEQ ID NO: 99320 - DNA, 513 bp, Homo sapiens
acaagcactctgatggtcctctctccatttgggactttctgtaaggrgatcaaattctctggccctgcatggggtgaagttccaccgcgagtaactacagctgggctggtcactattgtacctggcaaaggctgatagagaggagcataagtaggaggtgaaacaagcttagattctacagaagactctgatagtgtggggatgctgcggattctacaggaggtgtaggcccctgagggtccctatctgaagttggtgttgggctgttgggtctggggtcccttccccttaataagagatgatcttctaatgcttctgaggggctttgtggcttactaggctttagcccacaggtgcctgcatagagttgggttttgttgtcaggccataaaggtttgcacataggatatttcagaccattttccttgatttttacagaaaagatctagctgtaggagggtgttaaagttcacagtctcattccccagccatgttttgtgagttaatctgtat

SEQ ID NO: 99321 - DNA, 513 bp, Homo sapiens
acaagcactctgatggtcctctctccatttgggactttctgtaaggagatcaaattctctggccctgcatggggtgaagttccaccgcgagtaactacagctgggctggtcactattrtacctggcaaaggctgatagagaggagcataagtaggaggtgaaacaagcttagattctacagaagactctgatagtgtggggatgctgcggattctacaggaggtgtaggcccctgagggtccctatctgaagttggtgttgggctgttgggtctggggtcccttccccttaataagagatgatcttctaatgcttctgaggggctttgtggcttactaggctttagcccacaggtgcctgcatagagttgggttttgttgtcaggccataaaggtttgcacataggatatttcagaccattttccttgatttttacagaaaagatctagctgtaggagggtgttaaagttcacagtctcattccccagccatgttttgtgagttaatctgtat

SEQ ID NO: 99322 - DNA, 513 bp, Homo sapiens
acaagcactctgatggtcctctctccatttgggactttctgtaaggagatcaaattctctggccctgcatggggtgaagttccaccgcgagtaactacagctgggctggtcactattgtacctggcaaaggctgatagagaggagcataagtaggaggtgaaacaagcttagattctacagaagactctgatagtgtggggatgctgcggattctacaggaggtgtaggcccctgagggtccctatctgaagttggtgttgggctgttgggtctggggtcccttcccmttaataagagatgatcttctaatgcttctgaggggctttgtggcttactaggctttagcccacaggtgcctgcatagagttgggttttgttgtcaggccataaaggtttgcacataggatatttcagaccattttccttgatttttacagaaaagatctagctgtaggagggtgttaaagttcacagtctcattccccagccatgttttgtgagttaatctgtat

SEQ ID NO: 99323 - DNA, 575 bp, Homo sapiens
cttaggtcctcccatgcaataatttccagcttttcttctcaataatctactttatattatagtccttgctcttttctttcacatatacttgctttagtgcwtttgtccagcggtcctcagactgtttggtcctgggttggggggtgcagacatgatgtaataattttctgtaccacatgttggacccaccagggtcgctggcaaatggtgagcgcaagggaaaaaagactggctaagtgattatatgggggatccctaatatcccttccccttttgaccacatgataatgtggacatcactgataacaacatgaggtgtgtgactgttacttgttccagctgctccagcaaagctcagtgggcaccagaaacacagtaggctgtaaccacctcctggccatcactaaccctacagccccaagcaggagcactactgaacaaatctgataccttgatttttctgtcctcaagacactggttcttcaaggtcctaggggataaagtagcgggatctgaaggccccaagtataatgagtgacctaggaatcccgttttgccctctctttgcctccacc

SEQ ID NO: 99324 - DNA, 575 bp, Homo sapiens
cttaggtcctcccatgcaataatttccagcttttcttctcaataatctactttatattatagtccttgctcttttctttcacatatacttgctttagtgcatttgtccagcggtcctcagactgtttggtcctgggttggggggtgcagacatgawgtaataattttctgtaccacatgttggacccaccagggtcgctggcaaatggtgagcgcaagggaaaaaagactggctaagtgattatatgggggatccctaatatcccttccccttttgaccacatgataatgtggacatcactgataacaacatgaggtgtgtgactgttacttgttccagctgctccagcaaagctcagtgggcaccagaaacacagtaggctgtaaccacctcctggccatcactaaccctacagccccaagcaggagcactactgaacaaatctgataccttgatttttctgtcctcaagacactggttcttcaaggtcctaggggataaagtagcgggatctgaaggccccaagtataatgagtgacctaggaatcccgttttgccctctctttgcctccacc

SEQ ID NO: 99325 - DNA, 575 bp, Homo sapiens
cttaggtcctcccatgcaataatttccagcttttcttctcaataatctactttatattatagtccttgctcttttctttcacatatacttgctttagtgcatttgtccagcggtcctcagactgtttggtcctgggttggggggtgcagacatgatgtaataattttctgtaccacatgttggacccaccagggtcgctggcaaatggtgagcrcaagggaaaaaagactggctaagtgattatatgggggatccctaatatcccttccccttttgaccacatgataatgtggacatcactgataacaacatgaggtgtgtgactgttacttgttccagctgctccagcaaagctcagtgggcaccagaaacacagtaggctgtaaccacctcctggccatcactaaccctacagccccaagcaggagcactactgaacaaatctgataccttgatttttctgtcctcaagacactggttcttcaaggtcctaggggataaagtagcgggatctgaaggccccaagtataatgagtgacctaggaatcccgttttgccctctctttgcctccacc

SEQ ID NO: 99326 - DNA, 493 bp, Homo sapiens
atgtgggcctgtgtgcgtctccctacgttttctgggagatgtatctcataaacactcttggccctttggtcacagggctgcaggactacaatcccagcatgcagcgagttcagggactstgtgtgtgtgtgtgtgtgtgtgtgtgtgtgtgtgtgtgtgtgtgtgtgtccctggaggaagacgtggagctgtgcgtgcctcgctgggcttgctgggagatgcattctgataaccaatcccagccctttcatcacatagctgtaggactacaattccagcatgcacggggtaccgggacagttcgcctcaatggaggaagagaaaggggtacatgcgtctcgctgggctttctgggagatgttgtctcattatttctcccagcccttttgtcacagggcttcaggactacaatcccagcatgcaccgtgctcagggagagcgcgcctcagtggaggaagaagtggacctgtgctcttctcgctatgctttttcg

SEQ ID NO: 99327 - DNA, 407 bp, Homo sapiens
ccttacccttttgtgtaaggaaagcagcaatgcatcagtagcataatttaaaactttctctagtattacttaaatttttattycttaaaactttctcatcacatctctttctaataattataatatggtttctttgaaatgttgttgccctaattgtatccaaataattcaaaatttatactttttacggattcaaaggaagagttgaaaattgtagttacctaggattctttttcagttggacactatgtttattcaggattttatagatcaaagtttctcttaattatgttttagaatttatgtttctgtattttttagagtaggctgtctcacagcagttaattgtgtttttactttctacctatttattatgattttgaattacattattcaagtaagaattc

SEQ ID NO: 99328 - DNA, 393 bp, Homo sapiens
ccttggctcttcattggtaactcactgtgctttgagactctgggaagaggcttttcaggttctagaggtccttcagagaagagagaggcctagagatgtgggcagatgaggacttggaataaagcagaatgtgacaatgcactgggctctggagtgtggggcccagaaaaaatactagttttttgggctgtccttgagktcctcattcagaagtggaagaaaatactgtctctgaatgctgttaaaatgtttaatgagtgcacagcacactcaaagaggctgaggaaaataggaatcaagggaggtttccgaggttacttttatggcccttggagtcttcagatactgctccttttcccaggggtccctgaagagccactgccttgagaattc

SEQ ID NO: 99329 - DNA, 400 bp, Homo sapiens
ttacaaaaatagtaggaatggtaaatagacccaaatgtaagtaagatttctaaacttaactcgtgtagtaaaatgtcaatattagtagacagtgataaaccatgcatgtatattgaaatacctagagcaaccattaaaacaattatacaaagccatatgctaaaaatcactaaaacaaatcaagatggaattctaaaaaatatttaactaacccacaagaaggtgagaaagtaaaagcgagaaacgagaagcatagraaatggacagaaaacaaattaataaaatagcagacttaagttctaatgtatctacggttaccctaaatgtaaatggtctaaatagaccagataaaagaaagagattgaaattggcagagtagatttagaaaatgagcaaagag

SEQ ID NO: 99330 - DNA, 434 bp, Homo sapiens
gcattatcatccccatttatagatgtggctcagagagggtaggcccattaaacacagccacacagcttgtaaagagccatttcctaaactgtaaatttatgtcttgggatgtcacgtttagtgtatgtgtgtatatgtatatatcatgttttgtataaatatgtgtgtgtattgctgtgaacagtagatacataatcataccttccatatgtatatatagagtcacgtttttttttttttktgtgtgtgtgtgtgtgtgtgtattgctgtgaacagtagatacataatcataccttccccaggacctgcccagacatcaaaataatctgatgtactaactgcttttctgttcctgttttaatacgagcctcacaccaatgaaaggacaaggcggaggaggaaagggtaggaaagcagaaatgaatgaagaattc

SEQ ID NO: 99331 - DNA, 580 bp, Homo sapiens
cactccctgcttggaagcctagcagctggcccagctaggaagaaaggtaagaaggtgcctcaggccaacccaccagcaacaaaaatgtctggacctctggggcttacggaggggttcaggacctaggattcctaggtcgtgcagctctgtaggaaacagctttctccctgatgtcaagatttgggaacttggagtggtgctatttctctcaaaaataatatctttttaaaaacaaaatgttgctttctcccatttaaaaataaccttttcccacccctgctacctcattacaaaagaaaacaatgcaagctcatcatggagaacatggaaaatatgaaaagatacaggaaaaaaataaaacatgaattgtaatcacatcacctaatgatagccactgctaggaatttgatggttttcctttcagtcttttatcaatgcatagagctatataatyagcagtaatatgtcataagcattttactaaatattatttgacactaccacttttattagtgtatatattctaatatgtggacaaggctttctttattgaggtaatctatggttgaatatttaggtt

SEQ ID NO: 99332 - DNA, 586 bp, Homo sapiens
gggggttctgtgagagcaggtctgactcactgattccccgacacgtctccatggactctcgaggtgcctgccctgcccatcactggacaatgggcctggtatgaaacaggaagaatccatccccacggacaaggtgggtcctccactgtccctggccctacccatcatcttcgtgatgctggcaggcaacaaaggcccacagagggtccaccatcccacacacccagggcacaagattgctagataaaatacagggtgcccaggtaagtctgcattkcagttaaagagccaataattttttagcatgtcctaatattgcaatgagacatgcgtatcttaaacaattttcatggtttatctgaaatgaaaatttaactgggatgtccactcattgttgcaaaatctggctatctggccggggtacggagtatgtaggcatgtgagctgggaccagagctagttcccatccccagctctcacctcttgccccagaacctcttacctccctccccttcttgtatcctccacccccaaaactctggaagacacagagttgctgcagtgatgcttgggaggaactgtcctc

SEQ ID NO: 99333 - DNA, 598 bp, Homo sapiens
gaacaagttaaaagaacaggaatatrtaagactttagcaatactgtaaagtgactagacctaacagacatctggagaacactccacccaacaaaagcagaatacattcttctcaagcatacactgaaggataaaacatatgccaatctataaaacaagcctcaataaacgtgaaaggactgaaattaataaaatatatgatctcttactaaaaaagaattaaattagatataaattacagaaggaaatatgagaaatcaataaacatgtggaaattaagcagtatacttctaaataaccaataagttaaaggacaaattacaagggaaattagaaaatacttttaggtaaaaaaaggaaaaacataccaaaacttgtgtccaaagaaaagctataagtagtgcttaatttatagctgcaatgcctttattaaataagaagaaactctcaaatcggtaacataaacttccacattgagaaactagaaaaataagagcaaactaaatccagataaagcaagagactcaaaataataaagattggagtgaacataaatgaagcagagattagagaaaaaaaagcaaagaaaatcaatgaaa

SEQ ID NO: 99334 - DNA, 598 bp, Homo sapiens
gaacaagttaaaagaacaggaatatgtaagactttagcaatactgtaaagtgactagacctaacagacatctggagaacactccacccaacaaaagcagaatacattcttctcaagcatacactgaaggataaaacatatgccaatctataaaacaagcctcaataaacgtgaaaggactgaaattaataaaatatatgatctcttactaaaaaagaattaaattagatataaattacagaaggaaatatgagaaatcaataaacatgtggaaattaagcagtatacttctaaataaccaataagttaaaggacaaattacaagggaaattagaaaatacttttaggtaaaaaaaggaaaaacataccaaaacttgtgtccaaagaaaagctataagtagtgcttaatttatagctgcaatgcctttattaaataagaagaaactctcaaatcggtaacataaacktccacattgagaaactagaaaaataagagcaaactaaatccagataaagcaagagactcaaaataataaagattggagtgaacataaatgaagcagagattagagaaaaaaaagcaaagaaaatcaatgaaa

SEQ ID NO: 99335 - DNA, 630 bp, Homo sapiens
tgtggtctgctattgttgaatgaagtattttataaattgtsaggcctctgagcccaagctaagcctgtgacctgcacatatacacccagatggcctggagcaactgaagaaccacaaaagatgacattccacctttgtgatttgttcctgcctcaccccaactaatcaatcaaccttgtgacattcccccctggacaatgagtctcatgacctccccaccctgcaccttgtgacccccgcccctgcccacaagggataaccacctttaactgtaattttccactacatacccaaatcctatagaactgccccacctccatctccctttgctgactcctttctcggactcagcccacttgcatccaagtgaataaacagccttgttgctcacacaaagcctattggtggactctcttcacatggacgcgtgagacataaaggtccattagatccaagggactgatggtgctgttcagttcaaccgtgtccttactgattttctgcctgtggacagaggtcatgaagtgtccaaatataacagtggattttctttctctttccagttctatccgtttttgcctcacatattttgaccctctgttgttacagagactttgagaattgttatgt

SEQ ID NO: 99336 - DNA, 427 bp, Homo sapiens
ctttgggaggctgtggtgggaggattgcttgaggccaggagttccaggccagccttggcaacatggcaagaccctgtctgtacaaaaaaagaaaaaataaatatcagctgggtgcagtggctcacacctgtaatcccagcactttgggaggctgaggcwggcagatcacctgacatcagttcaagaccagcttggccaacatggtgaaacctcttctctaccaaaaatataaaatttagccttttggtactctgagcagcaccatggcggttgttaagaacaagtgccttatggaaggtggcaaaaagggagttaagaagaaagtagttggtccattctctaagaaagatcagtatgatgtgaaagcacctgctatgttcaatataagaaatattggaaagacttcgtcaccaggacccaaggaacc

SEQ ID NO: 99337 - DNA, 427 bp, Homo sapiens
ctttgggaggctgtggtgggaggattgcttgaggccaggagttccaggccagccttggcaacatggcaagaccctgtctgtacaaaaaaagaaaaaataaatatcagctgggtgcagtggctcacacctgtaatcccagcactttgggaggctgaggctggcagatcacctgacatcagttcaagacsagcttggccaacatggtgaaacctcttctctaccaaaaatataaaatttagccttttggtactctgagcagcaccatggcggttgttaagaacaagtgccttatggaaggtggcaaaaagggagttaagaagaaagtagttggtccattctctaagaaagatcagtatgatgtgaaagcacctgctatgttcaatataagaaatattggaaagacttcgtcaccaggacccaaggaacc

SEQ ID NO: 99338 - DNA, 427 bp, Homo sapiens
ctttgggaggctgtggtgggaggattgcttgaggccaggagttccaggccagccttggcaacatggcaagaccctgtctgtacaaaaaaagaaaaaataaatatcagctgggtgcagtggctcacacctgtaatcccagcactttgggaggctgaggctggcagatcacctgacatcagttcaagaccagcttggccaacatggtgaaacctcttctctaccaaaamtataaaatttagccttttggtactctgagcagcaccatggcggttgttaagaacaagtgccttatggaaggtggcaaaaagggagttaagaagaaagtagttggtccattctctaagaaagatcagtatgatgtgaaagcacctgctatgttcaatataagaaatattggaaagacttcgtcaccaggacccaaggaacc

SEQ ID NO: 99339 - DNA, 427 bp, Homo sapiens
ctttgggaggctgtggtgggaggattgcttgaggccaggagttccaggccagccttggcaacatggcaagaccctgtctgtacaaaaaaagaaaaaataaatatcagctgggtgcagtggctcacacctgtaatcccagcactttgggaggctgaggctggcagatcacctgacatcagttcaagaccagcttggccaacatggtgaaacctcttctctaccaaaaatataaaatttagccttttggtactctgagcagcaccatggcggttgttaagaacaagtgccttatgraaggtggcaaaaagggagttaagaagaaagtagttggtccattctctaagaaagatcagtatgatgtgaaagcacctgctatgttcaatataagaaatattggaaagacttcgtcaccaggacccaaggaacc

SEQ ID NO: 99340 - DNA, 566 bp, Homo sapiens
ataactttgcagatcatctaccctactaatttgtttctcaagaggctcatatctgaattataacagccagcaggaattctagctcatttaaatgtgctatcactcagaagacagggtgatcagaaaatgggacccagaacttagaagttttaattaaatcaagctctgtgtaggtgaacaggcacattagtatttttggacagtgggatgtcatagaaaagtgtgytagagtgagggaaggctgaagacactttatataattggacctagttttggtgttattctgctatttgccatgttctgtaaaggaagtaggtttagatgcaaatggcatgctagtaatgagatggtaaatgtatatcttgctgcaagtgccatttttttcaagagctatttattaatttacaaaatagcaaagacggtttgacaagagtcatatgtaatgttggtaacattgattttattttttttaagttattttagagatgacttagaaggtgtggcaaattggcgtggccaaactgttttcaagcagaaataagtgctttgccacttcaggtgtttga

SEQ ID NO: 99341 - DNA, 561 bp, Homo sapiens
gactacaggcctgcaccaccatgcctagttatattttaaaaaaatttttgtagtgataaggtcttgctgtgttgcccaggctggtcttaaatgcttgacctcaagcaatcctcccatctcagcctcccaaaacattgggattacaggtgtgaatcaccatgcccagcctakttatttatttatttatttatttatttttaaactggagccacctgaggctatctaattctgaggaaactccaggctctttagagcttttctctctttccctaccttcctgaggacaatttctactcctctaggtttttgcgtgtgtgtgtgtgtgtgtgtgtgtgtgtgtgtgtgtgtgtgtaatatggtttggctgtgtccccacccaaatctcatttgaattatacctcctgcaattcccacatgtcatgggagaaacctgctgggaggtgactgaatcatgggggcaggtctttcccatgctgttcttgtgataatgaatgagtctcatgagatctgatggttttaaaaatgagagttttccctgcataagctctctctttgcctgcc

SEQ ID NO: 99342 - DNA, 561 bp, Homo sapiens
gactacaggcctgcaccaccatgcctagttatattttaaaaaaatttttgtagtgataaggtcttgctgtgttgcccaggctggtcttaaatgcttgacctcaagcaatcctcccatctcagcctcccaaaacattgggattacaggtgtgaatcaccatgcccagcctagttatttatttatttatttatttatttttaaactggagccacctgaggctatctaattctgaggaaactccaggctctttagagcttttctctctttccctaccttcctgaggacaatttctactcctctaggtttttgcktgtgtgtgtgtgtgtgtgtgtgtgtgtgtgtgtgtgtgtgtaatatggtttggctgtgtccccacccaaatctcatttgaattatacctcctgcaattcccacatgtcatgggagaaacctgctgggaggtgactgaatcatgggggcaggtctttcccatgctgttcttgtgataatgaatgagtctcatgagatctgatggttttaaaaatgagagttttccctgcataagctctctctttgcctgcc

SEQ ID NO: 99343 - DNA, 556 bp, Homo sapiens
taaaataaaagttgaaattattttaaaaaattaagaaaagggtaagttgagcctcatcaaaatcaaaatcttctactctttgtaagacactgttaagagaatgaaaatatagctgctgactgggacaaagtattgggaaattacatatctcattaaaagacttayattcaaaatatattaaaacactgaaaatttgatataagtaaacaactcaatgtttaaataaaggtccaaaaaattgagcagacattttaccaaagaagaaatcaggatggcaaataaacacatgaatacatgttcaacactactagtaattaagggaatgcaaattaaaaccacaatgagaaaccactacacacacagtaaaatgtccaaaatgcaaaagaccaactacagtaagctttggtgaggacaaggagaactcagaactttcttacactgctggcgggaatgtaaagtagtacaactactttggaaaacagtttggctgtttcttaaaatgttaaatatatacctatgattcgagcaagtcatttcactcctaggtgtttaacca

SEQ ID NO: 99344 - DNA, 556 bp, Homo sapiens
taaaataaaagttgaaattattttaaaaaattaagaaaagggtaagttgagcctcatcaaaatcaaaatcttctactctttgtaagacactgttaagagaatgaaaatatagctgctgactgggacaaagtattgggaaattacatatctcattaaaagacttacattcaaaatatattaaaacactgaaaatttgatataagtaaacaactcaatktttaaataaaggtccaaaaaattgagcagacattttaccaaagaagaaatcaggatggcaaataaacacatgaatacatgttcaacactactagtaattaagggaatgcaaattaaaaccacaatgagaaaccactacacacacagtaaaatgtccaaaatgcaaaagaccaactacagtaagctttggtgaggacaaggagaactcagaactttcttacactgctggcgggaatgtaaagtagtacaactactttggaaaacagtttggctgtttcttaaaatgttaaatatatacctatgattcgagcaagtcatttcactcctaggtgtttaacca

SEQ ID NO: 99345 - DNA, 629 bp, Homo sapiens
acaagctccttgagattgggaacctgtcttccactacccttttgcctctctatatctaatatatcaatgtatatatcatatgcatcaatattccttcatttggttttggtctaaaaattaaattgaaacaagggaattaaagaaaaaaggtgctgaagggttaaactgaaaagaaattggtccacttttgaaacacaatttatatwtctctatattgcatatgttttatgttcaagattgcgtccacccaactgtacacacatgttgcacacatctgtgcagagacagaaacaattgccacaatctctggatccctgccttgcttaaaactgtgacagtgttgccatttccctctaaacctttcttaatcagggtcacaattgaaaatgcctgcagttcaactatgtaaaaaagcataagggagaggagtccctgctagtgatacaaagaaaaagagaattttaatgataactataaatgcctgagaattaaagttttcattttctagatttaaacatacatacataccttcaagcaaagacaaaaatacctttggtttggattagagaactgaattctggcagagtcacatagtaatcagttttgttatattccagtgactaaaatgt

SEQ ID NO: 99346 - DNA, 506 bp, Homo sapiens
acttgataaactgactggctggtagaggagagggcatcatagtggtgtaataggtacagcaggtgcaccgataggaaatgagtatcaggccacccctcatcaccctgggtccacacactggagctgccactcagtgacctcaaagggctcgactgaaatctttccaaccatgttataaggattttttggagaaaatgacagggataagagcagttaagctgattaaggaaagtatgagttgtgggggctggagggcgtggacagaggggcaggttaaaagcacaagctctggggcatgctgcctgtgttcagaccatttccagtgtttctatgtgggtccaacctctgtccctcagctttctatctaagatgtggtaactacartagtacctactagttcctacgatcttgagggaaaattaaacaagataatgcctttaaagcactgagcactatgtctggcatacagttggagcacaaagaaataatacttagtattgttatca

SEQ ID NO: 99347 - DNA, 595 bp, Homo sapiens
tttagtgcataatattaaatggcaaaatcaaatttcccaacaatatacaaaataaaatcccatttacaaagggaaaaagctttatctatttgtatatcttcttatgtgtatataaattcatagaaaactatctggaagtgtatgtagcaaagcattaacaatggttatctctgggtataagaaggaactagaactgaagaagatggtggtgataagggaaggtatacctttcttttttttttattctgctgtgcttgagttttaaagaatgagaatattcatgtattccttgtataattataacacagaaaacctccttattaggaataggaggctgatttcttttttaatgactgatcttaggtcctttttgggtatttctccctcgagctggtttcaccactgaaggactgggtggatgatatggcttttagacacacaaattactcattaactttgatggaaaattctcactggcagctcacaagcaaaaatggtcctaactkcttatggttaatcttaggcaaagttgtgaagggattaacatctgtcttccatatactactttccatctttcccgacaatcaaactcctc

SEQ ID NO: 99348 - DNA, 556 bp, Homo sapiens
tctgacatcagagtgagatattccacaggaaaggcacctctatacaattatcatttttagggggaaaatctgttttgactcttggatgagattaggccattatactttggtcccctttattgttgcaattagcaaccttctacaaatgtttmaatgtgtatggtcgacccaagaaactcctggctgtgcccagtgagaggtcttgcctgttggcttgacagttggctggtgggaaatcagagaattgagtttatctggagcaaatgcgacaacattaagctcaacaactgttcttgtctgtgagtcaacaaaagggtcacaggataacctaaccttttgtaacttaaacatagttagtactttgagaatgagaagtaacatctcatgtcctattcgttttggtgctcaaagaagggtttagggaccacgagtcccagcagttttaagcaagtcccaggcactgactcctcggcactgcctcagcatttgggtgttgttacaacacaggaatgtggttagaaagacccttttgcatgtttttcaaataatggcaaat

SEQ ID NO: 99349 - DNA, 556 bp, Homo sapiens
tctgacatcagagtgagatattccacaggaaaggcacctctatacaattatcatttttagggggaaaatctgttttgactcttggatgagattaggccattatactttggtcccctttattgttgcaattagcaaccttctacaaatgtttcaatgtgtatggtcgacccaagaaactcctggctgtgcccagtgagaggtcttgcctgttggcttgacagytggctggtgggaaatcagagaattgagtttatctggagcaaatgcgacaacattaagctcaacaactgttcttgtctgtgagtcaacaaaagggtcacaggataacctaaccttttgtaacttaaacatagttagtactttgagaatgagaagtaacatctcatgtcctattcgttttggtgctcaaagaagggtttagggaccacgagtcccagcagttttaagcaagtcccaggcactgactcctcggcactgcctcagcatttgggtgttgttacaacacaggaatgtggttagaaagacccttttgcatgtttttcaaataatggcaaat

SEQ ID NO: 99350 - DNA, 632 bp, Homo sapiens
tgaaagtctggatttggttcttaaacgtctcccttccaaacccatagatgagatttgctcaaaaagaagtatctagaaggcaagtttctcaagacaccataaaattgtagggactgaagcagtgattggattgattaattcaatcaaggctgtgactcaatgttggctaataatgagacccaggcagggctgaacaatgaaatgctctaattgattttacgcatgtggaatgacacacacacacccccagagcatgctacgatgaatctgcatgctgtgtgcatatagatttcacagtggatcaattataccacccagttgcttcaggcccttatattctgcaattcacagaccagttcattactatggtgtgagtgcttaggacacaggctaaaaggtggcagagcccatgaagtctgtkgtcacctcatgttccctttaggggaaagcaactgcgtggcacacacacataccagccatgccacaggctcaagtgaatgcacggtatcttccagattctggcatgaccattgactgggctagaattccaaagccctggtttcaattaaacttaagtggatttgactaaaagtttgaactgatgctaattggttttcaaaacactgagtaac

SEQ ID NO: 99351 - DNA, 569 bp, Homo sapiens
ttttttttctttgtcagattgggttaattcaaaagacttgtcttcaagctctgaagttctttcatctacttgttttattctgttgagactttcctgtgtattttgcatttctctgtgtccttcatttccagaagttatgattgttttttatttatgctgtctatttctctggagacttttccatccatatcctgtatcatttttttgatttctctaagctggtattcacctttctctggtgcctccttgagtaacttaataattaacattgtgaattctttctctggcaactcagagatttcttctgggtttggagscgttcctggtgagccagtgtgatcttttgggagtgttttgtcataataccaggattgtttttctggttccttttcatttgggtagactatgtcagagggaagatctggggctcaagggctgctgttgagattcttttgtcccacagggtgctcccttgatgtggtgctctcccacttcccctagggatggggctttctgggagctgaactgcagtgatagttatttctcttctgggtttagccatccagtgg

SEQ ID NO: 99352 - DNA, 592 bp, Homo sapiens
ctaacaattatctgagccttaagcaagtctaatctttttgctggtggagggtcttgccttcatgttgatggttgctgaatattggaaagattctggcagtttttaaaagacaacaacaatgaagtttgctgcatcgattgattcatctcatgaaagagtcctctgtagcatgtgatgctgtttggtaacattttactcacagttgaacttctttcaaaattggtgtcaatcctctcaaaccctgccactgctttattaattaagtttatataatattctaaatcctttgtcatcatttcaacactgttcacagcaacttcaccaagagtagattccatctcaagaaaccactttctttgctcatccgtaaaaagcaactcctcatccattcaagttttattatgatattgcagcaattcagtcacatcttcaggctttacttctcatactagttctcttgttatttctaccacatctgcagtgacttcctcaacactgaagttttgaacccctcaaagtcatccatgagggctagaatcaacctctcccaaattcctgttcatgttrgtattttgacctcctcccatgaatc

SEQ ID NO: 99353 - DNA, 549 bp, Homo sapiens
gatgctgtttggtaacattttactcacagttgaacttctttcaaaattggtgtcaatcctctcaaaccctgccactgctttattaattaagtttatataatattctaaatcctttgtcatcatttcaacactgttcacagcaacttcaccaagagtagattccatctcaagaaaccactttctttgctcatccgtaaaaagcaactcctcatccattcaagttttattatgatattgcagcaattcagtcacatcttcaggctttacttctcatactagttctcttgttatttctaccacatctgcagtgacttcctcaacactgaagttttgaacccctcaaagtcatccatgagggctagaatcaacctctcccaaattcctgttcatgttggtattttgayctcctcccatgaatcatgaatgtccttaatggcatctagaatgatgaatcctttccagaacattttctatttacttttcccagatccattttagaaattactatccatggcagctatagcattatgaaatttgtttcttaaagag

SEQ ID NO: 99354 - DNA, 625 bp, Homo sapiens
agaagatcaaagttactggtgaatggacatattccaaataaaaaactgatagaagagagccaggacctgtcggagaatccacaggaagaagatgggatgcagaaaaggaaagcagcaagagtcttgaagagatagacccttgaggaactcggagccccatggaaagggtaggtgggaatgcttctccgctaccctcacccctgcaataatttgctgactgtcaaactgttggggagcccctctaccctagtgaccctagacaatactctttgtggtgattcaaaaactttctggcaacagaaaaacggtggccagctcatgcaggcatgcctatactcctgtcaggccagaactgagatggaaggtaccatactggttgtacacccatcccattatgagccactgccctgcctgggggatctcaggccttgagtcattataccaacagacaccactttaccataccccacaacccactctgaytttgacaagtgaaagggaccagtggatccctggggagctgcaggacccctggagagctaatcctcagtgtggattacccctatgggaggaaagagcgcaacccaccagatcccactttggaataattcctgaaggaagcagc

SEQ ID NO: 99355 - DNA, 536 bp, Homo sapiens
gctgttcttgaactcctgaactcaatcagcctcccaaagtgctgggattacaggcataagccactgcacctagccagcatattaatttcaaatattacatgtaaattataagagatgcttgacagagtttctttaatcagtgaacctgaatatttctcatgtattccatgtataaggcaacttttctgacacattctgacagatttgtgactatattttgtatttaggaccaaaaaattagccagattagtaaagtatatgatgactagaaatatgagatacatcttaatatttatttccttccaagaacccttactggagagtaagatcactttttgttctacccactggttgcaaccaccagcttttctcaaataaagtyacacgtactctttgggctataacactgtatatctggaggtgatgcaaatccatgttataataaacacagtatttcttcttagtacattaccttttactggacaatttctggagtatagattaaaatttttaaatattatatttatattgaaata

SEQ ID NO: 99356 - DNA, 565 bp, Homo sapiens
ttatcttttattgcagaccactttttaagtgtagatatcacaaagatgggtagcatacaaatttattaactttttctataacttaattcatcaaaataaatatctaaattttaaaaacatcactcatagatccctcagttacagaaaatatctcattcatctttgtgttcacagtacatagaaaagtagatagtaggcacttaattttattcaaatggatcaatgtataaatccatgcatggataagaaagactgttctttcaaaagcatgctagtgtgtatttagttttggggtttgtgctggtggggttgattggttggtacargctactgagctgtgaatgggatcggaatttaagtggttgaagcacagaatactgaaaaatatttttcctaccttataattttccatcttttctctggtgacatcaaacagccatttgtctagactgtgacttaaggtctgtcacaatctacagaggacaatcttggtcttatgtatgttgagaattggggcagaattcctcccctgagccagagagtttcttttccaccagaggcatta

SEQ ID NO: 99357 - DNA, 579 bp, Homo sapiens
agtctaaagtcttctccgtagaagtagctgctcagcagagattcacttaagtcttggatattagaggctttatctgtttatttgatgattggaattttctgcccattattgatccctgccactcttatgaacaacttaagtgtctgacacaagtgagttgataaaatagactgtattttttatccaytaactggcacttcatatattgtccaaaatctgtcatgagctttgcaacatttccacagcaatagcacctgcctattcagggatcatatatcaaggtgcattcagttcatctgccacaacaggaattggctgctgctgtttatattttcccccccaactcttatcatgaagttaccccttacccttacttttgaaaaaaaatgggacatacttccaggattattttcttcaatatttctctatctaacaaagttatgtgttttataatttttgatatctgttaggttacatacatttacctgcttgaggaaatatatgagaagaaatattcaaacttgatagatgtcagtaatgctacctaaacattttcaaggcatgtaaaatcaaccccta

SEQ ID NO: 99358 - DNA, 635 bp, Homo sapiens
tgaataaaatgcatacatcatttgggcaagtcatcacacttttctgggtctttcttttacttctttatgtataattttaagaccactatttttttgttgttgttgacagaaaaactrcagagaaagggtaaactttgaactaagcctcagggattgagagaaattgctagttaaactagaaaggaaagctattccgggcaggaaagaacatcctttttaggaggatcccctttactcttgaagacagagttaggctctcctcccctgggcttctgctgtactatgtatttatttctgttatcaatatttatttgattgcataagtgatatggcttggctttgtccccacccaaatctcatcttgaattgtagttttcataatccccatgtgtcctgggagggaccaggtgggaggtgattaaatcatggaagtggttaccctcatgctgctcctgtgatagtgagttctcatgagatctaatggttttataaggggcttgccccttcgctgggcactcattctctctcctgctgccttgtgaagaaggatgttgtattaatctgttctcacactgctaataaagacatagcccagattgggtaatttataaagaaaaggagatgtaatggaatca

SEQ ID NO: 99359 - DNA, 635 bp, Homo sapiens
tgaataaaatgcatacatcatttgggcaagtcatcacacttttctgggtctttcttttacttctttatgtataattttaagaccactatttttttgttgttgttgacagaaaaactgcagagaaagggtaaactttgaactaagcctcagggattgagagaaattgctagttaaactagaaaggaaagctattccgggcaggaaagaacatcctttttaggaggatcccctttactcttgaagacagagttaggctctcctcccctgggcttctgctgtactatgtatttatttctgttatcaatatttatttgattgcataagtgatatggcttggctttgtccccacccaaatctcatcttgaattgtagttttcataatccccatgtgtcctgggagggaccaggtgggaggtgattaaatcatggaagtggttaccctcatgctgctcctgtgatagtgagttctcatgagatctaatggttttataaggggcttsccccttcgctgggcactcattctctctcctgctgccttgtgaagaaggatgttgtattaatctgttctcacactgctaataaagacatagcccagattgggtaatttataaagaaaaggagatgtaatggaatca

SEQ ID NO: 99360 - DNA, 635 bp, Homo sapiens
tgaataaaatgcatacatcatttgggcaagtcatcacacttttctgggtctttcttttacttctttatgtataattttaagaccactatttttttgttgttgttgacagaaaaactgcagagaaagggtaaactttgaactaagcctcagggattgagagaaattgctagttaaactagaaaggaaagctattccgggcaggaaagaacatcctttttaggaggatcccctttactcttgaagacagagttaggctctcctcccctgggcttctgctgtactatgtatttatttctgttatcaatatttatttgattgcataagtgatatggcttggctttgtccccacccaaatctcatcttgaattgtagttttcataatccccatgtgtcctgggagggaccaggtgggaggtgattaaatcatggaagtggttaccctcatgctgctcctgtgatagtgagttctcatgagatctaatggttttataaggggcttgccccttcgctgggcactcattctctctcctgctrccttgtgaagaaggatgttgtattaatctgttctcacactgctaataaagacatagcccagattgggtaatttataaagaaaaggagatgtaatggaatca

SEQ ID NO: 99361 - DNA, 560 bp, Homo sapiens
tttaggggagtggataggaagggggccatcagctatagcrtgacaggattggtaccttcttcctattcctatggtgtacatatgaaatgctttgaggggtgacaggggttccaaaggaatggcacatggaagcccggagggcatcaccaggaggagcagttttcagagcacaactaaagatgctcagacagcaagaggcagtaacattgacagggctcttacagtgttctggacactgttgtaatccttgtgcatgctttaacactgttaatccacacaacagccctgtgagaggggtattgttttatgcaagaggaaactgaggcacagagaagctggggaattttcccacgcagctagaaagtgtcgatttcatgcttggttcatttggccacagaagctgtcctcttaaccagtatattatgtgacctcatcaaatgaacatacccactctaaatagaccacagggtttagacaaagaccatttacatagcaatcatcttgtttggagggctaagaactctttctctattttcagagcagtacttaagcccctaaat

SEQ ID NO: 99362 - DNA, 489 bp, Homo sapiens
gaattccttagttaaagcacaggtgggagatggctatgtcacgtaacctacagctgcagttccygggaaaagtagagcctgtctattgctctacagcatcgcttgtctcagaagcaacttggctgtttctcctagttctcttatggctcattgtctttgccaatgctgattccactgctttaaatttcctttccgtgtttatcaatctaatgaattaaaacttctcaatttacaatacagaataaacattacctctttagggatatcgtttctgatcctcagatagaattgccttctcatttgtatcctgttcatgaagtcaatatattacttgaagtacatgtattgcatttctgttctgttttcaagtctatctttcctgactacattgtaaggactaagtccagtggttagagtctgtcttcaccatgcccaacatagctgcattctggatgtttcaggacattgatcaataaatctttcgtatca

SEQ ID NO: 99363 - DNA, 489 bp, Homo sapiens
gaattccttagttaaagcacaggtgggagatggctatgtcacgtaacctacagctgcagttcctgggaaaagtagagcctgtctattgctctacagcatcgcttgtctcagaagcaacttggctgtttctcctrgttctcttatggctcattgtctttgccaatgctgattccactgctttaaatttcctttccgtgtttatcaatctaatgaattaaaacttctcaatttacaatacagaataaacattacctctttagggatatcgtttctgatcctcagatagaattgccttctcatttgtatcctgttcatgaagtcaatatattacttgaagtacatgtattgcatttctgttctgttttcaagtctatctttcctgactacattgtaaggactaagtccagtggttagagtctgtcttcaccatgcccaacatagctgcattctggatgtttcaggacattgatcaataaatctttcgtatca

SEQ ID NO: 99364 - DNA, 440 bp, Homo sapiens
agatttttaattcatctgcagaagatcagaacagagtttgagggattctaagacttctcctgaaagattgacattcaatcatccatattcacccattcattgttttatgtcttcattgcactaatagggaaaaattaataaatgccttacatatgctcaatgaggtgatgaaccataaaatagtcctttacatcaggaagttttaacttctagtaggagagatggacattaaacaaatacgtacgcaatgtttagctatactcactggaaagaaagaagagcccmcaaatgtgaaaacagcatatgtggaaaccttaagctactatggatatttggaatcggcataattgggaaggatagctaggctttgcttaggtaaaggagagcttcactaggggtgaagaaaaacataaatatctggatataatgcatgtagaaat

SEQ ID NO: 99365 - DNA, 659 bp, Homo sapiens
aaatacttttagttaaaaaagaatgactaaataatgtatcttaagacaacattaatatatttttggtataatgagatcaattctgtatttwtaaaatgtatcttattaaaagatcttgttggcacaatggctcacacctgtaagccatcacacctgtaagtgttttgggaagctgagacaggatgatcacttgagtccagggatttgagactagcctgggcaatatagggagaccttgtctctacaaaaataaaaaaaaaaacaaagtaatatcctttacaaaatattaaaaatatttcaatgttagtgcaatatacaaaatacataaaatataaacatacaattattaagattgctgattagtctttgcatatgttgttacaaaattaattaagtgctttattttacccccaaatgctaaggtgtagggaaagtagacataaaagtagagtgggttaaaagagaaaacagaaaaatcagagagataggcattaatttttaatgcattatgctagatgttttatatctgctatttcattcagtcttcacatggtagtattattcctgatttacagatttgaaaactgaagcatagagagattaatttctcaaagaacagatattgttaagaacacatgcaatttgaatagatgtacttt

SEQ ID NO: 99366 - DNA, 659 bp, Homo sapiens
aaatacttttagttaaaaaagaatgactaaataatgtatcttaagacaacattaatatatttttggtataatgagatcaattctgtatttataaaatgtatcttattaaaagatcttgttggcacaatggctcacacctgtaagccatcayacctgtaagtgttttgggaagctgagacaggatgatcacttgagtccagggatttgagactagcctgggcaatatagggagaccttgtctctacaaaaataaaaaaaaaaacaaagtaatatcctttacaaaatattaaaaatatttcaatgttagtgcaatatacaaaatacataaaatataaacatacaattattaagattgctgattagtctttgcatatgttgttacaaaattaattaagtgctttattttacccccaaatgctaaggtgtagggaaagtagacataaaagtagagtgggttaaaagagaaaacagaaaaatcagagagataggcattaatttttaatgcattatgctagatgttttatatctgctatttcattcagtcttcacatggtagtattattcctgatttacagatttgaaaactgaagcatagagagattaatttctcaaagaacagatattgttaagaacacatgcaatttgaatagatgtacttt

SEQ ID NO: 99367 - DNA, 611 bp, Homo sapiens
taattcctgtatgtctattgggctgctccagttacaaaataagttctcaggcaagtccacccctcctcacaagcccagatcttcaccaaaagggcagtaacatttcactagccattatcagggtccagaggcatttctgtgactctgttcccaatagggtgggtccagaacattcctcatggcattggaggtcaaaggcagagaaggatgggaagaataagaaaagccagatccaatttaaccttactgtcctcaaaccatcctgaatttcaaatctactttttgtttatagatataactatccaatgtatcaaaactcattgtcttgtttagattctgaaggtgtcaaaggaaaaagcatctcacattcttgatattcacatttctcatggggtrcagggttagctatagaagaaattatgaaaaaggtaaagtttggtatttcttgctatacttccaatgaagccttgatatttattggatcgtgtgagcgtgtgtgtgtgtgtgtatgtgcgcttaggatatttttatagcaaaacaagcaggataaaaacagtcacaaggaatgggacgatgtcatcacagcccattgtcggcaaagaaattctcat

SEQ ID NO: 99368 - DNA, 585 bp, Homo sapiens
ttattgagctctaactatgtccttgatggtattcgaagcaccttccatggattatctctttcaatcctcataacaacttggtgagaaaggaaccattattaaccccattttacagactgagagaatgaagcctagagagattaatttacttgccttaagttgcataaaagataagtggtggagctgggatctgaatttaggcagacctacttcagtgatattattckcaaccttggttgtacattagaatcacctggacaattttgaaaaattacctatgattagacttttttctccaaggagctaattaatctggggtggggcctgggaatcagtgatttttttaaagtcctttcaagtgattctacaacatggttagggttgcgaactcaggctccagaagctgcactcttacaggaaactaacttagattcagatccagccaagagcagagacatctgtaatatataagctgcagctctatgggcttcccatgaatgacttgatctactctcctccctgtgaagggagagagatattattaccttttacagataaagagactcaatgtagagaaattaagcc

SEQ ID NO: 99369 - DNA, 440 bp, Homo sapiens
gaattcaggcattgctgatatttggggtcctgtcccactgccacaggcttactctctgcctatctgagtcttactaattctcaaaaggagttctcttcaagcctttcctgaccaccctgctcagagtaatctccccacttatctcaactggcaccagagaagcgytggtacacaacagaagaggcaaacccctagggatccctcaggccacagatgctcactccttgcctgacccctctggaaagctaaaaacaaagtaagttaaactgagaacactggacaaaaatctgattgtccttgctgtacaccaggcttgccacatgccaactccttccttcttcttcatttcttcctcattccacacaaggtatagaaagccaccagctattaactaggaagaaacagataagccatatctaaaacacagaggaaccaattcc

SEQ ID NO: 99370 - DNA, 648 bp, Homo sapiens
tgtaaaacacatacacatacgtgatgttaacaaatgtgtttgacccttcttccttctgtctgatgacctgccaaagcaagtttaaagccaaactctcactgaacgcaactctcatacccagaagtcccaaggaactggagccaatttacacagcaactgatgacctgatcagagtgctctgtagagggcttagtttcatccaattgtcctttgactcagagtgcatgagacaaaaacaaatctggtctcccctacaagagcaaggacaatggaatagtctagaataatcagctcagacctcatagatgaggtatcatttgaactaggatttaatggatgagtaacattttctggggggggaataagagaaattttatacaaaagaggtagatgaataaatacacggaggccatgatgtgctcaagaaacaataactggttaagtatggtaagaaatgctgagagatggggctggcaaggtgaactgggctagttcaccaagctcttatcaggcagagcatctagactgaggtctataaataatgcaggcttaacgcaaatctcattaaaragctttgaaattttctcttttgtattttattatattttctttttagtattttctatcctcattataaaaaccatgcat

SEQ ID NO: 99371 - DNA, 646 bp, Homo sapiens
tcaagtagcggtaaatattcttttttttttctggaaattgatagtctaattttctcctgcctctctttggcacaccctcattttgcatgagatatgctccttaataaaatttctactcaatattacagaaacttccagaaatggcatytaaaatattacactggcccgtttaacttcaccttcactaattgcaatacattatacaaagagcactgtggacaaaggtggaatatttaactaactggatttggtttcacaaacagtaataagacttttaaaaacattattagagcatttatttcatctcctttgcaatatatttttcttccttttaaactaggctttctaaattctcatttttaatgtttcagttgaaagaactttcacaagcctttaaaagacattatgatttgaattattcttgcctagaaaattacttctgatgtttaacttacattctcctttattcaattgtagcttcaaactatcttagaaaattaatttgtcttataattttccccttaaatcattgtaggtaatctcaatattttatctttccaagcacacatagtactatttaaatttccagaaaatctgaagataactaagatttcctttaacttttcatgtttgatgaaatgatgca

SEQ ID NO: 99372 - DNA, 607 bp, Homo sapiens
aaatagtagtaagcatctccatgtaagagggtgaccatcttttctgagttgtctaaggcagtctcaatttgcttcygaggtcctaagttaattataaatagcacctcccttcagtttcaaatgtattcagatttggatgatggcggacacactcaccctatgcacaagttctttggtgtctttaactggcctaaattccagatgagaccagttctgggagtgggaggggatgagcaagagtcaacaagaaaaataacttttaagatgggttttgaaagtgagtttggcaataaaaatggtaaacaaacaacccccaaaaatatataaccaaagcagaagagcggagatgggaatgtgagataaactaagaggttccagaaaagttaaacatggaaagatccccagatgtatctgtgtctgtaagtgggaaagaagacttcgataggctgctggccttggatggaaagggcatcattattggcagtaagagtttggatatgacaatttattaatcgagaacttttgatccttctttttagacccttatccattgggctgtcttcagggttttaataggtggaagatcagcctggccctttgccaaggg

SEQ ID NO: 99373 - DNA, 607 bp, Homo sapiens
aaatagtagtaagcatctccatgtaagagggtgaccatcttttctgagttgtctaaggcagtctcaatttgcttccgaggtcctaagttaattataaatagcacctcccttcagtttcaaatgtattcagatttggrtgatggcggacacactcaccctatgcacaagttctttggtgtctttaactggcctaaattccagatgagaccagttctgggagtgggaggggatgagcaagagtcaacaagaaaaataacttttaagatgggttttgaaagtgagtttggcaataaaaatggtaaacaaacaacccccaaaaatatataaccaaagcagaagagcggagatgggaatgtgagataaactaagaggttccagaaaagttaaacatggaaagatccccagatgtatctgtgtctgtaagtgggaaagaagacttcgataggctgctggccttggatggaaagggcatcattattggcagtaagagtttggatatgacaatttattaatcgagaacttttgatccttctttttagacccttatccattgggctgtcttcagggttttaataggtggaagatcagcctggccctttgccaaggg

SEQ ID NO: 99374 - DNA, 544 bp, Homo sapiens
cccatataaacaaaaggtcattgaagagggtattctgaagagttgaagtcctgagaccaaaaagtttgggaattgctcgcttaaagaaacaagattcatgcctgggcctgggaggaaccagtctgccttgaagcagatggatacctgatacctgaatcctgaaccagttaggaatcctgtcaggaaggaacagggggaggctgggtggccactcagtgtttgtcacagagatcattcrgtaagaaatggaaactggaagtaaaagctactcttacaagagggaaaaccatagtgccactgaggaaacaaggcccacagatgttgatgaccgtgacttctccttctttcccctcttattttagaaaagagagactcaatgcatttaggaggcaaggagggcaagcaccagtggagaagacagtatacaaagtagagaaaacaaggccaagcgcggagtctcacctatagtcccagcactttgggagccgaggtgtaatgaatgcttggtgtagattagggactactgaaatgcttgttctgtgaa

SEQ ID NO: 99375 - DNA, 544 bp, Homo sapiens
cccatataaacaaaaggtcattgaagagggtattctgaagagttgaagtcctgagaccaaaaagtttgggaattgctcgcttaaagaaacaagattcatgcctgggcctgggaggaaccagtctgccttgaagcagatggatacctgatacctgaatcctgaaccagttaggaatcctgtcaggaaggaacagggggaggctgggtggccactcagtgtttgtcacagagatcattcggtaagaaatggaaactggaagtaaaagctactcttacaagagggaaaaccatagtgccactgaggaaacaaggcccacagatgttgatgaccgtgacttctccttctttcccctcttattttagaaaagagagactcaatgcatttaggaggcaaggagggcaagcacsagtggagaagacagtatacaaagtagagaaaacaaggccaagcgcggagtctcacctatagtcccagcactttgggagccgaggtgtaatgaatgcttggtgtagattagggactactgaaatgcttgttctgtgaa

SEQ ID NO: 99376 - DNA, 463 bp, Homo sapiens
aaatagaaaatcaatagaagaaaatgtcagagtacatgtttgcaatgcagagtcaagaaataactctttttaaaaacttgaaaagcttacatgcaaaggcaaacctgtctttaaaatgactatttcctctattaaaaaaattaagtgtttttgtttaatagaggaagagtggataaagagagataatcttttatcaacaatatccaaaactggcaatatgcaaacatgtaaggattaagtcaacaagacagataamccaaaagaaaaaaatgggcaaaaatatgaataagcaataaaaccaacagctaatatgtaaatcaagagacattcaaattcattagtcatcacaggagcaaatgaaaacagtaatgaaacagtatcttatccctgttaatttagttagaatgtaaaaaataagcagtctcaactatcggtagagtgtagggatagaggaccctacata

SEQ ID NO: 99377 - DNA, 482 bp, Homo sapiens
attaaatcaaaagttagaaatggttaagcttagtgaggaaggtatgtcaaaagcctaggcctcttgcaccaaacagttagccaagtaatgaatgcaaaggaaaagttcttgcgggaaattaactgtgctactccagtgaatgcatgaatgataacaaagtcttatggctgatcagaagaaagtttcagaggtctgattagaagatcaaaccagccacaacattcccttaagccaaagcctaatcyagagaaagaccctaactctcttcaattctatgaaggctaaggaaggtaaggaagttgaagaagaaaagtttgaagctagtagaggctggttcatgaggtttaaggaagtcatcttcataacataaaagtgtcaggtgaagcagcatgtgtcaggtgaagaagctgcagaagatctagctaagatgaatgatgaagatgccatcccagcaacagagtttcaatgtagataaaacagcc

SEQ ID NO: 99378 - DNA, 549 bp, Homo sapiens
gaattccataatggaaaaaagtagctggattctgagcccatcgggttgacataactctgggtttcctaatggcccccaaaaatgtgagggccagtgagcagggaaaaacatatcctattaccaccccagtttcttagactcagaaatggcaaaaaatccaaatgtaaagaggcacgaatcatagtgaaagaataaggactacacttttgcactgaatwtggcaataactgttttatatcagctgccaatatttagtgtccttgaacccttagatatgccccatctcaaaaatattttgtatcctggaaagaacaaaccccatcaactcccttattcaattttacattcaattagatgcccacaagtaagtgttgtttcagacttcatcttattactatttgtgtgtttgggtccaacatgccaggggtagatgaagagtagctacattgttacagaagaaaagtaaaaaccaggaagtgtttataaagtaactattattagaagcaattcagtccaattatttactgtctacgtacactatttcttaaa

SEQ ID NO: 99379 - DNA, 519 bp, Homo sapiens
tttagccgtttaattcttaagccctctaaagatggcaaagctaaaagagcactgtaatacatgccctctggggctccaggggtcacaggtacacccctaggtgccgccatggggctgcrctgagttctgctttggctggtgcccagaagtactagtcccagctcctgaacctgctcacctgtgtgctcctcctcccgcaaggggttaagagctacgggctgagtaagcaaggcaccccttttgcgaggtccgttaaggggtcagggaaaattttctgtttcaactccacatggagttgactctacttatggtccagtggagaagcaactacatgcctaataaagacaataggaattcaatgcagcccattagggacattggagccaccatcattagctagttgaaacttcctaggttgtttttaagttttcttcatcactctaactctagtactgaaattttcagtttttccttccttgtgttgaactttcatgtttctactctcaaggaaattatagc

SEQ ID NO: 99380 - DNA, 519 bp, Homo sapiens
tttagccgtttaattcttaagccctctaaagatggcaaagctaaaagagcactgtaatacatgccctctggggctccaggggtcacaggtacacccctaggtgccgccatggggctgcgctgagttctgctttggctggtgcccagaagtactagtcccagctcctgaacctgctcacctgtgtgctcctcctcccgcaaggggttaagagctacgggctgagtaagcaaggcaccccttttgcgaggtcygttaaggggtcagggaaaattttctgtttcaactccacatggagttgactctacttatggtccagtggagaagcaactacatgcctaataaagacaataggaattcaatgcagcccattagggacattggagccaccatcattagctagttgaaacttcctaggttgtttttaagttttcttcatcactctaactctagtactgaaattttcagtttttccttccttgtgttgaactttcatgtttctactctcaaggaaattatagc

SEQ ID NO: 99381 - DNA, 519 bp, Homo sapiens
tttagccgtttaattcttaagccctctaaagatggcaaagctaaaagagcactgtaatacatgccctctggggctccaggggtcacaggtacacccctaggtgccgccatggggctgcgctgagttctgctttggctggtgcccagaagtactagtcccagctcctgaacctgctcacctgtgtgctcctcctcccgcaaggggttaagagctacgggctgagtaagcaaggcaccccttttgcgaggtccgttaaggggtcagggaaaattttctgtttcaactccacatggagttgactctacttatggtccagtggagaagcaactacatgcctaataaagacaataggaattcaatgcagcccattagggacattggagccaccatcrttagctagttgaaacttcctaggttgtttttaagttttcttcatcactctaactctagtactgaaattttcagtttttccttccttgtgttgaactttcatgtttctactctcaaggaaattatagc

SEQ ID NO: 99382 - DNA, 556 bp, Homo sapiens
attatttacatagactggcttttcaaaaccacttgcccatgtattttctcatttgcttggaacaagtatcattattattatttaatttttctcaagagaaaactatcctcaaagtggttcaaggattktcctaagattattcacctagtaagtggtagaaaaaaagcttaggtgcctgtagttctgcctccagggtctttccactactcatcttcatatacaaatctactagatcttgctacttaaagtgtggtccaagaagcagtagcagcagcaacagcgatggcacagcaccacctaggcagcatctcagaccccacccaagacctactgaatctgaatttttttttccttctttttttagagataggctcctgctgtgtcacccatgttggaatgcagtggcatgataatagctcactcttacctcaaattcctgggctcaaacaatcctcccaccttagcctcttgagtagctggaactacaggtggcaccaccacacttgggctaatttttttttttcttattttgtagagacgaggtcttgccatgttg

SEQ ID NO: 99383 - DNA, 556 bp, Homo sapiens
attatttacatagactggcttttcaaaaccacttgcccatgtattttctcatttgcttggaacaagtatcattattattatttaatttttctcaagagaaaactatcctcaaagtggttcaaggattgtcctaagattattcacctagtaagtggtagaaaaaaagcttaggtgcctgtagttctgcctccagggtctttccactactcatcttcatatacaaatctactagatcttgctacttaaagtgtggtccaagaagcagtagcagcagcaacagcgatggcacagcaycacctaggcagcatctcagaccccacccaagacctactgaatctgaatttttttttccttctttttttagagataggctcctgctgtgtcacccatgttggaatgcagtggcatgataatagctcactcttacctcaaattcctgggctcaaacaatcctcccaccttagcctcttgagtagctggaactacaggtggcaccaccacacttgggctaatttttttttttcttattttgtagagacgaggtcttgccatgttg

SEQ ID NO: 99384 - DNA, 510 bp, Homo sapiens
aggcgggaaccagccctggacaggatgcctatactctgcagggtacatacacacacacacacacacacacacacacacacacacacgctctctctctctttctctctctctctctctctctcagactgggacaatttggacaggctatttcacttaatatgcacatctttgagatgtgagagaaaaaataattatccagagaaaatctatgcagacagtggccttggctgtgaattaacttttttttcgatcaacattatagtgaaatgatgttgaatgaaacattattcaaggacctgctgtagttagaatacagagtgatyttgttttcttgactgaatcctaactgatacaaagatctttaataccttcaaaataagatctcaaatctttccaagagtcctcatcaagtatccaagtgagccaataaaagtcttttctgccacatagcacctgctgtgttgttcttccttcgaggatacctcatcactcccaagatcaccagtgcct

SEQ ID NO: 99385 - DNA, 452 bp, Homo sapiens
attctctattgtctctgccacttgcattctttcaggccctctggcagctcctaggtttttgtcatcccagtttcctaatgagaaaacagggcttccctctcctggattcagtgagaacattcccagcaaaggattctgcattggtccagcttaaggggtgcccaccaccccaggaccaagcacggcagccccgcaaatagaagacccggtggatgcctggactacagggtaaaggatgctgacaaggagagggttccccgtgaggaaaacatcacagacaccrcccctgggtggctaatgagctgggcaaccaccccaagttgagtcactacaaagggaactttcgctacagcattgtttgtaataatgaaattttataaactatccacacgtttatcaacagggaaacaagtgaatacattgggatgcctcttaggaaattctatgcagcc

SEQ ID NO: 99386 - DNA, 562 bp, Homo sapiens
ttctactcaaaacacctgtctccctgccaaggtgaaggctagatggtaaaaaagaaagttcccttttttctgataaactaggctgtctccataggaagtaccctgaaggcccccagctccgactccgagagcagagcccagactctcctactttggacggacatgagctctatgcctcttggggtttctctgcctgcccagtcaccctggataacgtgcttgccctagattgtctcctaggccaagtcctctccaagttcttggccctttgtcctaaggttggatctcttcctctcgcttcccttgctccgagctgtgtctctggatacaccccctgcaaactacgcttcctgagctcggctggcatctggctgtgttcagcaaatgggaagcccagacgggactggagagcaggaagacgggagaacaaggagatttctcctccttcagcagccacagcagcaaygtcgtgtcctccacagttaactggaagaaaaagcctgagtccttgtctcctcctggattgccaaagggtcttctccttagacatgtaaatacacaa

SEQ ID NO: 99387 - DNA, 563 bp, Homo sapiens
ttcaaccatgtcagggaagcggttggaaggaaaaatcacagagcacataagaaggacttctgggcctgctccggaggcttgcagaggacatgcccgaaggggtgcatgaagccttctgtcccatacctgtcccttgcctcgatgggattctgtacaccacaggtttctgtcaccactttgccttgaaattggaggcctcagttatgaattttataacaacatcctcaaataaggcctcactttgcagtgggtgcctaacttaaggatgatttttaaatgactgtgtcatgtttgtaaagacactttgtacttatcgaagtgcttgcatatataccatctcatttaatgcttgccaagattctgttaggtatgcgaggcaggtactgttatcttcactttatgaatgaggaaaaggcacacagaagctaataacaagtgaagtcaacactgggtctgaaatttgtaaactctgatataaaaaagaaatcgtatctctggaaagaaaactgttgcaawctatacacctgctttccaaaacatgtgtggctcttcagtagctattt

SEQ ID NO: 99388 - DNA, 481 bp, Homo sapiens
ctggctgctccgtgatggccattaaatccctgctaggaattaggaatccattcctgtttcagggtcctcttcatcaccttcaaattgtttatgtacagtgtacttttgaaggctatacactttatatttttaacatttaaaagacaaatattgatgctatttattcacagctaagtatatacgcatttaaatattaatccaatatatatgtatttggtgcacattacacgctgagtacttttctaggccctgaggctagagctgggcacaacggagacaagtccttgctttgtgaagcagaaaacagatgacttccagtaaagtgctaagttgtgcttgggaaaaataaaattagaaaagcagccagaaggtgtactggagatgacaagaaactgagaagagaggttgctgttatatagaragggcggagaaggcttctagcaaaaagcagcattttaccagctatctgaaggatatgtga

SEQ ID NO: 99389 - DNA, 603 bp, Homo sapiens
tagcaactcaaaaagtcagactgtcactttacctccaaatgactgcactagttctacagcaatggttgttaaatagaaggaaatggctgaaatgtcagatatagaactgagaggtagaagaaaatgaagatcattgaaattcaatagaaagttgaacactatttccaagaatctgaggaatccagtaaaatgattaaagagaaaaaaattagccattgtgaaaaaacaaaacaagacaaacaaacaaaaaccaaacctagcaggtagagttacaaaatacactacaagaatttcataaaatgattggaaatattcacagcagaatggactaagccaagaaaagaatctcagagattgaagactgattatttaagttaacacagccagaaaataaataaagmaaagaagaattttaaaaaatgaaaggtcaggcatggtggctcatgcctgtacctgtaatcccagcactttgggaggatattgagaccatcctggctaacatggtgaaaccctgtctctactaaaaatacaaaaaaaaaaaattcactgggcatggtggcaggtgcctgtagccccagctattcaggagtctgaggcaggaga

SEQ ID NO: 99390 - DNA, 615 bp, Homo sapiens
gggtagcccatctgactagggcaataggaacactaaacactatgcaccaatgcaaaggaaacagcactgcagtgcatattgagggacactgrgcttggttggggtggaggtggatgagaaacccacctgactaggctgtctgtgcctgtaaagtctcagtctttctcaacaattctttttccttttcccctatagagtacatgtcctggggatgaattgcagttcagggtgccatagtactccagagaggccacgctgtctctaatctggagtttatacttcccttgggtacctcccctataaggggattccacaggggtggagtacaggactaaggaatgacagactgctagaatccctctaatgatgctggatacctctgatccttccatttgggtggatgatgttatgagatatgccaactttgtactggagtggatgattgaggcagaaaggtttgagtcaagcaacaagggcaatgggtgtctgcagaagtagctagggactaaaacagaaagaccgggttgctataccaactcagcctagttcttatccaatagggagagaacatctgagaccctggaaagggtgagaggtgggcattaaactgtcagt

SEQ ID NO: 99391 - DNA, 373 bp, Homo sapiens
ataactttgtggaaaaatgtcatgaccacaactaacgaatctttggtgggcaggtgctttgatgcaccaggctcctttaattacaargatgtgtgttcatgatgatgaagagaacaagtatcggagagtgctagccctctgcgtagaggctttaggattgtatggggtaaactgtatgaggaaaactcaggcaactactgccatcaatgagacttagctagtgagtgccaataccttcatcctcataaataatactagcacagggggtctgtgtgtgccagagggctacatctttatctgtgggcaatctggggtgactcaaatacggggtgggcaaagtcatgcctggaaaacttacaggtcctgccccatt

SEQ ID NO: 99392 - DNA, 537 bp, Homo sapiens
cagtctgaaatagccgatggtccagcttaagactattcaatatccatgcacctgccttttctaaagcttaaacttcaaaagagtaacagtaacaagtacatgatcctgtcaaatataattcaaatatatgttgcacaaattaaaatgcagtggtcytatccaaaataggtatccatgatattcactcctcttcagcttcagtctcaactatgtcttactatcctgaaataagataacaaattatgaagttattcaaaccagcctaccctaaaaatgatgggaaaaatggaagataataagacaaacaattatatacatgacaatgcagaagagaagaaaacccaagaatgtattacatacttaattttataactgatcatggaactgtggatggtatttgtaccattctttttatattattcattccacacttctctatagtatcctaaattatccaagtttccacagcaagagcccactcttcatgaacagtgaccttagttgtcttgtcaaattggagttgttttaatcttccct

SEQ ID NO: 99393 - DNA, 537 bp, Homo sapiens
cagtctgaaatagccgatggtccagcttaagactattcaatatccatgcacctgccttttctaaagcttaaacttcaaaagagtaacagtaacaagtacatgatcctgtcaaatataattcaaatatatgttgcacaaattaaaatgcagtggtcttatccaaaataggtatccatgatattcactcctcttcagcttcagtctcaactatgtcttactatcctgaaataagataayaaattatgaagttattcaaaccagcctaccctaaaaatgatgggaaaaatggaagataataagacaaacaattatatacatgacaatgcagaagagaagaaaacccaagaatgtattacatacttaattttataactgatcatggaactgtggatggtatttgtaccattctttttatattattcattccacacttctctatagtatcctaaattatccaagtttccacagcaagagcccactcttcatgaacagtgaccttagttgtcttgtcaaattggagttgttttaatcttccct

SEQ ID NO: 99394 - DNA, 537 bp, Homo sapiens
cagtctgaaatagccgatggtccagcttaagactattcaatatccatgcacctgccttttctaaagcttaaacttcaaaagagtaacagtaacaagtacatgatcctgtcaaatataattcaaatatatgttgcacaaattaaaatgcagtggtcttatccaaaataggtatccatgatattcactcctcttcagcttcagtctcaactatgtcttactatcctgaaataagataacaaattatgaagttattcaaaccagcctaccctaaaaatgatgggaaaaatggaagataataagacaaacaattatatacatgacaatgcagaagagaagaaaacccaagaatgtattacatacttaattttataactgatcatggaactgtggatggtatttgtaccattctttttatattattcattccacacttctctatagtatcctaaattatccaagtttccacagcaagagcccactcttcatgaacagtgmccttagttgtcttgtcaaattggagttgttttaatcttccct

SEQ ID NO: 99395 - DNA, 614 bp, Homo sapiens
aattaaagatatgatcagtgagtagaggagccgcaagttttaagcaaagcagaccatttcctacacataaaattaacagtagaaaaattaaaaaataatttattgctcacatttttggctttgaaggccatatagttaagttgttgcaactacttcactctgcttttgtgttgtgaaagcagccacagacaaacacataatcgaatagatgtggctgggctctaagaaaactttacttctaaaaacagacatggagtctgccgtttctttagaaattctttaattccttgcttttacaggctaggcattaataaggtagagatggcagttgtctggaaactttttctaaaagcatttatgagttataatttaatggmaatgttatctctattagttgatctattataatttaatggcaatgctatctctattagttgatctgtgctctatcggtttgtctatctactgaatacatactccatttatttctaaaacttgatttgagatgctgttatataatgattacaaattgtactattgatatttacaaataatcattaatttactctgaatagtcttaaaaactagaaaatatcaatctaaatgacaaattt

SEQ ID NO: 99396 - DNA, 614 bp, Homo sapiens
aattaaagatatgatcagtgagtagaggagccgcaagttttaagcaaagcagaccatttcctacacataaaattaacagtagaaaaattaaaaaataatttattgctcacatttttggctttgaaggccatatagttaagttgttgcaactacttcactctgcttttgtgttgtgaaagcagccacagacaaacacataatcgaatagatgtggctgggctctaagaaaactttacttctaaaaacagacatggagtctgccgtttctttagaaattctttaattccttgcttttacaggctaggcattaataaggtagagatggcagttgtctggaaactttttctaaaagcatttatgagttataatttaatggcaatgttatctctattagttgatctattataatttaatggcartgctatctctattagttgatctgtgctctatcggtttgtctatctactgaatacatactccatttatttctaaaacttgatttgagatgctgttatataatgattacaaattgtactattgatatttacaaataatcattaatttactctgaatagtcttaaaaactagaaaatatcaatctaaatgacaaattt

SEQ ID NO: 99397 - DNA, 622 bp, Homo sapiens
tgttctgtatttgtactgaacatcattagaacataaaaatcaatatccctstgacatgcatttttatcaagagctctattagtaaaaatttatcttgaaaattatcagacagtgaaaatagtttctttagtcctaaaaatctttctcataattatttttaaagtattttaattttaaaaatcacatttggttaaaaaccatgatgatctcagaattatacatttataaattaacaaaaaggaaatgtgtgtatgttcattagaaatatgaataatctggttcttcatggtagaactaaacatgtatatctctatatacattgataatatttaatataatagactagaaaaaatgtgaaggcaatttatttcctgttctgtgatataataactcatgaagacatgtatttaggttaaaatagaggcatttttaattcaggcagaaatgaagtaccattttgattatgaaatgctgaacactccaaaaggaaccatctaggaactagaaagcgggtcttcaaccaacaccaaacctgctgtatcttgacattggactttccagatttcagtactgtgagaaataaatttctcttgttgataggcttatcatgttatggtatttt

SEQ ID NO: 99398 - DNA, 545 bp, Homo sapiens
tcccaaaccccttgcacttcctgggtgaggcgatcccccactctgcttctgcttgccctccgtgggctgcacccactgtctaaccagtcccaacgagatgagccgggtacctcagttggaaatgcagaaatcactcgccttctgtgttagtcttgctgggagctgcaggccagagctgttcctgttcagccatcttgacttttctccctcttttttcttaatctaaccaaaagttcttcaattttatcttcaagtttatctttgttcattttgactccttagctaaaatcaaaaaaggaaagaaatataagttacttttctgcttttcttgctagcaatgcttcatcaaattacagagcttcagggacttgcacatgaaagttaatggaattggatcagtcttgtgagtccttatackcctaagaaagagatctttctccctgtccccatcagctcttctattcctctgagattcattggccaatttaacttcaatttctttatctttttgtaaaacttttccccactttaaccaaagagaaaat

SEQ ID NO: 99399 - DNA, 573 bp, Homo sapiens
tacatggcaaatgtagatgccaattgagcacaacagtggtaacctttttaaattgtgaaactaaatgttatccagaacactggataaaaaatcaattctgctaccccttagggtgtttaacatggaatgaatttcattaccaattcagataagcataaaaatagagaayttattggttctctaggggtgtttgtatcccaaaaagattccattaaagctatgatgatggccaggaagtgacaaaaacatttatggaattttttttttttttttgctccaaatatatatgtagtttaaccattatgcaggattttggaggaataaatcacttaccctgtgaatgcacccaaggtgtgcaggtgttaccaaatttaatttttctcattgaatccctcattggttgttgtttatgtgttaaaatattttgcttacagctctctaataacatttaacatgctttatatctttcattattcactgtagctcaattcttgggaaaaattatctatttttatggaagaaaaataagaaagtaaactctatctactgaagagccaccaattactgaactat

SEQ ID NO: 99400 - DNA, 578 bp, Homo sapiens
  misc_feature (1)...(578): n = A,T,C or G
tctaggatgtgaggagcccttctgcctggctgcccagtctggaaagtgaggagcgtctctgcccggccgccatcccaactaggaagtgaggagcgcctcttcccggccgccatcccatctaggaagtgaggagcgtctctgtccggccgcccatcatctgagatgtggggagcgcctctgccctgtcgccccgtccgggatgtgaggagcgtctctgcccggccgccccgtctgagaagtgaggagaccctctgcctggcaaccgccctgtctgagaagtgaggagcccctccgcccggcagccgccccgtctgagaagtgaggagcccctccgccyggcagccaccccatctgggaagtgaagagcatcttcgcccggcagccaccccgtccaggagggaggtggngggggtcagcccccccgcncggccagccggcccctccggggaggtgacgagcgcctctgcccggccgcccctactgggaagtgagagcccctctgcccggccaccacctcgtctgggaggtgtgcccaacagctcattgagaacgggccatgatgacaatggcggttttgt

SEQ ID NO: 99401 - DNA, 584 bp, Homo sapiens
agttgtaaccaccaagatgtctctagacattgccagatatccttgaaggaagtgggtcctggtgggcaaaataatgtgcactgagcattactgccctaaagtaaagaaataacccaaaatagggacaagttcaaacaggacagattggagcccatgtactgtggacatagtgaaaagggagtggggttgggagtatattacraagaagaatctgtaaaagggcagaataatcaaacagccttgactgaactggatgttgctgctgaaggtgtttacacacaggcaaacccctgtgtagacagatgaatggctgcatgggtaggtcactgtagggagactcccactttaccacttggctgccctcgctgagtggctggaaaattgagaggtgcccaaagagtgataacacatctgtggtttattttccatgaattattttctttccttagtaaagacagtgctttgcttaagagtgcttcttgtcttgatatgaatgctgaattaaatttaagaaaattttgtagattattagtatgctaagaattatagggtagcattatgtacaaatttacctgttcattttc

SEQ ID NO: 99402 - DNA, 584 bp, Homo sapiens
agttgtaaccaccaagatgtctctagacattgccagatatccttgaaggaagtgggtcctggtgggcaaaataatgtgcactgagcattactgccctaaagtaaagaaataacccaaaatagggacaagttcaaacaggacagattggagcccatgtactgtggacatagtgaaaagggagtggggttgggagtatattacaaagaagaatctgtaaaagggcagaataatcaaacagccttgactgaactggatgttgctgctgaaggtgtttacacacaggcaaacccctgtgtagacagatgaatggctgcakgggtaggtcactgtagggagactcccactttaccacttggctgccctcgctgagtggctggaaaattgagaggtgcccaaagagtgataacacatctgtggtttattttccatgaattattttctttccttagtaaagacagtgctttgcttaagagtgcttcttgtcttgatatgaatgctgaattaaatttaagaaaattttgtagattattagtatgctaagaattatagggtagcattatgtacaaatttacctgttcattttc

SEQ ID NO: 99403 - DNA, 584 bp, Homo sapiens
agttgtaaccaccaagatgtctctagacattgccagatatccttgaaggaagtgggtcctggtgggcaaaataatgtgcactgagcattactgccctaaagtaaagaaataacccaaaatagggacaagttcaaacaggacagattggagcccatgtactgtggacatagtgaaaagggagtggggttgggagtatattacaaagaagaatctgtaaaagggcagaataatcaaacagccttgactgaactggatgttgctgctgaaggtgtttacacacaggcaaacccctgtgtagacagatgaatggctgcatgggtaggtcactgtagggagactcccactttaccacttggctgccctcgctgagtggctggaaaattgagaggtgcccaaagagtgataacacatctgtggtttattttccatgaattattttctttccttagtaaagacagtgctttscttaagagtgcttcttgtcttgatatgaatgctgaattaaatttaagaaaattttgtagattattagtatgctaagaattatagggtagcattatgtacaaatttacctgttcattttc

SEQ ID NO: 99404 - DNA, 501 bp, Homo sapiens
aagtcacacaccattaagtgtattatgcaggtcgagcacccctagagtcaaaataatatcttcctttgcaaacttgcattggaggggatagtttttcttcagaattgtgtccttagaatgtgtgtgtccgttctggcaacttctcttgaattatgttaatgcagtgagtggaaaaatgtttaagcagtcaacaggatgtttattaagcttctactctgggcaggatatggcagcctaaaccctagggaagcatataaagaagttagcagtagggcattaataggaattaattagagagcaaagcaaagcagttaatattcaagtgctaaattgtattatggagatgcaagtgctatagttgacagagaagtatacacttttcagtgcacaaattaaccttgtgttgggacaatgaaatgtgcattgcttttcatctggggrttgaacattgagtctgggagtctgctggtagttttacggattctttttcagagaagcacc

SEQ ID NO: 99405 - DNA, 516 bp, Homo sapiens
ccaaactgtaccctcttggtctgtcttatggaaaatatgtgcatcccagaagcaggggaattggaagtacctattcacattcccctgtctgtgaagcaggttgcatacagttttgggaggatgtgatacggtgatgacagacatttcattcrgggcttgctacctaaatggtgtttaacaaatatagttgattctcattactcctgatagttatgttctataaagtcatcatgaacatttaattagcaaatatttaatcattggtcctaggggaaatacagcagtagattcctcagagctgccagtcaagacattttcttcaactgatcaataagtaactatgtttaatgggtgtttctgtttagacactttatatttttgattcattaacattgaactcacagccaataactctgtaactcatgcctgattgaagcttaactaacacatgtgttttctccataaggcacatgcccgccttctcgtgctcggggacactagacgcacttcagcacc

SEQ ID NO: 99406 - DNA, 621 bp, Homo sapiens
ccagaccttacaataactcacaaagagcaatttgattttccaattaccctgtgtttattctagccttgtaaaatctccattcttcacaagaaaactaattttgtagtctggaaactcattgccaagctgtgactattgtaattatttggggcttttgtatatttactcattgtgagtctacttccttttgttagtcctagtaattttcattctctgttcaggagccagcctctctatgtgtggattgtgttcacatgttagagatgatgaaaacaataggaattcattcatcaggttccaatgcatactaggttatcagtaacccttgaaagccagaagatgtttgaatttaatacaggttgatgtgctgttgccaaaaactaacataattgtcgaacactaacaattatatattctttgctcaatcactscagtgtttcctttctcatgaaaatataattatctagtccatttttatcaaatgcatagaaataagttcaatgaatatttagaagaatcacaatttcttggcaagatttccaaatatgtgttgaggttcttcaccttggcttcttctcctccctcaacccctttctctcaacacaggttgccatttgttgc

SEQ ID NO: 99407 - DNA, 621 bp, Homo sapiens
ccagaccttacaataactcacaaagagcaatttgattttccaattaccctgtgtttattctagccttgtaaaatctccattcttcacaagaaaactaattttgtagtctggaaactcattgccaagctgtgactattgtaattatttggggcttttgtatatttactcattgtgagtctacttccttttgttagtcctagtaattttcattctctgttcaggagccagcctctctatgtgtggattgtgttcacatgttagagatgatgaaaacaataggaattcattcatcaggttccaatgcatactaggttatcagtaacccttgaaagccagaagatgtttgaatttaatacaggttgatgtgctgttgccaaaaactaacataattgtcgaacactaacaattatatattctttgctcaatcactccagtgtttcctttctcatgaaaatataattatctrgtccatttttatcaaatgcatagaaataagttcaatgaatatttagaagaatcacaatttcttggcaagatttccaaatatgtgttgaggttcttcaccttggcttcttctcctccctcaacccctttctctcaacacaggttgccatttgttgc

SEQ ID NO: 99408 - DNA, 463 bp, Homo sapiens
tcaggtgaaattttaacttctccaggtctctgttttccccacctacagtgggtattatcatttctatctccaatatgttatggggattaaatgagatcatgtgtaggaagcctaggacagggcctgggtacataaacagccctcaattaagctattaaattctcttgcttctggatactactctagctactcaatttcagccttctcccaatccatccctttgccamtagtgagccaaatgtctgccttctttttggcctgcccttattgatacacctccctgatccagcccaaactgtatcccaaacaccatgactctcaggtcagcaactctattctcaattttctcagaacctgcttacttatctcctaaccccctgcttgtcttccaccccctaaccctccaccttttaaggacatttgtaagttttcatatttttctacatcactgaaaaatgaattc

SEQ ID NO: 99409 - DNA, 334 bp, Homo sapiens
tcatttttataatgatcaagactaaatgtataactattacagactcttttgtgataaatctcattgttccaaaatatactgagtacaacctaaacgtcccaaaagaagaatggttaaatgtattgtggtatatctgtgtggtagtcttatttgtaatggttaagaatggtattgttgaagtttctttgtttatcaaaaaagccattagtgatatattgttgatcaaaaaaccatactgcagatagtgtgaatattatgcttctactttgattaaagtagarccaaaaatgttaacaagggttatctctcagtgatgtaactggagtcaatttaa

SEQ ID NO: 99410 - DNA, 548 bp, Homo sapiens
aagggtgaaatttaaactttaaagcaatcttttggccaggtgcaatggctcatacctgtaataccagcactttgagaggctgcagtggaaggattgcttgaagctaggagttcaagcctgggtaaygtagcaagacccttcatctctaaaaaaaaatttattttttaattggcaaggcatgggagtgtgtgcgtgtagtcccagctacttgggaggctgaggtaggaagatcccttgagcccaggagttatgagctcaggttgcagtgagctgtgatggtaccactgcacttcagcctgggcagcagagtaagagtctgtctcaaaaaaaaaaaaaaaaaaaaaaaaaaaaagtgatcttttatgtatactaggtaaatactaaaaaagatggatagtgtaaagtgtttaagtggatgtggaaagatggatgatgttcccatatattgctgacgagaacaaactaatccagtctttcaggagagcaatttggcaacatggaactaaagcctcaaagtgacccatctgatctagaaataaattttaatg

SEQ ID NO: 99411 - DNA, 629 bp, Homo sapiens
cattcatccatttttactcatttagtcattcaacaaatatttattgcatctcctatgagcccagtacagctcaaaatcaaagcccgtgctctgttatagcttatgttctagtaagagagatgggcattaagcagtattagcatctgcaatttctcatttaagtcttctataagcagagaagagccacaggacacttttagtcacttactgacgtgttcatggttgttttcaggaaattttaactcagcagaatgtatagacgagaaagagatgggaagagttaaggaaagaagacctgtggggaggaactgcagtaattcagagaagaactagtgtgggtctggagaaggccagggcagtgggaattatgagaaagggtgaatattagttatttacagatgaagaatccttgttttttggccactgatgggatgtggagagcaaagttaaaagaaactcaaaaacaactccctggttttaagtttaaagaattgggtgtccggagttccctttaasagcatgttttgccgagtggtagaaatggaaaaagatgatttctgtgctatcatattgacttaaaacatcacataagtagagagacacgactataacattgcacactgtcttat

SEQ ID NO: 99412 - DNA, 589 bp, Homo sapiens
tggggatcacatgagggaatctatattgattattttttaactccattcaatagatccctaggatgccaggaaagtcccaggagggcagctttaggagaacaagggaaggatgaggatgtaaggcttgggcatcaccctgtcatctcccagaatccaacagctccactggattcagcaatagggtagaaatttctatagtgtaaactgaggcacgtttgctctgtggactcttcatargtaagccaggcttctttactaaaactggtgagaaaatagaggctaaaatttttttttaatctctttgctgcaagacttttcagaacctttactatgctggaatgcttgtagatttccaagagaaacaatgtacagtctcctttatatttatttgggcgcaataactatttctgaggagcatttcataggagtaatattccttgcagactttgttgctaggaaataagagagcataattcaatgcttaatgtgtggtatgcatgctgtaagtgataagagtatggcctagagtagggttagtggagaaagggactagtcctcaaaggacccagggaatttagaaaggtggaga

SEQ ID NO: 99413 - DNA, 589 bp, Homo sapiens
tggggatcacatgagggaatctatattgattattttttaactccattcaatagatccctaggatgccaggaaagtcccaggagggcagctttaggagaacaagggaaggatgaggatgtaaggcttgggcatcaccctgtcatctcccagaatccaacagctccactggattcagcaatagggtagaaatttctatagtgtaaactgaggcacgtttgctctgtggactcttcataggtaagccaggcttctttactaaaactggtgagaaaatagaggctaaaatttttttttaatctctttgctgcaagacttttcagaacctttactatgctggaatgcttgtagatttccaagagaaacaatgtacagtctcctttatatttatttgggcgcaataactatttctgaggagcatttcataggagtaatattccttgcagactttgttgctaggaaataagagagcataattcaatgcttaatgtgtggtatgcatgctgtaagtgataagagtatggcctagagtarggttagtggagaaagggactagtcctcaaaggacccagggaatttagaaaggtggaga

SEQ ID NO: 99414 - DNA, 648 bp, Homo sapiens
ccaatgcatgtttctaagtctcttagcctgctctcggctttgagatagaagcacttcttcctcttccatggaaaccactacaaattggagtattaggctgggcgcagtggctcacgcctgtaatcccagcactttggcaggctgtagtgggtggatcacttgagcctagaagttcaaaaccagcctgagcaacatggtgaaaatcccgtctatacaaaaacaaacaaacaaacaaaaaaattatctggacatgatggcatgcacctgtgtagtcccagttacttgggaggctgaggcaggaagatcattgagcccaggaggtcaaggctgcagtgtaccatgatcacaccactgcactccagcctggtctgggcaacagagtgagaccctgcctcaaataaacaacaacaacracaacagaattggagtattagtgactaagatatgcatgcatctgacaatctttgattgactctctaggcctggcttccttataaatttctttgtttcttttagttttctatggaaactggatcagatcaaatctctctcctgagatccaaaggggtctacagggtgtgtcagtgacagggtgacatttcaccagacttcttggtaatccagtagctgaataagttggattgaact

SEQ ID NO: 99415 - DNA, 478 bp, Homo sapiens
ttttcttgcccataaaataaggaaaaatacattttaacccgtagagttgtttcagagatgaaacgaagtgacatatgaggtatatttgatatgacagtcaacaccagttaagggtttatcctgygctggtcactattgtaagctcttctaagcactgtgtgaactcattcattctcctctaatgacccttagaggtaggtaacattattattatctccattcttaacattttctaaaaacagttatagtgagagaaattaacgtactatacaatttacccattgaaagtgtacaatccattgcttcttggcatatttttaaaaattgtggaaaaatatataaagcttatcatttttataatttatattttataattcatatcagaacctggcgatgtgaattatattcatagggttgtgcagccgtcaccactatcaacttccagaccatttttatccctcccaagtagaaacactgc

SEQ ID NO: 99416 - DNA, 587 bp, Homo sapiens
accactgcaattcttttgtttttttctttctgttcagtgatcttttgttttaggaaaaaggagttagatttacagccttggcaatcaaaggtgtctcttttaaataacagaataaatattgtatggatagtgagagtgtttttgtaactgcaggcaaggacctgtgtctgctcctgtggtctcctcagcaggcagatttctgctagcacttgctgacattttccatagcaataagagcagccaataaaacaagtgaagaccaytgtgtggccgaatgggataaatgcataataaaaaaagaaaccataattaattcttgtctttgggataatggaatcagaaccttggtgcagagacctccctctaccccatgaatcatcagtgttagacttacagtgctttgggatgttttcaatataatttggttttgtcggacattatatatataaaatagaagatcttgtttacagtacaattttagatcatcttggaagacattatgtataaaacaaaactctgctttaaacagtaatggttaaattattaagcaacggaagtgtagaattagtagtgcagaaagtaatgac

SEQ ID NO: 99417 - DNA, 587 bp, Homo sapiens
accactgcaattcttttgtttttttctttctgttcagtgatcttttgttttaggaaaaaggagttagatttacagccttggcaatcaaaggtgtctcttttaaataacagaataaatattgtatggatagtgagagtgtttttgtaactgcaggcaaggacctgtgtctgctcctgtggtctcctcagcaggcagatttctgctagcacttgctgacattttccatagcaataagagcagccaataaaacaagtgaagaccattgtgtggccgaatgggataaatgcataataaaaaaagaaaccataattaattcttstctttgggataatggaatcagaaccttggtgcagagacctccctctaccccatgaatcatcagtgttagacttacagtgctttgggatgttttcaatataatttggttttgtcggacattatatatataaaatagaagatcttgtttacagtacaattttagatcatcttggaagacattatgtataaaacaaaactctgctttaaacagtaatggttaaattattaagcaacggaagtgtagaattagtagtgcagaaagtaatgac

SEQ ID NO: 99418 - DNA, 558 bp, Homo sapiens
atctatcccttccacggagcagagagggcagaagtggtttgttgccagggaccaaactaataaaatcagtcagttttacattttaccaaaattacctytgacacatgggttttacagttgggcttattctgtcaataaatttttcatggaaagttagattatttagatcagtgaggttcacatagcatactccagctgtaatatgccagctaaattgcaacccagtggcccgaaagaattaattcatctcccaaaatgtgaaattaaatcctagggagtaacattacatgactgatgatgtactgaattaaattaaaggaagacttgaatgcttgttaaaaaaatatcacttacataaacacgtttataaccacatgtgagcctcctaatgaatcaagttattgtgaatccaccctaacaaaaatccaaaatgtgaactcttaggatgctgtttaatttagggaaaaaacccataagttttatctattattttaatgtgtcaaatagtttcatttttaatactgtgtttcaagattaaagtaacacagaatatgacta

SEQ ID NO: 99419 - DNA, 555 bp, Homo sapiens
gagataatgcctttttcactgggaaataaatgtactttggacagacacctcttcagtttactccttggtttagttagcttttgtcgcataataaatagtcataatttttcagtaatatacacatcaataagcctttatttttctcatagctctgtgtgggggagctggggtttgggtaggattctgattcaggctggtgtctcttgatcccactgtaactctgcagatctgagtgtgctgcacttctttctcctgctccttggatcagcagrctagctggcgcatgtccctctcatgcctcgagctgtcagagggccagcggcagtgggtgaatccgcgggctccaaactagcacactgtcaccccacacataggccactggtcaaagcaagtcatatggctgagtccaaggttgagcagtagaaaacacactccagccacgatgaagttatggcaaagatgtagatacagagaagggtaaagaattgagtcccatcactccatctataaaactggctcagaaatacataagcaggagcaaaagcgaaatagtag

SEQ ID NO: 99420 - DNA, 555 bp, Homo sapiens
gagataatgcctttttcactgggaaataaatgtactttggacagacacctcttcagtttactccttggtttagttagcttttgtcgcataataaatagtcataatttttcagtaatatacacatcaataagcctttatttttctcatagctctgtgtgggggagctggggtttgggtaggattctgattcaggctggtgtctcttgatcccactgtaactctgcagatctgagtgtgctgcacttctttctcctgctccttggatcagcagactagctggcgcatgtccctctcatgcctcgagctgtcagagggccagcggcagtgggtgaatccgcgggctccaarctagcacactgtcaccccacacataggccactggtcaaagcaagtcatatggctgagtccaaggttgagcagtagaaaacacactccagccacgatgaagttatggcaaagatgtagatacagagaagggtaaagaattgagtcccatcactccatctataaaactggctcagaaatacataagcaggagcaaaagcgaaatagtag

SEQ ID NO: 99421 - DNA, 555 bp, Homo sapiens
gagataatgcctttttcactgggaaataaatgtactttggacagacacctcttcagtttactccttggtttagttagcttttgtcgcataataaatagtcataatttttcagtaatatacacatcaataagcctttatttttctcatagctctgtgtgggggagctggggtttgggtaggattctgattcaggctggtgtctcttgatcccactgtaactctgcagatctgagtgtgctgcacttctttctcctgctccttggatcagcagactagctggcgcatgtccctctcatgcctcgagctgtcagagggccagcggcagtgggtgaatccgcgggctccaaactagcacactgtcaccccacacataggccactggtcaaagcaagtcatatggctgagtccaaggttgagcagtagaaaacacactccasccacgatgaagttatggcaaagatgtagatacagagaagggtaaagaattgagtcccatcactccatctataaaactggctcagaaatacataagcaggagcaaaagcgaaatagtag

SEQ ID NO: 99422 - DNA, 576 bp, Homo sapiens
tggtaatagtcatccctaagctttaggatttctgtgaatataaacaaacatgtaatacactaagaataatgcccagtgcagggtgagctcttgatatgcattagctatgatcatgtatgcctcaccatcattttctttctttcttttttttttttttttttttttgagatggagcctcacttctgtcgcccaggctggagtgcagtggcgcgttcttggctctctgcaacctctgcctcctgggtacaagtgattctcctgcctcagcctcccaagtagttgggattacaggtgcacccccaccacacccggctaatttttgtatttttagtagagatggggttttgccatgttgggcaagctggtctcgaactccacacctcargtgatccacatgccccagcctcccaaagtgctgggattacaggcctcactgttattttctgcaagagtttattcttcctccagattgtgcctcatacctatttaaattttttattcccaaatgataggatttactagttgtagtgatgtaggtagtggttatgtggacatttgtccagatatgttgatcaa

SEQ ID NO: 99423 - DNA, 576 bp, Homo sapiens
tggtaatagtcatccctaagctttaggatttctgtgaatataaacaaacatgtaatacactaagaataatgcccagtgcagggtgagctcttgatatgcattagctatgatcatgtatgcctcaccatcattttctttctttcttttttttttttttttttttttgagatggagcctcacttctgtcgcccaggctggagtgcagtggcgcgttcttggctctctgcaacctctgcctcctgggtacaagtgattctcctgcctcagcctcccaagtagttgggattacaggtgcacccccaccacacccggctaatttttgtatttttagtagagatggggttttgccatgttgggcaagctggtctcgaactccacacctcaggtgatccacatgccccagcctcccaaagtgctgggattacargcctcactgttattttctgcaagagtttattcttcctccagattgtgcctcatacctatttaaattttttattcccaaatgataggatttactagttgtagtgatgtaggtagtggttatgtggacatttgtccagatatgttgatcaa

SEQ ID NO: 99424 - DNA, 576 bp, Homo sapiens
tggtaatagtcatccctaagctttaggatttctgtgaatataaacaaacatgtaatacactaagaataatgcccagtgcagggtgagctcttgatatgcattagctatgatcatgtatgcctcaccatcattttctttctttcttttttttttttttttttttttgagatggagcctcacttctgtcgcccaggctggagtgcagtggcgcgttcttggctctctgcaacctctgcctcctgggtacaagtgattctcctgcctcagcctcccaagtagttgggattacaggtgcacccccaccacacccggctaatttttgtatttttagtagagatggggttttgccatgttgggcaagctggtctcgaactccacacctcaggtgatccacatgccccagcctcccaaagtgctgggattacaggcctcactgttattttctgcaagagtttattcttcctccagattgtgcctcatacctatttaaattttttattcccaaatgatargatttactagttgtagtgatgtaggtagtggttatgtggacatttgtccagatatgttgatcaa

SEQ ID NO: 99425 - DNA, 577 bp, Homo sapiens
caactatgccactactgagcatttgaagtccatgcctttagtctttttatttataaaaattacagtgatcacatcattggagatgaaaggacaactgtgatcacagaaactaattagggaacaattaataattcaaaactgtaataaagctgttttataggcaaragctatcctggaaatgatcccccagtccgagattaccctcccgaaggagatgtcttcaaaggaactaagataattgtcatcaacaagggctggaagactctgcttgagaagtttcctagcagtaaatgaatagtctcttaggtgatatagactgcggggggctgccacattcgtttcattgtcttgccattgtcttatggagacactgacctggctttgcattatctagatatctttaatagtggtgttccatttttatacatccgtatatatatgctattagcaaggaaccatttggaaaggatttttcctgaatactttctcacatcagttacttacgggaaagtggattggattttgcattgtcaattttccaaaactctcacattagaaaatactcttagcccagata

SEQ ID NO: 99426 - DNA, 577 bp, Homo sapiens
caactatgccactactgagcatttgaagtccatgcctttagtctttttatttataaaaattacagtgatcacatcattggagatgaaaggacaactgtgatcacagaaactaattagggaacaattaataattcaaaactgtaataaagctgttttataggcaagagctatcctggaaatgatcccccagtccgagattaccctcccgaaggagatrtcttcaaaggaactaagataattgtcatcaacaagggctggaagactctgcttgagaagtttcctagcagtaaatgaatagtctcttaggtgatatagactgcggggggctgccacattcgtttcattgtcttgccattgtcttatggagacactgacctggctttgcattatctagatatctttaatagtggtgttccatttttatacatccgtatatatatgctattagcaaggaaccatttggaaaggatttttcctgaatactttctcacatcagttacttacgggaaagtggattggattttgcattgtcaattttccaaaactctcacattagaaaatactcttagcccagata

SEQ ID NO: 99427 - DNA, 586 bp, Homo sapiens
ttgttgcttaagccaattgagtccatgcattcagtcctgaaaatgaagccctcttaaacagtgtcctgctcttttataaaattcttttgatggcaagacataacataatgacgcttggatagatgaaaggcagactattttgttacttgcagctctgaatgagagaaggctgccaggcagggccacataggggcacccacctggaggcagggtagcagcttgttggagtatgcatggcaagcagggtgtggttaggtttcaaaggctccctttggattggctaatttgagtaatttctggggcataagtgctgtcctagttgtctggtaccaggctccagggcatgggggctgaggcatagtggccctggagtgggaggtgtgtgagaatcccataagaaaggtggtttgggtgtgracttaaccacctgctcaagaagggaatttgactaatctttagccagtacttcaaaacaggctagtaagtcaagacaggacagttaaaaataaaaataaatattacatccagtcaatcaaaaggagaagcagctgccattgtttgctattagcctctggataagcttccc

SEQ ID NO: 99428 - DNA, 614 bp, Homo sapiens
ccaggagctttaccaatcaggagttagctattttcaatgactttctcagtaacattcaatcctctttgacctgcttctctgcctttcatttgcatactagcctggcccaaggagagtgattgyctgtcctggactgcttcttggacggtgttgatttagtggtaacactgtgctgtataattcgtttgctcctcgggcctgtaatgacttggcttatatagagtacaaaagtgaatagtaatctagggaccttggccctagggcattaagagcagcaaaggaaaactcttgtttcagagatggtccctaaccaagtgtcagacgggacacttcagtgatagctgattatatacaatataagagggttcagttttctatattatatgatgagatttttttttttttgctgggggaaggttatagaaaataaagttaaatgtaataaatacctacaaagagacagatactagaccaagcactttacatacgttaaattatttctcaaaacaaccaatgaggaaatgtgactgagagggttttatggactgagtgtatgtgtccttttaaaaatccatgttgatgcttttagccccagtgtggctgtatttagaata

SEQ ID NO: 99429 - DNA, 502 bp, Homo sapiens
aatgtggggacagaaatacctaccctgcctaagtcacagtggttttgtaaagacccaatatgataatggctgtgaaagaacaacataatcttaaaacactacattaatggtaagtcaaatcattacatcatagacattctttcttatgcttatctatttcaatcccttcatatatattttctcctcaaaattctacattagcaataactggaaaaattaatacaggcatatctcatttcattgcaccttaatttactgcactattgtacttcactttttttaatacaaattgaatgcttatggcaatcctgaatcaagcaagtctattggtgccattttttcccaagagcatgcgctcatttcttatctctctgtcacattttggtaattcatatkatatttcaaactttttcattatttttatatctgttatggtgatctgtgatcaatagtctttcatgttaccaatgtaattgttttggttgaggttacagtgaatcac

SEQ ID NO: 99430 - DNA, 656 bp, Homo sapiens
ttagctaacaacatgatgacaggatcaaaatcttgtatatcaatactaaccctgaatgtaatctaagcaccccacttaaaagacacagagtggcaaactagataaaaaagacaagatccaacagtctactcttttcatgagatgcatctcacatgtaatgacaccacaggctcaaagtaaaggaacggagaataatctaccaagcaaagagaaaacaaaaaggagcattattcttataccatataaaatagattttaaaccaacaataatcagaaagaagaaacaatggctgtacataatgataaagggttcatttcaataagaaggtttaacatcttaaacatatatgtttatgctcaacataggagcaaacagagtcataaaacaaggtcttcttgacttataaaaaaacttagccacacaataatagtgggggactttgacaccacactaacagcattagacagattattgaggcaggaaactaaaacaaattctggacttaaactcaacacttgaccaattggacctaatagacatctagagagtacttcacccaacaagtayggaatatatatttttgtcatccatacacagaatatattctaagacctgccatatgctcagacataaagcaagtctcaatacattttaaa

SEQ ID NO: 99431 - DNA, 611 bp, Homo sapiens
ttacacattgtataaatgtatcaaaatatcacacagtactccataagtatgtgtaattattatgtgtcaattaaaaataataacaaaagcaacaaaaccacaccatacgaatgaccaacaggtatataaaaaatgctttaaaaattgcctttggagacatacgttaaaaaatagatcatctctagtttatttgtgcccatagttcatttttaattttatattgtaattgagagataatttttgttattttcatgttacactttaaacaattaggtgatttttcactgtttttaatactcatcagtagttcttttctgtattgataaacctatatttgagttcttcattttgattattctgtgaatcctagagcagatatttgttaagatatttaggaaaaatattatgggtctttgactatatcatcatttctatgttatgcatacaggaataaatgttggctggatacacagcttttgattcataaactgtgtccttcaaagctttatayacattgtgtgtttaattctaatgcttagttttagtgaggaagaattgcagccaacctaaattttattttattttgtttggaagtaaatattttgtttact

SEQ ID NO: 99432 - DNA, 612 bp, Homo sapiens
tatcccggtcacaaataatagaaacaggaagcagagttgtggaaacgggaaggaatagatacaagcattgtcgtggaagatgaaccaatactcagtatgttagcagtgaatctttgcttgtgtggagcaaagcgttagggaaagaaactggaatttggagtctggaaacattgtatatgaaaggcatatacaatttttaagatttcatacacattttaatktatttgttttctcagcacatatttttgggctacctggagatgcctggaacatgctgtgttagggtctggagatacagaaatgaagtagataaactttctgctaaagagcttccagaatcatagaaaacccggaaagctggaccagcaattacaagaggtgaaaaactgacgctgagcttatgcgtctgggttcctgggaggaagtgatgctattaatcacaagagggaacacagcaggtgcagtaggcttagaaagaaagcagagaaggtgagttttccctctaatttaaggtgcattgtaccaaagagtagtccaatgggaaatagatggcacatctgaaataggataattcaacaagggtttactctacaaggactgtttgcaaaggtg

SEQ ID NO: 99433 - DNA, 379 bp, Homo sapiens
aagtcactatttgttttgcaatcagtttaagaacattgttgccctaaattaaaattaagccaagctgctcttccttagtatctacagcataagaaaagaacaaaagtctggtggtattgttgctaagtgatttggggacatttacaaactgcaaagcagtaagcttagctctgctattatagcaactatacaaaataattgaagataatttaggaaaaaaacaagtttcgcaacaaacctaactaccttacattttgctttctcaagatctatttaagaacacatatgtttttaagtcatgggagtagagggaaagttttatacatactctatactataaatcatakaattttagagctggaagataccttaaaaatca

SEQ ID NO: 99434 - DNA, 641 bp, Homo sapiens
gggactgaacggcaatccgattcacggtgggtttyctcactgaggattacaggaaaaccgcttcagaacacccggaaaggaaagttgcccgaagaacccttctccgacacaaggcgggctggctcgccaccaagtcagccccttcgcgcttgcctgaaaggaaggagtggcgacctcaccctagtcggccggccggccgcgcggcttcccctcgccggcgcagccttgggcaccgcggctcacacccccacacaggccgcccagtcctgcgctcgcacggccaccgccttcgtcgccgtccagtgggagatgcgagcattcggggctgaagccgttcgcaccgcctcctccatggagaagcgccgaggaaaacctgccaaggacaacctccggcaccgccgtcaccaccgctgccgggacctagggccggcgccggaaaacctaggcgcggctaaatgacgcaagaggcctcgcgcgcacgcgcagtgccgcaccacgtacaccccgcccccggggctctctcccgccgggttccggttcctttacaaggccccagtcggctgagcgcggagggcggggcgcgtagagtgtggggacgggggcggggcgcaggatccaggcgggacctggcgagggacgaa

SEQ ID NO: 99435 - DNA, 613 bp, Homo sapiens
gggcctagtgcccccactcagcaccccgccaccaaaacaggctccacatgctcatggcacaacaccgccctctgtcctctcccaccctccgccatccctgtcgccgcatgtgctgctgtctccatgccaccagttccaagtgctccatggtcacacatgttcacatgtgcacatacatgcgttggggctttctctgccacactgctcaagcctcacactaatgctgcctgtgtatgccctacctcccctaggtatgcgagaccacccacccatccccatcaccgacctggcggacaacatcgagcgcctcaaagccaacgatggcctcaagttctcccaggagtatgaggtgagatgttcccgccccctaccaygtgcctggcccaggcctacccaaaccagctcctgtcctgtcctaggtcccagctgtggtgggtgaggaagcaggggtccagctttttcaggagcacagagaggagggttggcagtggtaagggtcagctgggaaccgggtgcctcagatgctgggtctggccatagcctggcccagcaccttcttggggtcacccttaggagatggtttcaaaaggctgtgagtgacaccagggtctgg

SEQ ID NO: 99436 - DNA, 392 bp, Homo sapiens
gctagcccagagtctgtttcttaactattatactctaatgcctttgatatacaaagtacttggagaaatcttacacaaaaaagagcctatctctttgagggaaaagaaagaaaaatcttttctgccattcttcttttcccatactgttccagctgyctgacatgctcccctctttattccggcacttctgaaaaagatctagtcactaaaaaaattttcagctcaaccaagataaagctggtatgacttaaggtgattccagttttttgccttgtttttctagttgttccatcatgatactgtatgtcttgtacactttattttaaaattagcatttcaaactgaaagaaaacttagagcaacctagtttgattaatgttgcctcagtttca

SEQ ID NO: 99437 - DNA, 392 bp, Homo sapiens
gctagcccagagtctgtttcttaactattatactctaatgcctttgatatacaaagtacttggagaaatcttacacaaaaaagagcctatctctttgagggaaaagaaagaaaaatcttttctgccattcttcttttcccatactgttccagctgtctgacatgctcccctctttattccggcacttctgaaaaagatctagtcactaaaaaaattttcagctcaaccaagataaagctggtatgayttaaggtgattccagttttttgccttgtttttctagttgttccatcatgatactgtatgtcttgtacactttattttaaaattagcatttcaaactgaaagaaaacttagagcaacctagtttgattaatgttgcctcagtttca

SEQ ID NO: 99438 - DNA, 392 bp, Homo sapiens
gctagcccagagtctgtttcttaactattatactctaatgcctttgatatacaaagtacttggagaaatcttacacaaaaaagagcctatctctttgagggaaaagaaagaaaaatcttttctgccattcttcttttcccatactgttccagctgtctgacatgctcccctctttattccggcacttctgaaaaagatctagtcactaaaaaaattttcagctcaaccaagataaagctggtatgacttaaggtgattccagttttttgccttgtttttctagttgttccatcatgayactgtatgtcttgtacactttattttaaaattagcatttcaaactgaaagaaaacttagagcaacctagtttgattaatgttgcctcagtttca

SEQ ID NO: 99439 - DNA, 643 bp, Homo sapiens
gaggaagtaaattatttcctcatatattgagggtragtatataaggaaatgtcaaggatgactcccagatttgtgttaagagcacctgttggggtgattgtagtatttattgataagaaacactcggaggagggtagagttgtttggcttgaatggagaatcatgagctcggtttgggacatattgaattttatctgtctgttaaataaccttctggagatgccaaataagcaatttgatacttgaatccagaactcagaaaactgggctggggatattctcttggaagtcgctagcatataaatggtgacagagccacgggattagacaaaatcaacaaaaaagagaataacaatgccgtagggttcaagacccaagctttgggttccccagttaatagaattaatagaggtgaggatgagaagtcgaggggaaacaggagaaaagagaaagaaaaacaatagagttggaggaaaatccagggaaggttgtgtcctagaggccgcatgcatagaggtttggaggaaagctgctctcaaatgctgttgatggatctgaacatgtccattggacttggtaatagcagggacattaatgacatcagggagactgaggtggtggaatggtggaactgaaagggtaa

SEQ ID NO: 99440 - DNA, 582 bp, Homo sapiens
tgtggtcagatattgtaagtataaattaacctgctccagtgaaaaatacccaggggagctattacactctgaagaaatcttctctttaggtttaactgtamttacaagtacaattcaataggaggatgcgggatggttagctccaatttcaccaaccacttttttttttccagtccctgattaaaagattctgcagtttatgaccagcaaaaggctttgccttggtaccacttcaagactgaaggaatgatacaagaaagagaatttatcatcggcagggggcaatcagctgtccagaggtgcactctttatctaaagaatcttaagagtcagggggctgctctttaaatgactttggcaactcctccagaaggcttaaaagctgtctctgaagcctgtggtgtggtatccatattaatccatttgagtgaaaattaccagttccaaggaaaatacccttaggagataaaggtagtaagggaaagaagaaagacacagtcaggagacctgtgtcctagctgagaaaaagatatgtcaaaagatttactgaaaacagaaggcaggttttaaagtaagagtaca

SEQ ID NO: 99441 - DNA, 582 bp, Homo sapiens
tgtggtcagatattgtaagtataaattaacctgctccagtgaaaaatacccaggggagctattacactctgaagaaatcttctctttaggtttaactgtacttacaagtacaattcaataggaggatgsgggatggttagctccaatttcaccaaccacttttttttttccagtccctgattaaaagattctgcagtttatgaccagcaaaaggctttgccttggtaccacttcaagactgaaggaatgatacaagaaagagaatttatcatcggcagggggcaatcagctgtccagaggtgcactctttatctaaagaatcttaagagtcagggggctgctctttaaatgactttggcaactcctccagaaggcttaaaagctgtctctgaagcctgtggtgtggtatccatattaatccatttgagtgaaaattaccagttccaaggaaaatacccttaggagataaaggtagtaagggaaagaagaaagacacagtcaggagacctgtgtcctagctgagaaaaagatatgtcaaaagatttactgaaaacagaaggcaggttttaaagtaagagtaca

SEQ ID NO: 99442 - DNA, 563 bp, Homo sapiens
ttacctcctctccaatattttgttattgcttcatttttcacttcttttattactcatgaggtcaagtcctttttatatgtttaattttcttttgtgaattgcttttgcccatcagggagttcacttattctgcttagttygtggcgtgttttataagtatattaactattggtttgtttcctcaaatatttcagttggtttgttattttttatatgtggttcctgttgttttgatacacaggagtttaaaatttttacactgttaaactattaacctttgcttatatgttttagaatgatgccaatttagtaagactctataaatggaacttagagtctattttatagtttctttttaacctctaattcttatcttcttaaccagagctataactttcattatcaagtaaccatttatgctaaacctgaaaaaactgaatatgagtcttccccctaaaaaatctttacaaacacaggtgtcaacatgaatcatcgtatttcctgaccttgtggtcttccattacggtttcaaagcagagaagagtaactctgctatttttttt

SEQ ID NO: 99443 - DNA, 583 bp, Homo sapiens
ttacccagcaccttttatttttagcatctcaaaatgttcgaacaagacatttttcttactttcatgtgcctctgcstgggaaaatcagaatcacaaagactattaccatcataatgactctgatggttatgcaacaaacaattcaagataaaaggaggggaaaggcccttccaggttctggggttttgcaggatggatcaggttcagaacacagctgcatctcttctgccaaacctgctgacctggccctgggactcgggacttgctgatctgtgtgaaacagcttcttcctaccaggggtgttattgacaggaggggaggccagacagctgggctgccttgaagtgatgcttgcccatgttagccattttaacagtcatttaaaattcatttcaaatactagggatagcagtttgtcactttccctgttgtttttttcccacagacatattaatatggatgtggctagcaggttccaagctttgaattgtgctcattaagtcacagctggctgggaatacgtgtcaatcccagacctttatttctcaagccggttttataatgaaattaaaatggactcctc

SEQ ID NO: 99444 - DNA, 583 bp, Homo sapiens
ttacccagcaccttttatttttagcatctcaaaatgttcgaacaagacatttttcttactttcatgtgcctctgcgtgggaaaatcagaatcacaaagactattaccatcataatgactctgatggttatgcaacaaacaattcaagataaaaggaggggaraggcccttccaggttctggggttttgcaggatggatcaggttcagaacacagctgcatctcttctgccaaacctgctgacctggccctgggactcgggacttgctgatctgtgtgaaacagcttcttcctaccaggggtgttattgacaggaggggaggccagacagctgggctgccttgaagtgatgcttgcccatgttagccattttaacagtcatttaaaattcatttcaaatactagggatagcagtttgtcactttccctgttgtttttttcccacagacatattaatatggatgtggctagcaggttccaagctttgaattgtgctcattaagtcacagctggctgggaatacgtgtcaatcccagacctttatttctcaagccggttttataatgaaattaaaatggactcctc

SEQ ID NO: 99445 - DNA, 583 bp, Homo sapiens
ttacccagcaccttttatttttagcatctcaaaatgttcgaacaagacatttttcttactttcatgtgcctctgcgtgggaaaatcagaatcacaaagactattaccatcataatgactctgatggttatgcaacaaacaattcaagataaaaggaggggaaaggcccttccaggttctggggttttgcrggatggatcaggttcagaacacagctgcatctcttctgccaaacctgctgacctggccctgggactcgggacttgctgatctgtgtgaaacagcttcttcctaccaggggtgttattgacaggaggggaggccagacagctgggctgccttgaagtgatgcttgcccatgttagccattttaacagtcatttaaaattcatttcaaatactagggatagcagtttgtcactttccctgttgtttttttcccacagacatattaatatggatgtggctagcaggttccaagctttgaattgtgctcattaagtcacagctggctgggaatacgtgtcaatcccagacctttatttctcaagccggttttataatgaaattaaaatggactcctc

SEQ ID NO: 99446 - DNA, 583 bp, Homo sapiens
ttacccagcaccttttatttttagcatctcaaaatgttcgaacaagacatttttcttactttcatgtgcctctgcgtgggaaaatcagaatcacaaagactattaccatcataatgactctgatggttatgcaacaaacaattcaagataaaaggaggggaaaggcccttccaggttctggggttttgcaggatggatcaggttcagaacacarctgcatctcttctgccaaacctgctgacctggccctgggactcgggacttgctgatctgtgtgaaacagcttcttcctaccaggggtgttattgacaggaggggaggccagacagctgggctgccttgaagtgatgcttgcccatgttagccattttaacagtcatttaaaattcatttcaaatactagggatagcagtttgtcactttccctgttgtttttttcccacagacatattaatatggatgtggctagcaggttccaagctttgaattgtgctcattaagtcacagctggctgggaatacgtgtcaatcccagacctttatttctcaagccggttttataatgaaattaaaatggactcctc

SEQ ID NO: 99447 - DNA, 605 bp, Homo sapiens
actaattatgcaaaacactgagggggaaaataatgatcgattatctacatgttgggctatgtactagaggcttctcataaaataggtttccatttgaagacattataatgtagttagaatgacaaaattaatacccaatataacccaagtttcttttacaagcctcaaagtaggtattaatagggtcactatcgcatgtgtacacatgtatgtgcatttacaaaaaggatttcagcttgcttccctcaaggtttcaacttactatttctagaaaacccagaggagagtcttctgtgtacttcacactaatgtattttcattccttccyttcttcctccacatttcccttttggtacttaaagtccctggaaggtgcaatcttcctatgatcaacaacagcctctgtctcggtaagaaaagccaatgtccgcaccaagggcatgattaccctctgcccagccttgagattcccaaaagtttctgggcttcttattgccctccctgttttaaagcaatgaggaaattcttctgtcctccaagtcatgctacgtattgccctacataaaactgagtgagccctgtgttttcacagactgcctcctgga

SEQ ID NO: 99448 - DNA, 626 bp, Homo sapiens
atggtaatccagagttctgaaatgttatgtacttgttttttttttcctctcttttttaacaatttcaacttttattttagattaaatacgcatatgcagatttgttacatgggtatactgcacccaggtartgagcataacacctgataggtagcttttcctcccatgccgcctccctacttctccccctagtagtctgcagtgtcaattgttcccatgtgtatgttcctgtggccttaatgtttagctcccactaacaatgtgagaacattgattttctgttcctgcattaattcacttaggattatggcttgcaggtccatccatgttgctgcaaagggcatgatttctttcctttttattgctatgcaatattccatagtgtgtatgtatattttttaatccagtccactattgatgggcacctagtttgagtttgttgtctttgctattgtgaatagtgccatgatgaagatcttttgggtttaatgacctatatacccagagatggtattgctgggtcagagtgttcccttttctccacagccttgtcagtttatgttgttttttgactttctgataatagccattctgactggtgtgagttgatatttatttaattgtga

SEQ ID NO: 99449 - DNA, 626 bp, Homo sapiens
atggtaatccagagttctgaaatgttatgtacttgttttttttttcctctcttttttaacaatttcaacttttattttagattaaatacgcatatgcagatttgttacatgggtatactgcacccaggtagtgagcataacacctgataggtagcttttcctcccatgccgcctccctacttctccccctagtagtctgcagtgtcaattgttcccatgtgtatgttcctgtggccttaatgtttagctcccactaacaatgtgagaacattgattttctgttcctgcattaattcacttaggattatggcttgcaggtccatccatgttgctgcaaagggcatgatttctttcctttttattgctatgcaatattccatagtgtgtatgtatattttttaatccagtccactattgatgggcacctagtttgagtttgttgtctttgctattgtgaatagtgccatgatgaagatcttttgggtttaatgacctatatacccagagatggtattgctgggtcagagtgttcccttttctccacagccttgtcagtwtatgttgttttttgactttctgataatagccattctgactggtgtgagttgatatttatttaattgtga

SEQ ID NO: 99450 - DNA, 587 bp, Homo sapiens
cttggaagcactgggaccacagtgactacagctaataaggcaactcaccagctaccatgtggagtcctgcagtaaacctttcttcctaaagcctgttaggtatcattcttctttgcagttccaaagattctgactaatgcacaatgcttcaactttcagaaatggttatgataaattcctcccaaagtaaaaatctcccattgctcggtcatctctcatatatgagctatcaaagtgttcacatctgttctcatttaatcctcaccaaaattctgtaatagtggtgcttaaagttggmggtataaagaatcaccttaggctgggcatggtggctcacgcctgtaatccagcactttgggaggctgaggagggtggatcacgaggtgaggagatcgagactatcctggctaacatggtgaaaccccgtctctactaaaaatacaaaaaattagctggggtggtggcgggtgcctgcggtcccagctacttgggaggctgaggcagaatagtggaacccgggaggcagagcttgcagtgagccaagatcccgccacaccactgcactccagcctgggcgacagagcaag

SEQ ID NO: 99451 - DNA, 521 bp, Homo sapiens
aatttccatgtgtttccagcctggagacactttcccttcccagatgctctggagttctaagtggagatgttcccactcctgcttcactttggaattgagagactcaccccagacagaatgtttgtgtctgtccctagtgggtgacgggagctggcttctcagagaagcaggggaaggctttcagggaggacaggggttggccaagggcatggagagatgaatcctcagggaccacatactccagcacttagcttcctaattacatctgctactccaactccttgaactgagtgcttcctatcaggccttcaagcaagagtagaaaatacaaagagcaytggagagcactggtccgggactttagtcctaccgtgactgcctctgtgactttggacatagtccttaatcactcaggcccttcattccctctttatgaaatgagagagttaggcatcatgacctcggagctttgcccagctctagaaaaagctctagagtcagctttgtgactctagctctga

SEQ ID NO: 99452 - DNA, 452 bp, Homo sapiens
ctggaaccgtctgtccgtccttccttcctctcctctcctccctcctctctctcttcctttctcccctcctttcttccctcccctcccctcctctccctttcttatggagacatggtctagctctgtcacccaggctgaagttcagtggcctggtcacagctcactgcagcctcaaactcccaggctcaaacaatcctcccacctcagccccacaagtagctgggaccacaggtgcacaccaccacgcccagctagtttttaaaatgctttgtagagatggggtcttgctctgtttcccaggctggtctcgaactcytggcctcaagcaatccttctgcctcagcctcccaaagtgctgggattacaggcaggatccaaggcacccagcctaaacagctttattgagataatttacatactgtaagttttacttgcattaagtataaaagtta

SEQ ID NO: 99453 - DNA, 567 bp, Homo sapiens
ccccttttgttccttctgagctgcagttggagatggctggttggttcacaggaataagcagggttagtctaaaatgtaggcaaaacgcaaaaacaacgaatgagtctagagtttaatgacaaacgtatgataagttttgaaacataatgtctctctccagtcctcatttttaaaaacaaatcatgataggactgagttgtttgcaaaacagactttagtcttatacttggcctgattatttgcataaagagcagcaagcataattattttaacgtgggccttttagatttacatgggctttgatggaactctgtttcacaaggaatctcagataggcctttctaaagctgagattgtaccctcaaatacttgtaagctgggtaaacaactctcttcttgaggtcccaatagcatggagttcctggacctgttagaaagtgacatgctttactcaccacaggttaggaaccctgtatggggactgtgtagaccagttatgaggccagttttcccaagggtcttttrttggctctgcaaatcgagcttgactccttaaaggtgagcata

SEQ ID NO: 99454 - DNA, 558 bp, Homo sapiens
cacacaagtgggataaaactagtcatttaaattggcttttggggctttttagctttgcttcgcaaaaatatcctgtctagacaaattygtacttaaattttccctatgcagcccttgtgaagacatatttaggcctgagaattactctgccacatggatatatttatatttacttatagtttctctatttcttttatatagttactttgtgtttgatcagtggagatcaatcattactaccattttgtctggaaatgtcataaagattaaagatagtttaaggtattaaaaatcataaaagggagctcaagtgatttttaagaagtagtatttgagttgttcccactaactgattgaattaactgtatgttatgctggaaaacctattgtattgaccctctctgggtaagcttttttaaatgagcatttataaatctccttttctcaggaagcagaatatagtggtaaaaattaagcattaattacagaacttacaatgcgaaggaaacatgattctgaatattaatcctcattgtccagtgatttaaatacgtagga

SEQ ID NO: 99455 - DNA, 606 bp, Homo sapiens
cagagaggaaattctccccaaaatgcccactttgaacatgtagcatgtgtcagatacaggtttgactttgtcctaggattacttctctcaaagcacttgttgtactaaatggcgtatatgtgtttacttccagtagcctctttgaatgatacccacagtagttcccttaagagtgtgcaaaaagatagcttagaagtcccaggagtaaagacttaatgactgaaggaattacattaaggaagatctaaaacaacaaaatgttagcccgatgctcacttggtgaattagtttcctattacttctataacaagttacaagatatttaggaaattaagtaacacagatttattrtcattgggctaaaatcaaggtgttgaaatggctgcattcatttctggaagctctagaaagaagatgacccatttgcttgcttccattcaagcttctacagatccctcatgttccttgactcatagcctcttcctctgccttcaaagccagcaatgctgagccaagtcatttcatattgctgcctctctggttctatctcttctggtcctttcttctaattttaagggtccctgtgattatattgggtctacccag

SEQ ID NO: 99456 - DNA, 586 bp, Homo sapiens
ttttccacccatccattcagaaacaaaactcaaaaaaaaaaaattgtcattagaataggtttttttgggtttttttttctttttggtgagaaggagttttgctcttgctgcccaggctggagtgcagttgtgggatctcggctcactgcaacctccacctcctggattcaagcaattctcctgtctcagcctcctgagtagctgggattacaggcacccaccaccagaataagttttaaaagtctcataaaaagtcatgtaaatccttttcagtgtcctggatatagaaagaagcagtgatttacattttcttcttatttttgttttcatgatagtttttcstttacattaggtcatagagttgagtaaagcaagagaaagcttgctcattaaattttcaaatgacagaaagttgggaagttcagctcatataaaagatgattgaatcaaggtgcaaatgtattcttctaggttgaaattatgaaagaaaattgaatagtcattaatacgaagtccagcatttatagtaaatgaaaagtcaagtagaagttaggcatatctgctgtgacaaacagtgctagcggcc

SEQ ID NO: 99457 - DNA, 496 bp, Homo sapiens
ttataattttttaaataaaatacaaagtgttccatgattgcttcagttaaatattaaaatgaaaaagggcattataatagggttaccgtaattatttggcatattaaagcaaattatacccaaaggccccacatgaagaaattagtttaaacagtcgctcgcctcggcaggaatcaactcttccctttgtctggaaggctatgtctctctttcttcacattctaagtactactcatccttcaccagcacagaatgttcaacgctctcgtcccccayacaggtaatcctttattatcttcacctgtcttgcaggtacgattctgactgagctatccccttcacaccttgctcaggacacggggaactttaaccactttaaccactctctgcctgcaaatggcaggacactaggccacagaacctgtctcaggcagggcccatctacctaaaactcctcccccaccattgagcctctacctcctagaagccatgctgg

SEQ ID NO: 99458 - DNA, 565 bp, Homo sapiens
gggatcttaatgccgcctaaaagagtactaaaggagaattcagcaaacatgggtttcagtcacagattcccaaggaaatgttttggtgacccacagaaagcctctggtttttataatttcaacttttattttagattctgggggtgcatatgcaggtttgttacatagatacatggtgtgatgctgaggcttggtgtacgaatgatcctatcccctgggtagtaagcgtagtaccaaataagaagtttttcaaaccttgyccccctccttcccttccaaatctagtagtaatggcaataataatgtccattactgccatctttatgaacatgagtgcccaatgtttagctcccacttacaagtgagaacatgtggtatctgtttttctgttcttacattaatttgctttggataatggcctccagctgcatctatgttgctgcaaaggtcatgatttcattcttttttatggctgcatagtactccatggtgtatatgtaccacattttctttaatccaccactgacaggcaactaagttgattccatgtctttgctattgtgaa

SEQ ID NO: 99459 - DNA, 612 bp, Homo sapiens
aaatgatgttccgaggtgtccagatccttgggcctaacagaggatcaggaattgaggtttcattccctgcagttcagggacatcccttgtcctagcagataaaccaggaaaacactattgtctagggctgagggggtgcttgcactgtagagcataccaatgaggctgactacactcggagctsaagaacgagtttcatttgcttctcaccctttttgtcattgtcgatgtgcagggtgctcatggatgggtgctgggtttggcaggggtggaaataaagtttgcttcttttgctttgtgttcctcacagagtttatttctgtggcaggctttttcataaaggatctttctttggcatcctttgatggtttaaattgctaaatatgttttcgtgatggatattacacataatgtttaaccgaaagcatttgatattattttcccaaagtcaattattatctccctagcttttgtatgtctttaggcaggattttttcttggtaagtgatccaggcctattttaccttttcctgaaatgtataccactctcagatgtctcagagagtctgggaaatatgaattgacatatcacaaaacttaaaaagtaggtag

SEQ ID NO: 99460 - DNA, 600 bp, Homo sapiens
aaagcattttaagaaggaaatgatggtcaatagtggtactcgcagattgaccttgaaggataagagtaatgagaaaaaggaaacacaaaatgtttcaatcaggaggccattggtaatgttcgaggataatttggctagaacggtgggccaaatgccagaccaaaagtggttatttagtatttatatggctaataagagcaaaatttaatttttaatcagtaaatttatttaatgcatattttcaataattttgtatgtgatttttttctttgaaaattattctctaagaaaaaaaggactgtatctttctgatttaattttgtggtgtctctaacaacaccttgagctctttggtgttataaataatcacwatgaataacattggagaaaattaatatattttgagaaattctcctggaattacattgctgtctatactacggatttagggttcaaaccccagctgtttggcaactgccagagcctaccagctatgagttaggacttagaatttgcattgcaaataaccacctggtaatgatagttaccattcgccactgcttacacattacacataatggattgttttaggaaggccaa

SEQ ID NO: 99461 - DNA, 600 bp, Homo sapiens
aaagcattttaagaaggaaatgatggtcaatagtggtactcgcagattgaccttgaaggataagagtaatgagaaaaaggaaacacaaaatgtttcaatcaggaggccattggtaatgttcgaggataatttggctagaacggtgggccaaatgccagaccaaaagtggttatttagtatttatatggctaataagagcaaaatttaatttttaatcagtaaatttatttaatgcatattttcaataattttgtatgtgatttttttctttgaaaattattctctaagaaaaaaaggactgtatctttctgatttaattttgtggtgtctctaacaacaccttgagctctttggtgttataaataatcacaatgaataacattggagaaaattaatataytttgagaaattctcctggaattacattgctgtctatactacggatttagggttcaaaccccagctgtttggcaactgccagagcctaccagctatgagttaggacttagaatttgcattgcaaataaccacctggtaatgatagttaccattcgccactgcttacacattacacataatggattgttttaggaaggccaa

SEQ ID NO: 99462 - DNA, 602 bp, Homo sapiens
cgtgggttagttggagataagtattaaggcaagaactaggaaatggcaagagattgcttcttttggatgaggaattccaccgtcatactcataacagaatgacagctggttctatcatcctaatgatgatattaaaacatttccagtgatggggacactctacctcagaaggtagctacttgcttggataaatatttgtggtttctagaagactttttcttacatttcaacaatcttagttgtccacgtgcaggtaagaaaatgtcaacttaacrgcagtcctttggatttgaaaagaaactacttgagtttcactactcatggttttaagggtatctcaaaaatttatttctgactttgtttcttaaacatagtttcatcctgaatatgtaaaatactatggaaatagcaataatattctgtatttgttactgctttgccctttaaaaaacattttcacatattttctaatgcctcttaatcttcagagtaacttccaaaataataacatctttataaatgaagagaccaaacctgagatgttaagttagtgcttttggcactttgaattatatactgaagagatgtaaaaaaatctgtat

SEQ ID NO: 99463 - DNA, 559 bp, Homo sapiens
catgacagtgaccagattacagaggcagttgtgaaaggcagattaggatattttcctttattatccaataaaagatatgtggtcttcagggaagtcatctgtcctttggagaaaaaagcttcggtaggtctcatcttgtcccaaataagataactatttgaattattctcttgyaatttatctgatttcaccctcatcaagcaaccttaaagttattaattccacttcataggtaccttgacactgggaaaaaaaaattgttcaacatagggatgaataataaaaccatttttttaggacattaacttaaggaattgactatatcatttatctactcatctatgtacatatatcttttgggaatctggttggtatgagcttatcatagaaagcctaataatctcaaagaaactgataaagcacaatatttggtgattcaagtctaagggccaaattctgaaccatgacatattcattaagatatgaacttccctatagggtttctgctagctggactttccttggaaagttgcacattttatttttaacttacaacatt

SEQ ID NO: 99464 - DNA, 595 bp, Homo sapiens
tttatcaagacaatacatgcacccctgaacatagacgtctccttatcagtggttctgcttttgccctttgccttgtgatctttgttggacccttatcagtagttctgcttttgccttttgtcctgttctctcagaagcatgtgatctttgttagacccttattagtagttctgctttttgccctttgaagcatgtgatctttgtacctactccctgttcttacaccccctccccttttgaaacccttaataaaaacttgctggtctgagactcaggcaggcatcatggtcctaccaatatgtgatgtcacccccagctgtccagctgtaaaattcctctctttatactgtctctttatttctcagctggctgacacttatggaaaagagaaagaacctacgttgaaatattgggggtgggttcccccaataaaaggtatttttaaaagacccmcagtaaccatctagagatgaaaaatacaatcactaaaatgacaaggaataaacagcatattaataaagatggaggataaaagttgataaacttgatgacatagcaatagaaaccatccaacagaaactatggaaagaaaaaa

SEQ ID NO: 99465 - DNA, 574 bp, Homo sapiens
agactttgggggactgttggaagggcatgattgtgttttgaaatgtgaggacatgagattcgggaggggtcggggtggaatgatatggtctggttgtgttcctagccaagtataatccccacatgtgatggtagggacctggtggaaggtaattgaatcatgggccagtgggggggtgggggtttcccccatgctattcctgagtgagttctcaggagatctggtgatttataagatgcttcccctttggcttggctctcattcttctctctcttgccaccaggtgaagaaggacgtgttagcttccccttcagccatgactgtaagtttcctgaggcccacccagccctgcagaactgtgagtcaattaaacctctttcctttataaattacccastgttgggtatgtctttattagcagtgtgagaacagactaatagagttcctcattttttttttcttggaacctccatagaaaaactctacacactttatttaaaaaaaaataaaacaaaacagtgtttacagatcgaaaacctagacttcaatctagaaattgccttcacccaaatta

SEQ ID NO: 99466 - DNA, 614 bp, Homo sapiens
aatgctaaataaaaaataacatctctttctctctcttttccacttctccctcctttcctcactgcttctcttttcttttaaaaatagtgagctcagcaaatataagaatgaggaaacactattaaccctcaaaactctgcacatgtgttaataacattacttgtttctggtacttgtggttttttaattgatgcataatacacatgtatgttttgggggtacatgygataatttaatacattcatataatttgtaaagatcaagtcaatatatttggaatctccatcaccttaaatatttagctttgctttatgctatgaacattcaaattattgtcttctagcaacttgaaaagtacaatagaataatgttaactagagtcactctgctaatctgtcgaacaataggtcttatcaattttattacaccatatatttggttccattaatcaactactatgcatccatcacccacacttctcaggctctggtaaccaccagctactcagtcttcatgagatacaattttttttagccccacatgaatcaggaaatgtggtatttgtctttctgtgcttggcttacttcacttaacataatgacttccagtttcat

SEQ ID NO: 99467 - DNA, 321 bp, Homo sapiens
atattataaatttggtactttaatatgattcaagctactagaacataaactttataacagcagggactgtgtctgtcttatttgtcattttatccctgtgctatttcaacaagttgttgraatcagtttttaaatcaagggagattctacagagaccctttataaactacacttggtaggaagactataaataataaccatagtgtgcccaggttttaaaacatggaaacaagccatgtttgcctgatttaaagtacagtttagcagattcttcacattcctgataaatgtatctcaaactttgaaaattcctgtttttgt

SEQ ID NO: 99468 - DNA, 378 bp, Homo sapiens
gtgaataccgctaagtcttcagatatttgaggtatcttttctaaactttacaatagccctgaatttggttttaagttagaacaagaaagccacataggaacaatatttcttttaaattactccatgctatgagattacayggggagcagatgaaggcagaataatagagttcaaaatattgtatttcaagaacaagaaatagtgtttagcaggacttctgaacattttgaacatgtctaaaagcaaaaaacaagagcctaacctaaacattaaacattaggagaaggttatttattcagatctctgtttcatgttacacaaataaataataaacaagggtgctgggttttcaaataggatgcattctgcattacgaat

SEQ ID NO: 99469 - DNA, 603 bp, Homo sapiens
cactgcacccagccccagtgaaacttttagatcaaactataaactcataattgtatcaattaaatttttctcaatgatataggaacttcatggtcttaattgttgatagcatccaagtacacattcagtaaacagagcttttttttatckgtgtcatgcagttaaaatggttttttattgttttctatgaaatatcttagttatataatggtcaaactgaaacatcatctcttacaaaggtgagattaaacacaatagaattatttacagaacttccatcttataagccactttttcattaaatttggataataagtggtgctttgctacctgatttaaactagttttatttaggctatgaatcaacctctttgttccaaaacactggaataggggaatgttttgcatttccccttccccacgagagtttgttttcctctaagtcacattaagatgctgttctcaagccagtttcgtttcacctagtgcctagtttttggagtgggaatgaaggtaggcaaaagttaattgtagaccaacacaaagagcacaagtgcagcatgtgtttgcagtaataatgaatgcacactatgaagcaagtct

SEQ ID NO: 99470 - DNA, 645 bp, Homo sapiens
taagtttccccaagaattgctcaaatatctctattttcaatacagttttatcctgaaagaagtgcattagactgtcaattttcctcttcccaccttttctttgcccccaacacaggcaaagctcttgaaagcaagatcgagcaactcttaaaataattgagagaaactacccaaagatcagcaaccatgtgtgcaagccaattcctaaaaacaaatcttaaaataaatgtcactgtgggcactgaaatatattcagctactatgttgatatttccatttgaaagctttaatataaacaaattattttctagtgttttcatgttactaaatctttagtaaagatatcactgagtcttttccttagagcttacgttctaggatgaaagaaaaaaaacagcaatctgaatgaaagcaaactttagtttcatctcatttcagcatacctcaaactgtcatctcaytgtcacctttcattagctgatactccctatttctgtgttcttgtctataaaccaatggagcacacacaaaaaaaatcactgcaaaatatgagatctcctagattctcctattgagtaatgggaaagtaaaacaaaaacttaacattcctaaatgatccgtcaaaatcagtactttcatatggaa

SEQ ID NO: 99471 - DNA, 566 bp, Homo sapiens
tcagggtctttactatgctaacatgccatgactgttcaatgctgtggagctagggggtgggagggggtgtgtcagtgcagcaacccctttagggggccatctctccacactagagtttgggggacactgatgtctcatcagcctccagtcatcagccggctggttgctgagtgagactaatgaaggcatgctcgttctctgccttcgtttgcctctctggataatgggggtggtcttcatggtggccaaattgagcccaggagcctgaagcagagcccttaatgagtactgcttggtgatgaaaggcccccttaagctccagccaccattattgcatgatggaataaatgtgaccagcctaggagacgcgtacgaataaatttgaatagcaagacacaaatgccacccttaactccaacgagmaaatagagtttaataaagaggtaaactgagaccgcttttatttattgctgtgtaaatgtatttaaaaaggtattggctttctgcagctgcagaggccagttcctctgcagcctggtgctttaatgcctgccgctgttattaga

SEQ ID NO: 99472 - DNA, 606 bp, Homo sapiens
ctgtgactcagtctgaccactgacccaggcagacaggggaatgcaggcaggaaatgtcaggcgcccatcaggggaatggggcttatcgatgtggcatcggcacctgcctctggggagcttcaagaagtgctctgcatggagctgacaggtccattagttgtcagttctggccatatcttactggactggcaatgcagcccacagccagctggaagacacgcccagataacacgatcctgcagggtgtaacaggacatcgtgcctttgctggcagtcataataaataccaattgctgagtaatgacaacacagggtgtttttgctggtattcctatttaaccccctcacaacactcctgaaagatagctttgattgactccacttgtaaatgaggaaaccgaggctcagaggagtgaagttaccagcccaagatcacaggaggagggagaaagcccacattttcatcacattccmtatggtcagaggagcagttcatggtctcatactcttcatgttaccccacatgaaagaaaattttctccccacttgacagaggaggaaattgagtctgagagaagtcaaaatctgtatccttccaatcagaaa

SEQ ID NO: 99473 - DNA, 592 bp, Homo sapiens
attaggatgtggacatctttgggggcccatgatacacctatggagaggagaagtaaagtgcctaagatcacaagccaccaggtcccaggaactgtgtaaacacagaaaataggacaagaagaggcttgttccaaagaggccctcgctacttcacagtcccaccaggagggcagtgctctgtgcccaggggcagsctgagctgctctccctgcggggctgccagctaccctgactcgtcttcccaggccctgtgcatccttccctgacccctcatcaacctgaggaaagctctggaatgccttctcctaggctctcactgtagtatgagggcatttttcttactgtgtggcttaattccatgtctttctcccgcactggaccgtgaacagagaccacatctgctcctctctgttcccaggacccagtacaggagtgccagcttgtgccttctgctctgtgtgacctatcagaacccacacactttctctggtcatcttaacaaagactctttctacgtcttacccaggagcaccctaaccctttgtctagagcccgggctcagtaaataaatgaatggatgtcatccactgat

SEQ ID NO: 99474 - DNA, 589 bp, Homo sapiens
ggctgagcattctgaaccaaaaaaaaagcaaaagatacaaaggacctttgaagatataccccatccttccctackttgttactccctaaattacagagaatttttgtgggaatatgttcatttattcaacagacatgtattcagtatttctgtgtgccaggtattgcaaaaacaagcatccaaaaataataaaatagttctaaaaccattttttttcattttaccttgaaacactttgctatcgtatgcatgaacatagacatgaactcccataatatgaaactggccacttttctaagaaaaatgacccaaaatgggcttttaggctcattgtgatctttttctccgtccctgggccaaagaaaagtgatgacaaatgttgtaagccaatctaggagccagggaagttcaagggctagaagaatgtttctgagctacagtggtctgtgagcacttttatggcccatttgtcagaagctttgtggggtgtccctcagctttgtcctttaaattgtataattccatcaatttctgctagtgtcctggaaaatttatattatcttagctttcttgcctagttttaaacgat

SEQ ID NO: 99475 - DNA, 589 bp, Homo sapiens
ggctgagcattctgaaccaaaaaaaaagcaaaagatacaaaggacctttgaagatataccccatccttccctactttgttactccctaaattacagagaatttttgtgggaatatgttcatttattcaacagacatgtattcagtatttctgtgtgccaggtattgcaaaaacaagcatccaaaaataataaaatagttctaaaaccattttttttcattttaccttgaaacactttgctatcgtatgcatgaacatagacatgaactcccataatatgaaactggccacttttctaagaaaaatgacccaaaatgggcttttaggctcattgtgatctttttctccstccctgggccaaagaaaagtgatgacaaatgttgtaagccaatctaggagccagggaagttcaagggctagaagaatgtttctgagctacagtggtctgtgagcacttttatggcccatttgtcagaagctttgtggggtgtccctcagctttgtcctttaaattgtataattccatcaatttctgctagtgtcctggaaaatttatattatcttagctttcttgcctagttttaaacgat

SEQ ID NO: 99476 - DNA, 533 bp, Homo sapiens
gtggggcaaattctttcacagaatgatgagtggagctaatgagaccctgaatatatggtgagttaaatgtttggggacatttcctaagccaaaagcctatgcatcattcttcattcttctgtctcccttccctggagatgccctggacaattctacatcctaatatctttcttgaagcattattgtgtccccatcctcactcctctgcctacagttcattacctcttacctgaattaccacctctcacctgctctcccagcagccatccttgtctccctgcatccgttccccacaccacacactgacgagatttytaaagtgaaaatctggtcacccttccctcctgctctgtggtttcttgttgaccttagaataaagccccaaagctttcacattgcaatcttactcctgcttgtttctctagcctcatctctcaggtgtctgctccctctttaagtgtatgcccgtgcacacacacaccctcctccacaccccaacctgaccacttgactgtctctgcttagcttttatt

SEQ ID NO: 99477 - DNA, 585 bp, Homo sapiens
gctggggtttcccaccacacagaaacagatgtttcccaggactctgtgcttaacctggctttggttttattagcacagtcttgccatgcttgggactgagcaggctttcaagcctgtaccacttctgaaggaagtcagtggggtgttccctggctctacctggaaaagtcacatcacactggtacrggggtaccatgaaaagagttcgtggaccaggactcagggtatccagtgtccagtgctaactctgccactccctcagtatttgaccttggacaagttgcttcacctctctgtgcctcagtttcctcatctggaaggagtggggactggcctagaaaatctccaaggtccattccagaagcttaacagtgcagatcacttaccaattaaaaagcagtccccccactcactttccaataggggttctacattaaatgtcacagagacaagttagagaaagatgcctctccagaaattaaaatgcaccttagaaaggtggggagaggtggggctgcttgcaagagacctctgggccatagtcaaccatcttcacctgcatttaactcaagtctgaaaggatgt

SEQ ID NO: 99478 - DNA, 575 bp, Homo sapiens
cccaccacacagaaacagatgtttcccaggactctgtgcttaacctggctttggttttattagcacagtcttgccatgcttgggactgagcaggctttcaagcctgtaccacttctgaaggaagtcagtggggtgttccctggctctacctggaaaagtcacatcacactggtacaggggtaccatgaaaagagttcgtggaccaggactcagggtatccagtgtccagtgctaactctgccactccctcagtatttgaccttggacaagttgcttcacctctctgtgcctcagtttcctcatctggaaggagtggggactggcctagaaaatctccaaggtccattccagaagcttaacagtgcagatcacttaccarttaaaaagcagtccccccactcactttccaataggggttctacattaaatgtcacagagacaagttagagaaagatgcctctccagaaattaaaatgcaccttagaaaggtggggagaggtggggctgcttgcaagagacctctgggccatagtcaaccatcttcacctgcatttaactcaagtctgaaaggatgt

SEQ ID NO: 99479 - DNA, 585 bp, Homo sapiens
gctggggtttcccaccacacagaaacagatgtttcccaggactctgtgcttaacctggctttggttttattagcacagtcttgccatgcttgggactgagcaggctttcaagcctgtaccacttctgaaggaagtcagtggggtgttccctggctctacctggaaaagtcacatcacactggtacaggggtaccatgaaaagagttcgtggaccaggactcagggtatccagtgtccagtgctaactctgccactccctcagtatttgaccttggacaagttgcttcacctctctgtgcctcagtttcctcatctggaaggagtggggactggcctagaaaatctccaaggtccattccagaagcttaacagtgcagatcacttaccaattaaaaagcagtccccccactcactttccaataggggttctacattaaatgtcacagagacaagttagagaaagatgcctctccagaaattaaaatgcaccttagaaaggtggggagaggtggggctgcttgcaagagaccyctgggccatagtcaaccatcttcacctgcatttaactcaagtctgaaaggatgt

SEQ ID NO: 99480 - DNA, 535 bp, Homo sapiens
tggcctcctcacctgccctcactgttctctctaccatactctgctactcctgcaccagcagctcccagccccaaacagtgtgaagatggcttcatctgaaccacctaaggggaggagggtattggtaaaccatgcattcttaggctccgttccctgagatcctgacttagtaagtgctatmcaggaatctgcatttttattttattttattttagagacagagtctcccaggctgtcacccaggctggagtgcagtggcatgacctcatctcactgcaaccttcagcgcccgggttcaagcaattctcgtgcctcaacctcccaagtagctgggattacaggagtgcaccatcatgcccagctaatttttatattttcagtagagacagggttttgccatgttggccaggctggtctcaagctcctagcctcaagtgatcctccctctcggcctctcaaagtactggaattacaggcatgaatcaccatgcccggctcaggaatatgcattttaattgagaaataatttctatgt

SEQ ID NO: 99481 - DNA, 600 bp, Homo sapiens
tagagtgtgcagtgccattctaagggcttcatgtgtattagctcactgaattctcatawgagttctatgaataggactttaactattagtccttgtggggggaaagaagagcatttaatcaggctatggaggattggtgggaatatttcaaattcctcacctattaattcaactgccatcaggaaggatccccattgccttttcatgtctataatctccactgctaatttcccaaaaataagagagaacaatatttggactagagctggttgctactggctctattgaggactctcattctacccccaaagaatgacttctttcatagaatttcaagaggctggctgtccactctatgagcaggtaaagctgcctctgctccaggttttctgatgaacctaagctatatcaggagccagaaaaatcgaggctcaatctatgaacattgcaacccatattacctggtctctgttcctgcagaattcatactttatggtggccactgtctttaactgcctgggacttttccccaactccagatgccagcctacccttctgataatagactctagcctcagaagctttgggattgactagtga

SEQ ID NO: 99482 - DNA, 360 bp, Homo sapiens
cggcctgctagggcgacgagtatgtcgggagcgcgccgcccccacccaggcgccccgatgggtttttccatgactgcatccggcctcgggccgcctttgttcccgccgtccccggcctgcccgcgaagcggcccgcctctccctgcgcgcctgggattttccagggctcaattggagcactggcgagccgcctccccgcccccagcctcccctgccccggctgcccccgagtcctgtttcagggatcctagccctctctccagacgcgctgctctgtccactgtccccgcctccagracctgcgtcctcccagccccacatttgtgcgcaaagttgacggtcaccgggcccgcgcgcttc

SEQ ID NO: 99483 - DNA, 594 bp, Homo sapiens
tggagagaacagggtagtggctatgggatcaaagtcagataacctttcccaaggcagcagtagttcagcacagaattcacacaaatacaggaattatacactggaacctggccttccaacttcagttcgtttgagaaaytgaaaagaacaatattgacaggaaagagagctgcttgcatggcttgctgaagagtgaaaagaaaccttgcaaattcctcacttgggcatcttctgagaaatctgaagagtggggttaaggaaagagtacacagtggataaacagctgagtcttcgtggggaggaaagacccccactcatagaaggaaaaacaaagtgaatgttttccctatggaaaaagaaactgaaggagcaaataaaataactataaatcttttctccctactgttgtcttgtctgaccaatgctgctgtgtctccctataataaatcatagtccttaatgaaaaatgacaattacactgaagttgcactacccacagttacttggtataaactgttgctttatatagttacatatattgtgggtaagatggtatacttgtcagggaaaggggacaaatatatttttatttaa

SEQ ID NO: 99484 - DNA, 636 bp, Homo sapiens
ctaaaacttatttctaaatggggagttttcatattttctttccaataaaacaaagtgggcctttaaaaaccatatggtggtgtaaaaagaagtttcattcagcatctttttttagacacaggtttccttataaaatataccacagtcacaaagctgaaggagccttcttgtttctgcggacaaagcctctcgccatctaacgagtcttctgcagctctgctagccactgcgcccgtcctatttcttctctcccaaaaaagaaattgtaaacaaaatggtattgttttttaaacaagttatttttcatctatttagcaagctattttgaggtaacacatatgtaagagaaacctttcccactgctcacrtaagttcctattaattttgagctaagctctttagatagaacgtgctttgccaatacatgagaatagaccagttcaaaagaacaaacgtatgtctgtaactatttccgccaatctccaagcagcattaatagtgttcattttaaatttctgaatacagcagtgggttcagaaacatttttatgctccatatttcacatatgacttataaatatatgcatattttgtatgtataaaatattacacaacttaacattttgcatagcatttc

SEQ ID NO: 99485 - DNA, 569 bp, Homo sapiens
cactgcactgcagcctgggtggcagaatgagacactctttctaaaaaaatctttttaaataaataagaaaagagagatggggccagatttcagtccagttaggagtgtgaaggtgagagagcattatctgaggaggatgtaggaatttagaaaaatagtagaataaaactccaaaggacagagtaaaaaggcttagaaaaggagggtaggaacaatgagaagacaagttcttggtccagggcagtgtggagatgaggatgcaggartggctggtggactctactgagcattgcgtaaggtggctggctttggtggggtttagtagcattagaatgcactgctttgagctctgaggatctcaggtggtacttaggcaaggtctttccagattccactgctttgccagtgcctaggcaaggtctctgcagagtctactcaggtagtgtctagttccaaagtctctgcagattcttacctttttgggccagctgttttggggtcaagtaaatgtcactgcagattgtagtctgagagcactgatgtttttacatagctataccacagagctg

SEQ ID NO: 99486 - DNA, 669 bp, Homo sapiens
tccattggtaatctcagcagaaataattgcttcctcttctgaacttccataatacttatttttccttgtattataattatgcacgccatcttcctcactatatgttacatttccaggggtgggagggagtgactgtctttcatctytgtccatgcttttaacaattacctctttatctatctttgatatctttaaaaaataaacaaaacattgcaggtatcttctttctagctcaggaagctggtctaagctcctcctctaagtttcaccattctgttcctggaaatgcctccatgtctaacttacttagtatgtctccaagattctgccttaacttaggccattccctcatttccacactaaaacgcttttgctctggcattgtatgtagagtaagtatgccaagaccattcaaaagggaaaagagagtctttccaacaaatggtattggaaaaactggatatccacctgtaaaagaaggaagttggagacttatcttataccataatggaaaaattacctcaaagtggattaaagacctaaacataagagctaaaactataaaactcttagaagaaaacacaaaggcaaagcttcatgacattgcacttgacagtgatttcttggatataacaccaaaagcacaggtaacaacaggaaaaaaaaaaa

SEQ ID NO: 99487 - DNA, 669 bp, Homo sapiens
tccattggtaatctcagcagaaataattgcttcctcttctgaacttccataatacttatttttccttgtattataattatgcacgccatcttcctcactatatgttacatttccaggggtgggagggagtgactgtctttcatctttgtccatgcttttaacaattacctctttatctatctttgatatctttaaaaaataaacaaaacattgcaggtatcttctttctagctcaggaagctggtctaagctcctcctctaagtttcaccattctgttcctggaaatgcstccatgtctaacttacttagtatgtctccaagattctgccttaacttaggccattccctcatttccacactaaaacgcttttgctctggcattgtatgtagagtaagtatgccaagaccattcaaaagggaaaagagagtctttccaacaaatggtattggaaaaactggatatccacctgtaaaagaaggaagttggagacttatcttataccataatggaaaaattacctcaaagtggattaaagacctaaacataagagctaaaactataaaactcttagaagaaaacacaaaggcaaagcttcatgacattgcacttgacagtgatttcttggatataacaccaaaagcacaggtaacaacaggaaaaaaaaaaa

SEQ ID NO: 99488 - DNA, 585 bp, Homo sapiens
ttcttaaaaatatttcaagggtggaaaaacataacacacacaaatacatctaccttatgttggtgtggcttaaaatacagaaatatctgaagatagggtttgtgaagggtaattatttctcacatagcatcccagatacaggctttttgttgttctttttttggcggtggtttgtttattgggagagcccatattgacagttatttaaaagaggaggaaggaaacattttgaccttagggtagagtttatgggtgagaacattactggcataaatgagaagatatgaattcgataaaagaatataaagaaagaaaatttacaggtaaaattaacaaggcttttaaagactgggaccactgaggtrtactgggtgttatacaatttaaaaaataagaatataaaagtgctttaggagaatgttttgaaaactgaagccatttatttatccaaagagggagagcttgagcagcatcaggccagaatgttcctgtgtgtgccatgcccagattgaagataacacaattattataataacatagtttcaattcagatctctccttagtgtttctgcccagaattcaaca

SEQ ID NO: 99489 - DNA, 604 bp, Homo sapiens
tgccaatcaagattagaaaaatctttccaccaataaaatgacctaatagtcatagctttatgaatgtttattaatgatccagaataatcatatcagtttatacctttaaaattaactgtcaawcatattaacattcattcaaaagattttgtatttttataaaccctcctttttacacacacacacacacacacacaggtacacacacacaaatatgtccacagtgagggtcaacaggtaacaaattattcccacaaaacctgtctcttcttgccaaatgttcctaatattttataaacctcacaagtaacttactactggacaaaccttccagctaatgatcaaaaatataaaacttcaaaatatttttcactttttctaagttcttcataaaatgcctgaatgctcatgccccagaaaaagctaatgcacaaaacaggatataccacggcactctcaacttccgctgcaacatcaagactggctgataactttgcttatatattttctatttacacatatcaagtttcccagcattactttcctcctcacaagcggtgaacccagagaccttcattactaacattccacaatgcatggagaa

SEQ ID NO: 99490 - DNA, 540 bp, Homo sapiens
tatggcatatcttacttgggaaggtaaatgttctacattmtaactgttaatgacctattcaaatggaaaagccaatgggcagggctttagactgttcttcacagatgttctgctagaaacatcagcttcagttcactcatacaatccacaaccatgatttgttccatgaatgctaaaattgggtgtctaattgtttcactgtacacaatgacaaatatgtgtgccatttcttcgattaaatgtctctgcctttaaaggatgtgtgttatatatgggtggtgtgtgagaatgcacataagtcttttctttaggtttctatgcagttaagaagagatacagtgcattgacatttagtcagatgattcaagtagaaattgtgccaaaacaagaaggggccacaagccaaggaatataggcagctgctagaacccagtaaaggcaaggaaatgaattatccactggagcttccagaagagaatgcagccctgctgacactttaattttagcccaatgggacctgtatcagacctacagagctgt

SEQ ID NO: 99491 - DNA, 652 bp, Homo sapiens
tagtaaaaattaaactcctgatgaagaacaaaagagaaaagacacaaattaccaaaatcaagaatgaaagaagggatatcactacggacttaacaggcattagaaatataaatgaattaacattaatgaattcaaagtgatagatgaaatggtttaattccttcaaagacacaaamcacaaaatactgatgtgagaaatcaaagagaaaaatgaaaaaaatcactcaaaattctacatactgcattgatttgttcacgtgatgttatggaaaaggcaatggggttggggagtgaaccaggggtttcctggggttaagagttggggaagagtttgactacaaaaaggtaccacaaggggatgtttctgggcgatggaactgttgtgaatcttgattgtggtggtgaagtctacatgacaatgcaattgtcaaaactcagaaatgtacaccaaaaagaataaatttctactataagtagataagttaaaaaataaatgttaaaaaattaaataaggctgttctacaggtacttgtcaaacttttaagtgcacagcaatcaccagctccagtaaaagtgaagcagaaaaagcatttgacaaaatacaacatccactcatgacagaacttttgcagactaaaaatataatggaact

SEQ ID NO: 99492 - DNA, 547 bp, Homo sapiens
accaaaggtcatggcctccatcaggcagctgtcatcccataaatctttcttcaggttttagcaactgcctcctcccttagcccttcagtcctaaagtcagtaagttaccctgctatcactagctctgaaatattgcagtatcctttgttgattaccacagcctgcctacaactytatagattgtccctttattaagctcttctcaaattacccaatttgagtgttctgtttattttttattgggattccatctgataaaccctgtaaacacaattgcctctggcctttgtggagaaacttattgtataaaattgccactttaagcactgtggaaacaccgaagattaaaaaacaaaagcccaaagccatgtttctgccttctcagatagtgcttctcacactatctgtgataaaggactagtttttaaattattattactgttactttcagtctgtcacagactgatattctggtaagatacagtaacaagaaattaccagaaaaaggaaatttagaaggtatgcaaattaaagcccaattgttatt

SEQ ID NO: 99493 - DNA, 547 bp, Homo sapiens
accaaaggtcatggcctccatcaggcagctgtcatcccataaatctttcttcaggttttagcaactgcctcctcccttagcccttcagtcctaaagtcagtaagttaccctgctatcactagctctgaaatattgcagtatcctttgttgattaccacagcctgcctacaactttatagattgtccctttattaagctcttctcaaattacccaatttgagtgttctgtttattttttattgggattccatctgataaaccctgtaaacacaattgcctctggcctttgtggagaaacttattgtataaaattgccactttaagcactgtggaaacaccgaagatkaaaaaacaaaagcccaaagccatgtttctgccttctcagatagtgcttctcacactatctgtgataaaggactagtttttaaattattattactgttactttcagtctgtcacagactgatattctggtaagatacagtaacaagaaattaccagaaaaaggaaatttagaaggtatgcaaattaaagcccaattgttatt

SEQ ID NO: 99494 - DNA, 547 bp, Homo sapiens
accaaaggtcatggcctccatcaggcagctgtcatcccataaatctttcttcaggttttagcaactgcctcctcccttagcccttcagtcctaaagtcagtaagttaccctgctatcactagctctgaaatattgcagtatcctttgttgattaccacagcctgcctacaactttatagattgtccctttattaagctcttctcaaattacccaatttgagtgttctgtttattttttattgggattccatctgataaaccctgtaaacacaattgcctctggcctttgtggagaaacttattgtataaaattgccactttaagcactgtggaaacaccgaagattaaaaaacaaaagcccaaagccaygtttctgccttctcagatagtgcttctcacactatctgtgataaaggactagtttttaaattattattactgttactttcagtctgtcacagactgatattctggtaagatacagtaacaagaaattaccagaaaaaggaaatttagaaggtatgcaaattaaagcccaattgttatt

SEQ ID NO: 99495 - DNA, 547 bp, Homo sapiens
accaaaggtcatggcctccatcaggcagctgtcatcccataaatctttcttcaggttttagcaactgcctcctcccttagcccttcagtcctaaagtcagtaagttaccctgctatcactagctctgaaatattgcagtatcctttgttgattaccacagcctgcctacaactttatagattgtccctttattaagctcttctcaaattacccaatttgagtgttctgtttattttttattgggattccatctgataaaccctgtaaacacaattgcctctggcctttgtggagaaacttattgtataaaattgccactttaagcactgtggaaacaccgaagattaaaaaacaaaagcccaaagccatgtttctgccttctcagatagtgcttctcacactatctgtgataaaggactagtttttaaattattattactgttactttcagtctgtcacagactgatattctggtaagatacagtaacaagaaattaccagaaaaaggaaattwagaaggtatgcaaattaaagcccaattgttatt

SEQ ID NO: 99496 - DNA, 613 bp, Homo sapiens
ttttttgtagagatgtaggtctccctatgttgccaaggctggtctcaaactcctggaatcaagtgatcctcccatcttggcctcacaaagtgctgggatgaccggcaggagccactgtgcctggcttaaacacctacttttgaaatttagaaatttgattaaaaaaatggtgttggaattaaagtttggctagaacttagtaatggtsccctttttttatggtggtttttgggttggtgttggtttttgtagttgttgttgtttgagacacggttctctctgtcacccaggctggagtgcagtggtacgttctcagctcactgcagccttgaacccccaggcttccacctcagcctcccgaacagctgggactacaggtgcacactaccacatgccactactttttctattttttgtagatatggggtcttgccatgttgcccaggctgatgtaaaactcctaggctgaagtaatcctcccatgtccgagtccgggccaacatgtctccctgtaaatattgcagtggcctccaatgtggtctccttgtatctatacttgatccattgctatgtttttccatgctgtgtcgggttcataattttaagacagctc

SEQ ID NO: 99497 - DNA, 626 bp, Homo sapiens
aacagaaatgtctttacacagtatttataggaccaacttactatccctctcctttgtgcaattcccacttatctctgtagtacatcaatgctttatttaaaaaaccactttcaacttcattggcttagtgttaaatttcaaagagaacagactctagggaaaaaagtacctggagaggacagtataaatttaaagggcaagttactttccccaactccctatcctgggccaactggacttgctcttatggcaacttccttaattcaaaaaggctagaaggatgggcatggtggctcatgtctgtaatccagtgctttgggaggccaaggcaggaagatcgctttaggccacgagtttaaaaccggcctgggcaacataatgagaccccatccctacaaacaaacaaccaaaaaaaatacgaaaggctaaaaaacgtaacacttatggtgtactgctaactatatcatttttctgttgaatattttgtttttgattggaatgtaagctttgtgarggaagagaccatggatttcctgctttatttttctgcatctcctaggatggagacctcagtagctttcaaaaatttttattgatcgcctagttaaatgctcaaaatggacagt

SEQ ID NO: 99498 - DNA, 567 bp, Homo sapiens
cttttctttcttcttgcagggcagcagaggatgaaaccccaagcagtcaggtgctggggacgtcattcatcctgatgatcctgatggggttaattcttactagtcatgtctccctcactctgatcaagccaccctaggactccttctcttctattgctttggaaggaggactgttctttctggctccaggagtccacctcccaatctcccagcatgtcccccggagctgagtctgacagatccaggctcttctgctttttctttggggctttctctccacttgtttctcttatacgttctagctcaaacctatgcccaacacagagtaggcactcactaagaatgggtgctggattgttcatcatcagggccaggttgcctttgctgccctcatcaggcccttatacagccagggcattggtggtactctgggcaggctatgagaccctgcttgcctagcrtctgagagatggaaagtccgccaaccagacctgggctgcccaccccttctcctcccctccccagaaaaccccagattccccactgtaaacagttctgtgactgtgt

SEQ ID NO: 99499 - DNA, 624 bp, Homo sapiens
tcccttcttttacattattgtttgtttttattttaattttttaggacattgataaaatcactttctgatttttgagattaaaaattaaataattttcaagtttacactttttaaaatttttcactattttaatgcttttattttttgtatattttaattattgtagtttatatcttcaattattatggaagattttagaaaagtcttttcacataatgaaktctaattatttaactattatttattctcttctctatctcaaatatgaactttaaccttttagaacactttatgttttgagactcttgttactcatgtgacattttaactattattcttcactcttctagtgaatttttaatgtcactcaaagggtacatctttttatagtgagaattaaacagttctcaaaaatattctcaagtattaggaatttcaccttccaatggtatgttaagtatgttctccttcccttctaatccatattccccgccccccaccccctgctaattttgtattttaagtaaagacaaagttttaccatgtggaacaggccagtcttgaactcttgacctcaagtgatccacctgcctaggcctcccaaaatgctgggattacaaaaac

SEQ ID NO: 99500 - DNA, 434 bp, Homo sapiens
atgaattctggaatcttgcaagtcttccagagggaactcacctgtcccatctgcatgaactacttcctagacccagtcaccatagactgtgggcacagcttttgccggccctgtttctacctcaactggcaagacatggcagttsttgctcagtgctctaaatgcaaggagacaacatggcagagaaacctcaacactgacatttgtttgaagaacatggcttccattgccagaaaagccagcctccggcaattccttagctctgaagagcaaatatgtgggatgcacagagagacaaagaagatgttctgtgaagtggacaagagcctgctctgtttgctgtattccaactctcaggagcaccggaatcacagacactgtcccattgagtgggctgctgaggaacgccgggtaagtgatgcctctgaagatct

SEQ ID NO: 99501 - DNA, 434 bp, Homo sapiens
atgaattctggaatcttgcaagtcttccagagggaactcacctgtcccatctgcatgaactacttcctagacccagtcaccatagactgtgggcacagcttttgccggccctgtttctacctcaactggcaagacatggcagttgttgctcagtgctctaaatgcaaggagacaacatggcagagaaacctcaacactgacatttgtttgaagaacatggcttccattgccagaaaagccagcctccggcaattccttagctctgaagagcaaatatgtgggatgcacagagagacaaagaagatgttctgtgaagtggacaagagcctgctctgtttgctgtrttccaactctcaggagcaccggaatcacagacactgtcccattgagtgggctgctgaggaacgccgggtaagtgatgcctctgaagatct

SEQ ID NO: 99502 - DNA, 461 bp, Homo sapiens
gacacgatggcctgcccaaggtcactccactggtgaggaccagagctgacatgcaccaccacacatcccagcaaagtctggcccgatccctgtaaggaatgaggggaattttaagagctcgataaagaggtcgctcccacagagacagacattggctgcactggtctgtgacaacctccataggccaacctaccactcacctgggcctccrgaaccctcagaaaccacaggctcttgcagcaggaggaaactgagaccagcccatgcagcctcccactttacaaatggcaaagtggagaccctgagaagaccagtgatctcccctagggccatagagcaaactggtgggtggacacaggatgtctctggtgccagggatcttcaagaattattttttaaaatgcatgtcaggatctgacagagaacaatgtaaccaacaccattcattcattcattcaaca

SEQ ID NO: 99503 - DNA, 544 bp, Homo sapiens
acaggtgtttacgaagaaggtgggcaataacactcgtttatgattaaaactgaactcaattcaggtacaggaagatggcaaagatggaggggtattgtatgctcttctgtacttcacagaggattcaaagagaaaaattgcagctggactccatcagtgtactacgtgccaggcaatgctgatcactacttccatctatgtgtaaatatartgttttagtaatttattattataaacacactagtgtatatgtatatttttcatgaaagtataggtgatgtcagcctagagcgttctaaatagcatttattggaagtttgtatgtgtgtgtgttttattcattttataaagatgaatgcttttatttcatgacagtattattcatgtctaagtttctgagttttgtggcttcaactcttctctgtgtgtatttaagcttgtttgcactttatatgacagaagagctttgaatgaaattaatttttctttgaggattggtgagcatctattattttggaaactctagtaataaaatatagtgtca

SEQ ID NO: 99504 - DNA, 430 bp, Homo sapiens
acacaccacattagaacatagtacatttaaagagccrtgattattgtaaatacaggggcattttttaagactttggtttttagtgttttaggcttacaaaattgaccagaacttatagagttccaatataccctttttccccaacacatgcagctcttccccagctatcgacatcccacatcatagttacaatcgatgaacaaatattgaataccattatcactccagatccatagtttaacttatgctactttagatacattaaagttcttgatgttgtacattctatgggttctgacaattgtataatgacatttatctaccattatactataatttacagaatagttttactgccctaaaaatcctctgtactccatctattcatcactttctcctgtaacccttggcaaccactgattttttttat

SEQ ID NO: 99505 - DNA, 392 bp, Homo sapiens
agaaaataaatgggagcctcatttgtcttgaccaggagggagcaatagagacataaactgaaggaagcaaattaaaaggagggcaggyagtcattttggagttgtctgtgggctgattgcagatacacacaaaatggagaagcacttccctgcaaggctaagtagatcagaactgagtttgtagatcccagatggaggcacactccactttaccaaaactgcaacctttagaaagagatcaatgaagggactgtagccaaaccgctctcaagaggattcagtgcaaactggttctatttatcttcacactacttgactggggggaataggaagaagatctggttggtgggtgggagaaatgtccccgaaatgataatagaagtcaccagaaa

SEQ ID NO: 99506 - DNA, 510 bp, Homo sapiens
gttatggatttgtttttattaacttccaagttatgtgtagctttacttcaattatttttattgctgtataatatcccttaggttttgcatttattaaacatttagtaytttctttcatcaaactttctgttcctacaaggaatgtgaaaaaataaactctacatttagtcctagggaaaaaaagtcctagatcatgacaaagtttccatttaacctgatatctacacagacacaaacatacctgatggagccagtgacattttctcatagttcgcagtttgagataggaagcttagttaacctgttggttatttggagctcattttggaaggatataaccccaatcctatactgttctctagttttgacacattcagaggtttacattgatctcagcatgtattcctgtctcatgggttgcttactataggggatgcaagtttactaaattacatggatgtatttgttcattctcacattattataaataaatacctgaaactgggtaat

SEQ ID NO: 99507 - DNA, 510 bp, Homo sapiens
gttatggatttgtttttattaacttccaagttatgtgtagctttacttcaattatttttattgctgtataatatcccttaggttttgcatttattaaacatttagtattttctttcatcaaactttctgttcctacaaggaatgtgaaaaaataaactctacatttagtcctagggaaaaaaagtcctagatcatgacaaagtttccatttaacctgatatctacacagacacaaacatacctgatggagccagtgacattttctcatagttckcagtttgagataggaagcttagttaacctgttggttatttggagctcattttggaaggatataaccccaatcctatactgttctctagttttgacacattcagaggtttacattgatctcagcatgtattcctgtctcatgggttgcttactataggggatgcaagtttactaaattacatggatgtatttgttcattctcacattattataaataaatacctgaaactgggtaat

SEQ ID NO: 99508 - DNA, 530 bp, Homo sapiens
aattgacttattttgtcattttaaaatgaattaagacaaatgtattttaatattttcgtttaatttccaatatggtaaatattggtaggcataacccacataggcaaaaactattcacagttctcagacattgtaaaagtgtaaatgggtctcaagaccaaatagttttgagaactgttagcctatagtaaataaagtgtagctcctgaaatttccttgtcagtatacaaaagaaggagttagaaaactcagagaggaggtatccttactaaaatggatttgttatataaaatcagagaatcaccagttcactatgtgtcctgggagggagcagaggacactagaatttattaaagcaataaaaaaatgcacaagtcggggaggcacagtctgtcccctgtaggcttgaatgaatgatggargataccattacaaactaggctccctagtgtcaatatggatgatagaattccagaacagcagagtccaaattatgctacgtaacagtcagaggaaaggtggagatgatt

SEQ ID NO: 99509 - DNA, 530 bp, Homo sapiens
aattgacttattttgtcattttaaaatgaattaagacaaatgtattttaatattttcgtttaatttccaatatggtaaatattggtaggcataacccacataggcaaaaactattcacagttctcagacattgtaaaagtgtaaatgggtctcaagaccaaatagttttgagaactgttagcctatagtaaataaagtgtagctcctgaaatttccttgtcagtatacaaaagaaggagttagaaaactcagagaggaggtatccttactaaaatggatttgttatataaaatcagagaatcaccagttcactatgtgtcctgggagggagcagaggacactagaatttattaaagcaataaaaaaatgcacaagtcggggaggcacagtctgtcccctgtaggcttgaatgaatgatggaggataccattayaaactaggctccctagtgtcaatatggatgatagaattccagaacagcagagtccaaattatgctacgtaacagtcagaggaaaggtggagatgatt

SEQ ID NO: 99510 - DNA, 601 bp, Homo sapiens
tcctcagaaaatgcaaaagaaatgaaataataagaaacaatctcttggaccacagcaaaatcaaattagaaatcaagaatgaaattcactcaacaccatacaatcacatgaaaattgaataactgctcctgaatgatatttgggtaaataataaaattaaagcagaaatcgagaagatatttaaaattaatgaaaacaaagatacaacataccagaatctctgggacacagctaatgcagtgttaagaggaaaattcatagcactaaatgcccaatcaaaaagttagaaagatctcaagttaaaaacmtaaaatcacaactaaaaaaactagagaacaaagagcaaacaaatcctaaagctagcagaagacaagaagtaaccaaagtcacagctcaactgaagaagtttgagacacaaaatttcattcaaaagattaacaaatctaggagctggtgctttggaaaaaaataaaatagactgctaactagactaatgaagaaaagagagaggattcaaataaacacaatcagaaatgacaaggagggatattaccacttaccccacggaaatataagaaaccaccagaggatattatgaaca

SEQ ID NO: 99511 - DNA, 530 bp, Homo sapiens
aagtgatataccttcagaatataatttaaaacagaacaaagtaaactaaactaaactaaamtaaaataaaatgaaataaaaacaaacaaaaaacaaaaacaggatcactaattttaggtgaaagaagaggggtggtaggaggcagtgtttgaacattcatttcctcgtcttcataggagccattcatctactgcctgcaactgagatatttagctaaaaagaaaaaaatgacttaacaacttaaattttgtggtgatcatttaaaatttaatttagatgaatgttttaggtcatggtatttttttgatgaagaaacaattactaaaaatttaacaacaattcatttcattttaatgcagcattgttcacttttaaattttaaattaaaataaaatagcatgtcataattttgaaaatgaaaatagcaagtacaattctattttaataatattagtttgatctcaatctagttatctatacctctatgtttctttatgaatggagatgtctggaactaaggtaacaaattt

SEQ ID NO: 99512 - DNA, 616 bp, Homo sapiens
ctgttttataatctccccactggagataattttacagtaaacattttgcatgcttcttcatgtamctctatgggaatttttctggctaccattcagtaatagaattactagattattgtacatgtgtataatatactatttatcatgcatattcattcattcaacagcgtacttctcctctccatgttgaggatacagcaatgagaaaaattaagtcataccaatttgaaaaaggtgactccaattttcacttctttcaacacttgaggatttccattttctcatccaagcttgatattatatagatacaaaatttacccaatctggtcgtgtgtaaagtgttttaatttacatttctctgattactaaatgttctgaccgcctctttgtataattattacttatatatttttcttttgtgaatcatctggtcataacaaaacattttaacattctatagaaatcttaaacatacacatactgatatggtttggctgtgcccccacccaaatcacatcttgaactgtagttcccataaagcctatatgtcatgggagggacccagtggtaggtaattgaatctcagggacaggtttttcctgtgctactctcctga

SEQ ID NO: 99513 - DNA, 595 bp, Homo sapiens
ctcaccatcccccaagtaggagaattctcctgcctgatggccttggcctttgaaatgagtcattggctcttcctggttctacagtagcttcctgacttcacacttaaactgagacatygactcagacttgggctgatttggatttgccagcctccataattgcataagccaattccttctaataatccttttttattccttatgaatgaatgaatgaatgcaccctagtgactgtttctctagagacccctgactattaattttttttgtttttttttagatggagtctcgctctgttgcccaggctggagtgcagtggcacaatctcagctcattgcaacctctgcctcccaggttcaagcgcttctcctgcctcagcctcccaagtagttgggactacaggcatgtgccaccacgcccagctaatttttgtatttttagtagagacggggtttcaccatgttggccaggatggtctcgatctctggaccttgtgatctgcccacctcagcctcccaaagtgctgggattacaggcatgagccaccatgcctggctattaattttttaagtgatcatttacacagcaatgttgg

SEQ ID NO: 99514 - DNA, 595 bp, Homo sapiens
ctcaccatcccccaagtaggagaattctcctgcctgatggccttggcctttgaaatgagtcattggctcttcctggttctacagtagcttcctgacttcacacttaaactgagacatcgaytcagacttgggctgatttggatttgccagcctccataattgcataagccaattccttctaataatccttttttattccttatgaatgaatgaatgaatgcaccctagtgactgtttctctagagacccctgactattaattttttttgtttttttttagatggagtctcgctctgttgcccaggctggagtgcagtggcacaatctcagctcattgcaacctctgcctcccaggttcaagcgcttctcctgcctcagcctcccaagtagttgggactacaggcatgtgccaccacgcccagctaatttttgtatttttagtagagacggggtttcaccatgttggccaggatggtctcgatctctggaccttgtgatctgcccacctcagcctcccaaagtgctgggattacaggcatgagccaccatgcctggctattaattttttaagtgatcatttacacagcaatgttgg

SEQ ID NO: 99515 - DNA, 575 bp, Homo sapiens
gctgcgaatgtctgaatgattgtaaatcacaaaggattccgtaacactaatgctctcttctgaatattggtacctcagattggattccagaacacagcagctgggttctgagtgtttgtccctcagaaaggattctagaacactcctacgagggtctgaaagtttgtccctcacataggattccagagcactactgctatcaactgaaaatttgaccctcacataggattccagaacactcctgctgttgtctgtgcctcacttggtattccagaacaatcctgctgcagtctgaacgtttctccatcacataggattccaaaacattgcttctgttgtctgagtgtttgtcccaaaatagaattccaggacactgctgctgggttgtgactgtttgtccctcacaaagcattccataacactgctgccgtcgtctgaatgtttgtccctcagatacrattccaaaacattcctgctgtggtctcaatatctgttcctcccttaggattccagaacaaagctctgaggttctcagtgtttgtctcacacttatgattccagaacgctgctgtgtg

SEQ ID NO: 99516 - DNA, 497 bp, Homo sapiens
cagaacactactgcagtggtctgaatggttgatgctcacataggattccagaacactcctgctgtggtctgggtgtttgtgcctcacatgggattccataacaatcctgctgtggtgtgaatgcttctctgtcacataggattacaaagcattcttgctgtggtctgagtgtttgtccctcacatagggctccagaacattcctgctgtcgtgggaatgtttctccctcacttatgtttccagaacactcctgctgtkgtctgaatgtttatccctcacttaggattccagaacactgctgttgggttctgagtgttttgtgcctcacatacgattctagaacacttctacattggtctaaatgctcgtccctcacatagggctccagaaaactactatgagggtctgaatatttgtccctcacctaagactccataacactgctaagagagtctgaatgtttgtcccgcatgtagaattccagaacactcctgctg

SEQ ID NO: 99517 - DNA, 554 bp, Homo sapiens
ttctgctgtgatctgtatgtttgtccctcacataggattccacaacactgctaggagggtctgaatgtttgtccttcacataggattccagaacactgctgctggggactaaatgttattccttcaaaaaggattccagaacacttctgctggggtctrgatgttttctccctcacataggattgcttaaaaatgcttctaggctctaaatgtttgtccatcacagaggattccagaaccgttctgctggtttctgactgtttctcccacatataggtatccagaacactgctgcaggggtctgaatgtttatccatcatataggattaaagaacactcctgcttaggtctgaatgtttgcccctcatataggattccagaacaatgcttctggcatctgaatgtttgtcgctcgcataggattccacaacactgctgctggtttctgagtgtttggccttcacataggattccagaacactgctaccagggtctgaatgtctgtctctcacataggattccagaacattcctcctgtggtatgaatgtttgtc

SEQ ID NO: 99518 - DNA, 554 bp, Homo sapiens
ttctgctgtgatctgtatgtttgtccctcacataggattccacaacactgctaggagggtctgaatgtttgtccttcacataggattccagaacactgctgctggggactaaatgttattccttcaaaaaggattccagaacacttctgctggggtctggatgttttctccctcacataggattgcttaaaaatgcttctaggctctaaatgtttgtccatcacagaggattccagaaccgttctgctggtttctgactgtttctcccacatataggtatccagaacactgctgcaggggtctgaatgtttatccatcatataggattaaagaacactcctgcttaggtctgaatgtttgcccctcatataggattccagaacaatgcttctggcatctgaatgtttgtcgctcrcataggattccacaacactgctgctggtttctgagtgtttggccttcacataggattccagaacactgctaccagggtctgaatgtctgtctctcacataggattccagaacattcctcctgtggtatgaatgtttgtc

SEQ ID NO: 99519 - DNA, 554 bp, Homo sapiens
ttctgctgtgatctgtatgtttgtccctcacataggattccacaacactgctaggagggtctgaatgtttgtccttcacataggattccagaacactgctgctggggactaaatgttattccttcaaaaaggattccagaacacttctgctggggtctggatgttttctccctcacataggattgcttaaaaatgcttctaggctctaaatgtttgtccatcacagaggattccagaaccgttctgctggtttctgactgtttctcccacatataggtatccagaacactgctgcaggggtctgaatgtttatccatcatataggattaaagaacactcctgcttaggtctgaatgtttgcccctcatataggattccagaacaatgcttctggcatctgaatgtttgtcgctcgcataggattccacaacactgctgctrgtttctgagtgtttggccttcacataggattccagaacactgctaccagggtctgaatgtctgtctctcacataggattccagaacattcctcctgtggtatgaatgtttgtc

SEQ ID NO: 99520 - DNA, 659 bp, Homo sapiens
cacacatatcattgtgcctggctaaaacacctagcttaaagatgctcattcagctaaagaagaacatagaaagctaaacagaaaaagaaaacaattcatgaagataatgagattatcaatgaagtgattaaaagtacaaaatagaaacataaagtgtggagctgaaaaataaaatacctgaatttagagattcactagaaggtccaacaactggtttgatctagcaggaaaaaatccagcaagcttcataagaagtcttttgaaattatatggtgaggagggtaaaaataattttaaaaattaagaragcctaagggacttatgggataccattaagatggccaatatacttctaatgggaattctaaaataaaaagagagaaaagagagcagcaaagttatttcaagaaacaaacagtggctgagaactctcaaaatttgaaggagaaaatggcctaaaatttaatgaaactttaccaactagtagcaacacagggagacccatgacaagacacattttaatcagagattcaaatgttaaaacaccgagaatcttgaagtcagcaagaaaaaatgacttagcatgtacaatgttacccctataggatgaccagcagatgtctcagccaatagcatgcaggcaagaggttgtaggatga

SEQ ID NO: 99521 - DNA, 659 bp, Homo sapiens
cacacatatcattgtgcctggctaaaacacctagcttaaagatgctcattcagctaaagaagaacatagaaagctaaacagaaaaagaaaacaattcatgaagataatgagattatcaatgaagtgattaaaagtacaaaatagaaacataaagtgtggagctgaaaaataaaatacctgaatttagagattcactagaaggtccaacaactggtttgatctagcaggaaaaaatccagcaagcttcataagaagtcttttgaaattatatggtgaggagggtaaaaataattttaaaaattaagagagcctaagggacttatgggataccattaagatggccaatatacttctaatgggaattctaaaataaaaagagagaaaagagagcagcaaagttatttcaagaaacaaacagtggctgagaactctcaaaatttgarggagaaaatggcctaaaatttaatgaaactttaccaactagtagcaacacagggagacccatgacaagacacattttaatcagagattcaaatgttaaaacaccgagaatcttgaagtcagcaagaaaaaatgacttagcatgtacaatgttacccctataggatgaccagcagatgtctcagccaatagcatgcaggcaagaggttgtaggatga

SEQ ID NO: 99522 - DNA, 580 bp, Homo sapiens
tattttgtccacaatcagagaccatttgacatcatcctttcaattagtatgacttttatttcttcctcttgcctaatttccttggctaggacttccagtactatgttgaataagagggctgaaagtttggacgatttgtcttgttccagatctcagagagaaagctttcaacttttccttattcagtataaagttagcattgctttttcataaatggcctttattgagttaaggcacataccttctattcctaacttgttgagagttttcatcataatcaaggctgaatttcatccaattcttcttctgcatatgcaaaagctacaaaaatgaaaatacttaatgtgatggctaatacagggtgtcaaattgattggattggaggatagaaagcattgatcctgggtgtgtctgtgagggtgttgccaaaggacattaacatttgagtcagtgggctgggaaagggagatccactcttaattgggtgagcaccatctaatgagctgacagtgaatataaagcaggcagaaaaacgtgaaaaasagagactggcctaagctcccagactacatctttctcc

SEQ ID NO: 99523 - DNA, 515 bp, Homo sapiens
tgatattcagttatagcagccaaaagagactaaagcagacagagtggataaattaatcgtttaaacctcgtaatatgctgcttacaagagactcaattatgaattaagagcataggctaaaagtgaaaggatagaaaatgatattccatgcaaacaataaccaaaggagtgcaacggtaatgcttaaattagacaaaatagactttctagcaatgtctctcacaagcatgaaatgagtttaccatasaataataatagaggttaatttctcaagagaatatagctttatatatttatgcacccaaaagggaggcttctaaatataaaaagcaaatattgccagaactgtagggagaagtagaaagaaaccaaataatagaaaactttaatgaaatgtataataaaggacatatagttaacagcattgtaaattggcaagggaaagctggtctcatgtgttgcatttgagaatgcagcaaagaaagtgggaactgataattttactgcaagcctga

SEQ ID NO: 99524 - DNA, 489 bp, Homo sapiens
gactgcaggccagcaagcaagcccaagaagctcagctctagtcacctctggctgtactttatgtgtatacattacataaaggtagcaaacagaggtcaacaatagctgttgtgatatgaaagtctatgcctcattaagaccttaaaatgctgttgtcttaagctttctttattctaataaaatttatacaaataaacacatgcaagctgaaactactataaatgaaatattaggattttttaaacccataaacagacacaaagacagtcactgtttgattgcagagaaagtgagattctaaagcagctgaccasaaaacagcctcaccaaaccccaggcaggccaggcagtctgaacactacaaggccacgtgatggtcacagaggatgacagctcccgtgagtattgcaaggcactgtgttagcttctcactcacagtctcagaataccctgtgaggggaggccccatctcactagagcacaggaggt

SEQ ID NO: 99525 - DNA, 390 bp, Homo sapiens
gaattctgtctagtacccagaaggaagggggttcccagtgaaggcagggccaggctgcatgcacctcttcaaaaatgttctcctcatagtccacgctcaaggtgtacatcctctgtgtgcttgcagtccatggcagcctctgccttgggaacmgtccagctgcacacctgcaatatggtggtgaccctcttgaatggatggttctgggccccattgcagacagcagatagggagatgctcagcccatcaagcccagagccctgccacaggcttctgtgaggcctccacctgctctgggttcttgccctgagaggctgccctgaagtcaaacagaagcaggtgggactctcttccacagctgctctctctcccactgacagctccctagag

SEQ ID NO: 99526 - DNA, 409 bp, Homo sapiens
agccttacccttttgtgtaaggaaagaagcaatgcatcagtagcataatttaaaactttctctagtattacttaaatatttattccttaaaactttctcatcacatctctttttaataattataatatggtttctttgaaatgttgttgccytaattgtatccaaataattcaaaatttatactttttatggattcaaaggaagagttgaaaattgtagttacctaggattctttttcagttggacactatgtttattcaggattttatagatcaaagtttctcttaattatgttttagaatttatgtttctgtattttttagagtaggctgtctcacagcagttaattgtgtttttactttctacctatttattatgattttgaattacattattcaagtaagaattc

SEQ ID NO: 99527 - DNA, 564 bp, Homo sapiens
acctcactgattctgtaacccccaactaatccaccctatagtccctagatgaccagagatgcctattatcctctgctttttactgtcactctccccagtccagcaaactcattcctcttcctgcataagcctcctgtgtttctgcctttttttatctgcaccctctgctgagattcttttgtcttcacccatcccaaagccatccatacttccactgcttgactaggggtaattatctcattcacccagcctaatttttaamcttaccttcctgctcccaccctctcttcactctgaacaagattttactaggttgttgttatgttctggggttcggagaatctgactagtgtgagtttcccaaggtaaaggtaatgccttaataattttcactttaattgctgtttgcgcagtgttttgcacaaaatttaacacaataattgctcccagagtaaatgtataaatctttgcaatgtctgatttgactcccttagagtttggatcttttcccctacaaccatccagagtcctgtctaaccaaagtgaaaatggggaactccctct

SEQ ID NO: 99528 - DNA, 601 bp, Homo sapiens
cacacatttggaaaatgcatgagaaaactagttcccttttggagtgttaaaataactaaaaaacaggtgattatgttgaggtggctctagtgtcctgagctctgagtggagagacaggccaaggcctccgtacttccaaaaagctgcccattcttctccagctgtgcacctgattagatagtttccactccaagacccatgattggatgtagttcaattccctaccctgccgcctcagaccatgagtgacatatgtgatttgacactgggttgaataaagcaagaattataggtttttcctggatccttttctrgcagggcttcctctgtgaactagaaactggccctgcctgtaaaatatttgcatttacatttgtatgtaagattatttgtattaatgaataatatatatgtgttattcatatatggaatcaatataatgacaattgttttaaaatttcagatgttttactttcctggcacatccaggttttagagcaggcagcctgagatttcaaaagggaggcaattctctaagaaataatatgagaggcacaagtgaattttaaatattctggtaactacattttaataaatacac

SEQ ID NO: 99529 - DNA, 491 bp, Homo sapiens
cttccaaaaagctgcccattcttctccagctgtgcacctgattagatagtttccactccaagacccatgattggatgtagttcaattccctaccctgccgcctcagaccatgagtgacatatgtgatttgacactgggttgaataaagcaagaattataggtttttcctggatccttttctagcagggcttcctctgtgaactagaaactggccctgcctgtaaaatatttgcatttacatttgtatgtaagattatttgtattaatgaataatatatatgtgttattcatatatggaatcaatataatgacaattgttttaaaatttcagatgttttactttcctggcacatccaggttttagagcaggcagcctgagatttcaaaagggaggcaattctctaagaaataatatgagaggcacaagtgaattttaaatattctggtaactacattttaataaatayaccgggcatgcttccctgtgcctg

SEQ ID NO: 99530 - DNA, 593 bp, Homo sapiens
ggtggcacagaaatctgcgatggtgaaaaaaccaggttgccactgcagattcggtgtctgaagtagaacatatgccaggggtcttgtaggcacgtgtgtgggtttttggtgggaaagtctatgaggaaaggtaggatgggcaacaatcttgatgccaaagccttgtcctgagaggggcttgaccacgtcaacatgcagtgtgtatgttcagtgggtgaaaaacatgtggtgrcctcaggttggcaggagggtagaaggcatctgttctcagaacttcttccctcagagtcgtcggtccttcttaccatgggaggatgcctggaaccacagggcagtgcatggcgtagcagcctgtgtgcagagcagaacctaccttccccgagacacctggagtctctctccagcaaaggcccccacattgtctttctccttacaacacttttgatcctaaatgtgtaaagttccctgaaaacccactgcttctccaacacccatttcttgccccaaaatttaattctgacacaacttagagttcgcacagatcccacaaattcagggctaagtcccacatcacccctctcactgcagaggtt

SEQ ID NO: 99531 - DNA, 593 bp, Homo sapiens
ggtggcacagaaatctgcgatggtgaaaaaaccaggttgccactgcagattcggtgtctgaagtagaacatatgccaggggtcttgtaggcacgtgtgtgggtttttggtgggaaagtctatgaggaaaggtaggatgggcaacaatcttgatgccaaagccttgtcctgagaggggcttgaccacgtcaacatgcagtgtgtatgttcagtgggtgaaaaacatgtggtgacctcaggttggcaggagggtagaaggcatctgttctcagaacttcttccctcagagtcgtcggtccttcttaccatgggaggatgcctggaaccacagggcagtgcatggcgtagcagcctgtgtgcagagcagarcctaccttccccgagacacctggagtctctctccagcaaaggcccccacattgtctttctccttacaacacttttgatcctaaatgtgtaaagttccctgaaaacccactgcttctccaacacccatttcttgccccaaaatttaattctgacacaacttagagttcgcacagatcccacaaattcagggctaagtcccacatcacccctctcactgcagaggtt

SEQ ID NO: 99532 - DNA, 484 bp, Homo sapiens
tgacctgtgttcccgtgagaggwtgacaatagttactgttggctgggtgtgcatatgagtgtcacaatctcacctgtgtgctcggcccagttagcacgctctgtgtactacccaatggccctatactctatgcatgagagtcgtaatcaactttgacaccttcctaatggtagggacccatgatcgtacttgtagcattaagcccggtatgagagtcaacatcattacaattaactaggtcaggataggagagtcctcccttgcctatgagctgagtttagatgtgggccaccatttcaactctggttgaatgtttatatatgaacacgggcctaacactgaggtgatgtgagtctttggcctagacacttcaagcaggaggcaaagtgacatatctctgggtctatcaactatttgatgtgaccttccttttttacctgagctttccccataaaagagatgtgacatatgtctagacaaagca

SEQ ID NO: 99533 - DNA, 642 bp, Homo sapiens
aatctcacctgtgtgctcggcccagttagcacgctctgtgtactacccaatggccctatacwctatgcatgagagtcgtaatcaactttgacaccttcctaatggtagggacccatgatcgtacttgtagcattaagcccggtatgagagtcaacatcattacaattaactaggtcaggataggagagtcctcccttgcctatgagctgagtttagatgtgggccaccatttcaactctggttgaatgtttatatatgaacacgggcctaacactgaggtgatgtgagtctttggcctagacacttcaagcaggaggcaaagtgacatatctctgggtctatcaactatttgatgtgaccttccttttttacctgagctttccccataaaagagatgtgacatatgtctagacaaagcacctgggtgatgtgactctcctttattgactgagccctgtgtattttgggtattctgacgtatccctggacctaacttctggaagataagaagatccaacatgggccctgcctaaaaagtttcttgtgacaaatttctacatgaatcaccttggagatttgactctcctctcttacccgagttttgcccataagagagattgttacgtacctctgcagcaagca

SEQ ID NO: 99534 - DNA, 484 bp, Homo sapiens
tgacctgtgttcccgtgagaggatgacaatagttactgttggctgggtgtgcatatgagtgtcacaatctcacctgtgtgctcggcccagttagcacgctctgtgtactacccaatggccctatactctatgcatgagagtcgtaatcaactttgacaccttcctaatggtagggacccatgatcgtacttgtagcattaagcccggtatgagagtcaacatcattacaattaactaggtcaggataggagagtcctcccttgcctatgagctgagtttagatgtgggccaccatttcaactctggttgaatgtttatatatgaacacgggcctaacacygaggtgatgtgagtctttggcctagacacttcaagcaggaggcaaagtgacatatctctgggtctatcaactatttgatgtgaccttccttttttacctgagctttccccataaaagagatgtgacatatgtctagacaaagca

SEQ ID NO: 99535 - DNA, 236 bp, Homo sapiens
caaaatgcacatgctttctagaacagaaagtccttaatgaggataactttgcttgaataagcccaattacaatgcgaatgctayggcttattgtgttggctgtacagtcaccatggtttctgtatcctgagatcatggtcattttctgtactatctattctgcctcaatttccccctaagagattttagggcaataatcatattggaggttgaggggttaggccattatttctgga

SEQ ID NO: 99536 - DNA, 550 bp, Homo sapiens
gctcacaaaactcacgccttggaaagcgggttttctcccttgctcttagattttctgcaacccattaaactaacttcctgatgcctcgactttcacattcgtgaaaaaggcgccattgagagtgacgtttccaggaaggctcagcccttgtcagcccctgcagagctctgaagctgttcacaagcaggccatgtggaagatttctctcaaaagccattgagcacgcgctctggctagagaaaaaagagggctgctgcacaatggacagtgtctcagacatcaggacagtttccacagtagtttaggaaaraaggcagtgccctgagctgcagaaggtgcaatgctctggaaggaaccctgggtgcagctgaaagaggaacctgagaagcatagggccaatcgggtgaggataacccgcctgatttgggcaaaggtaaggtgcctacatagggtaataccctcctcaatgctcagcccagacctgtcctccaggtccacctctgtactcactctctgtggcaaagagtcggcatagcataagaactcagca

SEQ ID NO: 99537 - DNA, 588 bp, Homo sapiens
gtgggctagcttgaagcgagcttacagtggcgtgaaagcaggaatacagaggcaggacaaagacaggattgcacatgaccgttgccaagcaacccacatgtccattatctaggtttccctgggcatgggcttatcctataaccctcactatggtkcccaaacagctgtagttcagcctactcaggcttctcatgactttcattgtacttcttcgataaaacacaatacttgaagtcactagttacagagaacaagaatctataaactcattccataaaacaaagggaatttgtttttcttttccctgtgttgggggagtgttgggagaacctccagagcacattacataatattatcaagaattttcctgggtctgggctgtgcctattgctgcctctgggacaaatcagcctaatacaagaaaacttatttctctttccttttaatttcatttttctttaatttccttccttagtcctgcagccctgtgaccaaaggactgggagtgcacagttacacatctgttcacttgtcatgagactgttttcctttaaccccatgaacatacttaccatagcttctttcaaa

SEQ ID NO: 99538 - DNA, 395 bp, Homo sapiens
gaattctgttgtttgtgtaatctctattgcatttatctctgctaaaatcttcaatactttcttctttctctttgctttgcatctaatttggtgttatttttctaatttactaggtgataaagttattatttatttgaaatctttgctctttttaaatgtatcttagctgcaaacttttcatcttaacactgtttttgctgtttcccataacttttgatatgttttgttttcatttttcttcctctgtatgttcctacttcttccgtgatttcttcctttacttaatttatacaattttgtaattctttaagttgtaattgtgtagttgtttwatttatacaattttgtaaactttctagcatttcatctgttattgatttaatttgagatctact

SEQ ID NO: 99539 - DNA, 601 bp, Homo sapiens
ttggccttttggactcagagctatcttgacactactactggttacactgatttgaaagtcagctaagagcttgctacagaactcctgacaaactaagtttgacctatagagggctagggcatccccagctggttgaaattttgtgcctccttctatcctctgaagcaaagctgctgtctctgtggggcccccaatttactgagtgtttcctatatgactggtcctggttcatagatgagtcagggaaggtgaaacctcatgatgtccactgggccgctgtggctgtttaacctgtgccagccatacagaacctgacatgagtggttgctcctctcaaaggtcagaactcagggtttgggataatggcacatattctatctgtttggttatctacaatggaaagtgtagactstctgaatatcttttgggctgcaaaccggaaacaaccccagatgctgatctaactgggtcactcatctagaagtccatggtaagtgttttccagagagtgaccacaatcaagctgcagattgaacctaaatctgtgtccaacccagagtctaatactgcaaaccagacttggggttgctggtgaaagttg

SEQ ID NO: 99540 - DNA, 618 bp, Homo sapiens
tttcagagaaatctctatttcaatctattcctatactttagttattgaaaaacaacagacaacggcaaaagcaaattgacctttttgtgttcctttgtgcatggatgagtggctgactctggagcccaggctgttgcttctcggtctggtgatgaatcctscatagtctatcctcatatatatatatacacacacatttttttccttctccccttcccactgcaatttgcttattgtatcaatttgcttattctatcatttgcttattatatctgcattgccatttatgtgggatcgagtttgttgacctttaaaggtattgtgtgtgtgtgttttcttcttccctggagcatctcctgtacataacacctctcttgctgtcatagccagaaattcagtttttaagtttttttctggggtcttcttgctcaagaggaagtatgttcagttgatacggggcttagaattttatttatagcttttattacattctaaaacccccagcagaaacaagtcttaacaaacacagattttaatttctgaacattcttctaataagttttgcacaggtagcggaacaactaaaaaaactgttttttgcattgatggtctacctca

SEQ ID NO: 99541 - DNA, 630 bp, Homo sapiens
tttcagagaaatctctatttcaatctattcctatactttagttattgaaaaacaacagacaacggcaaaagcaaattgacctttttgtgttcctttgtgcatggatgagtggctgactctggagcccaggctgttgcttctcggtctggtgatgaatcctccatagtctatcctcatatatatatatacacacacatttttttccttctccccttcccactgcaatttgcttattgtatcaatttgcttattctatcatttgcttattatatctgmattgccatttatgtgggatcgagtttgttgacctttaaaggtattgtgtgtgtgtgttttcttcttccctggagcatctcctgtacataacacctctcttgctgtcatagccagaaattcagtttttaagtttttttctggggtcttcttgctcaagaggaagtatgttcagttgatacggggcttagaattttatttatagcttttattacattctaaaacccccagcagaaacaagtcttaacaaacacagattttaatttctgaacattcttctaataagttttgcacaggtagcggaacaactaaaaaaactgttttttgcattgatggtctacctcattacaatttaac

SEQ ID NO: 99542 - DNA, 630 bp, Homo sapiens
tttcagagaaatctctatttcaatctattcctatactttagttattgaaaaacaacagacaacggcaaaagcaaattgacctttttgtgttcctttgtgcatggatgagtggctgactctggagcccaggctgttgcttctcggtctggtgatgaatcctccatagtctatcctcatatatatatatacacacacatttttttccttctccccttcccactgcaatttgcttattgtatcaatttgcttattctatcatttgcttattatatctgcattgccatttatgtgggatcgagtttgttgacctttaaaggtattgtgtgtgtgtgttttcttcttccctggagcatctcctgyacataacacctctcttgctgtcatagccagaaattcagtttttaagtttttttctggggtcttcttgctcaagaggaagtatgttcagttgatacggggcttagaattttatttatagcttttattacattctaaaacccccagcagaaacaagtcttaacaaacacagattttaatttctgaacattcttctaataagttttgcacaggtagcggaacaactaaaaaaactgttttttgcattgatggtctacctcattacaatttaac

SEQ ID NO: 99543 - DNA, 566 bp, Homo sapiens
gctttgggctgaattacaccaccaacttccctggttctctaacttgcagatcatgggactccttggcctccataactgcatgagccaattcctatactaaatctcttcatatatgcaygtatatatatacagctggccgtctatgtccatggattctgcatccatggattcaaccaaccacagatcaaaaatatttgagaaaaaaatgcatctgtactgaacatgtatagacttttgtttcctgtccttattccctaaataaaacaactatttatgtagcatttacattgtattaggtattataagtaatccaaagatgatttaaagtatacaggaggatgtgcatagggaagatggcaaatactatgccattttatatcagggacttgagcaactgcagattttggtatccaagggagatcctggaaccaatcccacacagataccaagagatgactatatatatagaattggttctgtttctctagttttttgttccactacacacagatgagtaattggaaagggaagagtatattaacagccttttcagatcatggtgaaga

SEQ ID NO: 99544 - DNA, 566 bp, Homo sapiens
gctttgggctgaattacaccaccaacttccctggttctctaacttgcagatcatgggactccttggcctccataactgcatgagccaattcctatactaaatctcttcatatatgcacgtatatatatacagctggccgtctatgtccatggattctgcatccatggattcaaccaaccacaratcaaaaatatttgagaaaaaaatgcatctgtactgaacatgtatagacttttgtttcctgtccttattccctaaataaaacaactatttatgtagcatttacattgtattaggtattataagtaatccaaagatgatttaaagtatacaggaggatgtgcatagggaagatggcaaatactatgccattttatatcagggacttgagcaactgcagattttggtatccaagggagatcctggaaccaatcccacacagataccaagagatgactatatatatagaattggttctgtttctctagttttttgttccactacacacagatgagtaattggaaagggaagagtatattaacagccttttcagatcatggtgaaga

SEQ ID NO: 99545 - DNA, 442 bp, Homo sapiens
attttataaagttactgccaacactaattagcgaatatgggatcattgcacctagaggaaatacagggttatttccggtgaggctctgttcacaacattttcatcaacagatcggcacataatcctattttatgcatatttctgtctagagataccttatttaccatayactcttgattcattagcattaaactcccaaccaatggcactaactcatgcctgaaagaagcttattgaatgcccatattttctccataaggcacagctttttgggcttaggaacactagacagcacttcggcattttgcttcaggcaattttaaacagcgaaatcaccaacgaaatgcacaaacgtgaaaaatgtgacgctaaatattctgcgaaaaggacacatttatagtatgagagttgaaacaggaaggcagagcattgccttgtttaa

SEQ ID NO: 99546 - DNA, 499 bp, Homo sapiens
ttaaagttccaaatgtgatttctcagttacagggtgatatcaggataccccactgtgggaaggttggccggccgtctcccaaatggcctgacagtgtatcatttattaccttacaaatttacaatcatcagtagttggataattagmctggtgagctcagacctgactttgtcaacacatcatgccatgcgtctctcagggcaggctcatgctaattacattcaaaaggctgatataaaacatcagaatgccaagttattcacttctcgtaagaaaccatctttagaaggacaagaatatccgaagtttctaggatcaatacattctttccctgtaggagctaaacagtaatcaggagattacttgttgagtgtgacatcagatcaaagagaattggataagccaaaggtatgcagtagcaaagtaagctactcagtacatctttcatgtcacacagagatagtcttacagacagaatgtgaaggcacaaacacaagag

SEQ ID NO: 99547 - DNA, 567 bp, Homo sapiens
gaaaactgagcttagttttcattaggttgttactaaaattcatttggcagtaacacctgacctgaagtgacctgaggatattgataaacttaatatgcttatctgtgtagtgtgcctattcataagtttactgcaggaatattggtgtatatgattgcaaggtatttggttaccctgctggagatattacataatgtattatggtagatgtacaatatatgaaaaatcttggccgggcacggtggctcacccctgtaatcccagcactttgggaggccgaggcrggcagatcacctgaggtcgggagttcaagaccagcctgaccaacatggagaaaccctgtctctactaaaaatacaaaattagccggggtggtggcacacgcctgtaatcccagctactcaggaggcttaggcaggagaatcgcttgaacccaggaagtggaggttgcggtgagctgagatggagctattgcaccccagcctgggcaacaagagcaaaactccgtctaaaaaaaaagagagaaagaaagaaaacagaaaaggaaagaaaagaaagaaaagagct

SEQ ID NO: 99548 - DNA, 614 bp, Homo sapiens
  misc_feature (1)...(614): n = A,T,C or G
catcccattggccagaacttaatcacatggtcgtacctggctgaaggaaagcctgggaaatgtagtcttttattctggtagtccatgcgacsagctaaaaatattcctaagaagaacaaggaggggagaatggattttggttggcaaatagcagtctctaccatacccctccttcttcagctccagggaaacaagtcctggttggttctttgtagccattggcttcccaggtttatgaagttccatttctaggaaaagtggcaaagcaggatctcccagaaattctcaggattctgtgaaagactgaaaatcagaatctttggtgtggaggtcacaatgataaaaatacctgccatttatttggggcttactatttgtttgctaggcatatgttaacatgcattctcttatttaattttcagatgaatcctagggggcaggtatgataactaattctaaatntacaaaccaagttttccaaagaggtgaaacaacttcccaaggttgtacagcgattacagggtgaagctgccacctgtttatcttagtgcactggagcctgaggtcattgcccactcagtttgatgccagacagaccagagttgctcattacc

SEQ ID NO: 99549 - DNA, 606 bp, Homo sapiens
attatggggcatttctcggagagagggacgtggcaggacaatagggtaatagtggagagagtgtcagcaggaaaacatgtgagcaagtgcctctgcatcgtaaacaaggtaaagaaaaaagtgctgtccttttgatgtgcatatacataaacatctcaatgccttaaagagcagtattgcctccagcatgtctcacctccagccctaaggcagttttctcttatctcagtagatggaatatacaatcgggttttacactgagacattccattgcccagggacgagcaggagacagatgggtttgtcttatatcaactgcaaagaggccttcctcttttattaatcctcctcagcacagaccatttacaggtgtcgggctgggggatggtcaggtccttcccttcccacgaggccatatttcagaatatcacatgckgagaaaccttggacaatccctggctttcctaggcagaggtccctttggccttccgcactgttttgtgtccctgggtacttgacagtagggagtggtgatgacttttaacaatcatgctgtcttcaagcatttgtttaacaaagcacatcctgcatatccctaaatccatt

SEQ ID NO: 99550 - DNA, 593 bp, Homo sapiens
ttttagtttttcttgcttaattatttgatgtaggacttaattgttctactaggacttccagttctatgttaaaacagaaccgttagaatgggcataatatagacttgcattggtgtttgcacatttgaaggagaaaacacctcgtttcattttttgttgttgttgttgttgttttgtttttgagacggagtctcgctctgtcacccaggctggagtgctgtggcacgatcttggctcactgcaacctccacctcctgggctcaagcaattctctacctcagcatcccaagtagctgggattacaggsgccaaccaccatgcctggctaattttggtatttttagtagagacagtgtttcaccatcttggccaggctggtcttgaactcctgacctcttgatccacccacctcggcctcccaaagggctgggattacaggtgtgagccactgtgcccagccacctctgttcatttttataaactgattttagtaggtaaagatcttcatctgttgggtctcaaggctgatgagatctttactgggtttgcagtaaaaaggctcgtagctgtgtcacaatgtggctgccgaatct

SEQ ID NO: 99551 - DNA, 593 bp, Homo sapiens
ttttagtttttcttgcttaattatttgatgtaggacttaattgttctactaggacttccagttctatgttaaaacagaaccgttagaatgggcataatatagacttgcattggtgtttgcacatttgaaggagaaaacacctcgtttcattttttgttgttgttgttgttgttttgtttttgagacggagtctcgctctgtcacccaggctggagtgctgtggcacgatcttggctcactgcaacctccacctcctgggctcaagcaattctctacctcagcatcccaagtagctgggattacaggcgccaaccaccatgcctggctaattttggtatttttagtagagacagtgtttcaccatcttggccaggctggtcttgaactcctgacctcttgatccacccacctcggcctcccaaagggctgggattacaggtgtgagccactgtgcccagccacctctgytcatttttataaactgattttagtaggtaaagatcttcatctgttgggtctcaaggctgatgagatctttactgggtttgcagtaaaaaggctcgtagctgtgtcacaatgtggctgccgaatct

SEQ ID NO: 99552 - DNA, 559 bp, Homo sapiens
ttagcaacataaatcaagctatccatcttttttttcctagtccacctttccatgttggtaatattgtcagcaacctctgctttcaaagaaaagtgaacctggaagcctgttgrgtcaggagtaaaaagaaataacctaattaaagagttgtagagaaagactttgaatcttctagaagtaaattttgctacatggatgctacttagagaaaatggagaaaattgttgataacactaactactattagttccagtcttttgttttattctgctcattactcctcccccacgttatagccatcatataacacaggtgcttgactaacttggaattacaatgttttccacgagatatgtttcattcaaacttttaaagatgtttacctttttgttagcttgtatgaattatttttattttatttaaatggacatagattatcctgataatacattagcacagataaaataacaaaaaaagaaacaaaatgaaaatcccccctataattttgtctaccattctaaataaattttacatgcctatataagcctttttttcttaa

SEQ ID NO: 99553 - DNA, 605 bp, Homo sapiens
aaaaaacagcaagagaaaatgaacacataacacacaacagagcttaatacctctggctggagacttttcagtggaaatctaaaaagagccaggagacagtggcatgacatatttgaagttctgaaggaaaaaaaatcaccctagaacagtatattcagtataaatacccttcaagcatgagggagaaataaagaccttccaagacaaacaaaagctgagggattttatcaatatcagagatgtcctacaagaaatgctaaagagaattcttcagtctgaaagaaaaggatgttaataaacaagaagaaatcatttgaaggtataaaattcactggtcatagtaagcacagggaaaacataagatagtataacactgtaatggtggtgtgcaaattactcttgacttcactagaaagactaaatgatgaaccaatcaaaaataataactaccacctttcaagwcataaacagtaaaataagacataaacaaaaaaagctaaaaactagggggactaagttaaagttattagttttccttttgagtgtttatttgcagaatcaatgttaacttgtcatcaacttaaaataatgggttataagatagt

SEQ ID NO: 99554 - DNA, 564 bp, Homo sapiens
gaaatgaaaataaccaatataaagtcaagaaattaatcaaattttccactcatggaagaaaattttctggtgctaatgtatggttaatgttgaagtagagagctgtacataacacaaaaagataactctccctctaggagaaaaaagatatttattaagtttatagaaaaagataacaatttcacacataaattatccgattgtattgttaggaaaaaaacaatgtcctttcatataaattacattctccttacctggaaggcctacatggctayatttgtatgtgttgattatcgggacactcattgttatatttgagcctgtagtcaaatattcaagcaagaacccttaatgtctaacatcaatttatttagcacttgattgtccaggttactattcttactcataattttattagcagtttttttttccttttctatacaaatctcctaaaaagcatccagtcttttctcttttggaacccttgtccccacatgacatcttgaaattcctttttattgtcttcagttgtgcgtgctggagctcttcagaaagttgctgcat

SEQ ID NO: 99555 - DNA, 564 bp, Homo sapiens
gaaatgaaaataaccaatataaagtcaagaaattaatcaaattttccactcatggaagaaaattttctggtgctaatgtatggttaatgttgaagtagagagctgtacataacacaaaaagataactctccctctaggagaaaaaagatatttattaagtttatagaaaaagataacaatttcacacataaattatccgattgtattgttaggaaaaaaacaatgtcctttcatataaattacattctccttacctggaaggcctacatggctatatttgtatgtgttgattatcggracactcattgttatatttgagcctgtagtcaaatattcaagcaagaacccttaatgtctaacatcaatttatttagcacttgattgtccaggttactattcttactcataattttattagcagtttttttttccttttctatacaaatctcctaaaaagcatccagtcttttctcttttggaacccttgtccccacatgacatcttgaaattcctttttattgtcttcagttgtgcgtgctggagctcttcagaaagttgctgcat

SEQ ID NO: 99556 - DNA, 588 bp, Homo sapiens
cacttctaaaattttcctatggcttaccatggccttcaagataaagtttgagctgctttgcagatagcctgtatattctaccacctgaatctgggtttatctcccatcattaccaatataattatacccttaaaatactgaatttgctgtggtgtccgacacatcactatgtttcttgggtctttacatattgtgcactaactttcaattgtctaggatgcccttcattccccaaccccaaacatttatttgcctaggtaactcctgttctttcctcaagactcagcttggttctcatagaagactttaccttaaccttcacactagcgtcagttcatcagaccgctatcacttcacttaatagatttattctcacataaagtatccatatgatcagtttctttgtcagtctcttccctggattgaaaatttattgaagtcaagtaccttataatttttgcattcccagtgcctaacatataatgtgagcataaaattatttattaaastgaactgaatgtgtacttttatttcttcagaatgtcatatgcaacaggggattcaggtttttacctagggcatccttaa

SEQ ID NO: 99557 - DNA, 581 bp, Homo sapiens
cctgttttattataagcaattacaaaatcttatttggatctagagatataataaataaatgcactcataaacaaaagtaaactagtactatttartcacttccattgcctgtctctcctcagggtccatttaaaattcttctaagtgattatccttcagctttttctctccttccaagtgtattctgtatgtcattagtctacacattcaggataagtcattcctaaacaatgagtatgtttatatcaaattgctttgcttctcaaaaagtttccatgactccccatggtctataaagcaaaattcaacctccttaaatggattcaattcaaggattttcatgcaatggacccaccttgccttttcaacgtagtctctcattttctccctttccattatcccatattatagtccaaattgatcaattactatttcctgtccatgaccctgtattttcatccctctgtttttaattaaactagaccctgtcacccctttaatcttcacatatctaaatcatatttatttgtcaaggcccagtccaaatgcaaccatcttcattcagtcctaattcttaatta

SEQ ID NO: 99558 - DNA, 596 bp, Homo sapiens
aattcacttgacatgctacgcttgcctgtttgcctacacaaattctatccattgttcaagatcctgaaatgtctctgaattatatcagtcaatgaaacaccattcaaatcctggcagctttttaggtcatccttagctgttttagcctgcttggtgttctgcaagctacaactgttgtaatcactagcaataaactgtcaaacaatatttttgctactgttatttaaactttcaaagtttacacatgtgtgtatatatatatacacacacacgtatatatgtatatatatattacacacatatatatacacacacacatacgtgtgtgtatatatatactcttcttccaactccaacccacacagggtcaatcacagatgtttgataaatgtgtatgaatttcatacgaattgctaggtgtccaatgagttacatgtccatttgtttccaactaayaaataattatagtttatgtgcaataggtaaatttaaaaacttacaaagttcctgctaaatgcccaagattatgggaaaaaaaagattaagttatatcctattctagacagattcacagtagagtcagaaagacagaattg

SEQ ID NO: 99559 - DNA, 640 bp, Homo sapiens
tatcattcctatagctgcttattgtgacatgagttacagagaatacaaaagcaggtcttgaaatgaaaatgtaagattcttaaaatgagtactttttgaaaaattaaactttttatcctgcattagaaatatatttttttaaacttttaagttcaagggtacatgtgcaggtttcttatataggtacacttgtgtcatgggggtttgttgtacagattatttcatcacccaggtattaagcctaatacccattaagtattttttctgatcctctccctcctcctacccttcaccttctgataggccccagtatgtgttgttcctctctttgtgtccatgtgttctcatcatttagcttccacttataaatgagaacatgtkgtatttggttttctcttcctgtgttagtttgctaaggataatggactccagctccattcatgtttctgcaaaggacattagctcattcttttttatggctgcatagtattccctggaatacaggtaccacattttctttatccagtctaccactgatgggcatttgagctgatttcatgtctttggtattgtgagcagtcctgcaacgaacatacgtgtgcacatatctttatgatagaatgatttatattcctttgtt

SEQ ID NO: 99560 - DNA, 593 bp, Homo sapiens
aatattttttgcataggcacaaaatagttctagttttaaggattacaattataatagatatgaatactggcaatttatgagctgaatgtcatttatatcatatgtcaggagaaaaattctgtagaagatattgtctagtttggttataagtaaaaaaaatggttaaattattaggtgagtttatgtacagatatatactcagtctaacaataacagcaaaacttagtatgtgcattttaataaactatttttcttttgagtaagaaattgttttcttgattagtattctcctgtaagactgctttaattctgtattctctagatataaatgagaattgggaaacagaactaaaaagtagcaagtatcgtataacttaattaattcaccaagattgctttgtgagtttgcaaatgcaactgcaagtgggaagtaaagtatttctagtttattcataagtgtcctagttgaagtctttttgtaaataggctggagcytaaatttaataacctaatttaataacaattttgtctttattgttactaggtcagcagttagcatttaagatgaaaaattgatgggaatgataacttac

SEQ ID NO: 99561 - DNA, 593 bp, Homo sapiens
aatattttttgcataggcacaaaatagttctagttttaaggattacaattataatagatatgaatactggcaatttatgagctgaatgtcatttatatcatatgtcaggagaaaaattctgtagaagatattgtctagtttggttataagtaaaaaaaatggttaaattattaggtgagtttatgtacagatatatactcagtctaacaataacagcaaaacttagtatgtgcattttaataaactatttttcttttgagtaagaaattgttttcttgattagtattctcctgtaagactgctttaattctgtattctctagatataaatgagaattgggaaacagaactaaaaagtagcaagtatcgtataacttaattaattcaccaagattgctttgtgagtttgcaaatgcaactgcaagtgggaagtaaagtatttctagtttattcataagtgtcctagttgaagtctttttgtaaataggctggagcctaaatttaataacytaatttaataacaattttgtctttattgttactaggtcagcagttagcatttaagatgaaaaattgatgggaatgataacttac

SEQ ID NO: 99562 - DNA, 571 bp, Homo sapiens
atgtctttgaaatgctttaattcctgtcttatcaatgacaataaaagatccacatgagaatagtgcccaaactcatgactgatgcccagtaacttgttaaatgaatggataaatgagtcagtcaaccagttactcaggtaattaaacacagaaagatacatccccttattcaggactcagggtaatcccacagaggtactaaaatataaaaaatgtttatcatgtgttaacattctccttggaaacatgtttgcattttgagcacttcagctataaaatacagcatcttggttatgcacctagacctaaaggagtggttttcatactttaatgagattagaatcacwtggggtgattgttaaaaatgtaggacctcatccccaaagattgattcagtagatctgcagtggggtttgataatatttttctgccatgtgattctaaatgcaaatagttaaaaacacatgcactaaaagatactagcatctcttatttaggcttcaactttttcatcgtttacttaatgtatttgtaaatgatatggttttttgtgaaacttaattaaaaatct

SEQ ID NO: 99563 - DNA, 619 bp, Homo sapiens
agaacttgcattcattgacactattttgacgacagtaaactggtagcaaaattaatgtgagcacattcaaatacaatttattttttaagcagcctgggagagtggaaaaagcactcctgggctcagcctccatcacctgctagctgtgagcttctgtacaatctcttcactttttccaatccccccaatgtccttccttagattgaaatcgactctttagaatcagcacattcaaggaggtaaagtcacagcttgtcttgcagcccaaacctcccatccaataggcccatggcaaagaacccacaggctgggagcttcgcatcaggcgtccttgtttttgtttgagccttttctttcaaatatatggataatgaccacgtttggggctaaacataaagcattctattcattaggaccatgtcacggacttgtggcatgtgggaaatattaccatggmtacggaggaggtgcgtgtggatgctggcagcggggagggagcccatgcctgcctggttgctgctaaacaataagtcaatctgtgtttcactggggtgttagtgttctgttccctctcacctcctggagaccaaggatgtctccctgacatcaagctgagcag

SEQ ID NO: 99564 - DNA, 605 bp, Homo sapiens
aggatcaaatagattttattcctgggatgcaaggtttgttcaatatatgcatataggcttttaaaaaatttcagcatcatttcctgttaaaatccctcaacaaactatgcacttaaggaacatccctcaaaataaaatgattcatctatgacaaacccacagccaatatcacattgaacaaataaaagctgggagcattcctgtattggtctcttttcacactactttaaagaactacctaagactgggcaatttataaagaaaagaggtttaattcagycacagttctgcatagctgggaagggcttaggaagcttaacaatcatggcagaaggggaagcaaggcatgatttcatggtggcaggagagagagagaaaaaagaaagagagagtgagagagcaaggggggaagtgccacacttttaaaccatcagatctcatgagaactcactgtcacaggaataccactggggaaactgtccccatgatccaatcacctttcaccagatccctcccctgaaatgtgggaattacaatttgagatgagatttgggtggtgacacagagccaaacccctgacccttcccaaatctcatgtacttctc

SEQ ID NO: 99565 - DNA, 377 bp, Homo sapiens
tataatgaatattcatgtaaaaatcctcagtaagatactagcaaaccaaattcaacaatacattagaaagattattcatcatgactaagaagagatgcaaagatagttcaacatatgcaaatcaattaaagtgatacagcatttcaacagaatgcaaggtgaaaaccatataattatttcaattgatgctgaaaaagcatttaatataattcaatatcccttcatgataaaaagcctcaaaaacctgggtatagaaaaaatataactcaacataataaaagccatatatgacrggcccacagctagtatcatactgaatagagaaaaactgatagcctttcctctaagatttggaatagggcaaggatgcctgttgt

SEQ ID NO: 99566 - DNA, 620 bp, Homo sapiens
attaaccatcacatgcaggtagtacatagtagggcaaggactggaacttagccagttctgctgmagagctggcttccttcaccagtactctatggtacgttgcaacagtgagagaaaggtggagagaaggggcctgaaattctacttgattaaaatcagagttgcattatgccactattgcacatgaattatttttaggtcattacttcttgtaaactcgtttatagtagttgccagaaataatatcaagaaacctattttaccttagccttataaatagctctcaaaatgtttagtttatactcctgctttctgatttttgaaagtgagctaagaatgtgtatcaagtgctgcttgctttggaatcacactcttgcaagtaatcattatttgtactcttaaatctaatcatgaagaagagcttttattgctatgaagttaatgtccttagttgaaataaaagagtttcatgggcactaatttttattttcttttgtttatacttttgtcttggaatcaaatatttaaagaaaccaagttgtctcaaatcaggatgattctttatgctaaacaaaactatccataaaataaggaaataggaataaaggataaaacaaatt

SEQ ID NO: 99567 - DNA, 620 bp, Homo sapiens
attaaccatcacatgcaggtagtacatagtagggcaaggactggaacttagccagttctgctgcagagctggcttccttcaccagtactctatggtacgttgcaacagtgagagaaaggtggagagaaggggcctgaaattctacttgattaaaatcagagttgcattatgccactattgcacatgaattatttttaggtcattacttcttgtaaactcgtttatagtagttgccagaaataatatcaagaaacctattttaccttagccttataaatagctctcaaaatgtttagtttatactcctgctttctgatttttgawagtgagctaagaatgtgtatcaagtgctgcttgctttggaatcacactcttgcaagtaatcattatttgtactcttaaatctaatcatgaagaagagcttttattgctatgaagttaatgtccttagttgaaataaaagagtttcatgggcactaatttttattttcttttgtttatacttttgtcttggaatcaaatatttaaagaaaccaagttgtctcaaatcaggatgattctttatgctaaacaaaactatccataaaataaggaaataggaataaaggataaaacaaatt

SEQ ID NO: 99568 - DNA, 576 bp, Homo sapiens
tataacacaggagagagaaatctcttattcaaagcatattttagtttttgctattatactttagtagctaaatacatatttcttataaatacaattgttgttaagtcagaatggtaatattaagaagctcacattgacttttatttaataaaacttgtatacctttttaaaaagtcatttctctgtactccagtaaagtaaggaaaactgggatataattattattataagctacacataatttttcctcttaaacattctgttttcatgttgtttgtaaagttgattttttaaaaagtaatttagtactttttaaaatctagaaactcatcggacttttttttgtcatagaagtttgaaaaattccaccaggatttctctagatayggacttcttttgcattctgtttgcctgaaacatgaaaaaaaattattaaatttctcagtgaaattttcattagatgaatttttagacaattcagataattttattttgtgatttcaatatggctagaactttgtgcagttttattttcacctataaaaatttttattagccattgaatagtgttcttgc

SEQ ID NO: 99569 - DNA, 576 bp, Homo sapiens
tataacacaggagagagaaatctcttattcaaagcatattttagtttttgctattatactttagtagctaaatacatatttcttataaatacaattgttgttaagtcagaatggtaatattaagaagctcacattgacttttatttaataaaacttgtatacctttttaaaaagtcatttctctgtactccagtaaagtaaggaaaactgggatataattattattataagctacacataatttttcctcttaaacattctgttttcatgttgtttgtaaagttgattttttaaaaagtaatttagtactttttaaaatctagaaactcatcggacttttttttgtcatagaagtttgaaaaattccaccaggatttctctagatatggacttcttttgcattctgtttgcctgaaacatgaaaaaaaattattaaatttctcagtgaaattttcattagatkaatttttagacaattcagataattttattttgtgatttcaatatggctagaactttgtgcagttttattttcacctataaaaatttttattagccattgaatagtgttcttgc

SEQ ID NO: 99570 - DNA, 579 bp, Homo sapiens
agcctgtaaaaccaagataaatgatgttcttccaaaatagaatgctggataaggcataagatagatatttctaccccaaaacggaaaaataggcaagaagggtctcaagtaagtccaaaatccaagaggggaaacaatgttaaatcttacagctggaggataatctcctttgactccatatccttaacsctgggcatcccggggtgaggattgggccctcaagacttcaggtagtgctacctctatggctttgctggctgagtccatccatcaattctcacaggttaaagtttcatgcctacagcttttttactcccatggttcaactaagcattgctcttgcagggactctctataggggcccaaatcctgcatttctgtttggtactgccttagtaggggttctttgcagtggccctgctgctagaacaagtctctgtcttggcccacaggctgtttgcaaaattctttcaaatgtaggtggagagagccatgtctccacagctcttgcattccatgttcctgcagaattaccaccatgttgatgctgccaagatttgtggcttgtaccttttagac

SEQ ID NO: 99571 - DNA, 530 bp, Homo sapiens
ttgcctaccatgttttgaataattcagtgcccatagtctttccagttcaatgcattataaaacacactcaagctgagtttcaatcatattagactgaaagctgatttttttatgaaggattatttaaaacaaaatgcgtcttgggcccaacagcctttgaagccaaacaatcctgagagttcagtaaggaaatgtcaacactgtggagaatttttcgattcagaaaattaaaggaatcctgtttgatgtatattaaccatatcaatattaacgaccttctgctggatttcagcactgatttgagagcygaggtattattggtcttgtattttaactagctgtgaaagcactgagagagttgttcttgggttgaacttgacctgcgtctgggaatgctttctgctccatccattttgaaaagctttattcaagtggatttctctgcctttcttatcacttgcaccccttcggaaaataaaagatgctcaaatatagatgttaacactacagatgctttgtttggtaatagc

SEQ ID NO: 99572 - DNA, 530 bp, Homo sapiens
ttgcctaccatgttttgaataattcagtgcccatagtctttccagttcaatgcattataaaacacactcaagctgagtttcaatcatattagactgaaagctgatttttttatgaaggattatttaaaacaaaatgcgtcttgggcccaacagcctttgaagccaaacaatcctgagagttcagtaaggaaatgtcaacactgtggagaatttttcgattcagaaaattaaaggaatcctgtttgatgtatattaaccatatcaatattaacgaccttctgctggatttcagcactgatttgagagctgaggtattattggtcttgtattttaactagctgtgaaagcactgagagagttgttcttgggttgaacttgacctgcgtctgggaatgctttctgctccatccattttgaaaagctttattcaagtggatwtctctgcctttcttatcacttgcaccccttcggaaaataaaagatgctcaaatatagatgttaacactacagatgctttgtttggtaatagc

SEQ ID NO: 99573 - DNA, 553 bp, Homo sapiens
gactagcttcaacaggaaaggtaccagctcttctatgtacatctgttagaatttggttgtgaattgctctgatcctgggctttttttcagttggtaggttatatattgcagattcagttttggagctcactattggtctgttcagggatttaattttttcctggttcagtctcrggatgatgtttgcatacaggaatttatgcatttcttctagattttctagtttgtgtgcatagaggtgttcataatgtttgctgatagttatttgtatttttgtggggtcaatagtaatatctcctttatcatttctaactgtttttctttgaatctgctgtcttttattctctgctcttcttctatattagtctagctagcagtctgtctatgatattaagtttttcaaaagaccatcttctgcatttgttgatcttttgaatgttttttggtgtctcaatttccttcagttcatctctgattgtggttatttcttgtcttctgctaggtttggggttggtttgctcttggttctctagttcttttagttgtgatgtta

SEQ ID NO: 99574 - DNA, 510 bp, Homo sapiens
tattgggctacacagtttgacctctttcttcttcctgatgaacataaagctttgaataaaatgaagtgactttgggacactaaatcacctaaaaaatgtatactgtgaaataagcatttgagtccaagcatttcatcctgagaggtctaaagtgagtctggtttcagaggcttctctggtaactttgggggacaggtggagaggaaggcaatccaggctttaataaaaacaggctggaccaaaaagattcttaattggatgttgcctttaagctaaagaaggaaaatgcatrtacaccagacctcagcttgctgctgccatttatttaacggagttttacaaaagcagaaacttcactacagtcagtgatttatcacccaggggaattcaaggaaactccctcatgtgagctattcattttcttgttctgagcatcccaaatcatctcagcaggagaggatgtgtgtccctgaccttggctgctttctctggtttgcatttccatttgct

SEQ ID NO: 99575 - DNA, 531 bp, Homo sapiens
aacttcccctctactgacaaagccatgagtgaatcttcctctgatcttcatgagtgcatcttctcatctttattcagtgtgagaacctggtatgattcctggaggtaaatttcacagaagtacgaagtccccaaaggctgcagacaccagagtttttcactctcatgctagtccacactcagcctccagttttakcaaaattaccatttaagtgtgaaatcacctttgcaaaaattacaacagtgagaaaattgtgagagtgaaagagatctgatctatctaaccaacccccttcttgcctttaacctctaaactgctcttggtcattccatggcttggcccaagctaactttgggagaaatttagtttatactttaaatgataatagcccttccccaaaattaaagcacctttgtaaaactaacgaaaagaccaccagattagaagaataagaggagcccaaattctgctaaaatataggcatagttaaatgattacgagccattgttctggaggtcacaacatgtgtaa

SEQ ID NO: 99576 - DNA, 607 bp, Homo sapiens
gcaaaaactgagagtggaagctaaccacactccattggccttcagcttttcttgtggctgtcagcctagctgaggaagtagaaaagaccattttacatcaaaatcaaagtttcaatgatcataaggggcttggaatwgtaatttctgaatttcagttgcatattttgtaaaaaggaccatgggatctcggaactcctaggaatgatcagaaaagtaatgggatgcccagtgttttaaggacaggggaagaactgtctcttctcattaattttaaagagacagtggaagagatgaaataaatttgctttgtgattgtatcccaagagttgctctcgtccaatccaagaaacgagttatattacattttttttaaatgggagaaagaaaaggagaaaagaaaaataaaagaaaagaaaatgaaatacagcaaaatgtaagtagagatattttgggttggtagatgatgcgtgggttttattttctattgtgttttctttccaatattttcatacatattatctttttaataagacagataatttttacatgcatctacaccctcctttacaaaagactctattcttggtacctacatggtatatgggtt

SEQ ID NO: 99577 - DNA, 498 bp, Homo sapiens
ggtcttttcaccacactatgtggttttgctaaaaccccaagcccatgattctgagatggctcaccgacagcacttgcttatcacattaattctccttagcatttttatttcccccagtgacattcaggcaytttaaaggccactgcggcacttccagcacattcatcagatttgctcccatggctccaacgtcagcctccccattaagattcatcttcaaagaagccatctgagagtcaaccaagttggagttcagtaaccactctgcgctttctgacattgggaagatatattaccgtactccggtgactgcaacgtttagaacagctttggaagagtattgtatcaattatattgtccctgtgggagccctattaacattaaaatgtcttataagatgagctaaacacttgcacaaagaaaacctttcatatgagggcttcttcaaatttatagttgttaaagcaaaaaaacatcgccttgcctctccctttgcac

SEQ ID NO: 99578 - DNA, 594 bp, Homo sapiens
aaggaagggaaggagagagagagaaagagtacaagactaccttataggttgttatgaggatacaatgagaaggtgtctgcaaaatggctagctaagagaatgcattttatacatatgtaaaattttattattaaatttaaagccagaatttagcccttacaggtagtgaatttatcttttatttattttttatttctataggttttgagagaacaggtggtgttcgattatatggataagttctttagtggtgatttctgagattttagtacacctatcacccgagcagtgtaaactgtacccaatgtgtagtcttttatccctcaccccctcccaccctttgccccaagtccccaaagtccattgtatcattctcatgcctttgcatcctcatagctgagttcccgtttrtaagtgagaacatacgaaagtttgtttttccctccctgagttactttatttagaataatattactcaactccatccgggttgccgcaaatgccattatttcattcctttttatggctgagtagtatttcatggtatatatctcacattttctttatccactcattgattgatgggttggtttc

SEQ ID NO: 99579 - DNA, 433 bp, Homo sapiens
ggtgcattcttcagtatgccaattttatttttcagctccagaatttctgcttgattcattataattatttcaatgtctttgttacatttacctgatagaattctgaatttcttctcggtgttatcttgaatttctctgagtttcctcaacacagctattttgaattctctgtctgaaaggtcacatatctctgtttctctcagattggtccttagtgtcttatttagttcatttggtgatgccatgttttcctgtatgttgttgatgctagtagatgttcttcagtatttggrcattgaaggcttaggtatttattggtgtcttcactgcctggacttatttgtagtagtccttattgggaaggctttccagatatttgaaaggacttgggtgttgtgatctaagctctatctgctttagagagcaccccaag

SEQ ID NO: 99580 - DNA, 433 bp, Homo sapiens
ggtgcattcttcagtatgccaattttatttttcagctccagaatttctgcttgattcattataattatttcaatgtctttgttacatttacctgatagaattctgaatttcttctcggtgttatcttgaatttctctgagtttcctcaacacagctattttgaattctctgtctgaaaggtcacatatctctgtttctctcagattggtccttagtgtcttatttagttcatttggtgatgccatgttttcctgtatgttgttgatgctagtagatgttcttcagtatttgggcattgaaggcttaggtatttattggtgtcytcactgcctggacttatttgtagtagtccttattgggaaggctttccagatatttgaaaggacttgggtgttgtgatctaagctctatctgctttagagagcaccccaag

SEQ ID NO: 99581 - DNA, 540 bp, Homo sapiens
caatacgccaataaattctatacaccaaaactttgaatgaacaaagtaatttttagaaaatcaaatagggattgtctagggagaataaaaagacatagtgttagtccagtgtatttattggcatggcacatgttgattgattacctactgtaagctaggccctctgccagaccttggaggcatgaaaataaacaagacagatgtgattactcttgctagttgagaagatcaccatgagtgcctactaagtgccacatgttttctatcaagttttctattcatrgtagtcatagctattagcagtggctcagatgtttgatgcttgatccctcagaagcatctctgagtaggcaatcaagcacttaatttaaatggaggctttctctttttaatttttttttgtagagcatagctactgatagagaaactatgcgataagatctgatacatagccagacgccatggctcacgcctgtaatcccagcactttgagaggccgaggtgggaggattacttgaggttaggagtttgagaccaact

SEQ ID NO: 99582 - DNA, 442 bp, Homo sapiens
cagtgtatctttttataggttctcccctccatcaatctgccaacttatatgaatcaatgttgtacccaagctagatgtgctagataaagaggccagaagatgaaaagctagacagaagatgaatactgaactctcttcagtaactaacttctttacttatgctgcaatgtctttatttacatacttaaatttttcaatgctattccacaggatctctttcttttctatacttggaaaaatctactttcatttataattgtttggttggtttttttttttttttttttttttggktttttttgttgttgtttttgctttgttgaaggtgaatcatatctctattcaaggaacctatcttttatagcaatcatctggtctaaataatataatcactacaataatataatcactaatggatcacgtaatactgagcaaagaggat

SEQ ID NO: 99583 - DNA, 536 bp, Homo sapiens
gcagaaaccagcttggcactgggcaggtctggagtctatgttcacaggtgccagcctggtccctgtggcatagtgctgacctagtactagagtgggcctgaagcctgaggctatgtggatacctacctggctctgggcagttctgaaacctgaagtaaacctagagcctgcagtcacaggggatgtcctagtcctgtgtggctctagaatatgtatccacataaagctgtgttcatgagtgccacttgatgactagggcagtggaggtcagcatgatgcggggttgggcctgagcctgacactgcagggccagccaatttctgggggcagactggagcctggggccaccagagcctgactggccctggagcaggcctggagtctgagtctgttggggtgggtcctggcactggggtggcctgaagcccagaaccactgctatggtcaacctggtggtgtgatgaacccagagactcaattcacaagtattgatctggagtttggggctacagsggcctgcctggtgctgagtttta

SEQ ID NO: 99584 - DNA, 617 bp, Homo sapiens
tagctcatcaggtcccatgcccacggagcctggctcactgctagcacagcaatctgagatcaacctgcgaggctgcagctgggtggggggaggggtgtcagccattgctgaggactgagtaggtaaacaaagtggccaggaagctcaaactgggcagagcccaccgcagctcagcaaggcctactgcctctatagattccacctctgtgggcagggcataactgaacaaaaggcagcagacaacttctgcagatttaaacgtccctgcctgacagctctgaagagagcagtggttgccccagcatggcatctgagctctgagaacagacagactgcctcctcaagtgggtccctaaactccatgtagcctaactgggagacayctccccataggggccgacagacacctcatacaggtgggtgccactctgggacaaagctctcagaggaaggatcaggaagcaatatttgctcttctgcaatatttgctgttctgcagcctctgctggtgatacccaggcaaacagagtctggaatggacctccagcaaactccagcagacctgcagctgagggacctgactgctagaaggaaaactaacaaacaaaaaggaatag

SEQ ID NO: 99585 - DNA, 587 bp, Homo sapiens
tcttccaccagatatcctaaatcatctctctcaagctcgaagttccacagacctctacgacatgggcaaaatgctgccactatctgtgcatatcaagagtggcatttactccggttcccaacaagttcctcatctccatctgagaccacctcagcctggactttttgatcaaatccattcaacaagtctccaggaagttccaaactttcccacatcttcctgtcttctgagccctccaaactgttccagcctctgcctgttacccagttccatagtctcttccacattttcaggtgtctttacagcaccaccccactatctgataacaatttactgtattagtagtctgttctcatgccactaataaagacatacctgagactgggtgatttataaaggaaaraggtttagttgactcacatttccacatgtctgggaggcctcataatcatggcagaaggtgaatgaggatcaaagtcatgtcttacagacagcaggcaagagagcttgtgcaggagaactcccctttgtaaaaccatcagatctcctgagatttattcactaccatgagaacagtatgggggaaa

SEQ ID NO: 99586 - DNA, 586 bp, Homo sapiens
ccgggatgaatttgctggcagggaatataaagtcagtactctaaagaagtactgggaatgagaactttctgaatcagggtaacatggagcagaatttgtctgttgaagaaaagcattatgtgcagttgcttaaagttctgttgaaacagtctggagctcaagttaattcacagacattaactaagcttccacaggaggtttttacgcataacccatggtttctgcaggcagacagtctctatgtaggaaattgggacagagtaggagagggaytgaaacaggctcatcaaaaaggtttcaaagtagacccttctgttttatctgcttggggtttagttcacatggtcctactgccattgtctccttcttattctgtcagacagcaggagtcaggttctgagtctcaagaattaaaaaaatcatttgttcctctgacagtgcctattgaaaataatgagcaggaggaaggggaggagaattggctgcttgctaagcaggaaaaatgataggagaattggcctctgccactccctccaataacagaagtagaaactctcatacaaaaaattttgcacactgctgctat

SEQ ID NO: 99587 - DNA, 548 bp, Homo sapiens
gattcttggtttcagaatggtgtttgtaaccctattctctcatcccaagatgaatgtccttgctttcctgaggcacctactgtcagaggcatgtgaaccagagcaactccatcttaaataggagctgggaaaaatgaggctgaaacctactgggctgcattcccagatggttaaggcattctaagtcacaggttgagaaaggaggtcagcataaaatataggtcataaagaccttgctgataaaacaggtagtaktaaaggagccagctgaaacccatggaaaccaaaatggtgatgagaatggcctctggtcttcctcactgctatactcccagcagcaccatgacagtttacaaatgtgatggaaacatcaggaagttaccctatatggtctaaaaatgggaggcatgaataatctacccattgtttagcatataaacaagaaataaccataaaaatggacaaccagcagccctcagggctgctctgtctatggagtagcctttctcttattcctttactttcctaataaacttgctttcacttta

SEQ ID NO: 99588 - DNA, 525 bp, Homo sapiens
aaactgaaactgggccacacccatacacctcaaacaaaaattaagtaagatggatgaaagagttagaagtaagacctaaaaccataaaaaatctagaagaaaaccgacgccaccaacctcaggggaaatgtacctgtagtgaaatgcatggtacaaataarcattccctgcttccttgagtgggcgacattgatggctagtccaaccacttcaggcacacccttgcaaacacggctgatttctctttgagccagcttggccttgcctggcatacacaagcctcaatgcaacaactgtgctaaaaatggagccacacagaggaaatgagcagcaagctcagaagcagggtgtgcactgcctttggggctccagtccatgcctcagggcttgtatgggactgcaggattcttggttgccaagaggtagaccatagaccagctgaggaggactttatgttcaagggcagaaagcagccgggattaccacccaggggactcggccttctgtggccccggccagacttag

SEQ ID NO: 99589 - DNA, 525 bp, Homo sapiens
aaactgaaactgggccacacccatacacctcaaacaaaaattaagtaagatggatgaaagagttagaagtaagacctaaaaccataaaaaatctagaagaaaaccgacgccaccaacctcaggggaaatgtacctgtagtgaaatgcatggtacaaataaacattccctgcttccttgagtgggcgacattgatggctagtccaaccacttcaggcacacccttgcaaacacggctgrtttctctttgagccagcttggccttgcctggcatacacaagcctcaatgcaacaactgtgctaaaaatggagccacacagaggaaatgagcagcaagctcagaagcagggtgtgcactgcctttggggctccagtccatgcctcagggcttgtatgggactgcaggattcttggttgccaagaggtagaccatagaccagctgaggaggactttatgttcaagggcagaaagcagccgggattaccacccaggggactcggccttctgtggccccggccagacttag

SEQ ID NO: 99590 - DNA, 525 bp, Homo sapiens
aaactgaaactgggccacacccatacacctcaaacaaaaattaagtaagatggatgaaagagttagaagtaagacctaaaaccataaaaaatctagaagaaaaccgacgccaccaacctcaggggaaatgtacctgtagtgaaatgcatggtacaaataaacattccctgcttccttgagtgggcgacattgatggctagtccaaccacttcaggcacacccttgcaaacacggctgatttctctttgagccagcttggccttgcctggcatacacaagcctcaatgcaacaactgtgctaaaaatggagccacacagaggaaatgagcagcaagctcagaagcagggtgtgcactgcctttggggctccagtccatgcctcagggcttgtatgggactgcaggattcttggttgccaagaggtagaccatagaccagctgaggargactttatgttcaagggcagaaagcagccgggattaccacccaggggactcggccttctgtggccccggccagacttag

SEQ ID NO: 99591 - DNA, 525 bp, Homo sapiens
aaactgaaactgggccacacccatacacctcaaacaaaaattaagtaagatggatgaaagagttagaagtaagacctaaaaccataaaaaatctagaagaaaaccgacgccaccaacctcaggggaaatgtacctgtagtgaaatgcatggtacaaataaacattccctgcttccttgagtgggcgacattgatggctagtccaaccacttcaggcacacccttgcaaacacggctgatttctctttgagccagcttggccttgcctggcatacacaagcctcaatgcaacaactgtgctaaaaatggagccacacagaggaaatgagcagcaagctcagaagcagggtgtgcactgcctttggggctccagtccatgcctcagggcttgtatgggactgcaggattcttggttgccaagaggtagaccatagaccagctgaggaggactttatgttcaagggcagaaagcagccgggattaccamccaggggactcggccttctgtggccccggccagacttag

SEQ ID NO: 99592 - DNA, 506 bp, Homo sapiens
cacgggttcctcttcgccctcgcaccgacccgcagggacatagaaccaagccccaagccggcccagctacaggaccctctctgggtgccgcacgtccggaggaaaatggcggagtgggccgggcagcgcaagcgcagagaraaaagctggttcccaaggtccttgatggtaacatcattggaaggtgacactacatttcccatgaggctctgcggtcccccgttaggaacccacgcaggacattctgttttgcccagcagttgagttcagttacccagagacccggacttaatggatcaggactggtccctacccaggtgacacagatgtggcattctggttctttattaaatcctggtttcacagcctgggacattgtgaaaaaaatggagaaatttcaatagaggccaattggtctatgctattaatgagtaactttttttttttttgagacggagtctcactgtcgcccaggctggagtgcaatggtgcaatctcagctcact

SEQ ID NO: 99593 - DNA, 429 bp, Homo sapiens
ttttttaatcactttattttgttgttgtgttgtagtggggttttttggccatgatcattcatttatctcacagttcattcttgttacttgggccagggtcatgatcattcattatctctcagttcatcctcattacgttgggcaaacagtcatgctgcagtgtatagattatgttattctgttactttcaggtagaattggrgtctaggttctaattgtttctaagtttagattctgaatgagaatcagcagaggtagaccactgctgctgaggcctggggattgctggggaaaaggcaggaaacagatacggacctgaccatggaaggtttgtgtttcacgtctcccatctgggtacccaaggaacctacatgtagctcgtgtgtggagagcctacattgcccactcaaagcaattgaggatgggaca

SEQ ID NO: 99594 - DNA, 429 bp, Homo sapiens
ttttttaatcactttattttgttgttgtgttgtagtggggttttttggccatgatcattcatttatctcacagttcattcttgttacttgggccagggtcatgatcattcattatctctcagttcatcctcattacgttgggcaaacagtcatgctgcagtgtatagattatgttattctgttactttcaggtagaattggggtctaggttctaattgtttctaagtttagattctgaatgagaatcagcagaggtagacyactgctgctgaggcctggggattgctggggaaaaggcaggaaacagatacggacctgaccatggaaggtttgtgtttcacgtctcccatctgggtacccaaggaacctacatgtagctcgtgtgtggagagcctacattgcccactcaaagcaattgaggatgggaca

SEQ ID NO: 99595 - DNA, 454 bp, Homo sapiens
gctccaagtgccaacacgggcgccagctctccacaaggctgtggctggaycacgggcacctcaaccagcttccatagctggcacactgggaacacagtggcacccagaatcttggagatatcacgaaccaaagggccccaaagaaggacctggctcggggagctcccaggtctgggcgccccaaagggccacagctcttctttccttctctttgcccacaatgtggtgagcaaggggcatgtctcagccctgtttgtgttacagctctttcagcctcttccctaggatttgtcataattaattcccatatcatcttatttttttacatgtgtttcaacttcagaagatgtatggatctaaacacaacatgatgtgttagctagctgccatatgagcttctccctgtttcaccactatgtagcctaaagttattccgtcatccatgactatcatg

SEQ ID NO: 99596 - DNA, 477 bp, Homo sapiens
gctgctgcagtggggcaggtggctccaagtgccaacacgggcgccagctctccacaaggctgtggctggaccacgggcacctcaaccagcttccatagctgrcacactgggaacacagtggcacccagaatcttggagatatcacgaaccaaagggccccaaagaaggacctggctcggggagctcccaggtctgggcgccccaaagggccacagctcttctttccttctctttgcccacaatgtggtgagcaaggggcatgtctcagccctgtttgtgttacagctctttcagcctcttccctaggatttgtcataattaattcccatatcatcttatttttttacatgtgtttcaacttcagaagatgtatggatctaaacacaacatgatgtgttagctagctgccatatgagcttctccctgtttcaccactatgtagcctaaagttattccgtcatccatgactatcatgtc

SEQ ID NO: 99597 - DNA, 480 bp, Homo sapiens
ctggctgctgcagtggggcaggtggctccaagtgccaacacgggcgccagctctccacaaggctgtggctggaccacgggcacctcaaccagcttccatagctggcacactgggaacacagtggcacccagaatcttggagatatcasgaaccaaagggccccaaagaaggacctggctcggggagctcccaggtctgggcgccccaaagggccacagctcttctttccttctctttgcccacaatgtggtgagcaaggggcatgtctcagccctgtttgtgttacagctctttcagcctcttccctaggatttgtcataattaattcccatatcatcttatttttttacatgtgtttcaacttcagaagatgtatggatctaaacacaacatgatgtgttagctagctgccatatgagcttctccctgtttcaccactatgtagcctaaagttattccgtcatccatgactatcatgtc

SEQ ID NO: 99598 - DNA, 457 bp, Homo sapiens
ctgctggctgctgcagtggggcaggtggctccaagtgccaacacgggcgccagctctccacaaggctgtggctggaccacgggcacctcaaccagcttccatagctggcacactgggaacacagtggcacccagaatcttggagatatcacgaaccaaagggccccaaagaaggacctggctcggggagctcccaggtctgggckccccaaagggccacagctcttctttccttctctttgcccacaatgtggtgagcaaggggcatgtctcagccctgtttgtgttacagctctttcagcctcttccctaggatttgtcataattaattcccatatcatcttatttttttacatgtgtttcaacttcagaagatgtatggatctaaacacaacatgatgtgttagctagctgccatatgagcttctccctgtttcaccactatgtagcctaaagtt

SEQ ID NO: 99599 - DNA, 578 bp, Homo sapiens
cagaatcttggagatatcacgaaccaaagggccccaaagaaggacctggctcggggagctcccaggtctgggcgccccaaagggccacagctcttctttccttctctttgcccacaatgtggtgagcaaggggcatgtctcagccctgtttgtgttacagctctttcagcctcttccctaggatttgtcataattaattcccatatcatcttatttttttacatgtgtttsaacttcagaagatgtatggatctaaacacaacatgatgtgttagctagctgccatatgagcttctccctgtttcaccactatgtagcctaaagttattccgtcatccatgactatcatgtctaaagagtctgaagatctttatttggtagctatggcttcagctagttcatttgctaagttacctagagtggttgacagatttctaattatacgttcatgagaggttactccccaccattgcaagagacttctgccaaacataggccaaaattcatctccttggtttgcaggtacagtttgtctaatcctggaaaataatttcaatgaactacttcagcgttcagaa

SEQ ID NO: 99600 - DNA, 578 bp, Homo sapiens
cagaatcttggagatatcacgaaccaaagggccccaaagaaggacctggctcggggagctcccaggtctgggcgccccaaagggccacagctcttctttccttctctttgcccacaatgtggtgagcaaggggcatgtctcagccctgtttgtgttacagctctttcagcctcttccctaggatttgtcataattaattcccatatcatcttatttttttacatgtgtttcaacttcagaagatgtatggatctaaacacaacatgatgtgttagctagctgccatatgagcttctccctgtttcaccactatgtagcctaaagttattccgtcatccatgactatcatgtctaaagagtctgaagatctttatttggtagctatggcttcagctagttcatttgctaagttacctagagtggttgacagatttctaattatacgttcatgagaggttactccccaccattgcaagagacttctgccaaacataggccaaaattcatctcctkggtttgcaggtacagtttgtctaatcctggaaaataatttcaatgaactacttcagcgttcagaa

SEQ ID NO: 99601 - DNA, 581 bp, Homo sapiens
ccatatcatcttatttttttacatgtgtttcaacttcagaagatgtatggatctaaacacaacatgatgtgttagctagctgccatatgagcttctccctgtttcaccactatgtagcctaaagttattccgtcatccatgactatcatgtctaaagagtctgaagatctttatttggtagctatggcttcagctagttcatttgctaagttacctagagtggttgacagatttctaattatacgttcatgagaggttactccccaccattgcaagagacttctgccaaacataggccaaaattcatctccttggtttgcaggtacrgtttgtctaatcctggaaaataatttcaatgaactacttcagcgttcagaaacattggagttataaatagaaagaggaagagccacataacctaatagacaattacctctcatatgccagtggtcaacacattcataagcccatgtgtgcttgatccagggaccacacagggtccctgatggattctgaaatttaaggctttggattactggtaacagagacatgttaaagtacatgtcttcagtcttgagtag

SEQ ID NO: 99602 - DNA, 581 bp, Homo sapiens
ccatatcatcttatttttttacatgtgtttcaacttcagaagatgtatggatctaaacacaacatgatgtgttagctagctgccatatgagcttctccctgtttcaccactatgtagcctaaagttattccgtcatccatgactatcatgtctaaagagtctgaagatctttatttggtagctatggcttcagctagttcatttgctaagttacctagagtggttgacagatttctaattatacgttcatgagaggttactccccaccattgcaagagacttctgccaaacataggccaaaattcatctccttggtttgcaggtacagtttgtctaatcctggaaaataatttcaatgaactacttcagcgttcagaaacattggagttataaatagaaagaggaagagccacataacytaatagacaattacctctcatatgccagtggtcaacacattcataagcccatgtgtgcttgatccagggaccacacagggtccctgatggattctgaaatttaaggctttggattactggtaacagagacatgttaaagtacatgtcttcagtcttgagtag

SEQ ID NO: 99603 - DNA, 581 bp, Homo sapiens
ccatatcatcttatttttttacatgtgtttcaacttcagaagatgtatggatctaaacacaacatgatgtgttagctagctgccatatgagcttctccctgtttcaccactatgtagcctaaagttattccgtcatccatgactatcatgtctaaagagtctgaagatctttatttggtagctatggcttcagctagttcatttgctaagttacctagagtggttgacagatttctaattatacgttcatgagaggttactccccaccattgcaagagacttctgccaaacataggccaaaattcatctccttggtttgcaggtacagtttgtctaatcctggaaaataatttcaatgaactacttcagcgttcagaaacattggagttataaatagaaagaggaagagccacataacctaatagacaattacctctcatatgccagtggtcaacacattcataagcccatgtgtgcttgatccagggaccacacagggtccctgatggattctgaaatttaaggctttggwttactggtaacagagacatgttaaagtacatgtcttcagtcttgagtag

SEQ ID NO: 99604 - DNA, 479 bp, Homo sapiens
tctggaggagaagaggcattctggcttttggagttttcagcctttttgcactggtttctccccatctttgtggatttatctacctttggtctttgatgttggtggtgttgatactattcctttctgtttgttagttttccttctaacagtcaggtccctctgctgcaggtttgctcgagtttgctggaggtccactccagacctgtttgcctgggtgtcaccagtggaggctcagttggaaatgcatgaaccacctgccttctgtgttgatctcactgggtgctgcaggccggagctgttcctattcagacatcttgccagctctcccgtaatacttttatgaatgggtgtagtcctctcttctcaaggtccccaaatatcttgaggttcctgggcccrtcagaaagtgacattctttacttcttaccacaaggacagcaaatttgtaaaggatccttgtagacaggacatcaagccag

SEQ ID NO: 99605 - DNA, 380 bp, Homo sapiens
ttatattaataatatatctatacatatacaactttagagaatatttaacatcatcaaaattatcactgataccatatyagatttttataatttatataacatttaaaatacttatattaataatatacctataaatgtaaccaaaagaagatttaggccaggcacagttgctcatgcctgtaatcccaacactttgggaggccaagttggacagatcatcagaggtcaggatttcgacaccagcctggccgacatggagaaatcttgtctctactaaaaatacaaaattagccgggcgtggtggcatgtgtctgtagtcccagctacttgggaggttgaggcaggagaatcgcttgaaccttggggcagaggttgcagtg

SEQ ID NO: 99606 - DNA, 380 bp, Homo sapiens
ttatattaataatatatctatacatatacaactttagagaatatttaacatcatcaaaattatcactgataccatatcagatttttataatttatataacatttaaaatayttatattaataatatacctataaatgtaaccaaaagaagatttaggccaggcacagttgctcatgcctgtaatcccaacactttgggaggccaagttggacagatcatcagaggtcaggatttcgacaccagcctggccgacatggagaaatcttgtctctactaaaaatacaaaattagccgggcgtggtggcatgtgtctgtagtcccagctacttgggaggttgaggcaggagaatcgcttgaaccttggggcagaggttgcagtg

SEQ ID NO: 99607 - DNA, 380 bp, Homo sapiens
ttatattaataatatatctatacatatacaactttagagaatatttaacatcatcaaaattatcactgataccatatcagatttttataatttatataacatttaaaatacttatattaataatatacctataaatgtaaccaaaagaagatttaggccaggcacagtkgctcatgcctgtaatcccaacactttgggaggccaagttggacagatcatcagaggtcaggatttcgacaccagcctggccgacatggagaaatcttgtctctactaaaaatacaaaattagccgggcgtggtggcatgtgtctgtagtcccagctacttgggaggttgaggcaggagaatcgcttgaaccttggggcagaggttgcagtg

SEQ ID NO: 99608 - DNA, 380 bp, Homo sapiens
ttatattaataatatatctatacatatacaactttagagaatatttaacatcatcaaaattatcactgataccatatcagatttttataatttatataacatttaaaatacttatattaataatatacctataaatgtaaccaaaagaagatttaggccaggcacagttgctcatgcctgtaatcccaacactttgggaggccaagttggacagatcatcagaggtcaggatttcgacaccagcctggccracatggagaaatcttgtctctactaaaaatacaaaattagccgggcgtggtggcatgtgtctgtagtcccagctacttgggaggttgaggcaggagaatcgcttgaaccttggggcagaggttgcagtg

SEQ ID NO: 99609 - DNA, 296 bp, Homo sapiens
atttagttttatctatcttttttattccttcaatttaaaataatccttaaaaatctctaagcgaatttactttctctgaaacaaaaaccggtatacrttttgcatacagaattgtttcccttgtatctagtagtcttaatcacatatatctaccaagatattaacacttagtaacccttattttaataaaaaacctaggaagcaagaaatcttgaattgtcatatagcagtatcttacatatgagaataatttcataatttagaattatgtgttcctaaaacatattttttaagat

SEQ ID NO: 99610 - DNA, 632 bp, Homo sapiens
tgtagaggtctacagcagcactgcttgctgaggcgggggacaattgttgtacatttgtaagggcagtggctgtgctgggtatgcctcggtttgttgaggggctcaaggtgggtccctcttcctatttcctgaaagaggttgcccatctttgctaaatttagaatgacacggacttgcctagtgattgcctttcttacaccagggacatacactgggacttttctgttgattgatggtagtagttttcgtctttttaattcctttctacattcctttcttgtgtccaatttgyccacaattaaggcaagagcctgagaaatgaagcatattttttcttactcttaatctagtcatagcctgagctaaaagaatagccttatgtaagttacctccaatgccatcgcaggccttaatatattagttaaatgagccttctctctcaggggtctaatagcagtttgacactctgcattagcattattgtatgcaagaagctgtattacaacatcttgagctgtttttatcatttatggctttatacacagcctcttggagctgagcaataaaattaatatatggttgtttaggtccttgtcagacagaactgaaataaggatacttttcccctgtaa

SEQ ID NO: 99611 - DNA, 583 bp, Homo sapiens
gctgaggcgggggacaattgttgtacatttgtaagggcagtggctgtgctgggtatgcctcggtttgttgaggggctcaaggtgggtccctcttcctatttcctgaaagaggttgcccatctttgctaaatttagaatgacacggacttgcctagtgattgcctttcttacaccagggacatacactgggacttttctgttgattgatggtagtagttttcgtctttttaattcctttctacattcctttcttgtgtccaatttgtccacaattaaggcaagagcctgagaaaygaagcatattttttcttactcttaatctagtcatagcctgagctaaaagaatagccttatgtaagttacctccaatgccatcgcaggccttaatatattagttaaatgagccttctctctcaggggtctaatagcagtttgacactctgcattagcattattgtatgcaagaagctgtattacaacatcttgagctgtttttatcatttatggctttatacacagcctcttggagctgagcaataaaattaatatatggttgtttaggtccttgtcagacagaactgaa

SEQ ID NO: 99612 - DNA, 432 bp, Homo sapiens
agcagcagtgttctggaatccgatttgaggggcagacattcagaccccagcagcagtgttctggaatgctatgtgaagaacaaacattaagactctcgtagcagtgtcctggaatcatatgtgagggacaaccattcagacaccagcagaagtgttctggaatcctaggtgtgggagaaacattcagaacctagtagcagtgttctggaatcctatgtgagggacatacattcagtccacggcagcagtgttctggaatggtatgtgagggacaaacattcagacccttgtagcagtgttccggaatyctatgtgagggacaaacattcagaccacagccgcagtgttctggaatcctatatgacggaccaacatgcagacccttgcaacagtgttctggaatactaggtgagggagaaatattcacaccct

SEQ ID NO: 99613 - DNA, 459 bp, Homo sapiens
gaattctatgtgactgacaaacattcagactccagcagcagtgttctgtaatcctatgtgagggacaaacattcagaccccaagagcagtgttctgaaatcctatgttaagggaaacattgagaccccagcatgaatgttctggaatcctatgtgagggacaaacattcagaccacggcaggagtgttctggaatcctatgtgaggaacaaacattcagaccacagcaggagtrttctggaatcccatatgagggataagcattcagaccctcgtagcagtgttctggaatcctatgtgagggagaagcattcagagcacagcaggagtgctctggaatcctatgttagggacaaacattcagaacctcgtaacattgtgctggaaacctatgtgagggacagacatttagaccctcgcagcagtgttctggaatcccatatgagggtcaaatattcag

SEQ ID NO: 99614 - DNA, 442 bp, Homo sapiens
gttctgtaatcctatgtgagggacaaacattcagaccccaagagcagtgttctgaaatcctatgttaagggaaacattgagaccccagcatgaatgttctggaatcctatgtgagggacaaacattcagaccacggcaggagtgttctggaatcctatgtgaggaacaaacattcagaccacagcaggagtattctggaatcccatatgaggkataagcattcagaccctcgtagcagtgttctggaatcctatgtgagggagaagcattcagagcacagcaggagtgctctggaatcctatgttagggacaaacattcagaacctcgtaacattgtgctggaaacctatgtgagggacagacatttagaccctcgcagcagtgttctggaatcccatatgagggtcaaatattcagatcctcgcagcagtgttctggaatt

SEQ ID NO: 99615 - DNA, 654 bp, Homo sapiens
tatgtttctctttgtgtacaactgtaaatgtacacatctatccatgtaaaattttacatctcaggaggataggtaccaacatgttaacatgctatatctgtaagataagaaattttactttcctacaatgtsatacacacacacacacacacactctctcaaacacacatacacacacaccgaggatatatacacacacaaatatatatataaacatacatgtttatataggtgcacacacacatacatatacacagatggtcaacttataatggttcaatttatgattttttttttactttatgatgaagcaaaagtgatagctttgaatagaatataaccattctgcttttcactttcagtacaatattcaacaaattacataaaatatccaatactttattataaagtgggttttgtattcaacgattttgcccaattgtctgctgatgtaagtgttctgagcacattaaaggtatgccaggctaagctgtgatattcagtaagttaggtattaaatacatttttaacttactgtattttcaatttataatcagcttatcaagacttaaccccattgtacattgaaaagcatttgtattgcattaaacatgttatataatatttttaattgaaattactggcaacttttga

SEQ ID NO: 99616 - DNA, 598 bp, Homo sapiens
agtgagctaaaaatcattgtaaaacattgcaggagctaacagacaaaatagcaagtataaagaagacataaccgacctaatagagctgaaaagcacactacaagaattttcataatgcagtcacatggtgattatgtgtgactggattatgaaaattattgtagtgtgtgtgggcacccgagattgccctgtaagcaggtgtggccagacaggggtcctgggagaggcaagcagactaaggagcgctgaggtcacaccagttccatctcatgtgcaagaccacccagcagaatagaccaagctgaggaaagaatcccagagcttgaaaactggctttctgaaataaaacaggcagacaagaatgggggaaaaaagaaggaaaatgaataaacaaaacatccaagaaatatgagattatataaacgaccaaatctatgactgattagtgtacgtgaaagagataaggagaatggagccaacttggaaaacatacttcagaatatcattcatgagaatrtccccaacctatccagacagaccaacattccaattcaggaaatccagagaatctcagtaagataagccacgagaagatcat

SEQ ID NO: 99617 - DNA, 576 bp, Homo sapiens
gttgtaagtctaaggaaactgattgggatgtacctaattcgagctgggaatatcagaagaaaaactttttgaaagtcatgagacatgagctgtgcctaaaagaataaaaaatagagagagaaataagaataaataaattagggaatgagatgggtataatagtagaaaaaggaaatctctttagataaaacaggttatgagagtatataggaggcttattaactcagtgtggttggagaaaacaggttgaaaggagaaataggggagaaagttacaaagggaatcaaatgtgttagtagttgaggaaaaagcaaatattgaatacgacccatagatcttggataacccagtgtttggtagtagcttacataaaaggttgtgacaaaataaccagagmtatgcggagaaaataataactgagtgttatatttcctctcagtagaaacctaaaaaaaaaaatgaaatcacatcctgatcttttaactgacctccacttatcttgctgcctggattggtatacatattcctgtgcctgaaaaattgctcaacacttttgaaaggttgtttctcactgtt

SEQ ID NO: 99618 - DNA, 559 bp, Homo sapiens
gtttctcactgttacacccaggcatttctgctaacaccagctgagttgtaaggggccctccaggaggcataggttgttctccttatcacatacattattttcatttatcaatttacccagaacatctaatgaaatattatggacaccaataacatgaatacaaatatagctatagaccctaacaagtaaattgatgtctcttgaaaggctgtcatgtcttagatgctaaatttggagtgtttctaataaataaatagcttgctttaataattctgatttatgaatgtaatataggggagcagcttttatttcacccttaatcttaaaaaacaattagctgggtgtggtggcgggcacctgtagycccagctactcaggaggctgaaacagaaggatggtgtgcacctgggaggcagagcttgctgtaagccaaaattgtgccactgtactccagcctgagtgacagtgtgagactctgtctcaaaaaaaaaaaaaaaaaagatcatacaaggagtaaatgatgatttagcataaaactcaactttagcctaaaacacag

SEQ ID NO: 99619 - DNA, 455 bp, Homo sapiens
tgttacaattgcctacagtattcagtacagtaacatgctgcacaggtttgtagcctaggaggaataggttataccacctaacctaggtatgtaatcagctatagcatctaggtttgtgtaagtaaactctgtgatgttcatacaataataaaattgtccagcaatgcatttctcagacacacccctctcattaagtgacacaygactgtattagttaacactatgggaacttcatgggaaatggacactctagctccaccataaatagaaactgtttatgtcaaaaaacacataaaagcatagttgcaagattacaattccttccagatatttcatttagtatctccacagatcactaacttcctgaataacattcttgtgtctccactgcctcacatttgatttcaggtcattccatcaattgtcaaagacgcatccaacattaactttccaac

SEQ ID NO: 99620 - DNA, 607 bp, Homo sapiens
tcctggcaacaatactcacagcacagtaaagttccttcatccaagttcatgtcccttctsaaggcatcccacatccgataactgcttggtacagaaatataatggcctggttttcttgctccaattcgaggtcattaggtaaactcaccaagatccctgtagagtgcactgcggccatgatagtgattgcattccagccgacttcctgctccacccaatcctattgctttcactcttccacaggtgttgggaatatcatttcaacctccttgcatgcaaatctccaactcggagtcggcttcctaggacacctgacttgtgatatctctatcactatcacagtacttagaggggagcatcttaaaatgattgaaggctaactgccctaacagcacaggcagatggtggcttaaaatagaatttaagtggatttaaaaaaacatgaaaaaagttgacattgcatgctcatatgagcttatggatcaaaccatgtgtatgatttctaagatccctcgtgcagtatatatttgcactgtttataaatgacatccccttgaattgaattcagtgcaattcaaaacagtaatttgtgggaaaaattagatat

SEQ ID NO: 99621 - DNA, 607 bp, Homo sapiens
tcctggcaacaatactcacagcacagtaaagttccttcatccaagttcatgtcccttctgaaggcatcccacatccgataactgcttggtacagaaatataatggcctggttttcttgctccaattcgaggtcattaggtaaactcaccaagatccctgtagagtgcactgcggccatgatagtgattgcattccagccgacttcctgctccacccaatcctattgctttcactcttccacaggtgttgggaatatcatttcaacctccttgcatgcaaatctccaactcggagtcggcttcctaggacacctgactkgtgatatctctatcactatcacagtacttagaggggagcatcttaaaatgattgaaggctaactgccctaacagcacaggcagatggtggcttaaaatagaatttaagtggatttaaaaaaacatgaaaaaagttgacattgcatgctcatatgagcttatggatcaaaccatgtgtatgatttctaagatccctcgtgcagtatatatttgcactgtttataaatgacatccccttgaattgaattcagtgcaattcaaaacagtaatttgtgggaaaaattagatat

SEQ ID NO: 99622 - DNA, 607 bp, Homo sapiens
tcctggcaacaatactcacagcacagtaaagttccttcatccaagttcatgtcccttctgaaggcatcccacatccgataactgcttggtacagaaatataatggcctggttttcttgctccaattcgaggtcattaggtaaactcaccaagatccctgtagagtgcactgcggccatgatagtgattgcattccagccgacttcctgctccacccaatcctattgctttcactcttccacaggtgttgggaatatcatttcaacctccttgcatgcaaatctccaactcggagtcggcttcctaggacacctgacttgtgatatctctatcactatcacagtacttagaggggagcatcttaaaatgattgaaggctaactgccctaacagcacaggcagatgrtggcttaaaatagaatttaagtggatttaaaaaaacatgaaaaaagttgacattgcatgctcatatgagcttatggatcaaaccatgtgtatgatttctaagatccctcgtgcagtatatatttgcactgtttataaatgacatccccttgaattgaattcagtgcaattcaaaacagtaatttgtgggaaaaattagatat

SEQ ID NO: 99623 - DNA, 607 bp, Homo sapiens
tcctggcaacaatactcacagcacagtaaagttccttcatccaagttcatgtcccttctgaaggcatcccacatccgataactgcttggtacagaaatataatggcctggttttcttgctccaattcgaggtcattaggtaaactcaccaagatccctgtagagtgcactgcggccatgatagtgattgcattccagccgacttcctgctccacccaatcctattgctttcactcttccacaggtgttgggaatatcatttcaacctccttgcatgcaaatctccaactcggagtcggcttcctaggacacctgacttgtgatatctctatcactatcacagtacttagaggggagcatcttaaaatgattgaaggctaactgccctaacagcacaggcagatggtggcttaaaatagaatttaagtggatttaaaaaaacatgaaaaaagttgacattgcaygctcatatgagcttatggatcaaaccatgtgtatgatttctaagatccctcgtgcagtatatatttgcactgtttataaatgacatccccttgaattgaattcagtgcaattcaaaacagtaatttgtgggaaaaattagatat

SEQ ID NO: 99624 - DNA, 564 bp, Homo sapiens
cctgtgacaacataataaattcaaaaagttctgtaactcagacaatttagatagaagtgaggactttggcctagacagccctgttcactctaaaggtggattaaacaaggaaaaatatattgatatcaaaaattcaatcaggaatttgattaaagcatttcattaaatgtgataatttcttagtatattatcttacatatgcaatattcatgtgtaacaaattaaatacaagtaaacatttgagcatattatctgcagcataatttacatattcagttttgcttacatgaaaacttcgatcttctcaataagaaaatttgtgaaatctttaattcctcatccccaggaatgtaaataaataaatataaatattgtaagtcagtgattttttcctaggaagacagtaaaaatactttacacgccttctcattgtaaacctaaataacaaacagagaaaggctctctaaasggaaaagacacatcttagggaggagggcactgcaatgggaatatgcatgacaaagcaaactgtgtagattcaaatggtaaaggaagacaaggtct

SEQ ID NO: 99625 - DNA, 564 bp, Homo sapiens
cctgtgacaacataataaattcaaaaagttctgtaactcagacaatttagatagaagtgaggactttggcctagacagccctgttcactctaaaggtggattaaacaaggaaaaatatattgatatcaaaaattcaatcaggaatttgattaaagcatttcattaaatgtgataatttcttagtatattatcttacatatgcaatattcatgtgtaacaaattaaatacaagtaaacatttgagcatattatctgcagcataatttacatattcagttttgcttacatgaaaacttcgatcttctcaataagaaaatttgtgaaatctttaattcctcatccccaggaatgtaaataaataaatataaatattgtaagtcagtgattttttcctaggaagacagtaaaaatactttacacgccttctcattgtaaacctaaataacaaacagagaaaggctctctaaaggraaaagacacatcttagggaggagggcactgcaatgggaatatgcatgacaaagcaaactgtgtagattcaaatggtaaaggaagacaaggtct

SEQ ID NO: 99626 - DNA, 387 bp, Homo sapiens
cagacactaatcataaaaagcttcaacagagatgttaacactagatgaaagaggcgtcagagcaaaatrtatcaccagaaataaacagggtaatttaataaaaataaaagaatcagagagtatgatgttacaactataaattgtgcctcagagtgcacacaaagtacacacacacacagagcctcaaagtatgtgaatcaaaaacaacagaacaaaagcaggaaattgacaatccaaaattatagctggtgaattaatactgctctctcagtaactgatggaacacccagataaaaatataggaaaaatatggatctaaatgacaaaatcctgacccaaatggtacttggcagtaccaagatagactgtatgtcgatcgattgagaa

SEQ ID NO: 99627 - DNA, 387 bp, Homo sapiens
cagacactaatcataaaaagcttcaacagagatgttaacactagatgaaagaggcgtcagagcaaaatgtatcaccagaaataaacagggtaatttaataaaaataaaakaatcagagagtatgatgttacaactataaattgtgcctcagagtgcacacaaagtacacacacacacagagcctcaaagtatgtgaatcaaaaacaacagaacaaaagcaggaaattgacaatccaaaattatagctggtgaattaatactgctctctcagtaactgatggaacacccagataaaaatataggaaaaatatggatctaaatgacaaaatcctgacccaaatggtacttggcagtaccaagatagactgtatgtcgatcgattgagaa

SEQ ID NO: 99628 - DNA, 570 bp, Homo sapiens
caacaatatggcatccatagagacacaatttaaacacaaagacacaaagaaagtatgagaaaaaatatgctatgcaggcactaatcataaaaatatgctatccagacactaatcataaaaagcttcaacagagatgttaacactagatgaaagaggcgtcagagcaaaatgtatcaccagaaataaacagggtaatttaataaaaataaaagaatcagagagkatgatgttacaactataaattgtgcctcagagtgcacacaaagtacacacacacacagagcctcaaagtatgtgaatcaaaaacaacagaacaaaagcaggaaattgacaatccaaaattatagctggtgaattaatactgctctctcagtaactgatggaacacccagataaaaatataggaaaaatatggatctaaatgacaaaatcctgacccaaatggtacttggcagtaccaagatagactgtatgtcgatcgattgagaaaaggttcaaacctgaaatagtatacaaagtatgttgtctgaacatttgaaattaaattagaaaccaacaacaaattgatat

SEQ ID NO: 99629 - DNA, 387 bp, Homo sapiens
cagacactaatcataaaaagcttcaacagagatgttaacactagatgaaagaggcgtcagagcaaaatgtatcaccagaaataaacagggtaatttaataaaaataaaagaatcagagagtatgatgttacaaytataaattgtgcctcagagtgcacacaaagtacacacacacacagagcctcaaagtatgtgaatcaaaaacaacagaacaaaagcaggaaattgacaatccaaaattatagctggtgaattaatactgctctctcagtaactgatggaacacccagataaaaatataggaaaaatatggatctaaatgacaaaatcctgacccaaatggtacttggcagtaccaagatagactgtatgtcgatcgattgagaa

SEQ ID NO: 99630 - DNA, 570 bp, Homo sapiens
caacaatatggcatccatagagacacaatttaaacacaaagacacaaagaaagtatgagaaaaaatatgctatgcaggcactaatcataaaaatatgctatccagacactaatcataaaaagcttcaacagagatgttaacactagatgaaagaggcgtcagagcaaaatgtatcaccagaaataaacagggtaatttaataaaaataaaagaatcagagagtatgatgttacaactataaattgtgcctcagagtgcacacaaagtacrcacacacacagagcctcaaagtatgtgaatcaaaaacaacagaacaaaagcaggaaattgacaatccaaaattatagctggtgaattaatactgctctctcagtaactgatggaacacccagataaaaatataggaaaaatatggatctaaatgacaaaatcctgacccaaatggtacttggcagtaccaagatagactgtatgtcgatcgattgagaaaaggttcaaacctgaaatagtatacaaagtatgttgtctgaacatttgaaattaaattagaaaccaacaacaaattgatat

SEQ ID NO: 99631 - DNA, 570 bp, Homo sapiens
caacaatatggcatccatagagacacaatttaaacacaaagacacaaagaaagtatgagaaaaaatatgctatgcaggcactaatcataaaaatatgctatccagacactaatcataaaaagcttcaacagagatgttaacactagatgaaagaggcgtcagagcaaaatgtatcaccagaaataaacagggtaatttaataaaaataaaagaatcagagagtatgatgttacaactataaattgtgcctcagagtgcacacaaagtacacacacacacagagcctcaaagtatgtgaatcaaaaacaacagaacaaaagcaggaaattgacaatccaaaattatagctggtgaattaatactgctctctcagtaactgatggaacacccagataaaaatataggaaaaatatggatctaaatgacaaaatcctgamccaaatggtacttggcagtaccaagatagactgtatgtcgatcgattgagaaaaggttcaaacctgaaatagtatacaaagtatgttgtctgaacatttgaaattaaattagaaaccaacaacaaattgatat

SEQ ID NO: 99632 - DNA, 395 bp, Homo sapiens
atctgtgggagcaggactgctagggcctccggagctatagtgtggtgagcagtgttgctagggcttctaatgacccccaggagtgctgaagtacaagaaaggcacctgcaaggactgctctgtgatggcagcagtggcccatgtggagcagttgctacggagacactggctgcagtgaggaggagtggctggggctgtgcgctcctcgaagctggtgggagccaggaaagggtgggagccccaccccttctaaattggcaggcaggagccccgccctcccaggcacagctgcagccatccagccatgactgcaaaccygggcatctttgcactctcagaggcccagcaagcccccctgcccccacaggctcagttgtacctggtcccaccacctg

SEQ ID NO: 99633 - DNA, 619 bp, Homo sapiens
tctttaaaaaaaaatggccaggggcagtggctcacgcctgtaatcccaacacttggggaggctgaggcaggtggatcacctgaggtcaggagttcagggccagcctgaacaacaaggaaaaaccccgtctctactaaaaacacaaaattagctgggcatggtggggcatgcctctaatcccagctactcaggaggctggggcaggagaattgcttgaatctgggaggcagggggttgcagtaaaccgagatcgcgccattgcactccagcctgggcaacaagagggaaaatccacctcaagaaaagaaaagaataatagatttgcctataaggttttatgaaaaagtgggtgacatttggctttctctctttaaagaagattttcagaaaatattaaaaaataatgggagaaggagccaagctggccgaataggaacagctcgagtctacagctcccagcatgagcgacgcagaagacgggtgatttctgcatttccatttgaggtactgggttcatctcactagggagtgccagacagtgggcrcaggacagtgggtgaagtgcactgtgcactagctgaagcagggtgaggcattgcctcacttgggaagtgcaagg

SEQ ID NO: 99634 - DNA, 636 bp, Homo sapiens
tttgcaatgaccacagtctgtcacagtccatataccttatcaaaattttccaataatccccaagctagaagccatggagtacctactagtactaacagtattatgaataatctaaacataaactctgccttatttcctgaatacaaaggctgttggccaaacaggctaagactgcatagcattcatttcctgtgaagttgccaatccattaatttggtaaataacctgattttaaatttacctgaataaaaattatttcctatgtattcttgggaagtcaattttctgattgtgtgtcacgtatacatctatacacgtatttatgtatacaaatmttaaatgaaaatttggatagtgttcaatttagttactgcttttggctttaccacaaattttttaatactcattatttctgaaaggattatttagaggtaagcgttaaaatgtacaaacacatgtttcttaagttatctctttggtttttatttctaatttgttagcattgcagtcatagaatatggtctgaataataccaaatctttaaaacttgtaaagatttgcttaattgatcagaatccatttttataaatgttccatgaaaccttgattcaaacgtatgttctccatttgttgggt

SEQ ID NO: 99635 - DNA, 592 bp, Homo sapiens
cttgttatatcttagcaaagagactggtggcattttgttcccaccctagaggtctgtggaattttgaacttgaraaagatgatttagggtatctggcagaagaaatttctaagcagcaaagcattcaagaagtgacctggcttttggtaaaagtgtatgcccatattcgttcacaaagaaaaaatcagaaattggaagttaaagggaagcagaccgtaaaagtttgaaaaatttgcagcctgaccatgcagtaaaaaagaaaaacctatcttctggcaataaattcaagctggctgcagatatttgcataagtaatgaggagcccaatgttaatggcaaagacaatgaggaaagtacctccagggcatgtcagagatcttcacagcagcccctcccatcgcaagcctggcagcctagtagggagaaatggttttatgggtcaggccagggccctgctcctctgttcagccttgggacattgtaccctgcatcccagccactccagctccagccgtggctaaaaggggccaaggtacagctcaaactatggcttaagaggatgcaatccccaagtcttacagcttccacgtgg

SEQ ID NO: 99636 - DNA, 592 bp, Homo sapiens
cttgttatatcttagcaaagagactggtggcattttgttcccaccctagaggtctgtggaattttgaacttgaaaaagatgatttagggtatctggcagaagaaatttctaagcagcaaagcattcaagaagtgacctggcttttggtaaaagtgtatgcccatattcgttcacaaagaaaaaatcagaaattggaagttaaagggaagcagaccgtaaaagtttgaaaaatttgcagcctgaccatgcagtaaaaaagaaaaacctatcttctggcaataaattcaagctggctgcagatatttgcataagtaatgaggagcccaatgttaatggcaaagacaatgaggaaagtacctccagggcatgtcagagatcttcacagcagcccctcccatcgcaagcctggcagcctagtagggaraaatggttttatgggtcaggccagggccctgctcctctgttcagccttgggacattgtaccctgcatcccagccactccagctccagccgtggctaaaaggggccaaggtacagctcaaactatggcttaagaggatgcaatccccaagtcttacagcttccacgtgg

SEQ ID NO: 99637 - DNA, 455 bp, Homo sapiens
tgactgtatttggagataggrgtctttgagaaagtaaagataaaattaggtccattagagtaggccctaacccagtgtcactggtgtccttagaagaagaaatgtggacacagacatctgcagagagaacaccatgtaaagatatagtgaaaaggcggccacctgtggccatctgtgagacaggctccaggagaaaccaaccctgccgacaccttgatcttggatgtttatcctccagaaatgttgtttaaaccacccaccctacagtacgttgttatggcagccttagtgaacatatataatagataataatgttagtcttgaatattttattattcattgcagggaaacataaaacttgctgccaatgaagcaaagaagaagaaaataataatccttttcttctttgtcttttttcgatgaacaaagccttaggagactagcctcgggatacc

SEQ ID NO: 99638 - DNA, 510 bp, Homo sapiens
ctatggtggaaaatgaaatggaaaatacacataagtacacagaagaggacaacaatctcttataatgttagtctcatgagagagccactgttcacatttcagcattttttttttcrtgtttgtatgctaaatattttctttaaatttcacagaaagtttttttttaagcagaaatacaaaagtaaggtttttagaattattgtctttacataaaaacatattgtataccacgtttattttacaatccaagttttcattttaatagcctacatcatttttttcttgtgtggggtttacttatatgttactcatattcatttcttttcaaaaacttaattgtatctagatttaattttttgaaattgcaaatcaaaggcattagcaccccctagtggtataacaaattttaagcacaaatgagtgctatctacatttgggtcaatttttctttcattcattctctttttaataatgcatataataattttaaatatcctactgtaacatgta

SEQ ID NO: 99639 - DNA, 586 bp, Homo sapiens
atattttaaatttaaatgtttcttacctgacagattttcacagaaatctttgctgtgttaaaaatcaattagaagaatgaattttgaccacagaactttcatcagcaccaaattccaaggagcaatgcatttagcaatgtgcttggcacagaataagaactgtaaattttcaccattaatatatcattccatcaaatacaaatccaaagaaagcctttacctataataaatttattaatgattttatagacaataatattgaaagaattgtagctgagaaaaagtaactaagaactggcgcttccttctgcaaagggggcactctgcctattatctgtgacattaaacagactctaggttttgataactttccattcctaattttgcaccatagttgaaggaaaaatctgcttgaatgttagctgaatacgtttattgtttgtgttttattccttaccacagagtatttgaagtcccaaatcctcagggaaaggttgctatttttttaaaatacatctacayaattacaatgttagtctaataatcattatttctagataagcagatggataacatacagaatgat

SEQ ID NO: 99640 - DNA, 596 bp, Homo sapiens
gaattctactgtttatctaatcagccctttgaaaaaggtgatgtgggagagcagaaaactgtacttgtactaacaggagttaagagcatgagctttgcagcctcaccagacctagactgtatttcccactctgtgacttgctgtttaagtgaccttgagcaaacgacttcacttctcatagcctcggtttcctcctctgtaaaatgaggatagccccggcagtcttgaggagatttttaaagattatctggtcaggtacagagtggctcacacctgtaatcccaatactttgggaagctgaggcaggcggatcacctgaggtcagaagttcaagaccagcctggccaatatggggaaaccccatccctaggaaaaatacaaaaattagccaggtgtggtggtgggtgccggtagtcccagctactcaggaggctgaggcaggagaattgcttgaacccaagaagcagagattgcagtgagctgagatcataccactgcactccagcctgagcaagactccgtatcaaaaaaataaaaaatagagattatataaaattatgtaaataaartgctcagcatagactgtagcagtcttt

SEQ ID NO: 99641 - DNA, 578 bp, Homo sapiens
ctgttgtccttctcatgaccatgtcatggatggaaatcaccctcagcatagacatgaaactgctcctccagatcactcatggtggccagagattccctttcaggggcactgcagctgagaawaatggagcatgatcaacgtggggttgagttgagggctatctatggtcaatgtgtgcatgcacaggaatggagctaggggctggtcttattttcacacttttgatcataatcacccaatgaactaggtatgattatttctactttacagaagctgaaggaaactgagttttaggtagagcaactggtcaaggcctcctgtgattaccttgattaacctagctaacccattccctattttagactctcagaatcaacctttccattcttctctctgacattcatagtcttccttgtgctctcaataatatgtcccttgcacattttattctagattggactacaaatcaaaattgtcaataatttgacagaactggagaaacagtgccttgttgagctagtatgggatctaaatgcttagccctgattacaaagctgactctgtttcttatatagtct

SEQ ID NO: 99642 - DNA, 430 bp, Homo sapiens
ccatgccatttacctccaccccttgtctaccttgattgataagggaactcccacatcctgccaatctcgtctgtgttcatttcctccgggaaacactccttacctccttcaggaatagttattcctccttctgtcttccagtaccatttaacatatacattctatcattttatctcacaatattataactgctgctgggtatgattccctcaataatctgccasctatttgagggcaggtgtcatgtgtactcatctttgcgttactagtgctgatcatagaaagtaaacaggtttcaactcatgacccagctgtcatggcttgaaaggacctgcctgaagcactgaggtgagaaggattttgatggcaaatctaggcctggcaagaaagagtgttgtgatggattagctatgtctgtattggcagcagg

SEQ ID NO: 99643 - DNA, 582 bp, Homo sapiens
gggtccccgctgccaacatgatgtttccctgttgtgatgctgacctcgagcacccggccacagtcattttctgcttctcttgggagacttttgacccacaggggttctgcttttctctgccaaaagtatctggtacctgcctcatctctctgctgctgcatgcgtttcctttcgttgtaacctctgcyccctgcccccgggagtttccccactcaccccacttatgtttcctgtgatgcagggtgcaattagtgtttccagagcagagttaacctaggcccttatcagagctgctgtgtgagactaagttcattatagtctttacccaaaccagaactttattggagacataaattacttttattttcattgaaaatatttgagatgaactatgttagaatcctcgctgagaaaatataccctggacctataatcagtggagaggtgctacctataaaaaaaagaaaaaagaaccgtagggtagacttttgcactgacacctattttatattttattatttgccctgtactatttcgtcaacttccatcccctctcctggtatttattagcagatgggcata

SEQ ID NO: 99644 - DNA, 582 bp, Homo sapiens
gggtccccgctgccaacatgatgtttccctgttgtgatgctgacctcgagcacccggccacagtcattttctgcttctcttgggagacttttgacccacaggggttctgcttttctctgccaaaagtatctggtacctgcctcatctctctgctgctgcatgcgtttcctttcgttgtaacctctgctccctgcccccrggagtttccccactcaccccacttatgtttcctgtgatgcagggtgcaattagtgtttccagagcagagttaacctaggcccttatcagagctgctgtgtgagactaagttcattatagtctttacccaaaccagaactttattggagacataaattacttttattttcattgaaaatatttgagatgaactatgttagaatcctcgctgagaaaatataccctggacctataatcagtggagaggtgctacctataaaaaaaagaaaaaagaaccgtagggtagacttttgcactgacacctattttatattttattatttgccctgtactatttcgtcaacttccatcccctctcctggtatttattagcagatgggcata

SEQ ID NO: 99645 - DNA, 582 bp, Homo sapiens
gggtccccgctgccaacatgatgtttccctgttgtgatgctgacctcgagcacccggccacagtcattttctgcttctcttgggagacttttgacccacaggggttctgcttttctctgccaaaagtatctggtacctgcctcatctctctgctgctgcatgcgtttcctttcgttgtaacctctgctccctgcccccgggagtttccccactcaccccacttatgtttcctgtgatgcagggtgcaattagtgtttccagagcagagttaacctaggcccttatcagagctgctgtgtgagactaagttcattatagtctttacccaaaccagaactttattggagacataaattacttttattttcattgaaaatatttgagatgaactatrttagaatcctcgctgagaaaatataccctggacctataatcagtggagaggtgctacctataaaaaaaagaaaaaagaaccgtagggtagacttttgcactgacacctattttatattttattatttgccctgtactatttcgtcaacttccatcccctctcctggtatttattagcagatgggcata

SEQ ID NO: 99646 - DNA, 630 bp, Homo sapiens
aagggtgcaaagtctgtgtctaaatttatgtttttgcacatagatgtccagttgtatctgtatcatttgttggaaagactgccctttggctgggtatggtggctcacacctgtaatcccagcactttgggaagccaaggcgggtggatcacctgaggtcaggactttgagaccagcctagccaacatggtgaaaccccatctctactaaaaatgcaaaaattagccaggcatgtttgcaggcctttagtcccagctatgcaggacactgaggcatgagaatcacttgaacccagtgattctcatggtaaaggtataggtcccattgaaccaagatcataccagtgcactccagcctgggtgacagagagagacyctgtctcaaaaaaaaaaaaaaaaaaaaaaagtctacctttgcttcactatatttatttgggtctatttctagactctatattctgttacagtgatttatttatctgttctttaccagttctttcactgtcttcattactataactttatagtaagtctagaagtcagatagtgttagtcctctgactttgttttccttcaatattgtgttgggtattctgggtcttttgactcaccatgtaaacttagttagcagt

SEQ ID NO: 99647 - DNA, 405 bp, Homo sapiens
aaaatggaattcagttataggttcggccttaaacagtttttttctatctacataaattattcatcaagatattctaggccaggcgcagtggctcatgcttgtaatcccagcactttgggaggccgtggatggatcccctgaggtcaggagttcgagaacagcctggtcaacatggtraaactccgcctctactaaaaatacaaaaattagccgagcgtggtggcacatctcttaattccagctacttgggaggctgaggcaggacaatcgcttgaacccgggttgcagtgagctgggatcacaccactacactctgtcctgggtgacagagtaagatttggtctcagaaaaaaaaaaaaaagatattctaaagctgtgcagatcataggaaaagttctattttac

SEQ ID NO: 99648 - DNA, 544 bp, Homo sapiens
caataatgatgcattcagaaagtgcataaggtttcaccattgatgcagtggtctaaatctttttgctttgtattaaattaataaaatcctatagtctcagtttggtagcttatccttttttatataagttatatttttcaaatattagtatttgaatgagtccagatatatactttgcccatcctgtctgcttcrtattttttttagcagacctcatttttagaagtgaagcctgtttttttctttctctttaaattctctggactttgtttctggatggagttttcttacaccagtatgttattcagcaaacctttgtttgcctgaagagtgtgccaggtttaccattcagcacttggtcaagattaaggtcacccctttggagcttgagagagaagcagagtcatgtaagtgcagtacattgcagtccacatcctggagaccctgtgacagaattttctgtggctgctcacagagccatcagatcttcatctttggccacatggcaggatctcctgaaatttgggggtactggctagagaaa

SEQ ID NO: 99649 - DNA, 606 bp, Homo sapiens
gttcccaaaattaatacttttataatttcttacacctgtctttactacaatctctgaacataaattgtgaagatttcatggatatttatcagttcccaaataatactcttataatttctaatgcctgtctttactttaatctcttaatcctgttatcttcgtaarctgagaatgtacatcacctcaggaccactattgtacaaattgattgtaaaacgtgtgtttgaacaatatgaaatcagtgcaccttgaaaatgaacagaggaacagcgattttagggaacaagggaagacaaccataaggtctgactgcctgtagagtcgggcagaatagaaccatatttttcttcttgcagagagcctataaacggatgtgcaagtaggagagatatcaccaaattcttctcctagcaaggaatattaaatattaagaccctaggaaaagaattgcattcctggggggtggtctataaatggcccctctgggagtgtctgtcctatggggttgagataaggattgaaatacaccctggtctcctgcagtaccctcaggcttattagggtggggaaaaaatcccaccctggtaaatttgaggtcagaccagt

SEQ ID NO: 99650 - DNA, 606 bp, Homo sapiens
gttcccaaaattaatacttttataatttcttacacctgtctttactacaatctctgaacataaattgtgaagatttcatggatatttatcagttcccaaataatactcttataatttctaatgcctgtctttactttaatctcttaatcctgttatcttcgtaagctgagaatgtacatcacctcaggaccactattgtacaaattgattgtaaaacgtgtgtttgaacaatatgaaatcagtgcaccttgaaaatgaacagagkaacagcgattttagggaacaagggaagacaaccataaggtctgactgcctgtagagtcgggcagaatagaaccatatttttcttcttgcagagagcctataaacggatgtgcaagtaggagagatatcaccaaattcttctcctagcaaggaatattaaatattaagaccctaggaaaagaattgcattcctggggggtggtctataaatggcccctctgggagtgtctgtcctatggggttgagataaggattgaaatacaccctggtctcctgcagtaccctcaggcttattagggtggggaaaaaatcccaccctggtaaatttgaggtcagaccagt

SEQ ID NO: 99651 - DNA, 606 bp, Homo sapiens
gttcccaaaattaatacttttataatttcttacacctgtctttactacaatctctgaacataaattgtgaagatttcatggatatttatcagttcccaaataatactcttataatttctaatgcctgtctttactttaatctcttaatcctgttatcttcgtaagctgagaatgtacatcacctcaggaccactattgtacaaattgattgtaaaacgtgtgtttgaacaatatgaaatcagtgcaccttgaaaatgaacagaggaacagcgattttagggaacaagggaagacaaccataaggtctgactgcctgtagagtcgggcagaatagaaccatatttttcttcttgcagagagcctataaacggatgtgcaagtaggagagatatcaccaaattcttctmctagcaaggaatattaaatattaagaccctaggaaaagaattgcattcctggggggtggtctataaatggcccctctgggagtgtctgtcctatggggttgagataaggattgaaatacaccctggtctcctgcagtaccctcaggcttattagggtggggaaaaaatcccaccctggtaaatttgaggtcagaccagt

SEQ ID NO: 99652 - DNA, 524 bp, Homo sapiens
ttatgtaggtaccagatatggctagatagaaattatagcagagaaaaataaaataacaatagacgaaacactgttgaacctctacaagacccaggaataacaggaaacatgcagatctgtataagaagattgtcaactttcacagcagaatgtgaaggaaacatgagtaaatgggaagcatttcatgtcctcagttgggaaaatraaacattttaactaatttcaggtttaattatattataatttttaaaatttaatgcattatattttagatttcaatgtagttctaacctaagaataaataaatagcaaagcatgtttggaggttgtggaaatcttgagtatgtttcctaccagatgttaaaacatgtttaaaatgacaatgattaaaacaatgtactgttattgacttacttgaacagatggcacacacaaaccgggtgacttgaggagagttgaataaaggaactgtttataaaagtgtaggcagattttagagaaacgactaaggaattatatgcaat

SEQ ID NO: 99653 - DNA, 606 bp, Homo sapiens
ggcatgtttcctcctctcactgtaactggcagcagtgtgcttcattgtcacgctcagagcggacccccccccccacaggttgcccaccccagggcaagacctagatcctggtgagccttggtgggacctgtgcccagcacaacacacawggacagcccagcaggggtagctgtgcagccagtggagtggcttctgtgcccagcatgccctctctggggctcattctcgtgtttcctaccctaattctaagctcattcttcagagctcacagtgcccctgacactccctggtccccctctctgcccagtgaccaaagctggcttgtccctgcacgcacgaggcaccactccatcacatgacttccatctgcctggcaaatctgcaccatttttggaagcagctgaaatcccatttacccagtaaagtcagctgaaataatcctagagaaagttcaccacctcttcctctgcctgtgcctctatcacagatttaataacacacccttgtaattcatcttgcttatgtgggtgttttctccatgagttcttcaagaaaagagctggattctgttcatctttgttcttacccctgagtatccaactcaga

SEQ ID NO: 99654 - DNA, 606 bp, Homo sapiens
ggcatgtttcctcctctcactgtaactggcagcagtgtgcttcattgtcacgctcagagcggacccccccccccacaggttgcccaccccagggcaagacctagatcctggtgagccttggtgggacctgtgcccagcacaacacacatggacagcccrgcaggggtagctgtgcagccagtggagtggcttctgtgcccagcatgccctctctggggctcattctcgtgtttcctaccctaattctaagctcattcttcagagctcacagtgcccctgacactccctggtccccctctctgcccagtgaccaaagctggcttgtccctgcacgcacgaggcaccactccatcacatgacttccatctgcctggcaaatctgcaccatttttggaagcagctgaaatcccatttacccagtaaagtcagctgaaataatcctagagaaagttcaccacctcttcctctgcctgtgcctctatcacagatttaataacacacccttgtaattcatcttgcttatgtgggtgttttctccatgagttcttcaagaaaagagctggattctgttcatctttgttcttacccctgagtatccaactcaga

SEQ ID NO: 99655 - DNA, 522 bp, Homo sapiens
tcagggacccttcttagtgctactataagtaacaacagtgagtcagacgggtgcaaaccctttggaagactcagtctgcaagccccagggagcacaggggggctggagggaaccgggggagggatgcacaggcgagaaatgcccatgacccggtccacaggtcatgcaygtccacactttctaaaaaaccacctacaagaaaggggttgtttcctggcccccagtggggtgcagaatgtcagtgctgggctgcaccctgggcagggctgctctgggcagcatcgccacacccgtgtcccattcttggggtgcatccccttctcacatctgtgtctaaagccaggaatgggcagtgtgacctgaggaaaatcagggacaccctctgtgtcctcatatgcaaacatgtctctttcatgccagttaaatgaagaaaaaggcaagacctaaatcctgaactcctaccgctataacacattcctctgcgctaaggaactgacattctaaaggtgcagatacccccgg

SEQ ID NO: 99656 - DNA, 570 bp, Homo sapiens
aattggctggtttaatttggaaactgcagctattcacagatgctacatcgtaagactgagtacatgggaatttgattacatatttgcctgataattctcacatcaatccactcatccctttactttataaaatctgaatgaacttattttgatgattcaaaatttgaagkaatttagagaacagtagagatgtttaaattatttaattaaaatatagagttcctgaacattactcttggatataatatatatacatatttacatatatatatatacattcatatatatacatattttctttaatatttcaaatacaaagcttttatatttatacttatttcagttaactataaactattaaagatgagatttacagtctaaagccaagcacaagtgttccaatatctctgctttcagattgtacgctttgggtcaaacgtctaacctctttgagcatccgtttcataaactgtaaaacaatgatactaacgtctttgagataacggctttgagaaatcaattaagatggcagaaattcatcctgaaactgtgactattatatgattcgga

SEQ ID NO: 99657 - DNA, 588 bp, Homo sapiens
tgaaacaaaaagcacatcaagaaacaaaaacaaaaacctacaaaagcaaaaacaaaagaaaaaaagtgtaaaactcaacatttttaaaacctatgaaatagcctgtcattttgtagctggcatcaaactttagcttatcataagcagtgttatcaaaaaacagtacttaggataaaccttttctgaggaagatcagtatttcataaatgtttacaaccttattattatccattgtttaaaataaaaataaaatgatatgataaacgggattgtctttctcttaaaattacaaacacaaaaaatatttttatcactgctttcaccarttgtgacaatttattttcaacactcatacttagtattttatgattttttttctggtaataaaatcattgtttgttaaagaaaataatttgaggtgctattttaattgaacttcagagctccagtgtcatggattagtgatttcttttttgggagagtaagttcaagggatataccatgaaatacaaatctatgaaaattcatataaagcctttcagatcaggaaaagaaactttctacacttatgtcaatgtccttattata

SEQ ID NO: 99658 - DNA, 566 bp, Homo sapiens
caaagtcagagtcaagttacctatgagagagtctccatcctggctcccattaggtacaatctcgtgagctttaaagaagtattgatgtaggggcctggtcccagaaacatcaacttctttggttttatagttaagctcattgctatttgctgaaaactctctaagtgatctgaatgggaatccagggttgagaatcaccacccatcacaatctgcttgccttcccccttcttatccttttatccatcttcccatccttcaatacaccccagacacacaggccacctggcaccccagctactctcccacctcagtctttgcgctggctgatgctctctctagtattcacatggagcatggtgagcctccttctggtctttaaagtgtcgaataccctacacaaagatccctagaaaattatgagcagaagaatcttgattagcctcttgtaatgtttccttctgaatcaaactccccaagctagatkagattgcatttccttcacaaatgagtagatctgtgatatgataatttagccttcaccctggtgagctgaggctgcaaaat

SEQ ID NO: 99659 - DNA, 595 bp, Homo sapiens
cttaatagtggatataggattttatcctaagagatctaagtatagatctattttcatgaggatggacaaaaagaatcatactactgacattttgaggtaaccaacagctaccatccaaatgtaaattctaagtctttggtaaaggattctttttgaaaacgctgttcttttagtaggtttgagaagtaaaatttggtctgtttttttccttattctaatggttaaacctcagttcgtgccctaagtctagtaaaggaaaggcctttggacttggatcaggagcttttgttcctaactctccctttgcctttcacaggatgtgtgatcttaggcaggagactaatgtcttggaacctgttttcacatctttcaaatgaaggaccagactggtctctgggatyacagctttcatgttctaggactgtgtatgcgattataactgagggggtggggcaagatcctttattgcgttaataccttctttgtattgctgtaatatattgctttctttctaacttagagctatttttagtaagaaggcggtgagactatcacacacactgaatcttgcctatgatcagttggagttttagaa

SEQ ID NO: 99660 - DNA, 576 bp, Homo sapiens
tccacatagtgttaaaatccaaaacccaggatttaacataaaaactgatgaatctagactttggcaaaaacaaacccaaaattactctgcagagacactatttctattcaggctataggggatgctcacagaatgaatgcayacactgaaaatgagcttgtaatcaaaattcatgaactattcaaaggaagaatgcaccataataaagagtaatcagacagaacaaacaggacaattaggaatcaaagaacctgagatactagataaatccaaagataaaaattttttaaagcatttaagagaagcaatgaaaaatgtaataagagaataaggcaccagaataaaaaatatagattttaaaatataatattgaggttaaaattttgacaagtcaaacaatggctagacacagctagaggaagaaatggtaaagtgaaggaaacatatgaggaaattactcagaatatagcactaataaaaaggaaatgaaaaacacagaaaaacaattaagagataaggagtttggaatgcaaaggttcaacataaaactgatatgagttccagtgaaagagaata

SEQ ID NO: 99661 - DNA, 576 bp, Homo sapiens
tccacatagtgttaaaatccaaaacccaggatttaacataaaaactgatgaatctagactttggcaaaaacaaacccaaaattactctgcagagacactatttctattcaggctataggggatgctcacagaatgaatgcatacactgaaaatgagcttgtaatcaaaattcatgaactattcaaaggaagaatgcaccataataaagagtaatcagacagaacaaacaggacaattaggaatcaaagaacctgagatactagataaatccaaagataaaaattttttaaagcatttaagagaagcaatgaaaaatgtaataagagaataaggcaccagaataaaaaatatagattttaaaatataatattgaggttaaaattttgacaagtcaaacaatggctagacacagctagaggaagaaatkgtaaagtgaaggaaacatatgaggaaattactcagaatatagcactaataaaaaggaaatgaaaaacacagaaaaacaattaagagataaggagtttggaatgcaaaggttcaacataaaactgatatgagttccagtgaaagagaata

SEQ ID NO: 99662 - DNA, 300 bp, Homo sapiens
gccctggaccctctgtgctgycctgctggtgttgacaagcccggcagccacgctccttggcagcccattcctgtggcgggagctgcaggaggcaccactgtcactggccaagggctggcagctcttcctggcagcactggcccagggtgcgctggagcaccacacctaaggcgccctgctcttcccactgctgtccctgggcctctgcccttgctgactacttttctggaatgtgctcttctggaagtgagatctgcctgtccggggcaccaggctgggacagagactccccaaggaccc

SEQ ID NO: 99663 - DNA, 629 bp, Homo sapiens
tggtacatgtgcaggtttgttacatgggtatatttcgtgatggtgaggtttggggtacaactgatcccatcactcaggtagtgagcctagaatccagcaggtagtttttcaacccttcccctcctctgtcccttcccctcaggaatccccagtgtctactgttgccatctttgtgtccatgagtacccagtgtttagctcctacttataagtgacaacatgcaaaatttggatatctgcactctgttaattcacttaggatgatggcctctggctgcatccatactactgcaaaggacataatttcattctttttaaatgactgcatagtattccatggtgtatatgtaccacattttctttgcctaacccaccattgatgagcaccyaagttgcttccatgtctttgccataaaacaaatgttcttacaccctacaggagagaggaataaaactgtctttctggaaggctctttggcagctcctttcaaaagccttgaaggtgaatatattttaaccctggacttccattcctgggaatttatctgtaggaaagaaggatgcattcagagatttagccacaaaattggtggtggctgacggtttataatattgaaaaattggaaacaa

SEQ ID NO: 99664 - DNA, 475 bp, Homo sapiens
caaccagtagaacttgaggaaaaaaaaaaacataattagctgaaaatcagttgaaggaaagcattactatttcaagccctttaaaaggggagagaaaaccaaaaacagcaagatgcaataraagttaaacttcgggttaaaaaatcaaaatatcttataatttattaaaacaaaaattaatccctacaaaatttcattgttccaaacaaaaaactcaaactcgtcttccctgctggcagtgagctcaaactctataaaggagttgcctgccttccatcatcatcgaaacaggaaatcttgccttcatcgttggaagtaagcaaaattccaagaaaaaagaggagggcttgtaattctagaattttgggagaccaaggcgggtggatcacttgaggtcaggagttcaagaccagcctggccaacatggtgaaactctgtatctattgaaaatacaaaaatgtgccaggcgtagtgg

SEQ ID NO: 99665 - DNA, 583 bp, Homo sapiens
gtttgagccataaagttagctcatgctggtttcaagcaatagaagatttgtcaaaggtcatgggcatctccactcagaatcccttcgtggttaccaaaatgtaaaccyagaaaatctaagacaggttacagttaatttagaaagtttattttgccaatattgaggacaggctcccatgacacagcctcaggaggtcctgaagacaactgcccaaggtggtaggggcacagcttgattttatacattttagggagatataaaacatcaattagtatgtttgagatgtacagtggttcagtctggaaaggtgggacaactcaaggcaaaggtcagacaacttgaagtggggagagggcttccaggtcataagtggataaaatgaaaatcactgcattcttttgcatttctgattaggctctccaaatgaggcaatcagatacacatttatctcagtgagcagaggggtgactttgaatagaatgggagacagatttgccctaagcagttcccagcttgacttctccctttagcttagggattttgtggccccaagatttagtttccttttacaccactcttaact

SEQ ID NO: 99666 - DNA, 583 bp, Homo sapiens
gtttgagccataaagttagctcatgctggtttcaagcaatagaagatttgtcaaaggtcatgggcatctccactcagaatcccttcgtggttaccaaaatgtaaacctagaaaatctaagacaggttacagttaatttagaaagtttattttgccaatattgaggacaggctcscatgacacagcctcaggaggtcctgaagacaactgcccaaggtggtaggggcacagcttgattttatacattttagggagatataaaacatcaattagtatgtttgagatgtacagtggttcagtctggaaaggtgggacaactcaaggcaaaggtcagacaacttgaagtggggagagggcttccaggtcataagtggataaaatgaaaatcactgcattcttttgcatttctgattaggctctccaaatgaggcaatcagatacacatttatctcagtgagcagaggggtgactttgaatagaatgggagacagatttgccctaagcagttcccagcttgacttctccctttagcttagggattttgtggccccaagatttagtttccttttacaccactcttaact

SEQ ID NO: 99667 - DNA, 583 bp, Homo sapiens
gtttgagccataaagttagctcatgctggtttcaagcaatagaagatttgtcaaaggtcatgggcatctccactcagaatcccttcgtggttaccaaaatgtaaacctagaaaatctaagacaggttacagttaatttagaaagtttattttgccaatattgaggacaggctcccatgacacagcctcaggaggtcctgargacaactgcccaaggtggtaggggcacagcttgattttatacattttagggagatataaaacatcaattagtatgtttgagatgtacagtggttcagtctggaaaggtgggacaactcaaggcaaaggtcagacaacttgaagtggggagagggcttccaggtcataagtggataaaatgaaaatcactgcattcttttgcatttctgattaggctctccaaatgaggcaatcagatacacatttatctcagtgagcagaggggtgactttgaatagaatgggagacagatttgccctaagcagttcccagcttgacttctccctttagcttagggattttgtggccccaagatttagtttccttttacaccactcttaact

SEQ ID NO: 99668 - DNA, 583 bp, Homo sapiens
gtttgagccataaagttagctcatgctggtttcaagcaatagaagatttgtcaaaggtcatgggcatctccactcagaatcccttcgtggttaccaaaatgtaaacctagaaaatctaagacaggttacagttaatttagaaagtttattttgccaatattgaggacaggctcccatgacacagcctcaggaggtcctgaagacaactgcccaaggtggtaggggcacagcttgattttatacattttagggagatataaaacatcaattagtatgtttgagatgtacagtggttcagtctggaaaggtgggacaactcaaggcaaaggtcagacaacttgaagtggggagagggcttccaggtcataagtggataaaatgaaaatcactgcattcttttgcatttctgattaggctctccaaatgaggcaatcagatacacatttatctcagtgagcagaggggtgactttgaatagaatgggagacagatttgccctaagcagttcccagcttgacttctccctttagcttagggattttgkggccccaagatttagtttccttttacaccactcttaact

SEQ ID NO: 99669 - DNA, 583 bp, Homo sapiens
ggccaaaagatacaaacagacacttcttaaatgacgacatccaagtggccaacaaacataccaaaaagtggtcagcatcataatcattagagaaatgcaaatcaaaatcacaatgatatactatctcacaccagtgagaatggctttgttaaaaagtcaaacaataatagatgctggctaggttgcagagaaaatggaatgcttatacactgctggtgggagtataaattagtgcagccactatggagagcagtttggatatttttcaaagaacagggttgaactaccatttgacacagtaatctcattactgggtatatactcaaaggaaaataaattactgtactgaaaatacaggtatccatatgctcatcrtagcactattcacaatagcaaagacatgaaaccaactcaggtgctcatcagtggaggattaaagaaaatgcgatacatatgcaccatagaaaataatgaaattatgttatttgcagcaacattgaatagagctggaggtgattatcctaagtaaactaatgcacaagctgaaaaccaaataccacatgctctcacttataagtgggag

SEQ ID NO: 99670 - DNA, 559 bp, Homo sapiens
ctaaactgtttatattgtatgaataattttttacttagttttgtccttccaattattagattaaatatccttggcaaaattaacaatgaaagtactttttcaagaattcactcactaaaagcagtaagaataatctggctgtatggtattctttttctcctccttcttgcctcacctaataatagtcacgagatcaagatgaaactaccagaattcagttgatctaaaaatagatagagtctcgtcaggccagctgttaagaaaatgagagtaaaggaatgctcagccagaactgaataattaaactctgcaatgatcatgaaatgyagaggactaagtcactggtctgagtggcaggcagttggacccgagcagggagacagggagtaaaactgaaagtgctatcaatatcaagaagagtcactcagaagcatagtattcaagttgacaggcaaaactttaaattttaaatagagtttctaggttggatacatgcaggaagtcagaaattcacataagctgttgtagaaggagagatagattcacatacaatggcagc

SEQ ID NO: 99671 - DNA, 595 bp, Homo sapiens
gatacaaaaattgactcaaaatagatcaaagacctaaatgtaagacgcaaaacatacacaactcttaggtaataacatagggcaaaaacctcacaatattagatttggaaatgagttaacagacatgacacaaaagacacatgcaacaaaagaaaaattagacaaattggaatttataacttttttttttttttctgagacagagtcttactctgtctcccaggctgtagtgcagtggcacaatctcgactcactgcaagctccgcctcccgggttcatgccattctcctacctcagcctcctgagtagctgggactacaggcgcctgccaccgggcccggctaatttttttttttttttgtattattagtagagacggggtttcaccatgttagccaggatggtcttgatctcctgacctcatgatccgcccgtctcggcctcccaaagtgcwgggattacaggcgtgagccaccgcacccagccctataacatttttaaaaaatatttatcaaaagacactaccagcataataaaaaggcaaccagcaaaatgacagaaaatagttgtgaattttatatctataaggtattaa

SEQ ID NO: 99672 - DNA, 514 bp, Homo sapiens
gaaagattcaaagtctggcgagggycagcttcttagttcatagatgctcatctttttaccaagtccttacatggtgaaagagacaaaggagctctcagggacctccttcataaggacactaatcctatgtctgaaaactccacctttatgacctaattatcttcagtggcgctccatcttaatgatattgctttgggggttaggattttaacaaatgccttttgaggggacacaatttccatagtactgtgttatatacacggttgtacagtctgtacacagaccgtacagtataatctttaacacaggtactatgctctattatataggtcaaaacaacttaataggaataatttccacagtgaccaatacgtgtcactgtgtagcctcaacaatttaagttatcatttagcatctctgtatagccacagtttgagaactgtggtcccatagtaaattacttgctgttcagactagtgtagagtctatttttcagtcttttcaatgtttccaa

SEQ ID NO: 99673 - DNA, 608 bp, Homo sapiens
ttaagtacctgtttaaaaaatatatattttacaaattaacagttacatccatttgaaaattcccttcttcattcaaaaaagtaatgcaagtctacatatggcaatatactattttcttcccttttgtgaaagccatttttggtgcacatatgaattcagacagttctttcaacaactccatgcattctataccacagcaaagatcatgttcatgtaccayggaaaatttttttttattgtggaaataccctcaacacaacatgtggcacacagcagatatgcaaattatctaagattccttcctgctcccaaattgagtgatattgctttgtacttagaacaaaaaattaaacctattattactcaagtaaaaatcaaaaacacaaaatagcatttagaaaattttactaaaattctattcttaatgattatctccaaagtcagaaaagaaagcaacaaattactttctttaatttttctatgtaatacatatctatgttgaatgaattctatttacaagacatacctataaaaaattagaaaaaaattcgaagtttttataaatttaatgctggtataaataagtgatacacacagtttaaaaggta

SEQ ID NO: 99674 - DNA, 392 bp, Homo sapiens
caatcactcctacacaacgatgcttccataaaaactcacatggactgggttctgggagcttccagatagttgaacacatgcaggttcttggagggtggtgcatccacccggagtgggcatggacgctccaagctccttctcccatacttcaccctatgcatattttccatgatgtttccctgagttctgtgagctgttctagcaaattaaattgagtccgaaaagggtgtcatgggaacccccagcatatagcctgtcagtcagcagctcaggccacaatctgtgctggccactggcatctcaagtggagagtagtcttgtgggactsagccatcaacctgtaggacctgacactatctttaggtagtgtcaaaatagaattgaattagagg

SEQ ID NO: 99675 - DNA, 520 bp, Homo sapiens
atgttttaatttcttttaagcacatttttgtattgtatgtaataaaatatggatacaatttcattcttttgcatatgaacatccagttttcccaggaacatttattgaagagactattatttccccattgtatattattcatgcccttgtcaaagactaactgattatatatgcagggtttatttctgggatctctattctgttccattgttctgtgtgtctgtttttatgccagtacctcactgttttgattactatagctttgtaatatagtttggaattagggagtatgacgcttccaactttgttcttcttcttcttcttttttttttttttttttttagatggagtctcgctctgttgcccaggctggagtgcagtggcatgatcttggctcactgcaacctctgcctcccaggttcaagcaattctctgcctcagcctcyctagtagctgggattacaagcacctgccaccacgttcggctaatttttgtatttttagtagagataggatttca

SEQ ID NO: 99676 - DNA, 546 bp, Homo sapiens
caatccaatcaagttgacactcagtattaaccatcacaacacataagtcattaacttaatcatgacctgtttccaatccaggaatgaagttctgttcttagaggaacttcctaagtacrtaagtacacagaggctcactttcccaatctaaaagctaagactgttccaagtgcatatgctttctgtttttttctatatttgttatctcacagaaacattgatttgccattggttcttgcaaaatcagtattttataactggaggtggtgttaaggtttattttgtataaccttttgattttatccctatggagactaaagaccagcaaggttaagaccagcagatctggaacaggttattatagaaatttgtatattatgttgttgctagcaaatggaattattgcaaggagatgatggaaaagatagtatttctgatatctccaagccattgtttttcaaaatgtgttgttcaaaccctccgcattgggatcagaggtggtgcatactaaaattcagactcccaggtcctattccagatctgctg

SEQ ID NO: 99677 - DNA, 548 bp, Homo sapiens
cttccccttcttataaggccactaatcctattgaattaagaccctacatttatgacttcatttaactttacctcctaaaggccctctctcctcacacagttgcctcaacatttgaatttgsggggaacacaaatctgtccatagcagtaagaatcactatccaagaatgattacataactttctcaaggtcacacagtggtgaatgatggagtttcaatttgaatcatggcaggctggctcaagagaccatacttagctgcgatcttatgcttcctctaaggatcaatgaaaagagggcatattaggtatgacatagctgtctccattaacggtttctctctactcaatactttattgtgatttcttgtttaacaacgtgcttttattccaatctaatttcctcccaaattatctgttttctattagtggaactgtaacagcatgacttttccttttccaaaaccagtacaactaacaaatgtaacatgggagaaaataggctaaattgtattgactacgtgctattagcttctagggacagatttat

SEQ ID NO: 99678 - DNA, 548 bp, Homo sapiens
cttccccttcttataaggccactaatcctattgaattaagaccctacatttatgacttcatttaactttacctcctaaaggccctctctcctcacacagttgcctcaacatttgaatttggggggaacacaaatctgtccatagcagtaagaatcactatccaagaatgattacataactttctcaaggtcacacagtggtgaatgatggagtttcaatttgaatcatggcaggctggctcaagagaccatacttagcygcgatcttatgcttcctctaaggatcaatgaaaagagggcatattaggtatgacatagctgtctccattaacggtttctctctactcaatactttattgtgatttcttgtttaacaacgtgcttttattccaatctaatttcctcccaaattatctgttttctattagtggaactgtaacagcatgacttttccttttccaaaaccagtacaactaacaaatgtaacatgggagaaaataggctaaattgtattgactacgtgctattagcttctagggacagatttat

SEQ ID NO: 99679 - DNA, 390 bp, Homo sapiens
tctaatatccataatatataaggaactctcacactttaacataaaagaaacaacccaattttcaaatgggcaaagtacttgaatagacatttttctccaaaagatgctcaacattatcagtcaataaggaaacacaaataagaaccacaatgagaactcactttatatctactaggatggmtataatcaaaaagagaaaaattaatatgttagggaaaatgtggagaaattcgaacccttgtgtactgttgcacaagcgttgtaaagaaatgtaaaatgatgcagctgctgtgaagaacagtttagagattcttcaaaacgttcaacaggattactgtatgacccagaagttttattcctaggtatatactcaaaagaatatactcaaac

SEQ ID NO: 99680 - DNA, 558 bp, Homo sapiens
tgtatgaagccaaaataaagacaattccaagattcctcttctttaaataaggtgaagacccttaaagatggagaaaaatagtcaaagaagaaggcaaagaatcatagaaaattggagrtaggtggatgttaagcacattttattttttattttcattttatatacataaaaattgaggctcaaacaaatgaatattcttagtcatgattacatagccagcaaatgcattgatgaatatacagctaaatcactttccattatacaacactgaatttgaagaaataagatcacattatggatgtaaggcaaacataatagcccagggtcaatatggcagagaaataaaagttagcatttttctatcttaaaagtattctggattttccccccatcttcataaggttggtaacaacaataatggttcatggacaacctagaatatttcatatttaaactagagtcttttctcatggaaaacaaaccatccatgtcttgatcaaaacaggggcatgaattactagaagaataagagcaaagaagaaataagcataaaatgtt

SEQ ID NO: 99681 - DNA, 558 bp, Homo sapiens
tgtatgaagccaaaataaagacaattccaagattcctcttctttaaataaggtgaagacccttaaagatggagaaaaatagtcaaagaagaaggcaaagaatcatagaaaattggagataggtggatgttaagcacattttattttttattttcattttatatacataaaaattgaggctcaaacaaatgaatattcttagtcatgattacatagccagcaaatgcattgatgaatatacagctaaatcactttccattatacaacactgaatttgaagaaataagatcacattatggatgtaaggcaaacataatagcccagggtcaatatggcagagaaataaaagttrgcatttttctatcttaaaagtattctggattttccccccatcttcataaggttggtaacaacaataatggttcatggacaacctagaatatttcatatttaaactagagtcttttctcatggaaaacaaaccatccatgtcttgatcaaaacaggggcatgaattactagaagaataagagcaaagaagaaataagcataaaatgtt

SEQ ID NO: 99682 - DNA, 591 bp, Homo sapiens
aaaaccacaatatcttcctgaaaataattaaaaaataaatagacattttatgtttgaagattggaagacttaatgaggataacagtcctccaaaactgatctctagattcaatttaatacccatcaaaattccagcagaattttttttggacaaaaattaataaactcactctaaaatttacatgggaatacaaaggacccagaagcaccaaaataaattttgcaaagaagtaaaaaattggagcattcactgtacatgatttcaatacttactataaaggyacattaattaagacagtgtcattttggaataatgacaggcatatagatcaatggaacagaactaagcgtccagaaagaactcttatatttatgatcacttggcttttgacaaaggtgccaaggtaacttgatggggaaatattctctttccagaaaactgtgcaggggaaaatctgatatccatatggccacacgcaaaaatattaatttaaacctttacctcatactatgcacagaaatagactcaaaatagatcacggacctaaatgtaaacgctaaaattttgaaacttttagaaaaacacagagg

SEQ ID NO: 99683 - DNA, 591 bp, Homo sapiens
aaaaccacaatatcttcctgaaaataattaaaaaataaatagacattttatgtttgaagattggaagacttaatgaggataacagtcctccaaaactgatctctagattcaatttaatacccatcaaaattccagcagaattttttttggacaaaaattaataaactcactctaaaatttacatgggaatacaaaggacccagaagcaccaaaataaattttgcaaagaagtaaaaaattggagcattcactgtacatgatttcaatacttactataaaggcacattaattaagacagtgtyattttggaataatgacaggcatatagatcaatggaacagaactaagcgtccagaaagaactcttatatttatgatcacttggcttttgacaaaggtgccaaggtaacttgatggggaaatattctctttccagaaaactgtgcaggggaaaatctgatatccatatggccacacgcaaaaatattaatttaaacctttacctcatactatgcacagaaatagactcaaaatagatcacggacctaaatgtaaacgctaaaattttgaaacttttagaaaaacacagagg

SEQ ID NO: 99684 - DNA, 508 bp, Homo sapiens
tttttattttttccttttgtcttctctgactgtgtatctcaaatagcctgtcttcaagctcactaattgtttcttctgcttgatcaattctgctcttaaaagactctgatgcattattagtatgtcaactgcattgttcaactctggaatttcttcctgattccttttaattattttaatctgtttgttaaattaatctgataggactgaattccttctctgtgtcatcctgaatttcattgagtttcctcaacacagctattttgaattctctgtctctccataattggtcactggtgccttattaaggttttctggggaggtcatgttttcctggatggtcttcatgcttgtggatgtccatcagtgtctggacatttaagagttagctatgaattgtaggcttcacagtctgggcttgtttgtatttatccttcttttgaaggctttccagttattygaaggcatttgggtgttgcaatctaaggtttgggttactgcagctgta

SEQ ID NO: 99685 - DNA, 621 bp, Homo sapiens
aagaacaatttttgaaagaattttagtgcaaaagastgggttccacttctcaattgctaaaaattatcagctaagattcccacttttccttcacatactgtctttagcttaaagaagacaagttccttagggttagtgggggagcgggaggtgggtaggatggagacacagccaagcttgaaatgatgctgacaagggccagggcaggtgggatccatgtggatgctagttcatgttctccaactgcttcttaatgtcaagttcaatattgttcatgttgaatgatgtatttttgcatcagtggaggtattcctgcaaagctgagtatgtgttctagaacacatactagtgttctaggaacactagaatatgtgttcctaccacctagaatgctggctcttcatttgactaacacctaatcattcttcaggtctaagctcaatgtgactttctctaggaaagcatatgtgactcctaaatctaaattaggatcccattacatttttctctcttaggaccctgtttctttccttcagagaaatatatgtatagaaatatatgtaaatgtagaagaatataatgcattattatatattaagatctcgtatttgttaaaagttc

SEQ ID NO: 99686 - DNA, 621 bp, Homo sapiens
aagaacaatttttgaaagaattttagtgcaaaagactgggttccacttctcaattgctaaaaattatcagctaagattcccacttttccttcacatactgtctttagcttaaagaagacaagttccttagggttagtgggggagcgggaggtgggtaggatggagacacagccaagcttgaaatgrtgctgacaagggccagggcaggtgggatccatgtggatgctagttcatgttctccaactgcttcttaatgtcaagttcaatattgttcatgttgaatgatgtatttttgcatcagtggaggtattcctgcaaagctgagtatgtgttctagaacacatactagtgttctaggaacactagaatatgtgttcctaccacctagaatgctggctcttcatttgactaacacctaatcattcttcaggtctaagctcaatgtgactttctctaggaaagcatatgtgactcctaaatctaaattaggatcccattacatttttctctcttaggaccctgtttctttccttcagagaaatatatgtatagaaatatatgtaaatgtagaagaatataatgcattattatatattaagatctcgtatttgttaaaagttc

SEQ ID NO: 99687 - DNA, 529 bp, Homo sapiens
accgtactcaattcagtgctaaatacatcttagctaaatctaaaacgttttgtgtgctgaattcagtatactttactgacaaccaccttgtttctaaggctctattaaaaatgaatgcccttttatgttgataattatttttgatggaattagagaagatactctagtaaatacagacattttaatctcctataaaagctaacctgtggttaatatgccatttgtaaaaaaacaaaacaaacaaaacacacgtttttgcagagaaaatggtaggtttstacaattactttggagagcagtgacagctccacctttacataacaggttgtgaaggatcaagggagcattacctgaacctgagattcacctagctgtggatttttagtcaggcattttctagtattatctagagattctttaggcatttaatcctggaattttcaaagttacttgtaaatgattaaaagggaaatgccaattcacaactctcctggaacataaaatgggtagtttgcactattaaggtatc

SEQ ID NO: 99688 - DNA, 508 bp, Homo sapiens
tggaccatagtgcaataaaaacagaaatcaataccaagaagatgtctcaagggtacacacatttatagaaattaaacaacttgctcctaaataactcctgggtgaacattgacattaaggcagaaattttaaaaaatatatatttgaaattaatgaaaatgaaacacaacttaccaaaataactggcatgtagccaaaatagtgttaagaggaaaggttatagccataaacactttyatcaatatcaaaataatgttaagagaaaagtttatagctgtaaacacctttatcaataagattgttctcaaattaacaatctaacttaccacctaaagaaactaaaaacaaacagcaacaaaagatagaacaaaccagtcccaaagctagcagaagcaaagtaaaaactaaaattagaaaacttaataaaattgacattaaaaaatccacacaaaagattcatgaaaccaaaagtttgttatttgaaagcataaataagattgatagacac

SEQ ID NO: 99689 - DNA, 586 bp, Homo sapiens
aaaattccaaatgggaaataatataaatggagtgaattctagggtgctattaaaatggatggaggcaaggggacaataaaaacccaaatattggcctatttacatataaaatggctctattattaaaacccaaatattggcttatttacatataagactgctctattattaattggatttttgcaattcaggcagctagtaatttgtgttggaccaatggagcagtgcttttcacaagactgcatacccaggtggttttggtcttctcaattgtaaatatgaattttggaatccgtagcttcaatgagatgcaaaactaatactttattaagtcaatgtaattaccctggaaccagttcttatgtgagagatttaaagagagagaaaaagaatggagacagaactactccatgcagtaatcactctaactacatgaaattcatcattactccattagaaaataatatttatcatctcctatatgccaagtacttttgtgggcactatgattatagcastgaaaaactaagttagcaacatatgaagttcatatgttagtttatagatatagaaaaagctgcagaga

SEQ ID NO: 99690 - DNA, 658 bp, Homo sapiens
tgataccaaaggctggcaaggacaaaacaacaacaaaaataaaattgcagaccaatatccctgatgaacatagttgcaaaaatcctcaacaaaatactagaaaaccaaatctagcagcacatcaaagagtcaattcaccaccatcaagtagcttcatttctgggaatgcaaggtcagttcaacatacacaaatcaataaatatcattgaccatataaacataattaaaaacaaaaatcatatggtcaactgaataaactcagagaaatccttcaataaaatccagcacccctctatcataaaaaccctcaacaaactaggcctcaaaagaacatacctcaaaattataagagctgctcatgtctgcaatcccagcactttgggagtctggaggcaggtgaattgcttgagctgaagagtttgagtccagcctgggcaacatggtgaatccctgtctctacataaaatacaaaaactagctgggaatggtggcacatgcctgtgttcccagctaccgggaagctgagrtgggaggattgcttgaacctgaggaagtcaaggctgcactgagttgtgatcttgacaattacactccagcttacgtgacagagcaagaccctatctcaaagtaataataatagccatctgtgacaaacccg

SEQ ID NO: 99691 - DNA, 625 bp, Homo sapiens
cccatgtaacaaacctgcacttacatatcctatatgcgtagytgacatttttaaaaaatctcataacttgagtaatttgtatttttgatatgttactttttgtcattccaaattatagcaagttaatctcttatacatttattaacttttttactatttgtaaataggatatacgctactaaaaaattgagacagtaactaatgaagtaaaattttaaagcattaaaaaataagtcaataaaaaatatacttttaatgtaggtacaatatcttctataaacaattcacaatcctgtacataatttgtcgatgttgcttgagcattttagtttcattaatatgggctaatatgaaatttctgcctttcatcattttagggaagctttgacatatttcttccttgtttgccaagagaactttggtgtcctttaatgccaatgctttttaaaaacagtttaccctcagttttgtagaaacacagtagccagggcagatgtgggaagggtggagtttgggagttaaaggtagccaatggggaggagggaagggatcctttcctgtgatcactgacagatttctctactctcaaataagatgccctgcaggctcaatgggatgccacgaa

SEQ ID NO: 99692 - DNA, 568 bp, Homo sapiens
attaaaaacgatgtctctcttatttttcatagctctgatcattgcctgatggtactgggtatctgtgtcactctgtggcagtccatgagtacagagccatgactgtgttcatgactactgcctaaaagagtttctagtaaatagcaaaatatcaataaatactagtcaaatatataaattaatcaatcattgaaatgaaattttttgagaactgaatattgtagctttctactgatttaatttaaagcagagaatagattgtaaattttaaaaaattgattgtttatcccagtggactcataaaggatggcatatgtgtgtrtatatatatatatatatatatatatatatatatatatatatatatatatatttgaaaatcaaggcttctataaatacctgaaataaaaattttaaatgacttacctattagttatagagttggtgagatttgagatttattttatataaatattgaataacttatctgtattcctacccagctgcaaaacaatagagttgggaagaatgaagacttttcagcaattttagttctttccaaggtatg

SEQ ID NO: 99693 - DNA, 576 bp, Homo sapiens
gcaaagggcctcaagggaaaaaaaaaaggccacagatagaatggctgagtgtgtgtatgttgtggaagatgtaatataagtcagacaatcatatttaatgaggagtctgaaaacacatggtgactcatgtattcatgcgagtatgcaggagcctaaacatgctgcgctctattcagaaaaggccacgtgactgtcaaargcagtcataagcaagttatgcaaatcatctcagcagatagcaatgacatatttagacctccccatcatgcatgtgctattgtgccaagaagctattaaagaaaattcttggagagtttcgactctgctgctggtgaagtcttttgtgtgcctgtgacaaatgcgtcaaacacaagaagcaaataagagtcacttgaaaaaaatcatggagtctaagtccacatattctaagtcacaaattagtgatgttaccaaaaatgtccccggttaattgggatagaacttgctcccactgttagaagtgtactagtcagcctaccatgccaaggaacttggctttctagagcagagagaagttctttcagatggataggtgaa

SEQ ID NO: 99694 - DNA, 582 bp, Homo sapiens
ggccctggtgagtgccgttacagtttgacctctgggggcattagaaactgagagtagcaaggtcagtcatgtgggtgctccatgcggagatggttgagcctcaataaaaaccttggacaccaagccttagtgagcctctctagttgacaacacttttaatgttgtgtcatacgtcatgctgggagaattaagctctgtctgtacagttccactgagaaaggacaaatggaaatttgtgcctggtttctcctttacttcatgctgcaaayctttttttctttgctaattttaaattgtattatctctttgtaataaactgtaaccttcaacataataacttttctgagttctgtgaatctgagtgtatcaacaaatctgagggtgatcttggggacccccatcacaagcagaaatggagatgtgtaggaagctgtatctgtaagttaaattcccctgaataacaatgtaaaacatttttgcgatgtaagcagaattgcatctctatattatgtttcttctgtgaaaactatcttaaaaatagattttaatagagtgtgattgcaaattgttgcttgtttttgg

SEQ ID NO: 99695 - DNA, 548 bp, Homo sapiens
gttgctctacttttccaaatcagatccagcatttgacttgctgagttcttaatggtaatttcattctttgttgtccagacctgttatttgactgccatctttgaattacctattttacctaccacatccaattaatctctaagcctttaagaattttccctgatgtaagtcattaacatcaattttgtcctttctttttttactgctacttgcacattctargccctttttcccatctggaatacactagttcctttgctccctaagggatctttcttctctctagtctttctttgttctgaccattccatatagtcaagatcgatcttcttttaagaggactataattttgacattccccatcttagtgttcttcaatgattcaatattgcctactgaataaagttgcaaattctttctttggaatttatgttgtataaatcctctccactccaccaattttatctttgctcattttatgtgttctttaatgtagacataccagagagaaatttttacttcattacttttcccttatttggctaggt

SEQ ID NO: 99696 - DNA, 556 bp, Homo sapiens
ttagtttgggaagatgaaaaagttctggagatgatggcagtgggggctgcacagcagtgtggttgtacttaaagccacgtacactgaaaaaatggataaaatggcaaatattatgttatgtgtgtgtttgccacatacccccaaaaaatcagtcagactgtgtgacatacctgctstcagccctcactcagaatacaatccaagttccttcctcagtggagcaggcctcacactccagccacacggcccctcctgtctcactggcccagcatgtttctgccccaggccccttgcagtcactctgtgttcccttcgcaggctcttctccctggccattgcatggctcattcccatatttaactcaggactctgctcaatcctcactgcttttggccaccctgttaaaatagcacatcccttcaaccccatagcacaccttatttttcttcatgagtttcatcagtgcctgggattatcttaaccactcatttatctgttcattatttgtctcctccagtggagtgtgtgctccatgcagtcagggcctttgccttgc

SEQ ID NO: 99697 - DNA, 556 bp, Homo sapiens
ttagtttgggaagatgaaaaagttctggagatgatggcagtgggggctgcacagcagtgtggttgtacttaaagccacgtacactgaaaaaatggataaaatggcaaatattatgttatgtgtgtgtttgccacatacccccaaaaaatcagtcagactgtgtgacatacctgctgtcagccctcactcagaatacaatccaagttccttcctcagtggagcaggcctcacactccagccacacggcccctcctgtctcactggcccagcatgtttctgccccaggccccttgcagtcactctgtgttcccttcgcaggctcttctccctggccattgcatggctcattcccatatttaactcaggactctgctcaatcctcactgcttttggccaccctgttaaaatrgcacatcccttcaaccccatagcacaccttatttttcttcatgagtttcatcagtgcctgggattatcttaaccactcatttatctgttcattatttgtctcctccagtggagtgtgtgctccatgcagtcagggcctttgccttgc

SEQ ID NO: 99698 - DNA, 551 bp, Homo sapiens
acggaacttggacatggaagcagcaatatgattaacaggtgatttttctccaggaatcatgagactaaaaagtatcggaattatatattcacagtgctagaggaaacaaaacaaaaacaagcaagggtcaaactataattgtatgttcaggaaaataattcttcaaaaataaaggaaaaataatggaatccccagagaaacaaatacataagttgttgttagcaaactgcctttaaaaaaaatactataatcccagcacttgtagagattgagacatgagaatcacttgaggccaagagtttaagaccagyctgatcaaaatagaaagaccccatatctacaaaaataaaaaataaataaattagctgggcatggtggtgtttgcctgtagtcacagttactggggaggctgaagtggaggatcacttgagcccaggagttcaaggacgcattgtgagttatgatggcaccactgcactctgacagaacaagcctttgtctcaaaaataaaaaatactaaaaggtgtttttcaaactgaaaggaactaata

SEQ ID NO: 99699 - DNA, 551 bp, Homo sapiens
acggaacttggacatggaagcagcaatatgattaacaggtgatttttctccaggaatcatgagactaaaaagtatcggaattatatattcacagtgctagaggaaacaaaacaaaaacaagcaagggtcaaactataattgtatgttcaggaaaataattcttcaaaaataaaggaaaaataatggaatccccagagaaacaaatacataagttgttgttagcaaactgcctttaaaaaaaatactataatcccagcacttgtagagattgagacatgagaatcacttgaggccaagagtttaagaccagcctgatcaaaatagaaagaccccatatctacaaaaataaaaaataaataaattagctgggcatggtggtgtttgcctgtagtcacagttactggggaggctgaagtggaggatcacttgagcccaggagytcaaggacgcattgtgagttatgatggcaccactgcactctgacagaacaagcctttgtctcaaaaataaaaaatactaaaaggtgtttttcaaactgaaaggaactaata

SEQ ID NO: 99700 - DNA, 603 bp, Homo sapiens
ccttgggccctgctggtgtgtgcagccttgagacttggtgccctgcatcccagccactccatggctaaaagtggctaaagtgcagctcaagccattgcttcagagggtgcaagccacaagccttggtggcttccacattgtatttggcctgcaggtgtacagaatataagagttaagttttagaaacctctgcctatgaaaacacctggatgtccaggcagaaktttgctgcaggggcagaatctctgctagggcactggggaagggaaatgtggggttaaagcccccatacagagtacccacgggggtactgcctagtggagctgtgagaagaggactaccattctccagaccccagaaagttagatccacagacagcttgcatcgggtgcctggaaaagccacaggcactcaatgccagcctgtgaaagcagcagctagggctgtaccatgcaaagccacaggtgaagagctccccaaggccataggagtccaccctttgcatcagcacatcctggatgtgagacatggagtcaaagaggacatcattttggagctttaagatttagtgactacctagccaggttttagacttacatgggg

SEQ ID NO: 99701 - DNA, 603 bp, Homo sapiens
ccttgggccctgctggtgtgtgcagccttgagacttggtgccctgcatcccagccactccatggctaaaagtggctaaagtgcagctcaagccattgcttcagagggtgcaagccacaagccttggtggcttccacattgtatttggcctgcaggtgtacagaatataagagttaagttttagaaacctctgcctatgaaaacacctggatgtccaggcagaattttgctgcaggggcagaatctctgctagggcactggggaagggaaatgtggggttaaagcccccatacagagtacccacgggggtactgcctagtggagctgtgagaagaggactaccattctccagaccccagaaagttagatccacagacagcttgcatcgggtgcctggaaaagccacaggcactcaatgccagcctgtgaaagcagcagctagggctgtaccmtgcaaagccacaggtgaagagctccccaaggccataggagtccaccctttgcatcagcacatcctggatgtgagacatggagtcaaagaggacatcattttggagctttaagatttagtgactacctagccaggttttagacttacatgggg

SEQ ID NO: 99702 - DNA, 599 bp, Homo sapiens
tacaactttatactattttcatagcacagtattgattatacatttaagaaattatactatactatccacattcctcacttgggagattatataatttctgcaaaatgatttttaagtgtctgtgaagctaccaaaaaaaaacaccctctcttttcattcccacttttgctttaagcagaacattctatttaaggagatatagaaacataaccakaaagaaaaattaacaaaaaattgttcttatagttccagttgacttccaccaggtggcagatattcaatggcatttttttattaacattttttcatttatagtctgtctaaagtgacttaatgaaaaagatgaatatttgggaaggttataaactattttatttgaaaatgtctataaaatgtagacaaaattactaagtttagtaacttaactttactttttctttccaatttgcagtgtggtggtgaactcttcaaaacaaaattgtaaacatgccatttatctacttttgttttcaaattttgatgcagtatcattttttacatttttattatcacatttaaacagtgatataatattttagacttataacagaataaaattt

SEQ ID NO: 99703 - DNA, 599 bp, Homo sapiens
tacaactttatactattttcatagcacagtattgattatacatttaagaaattatactatactatccacattcctcacttgggagattatataatttctgcaaaatgatttttaagtgtctgtgaagctaccaaaaaaaaacaccctctcttttcattcccacttttgctttaagcagaacattctatttaaggagatatagaaacataaccagaaagaaaaattaacaaaaaattgttcttatagttccagttgacttccaccaggtggcagatattcaatggcatttttttattaayattttttcatttatagtctgtctaaagtgacttaatgaaaaagatgaatatttgggaaggttataaactattttatttgaaaatgtctataaaatgtagacaaaattactaagtttagtaacttaactttactttttctttccaatttgcagtgtggtggtgaactcttcaaaacaaaattgtaaacatgccatttatctacttttgttttcaaattttgatgcagtatcattttttacatttttattatcacatttaaacagtgatataatattttagacttataacagaataaaattt

SEQ ID NO: 99704 - DNA, 599 bp, Homo sapiens
tacaactttatactattttcatagcacagtattgattatacatttaagaaattatactatactatccacattcctcacttgggagattatataatttctgcaaaatgatttttaagtgtctgtgaagctaccaaaaaaaaacaccctctcttttcattcccacttttgctttaagcagaacattctatttaaggagatatagaaacataaccagaaagaaaaattaacaaaaaattgttcttatagttccagttgacttccaccaggtggcagatattcaatggcatttttttattaacattttttcatttatagtctgtctaaagtgacttaatgaaaaagatgaatatttgggaaggttataaactattttatttgaaaatgtctataaaatgtagacaaaattactaagtttagtaasttaactttactttttctttccaatttgcagtgtggtggtgaactcttcaaaacaaaattgtaaacatgccatttatctacttttgttttcaaattttgatgcagtatcattttttacatttttattatcacatttaaacagtgatataatattttagacttataacagaataaaattt

SEQ ID NO: 99705 - DNA, 186 bp, Homo sapiens
gaattctgctttggtagagagcaggaagattaaaaattaaggctgtacatgtagctagaatatgcctgcacatcggctccttataagaactctagcacaagccaactgtgagcttcctggtagcaaggtgcttcaccttaatgytggtaatgactggagacttgaagacaagggttgcacagtggt

SEQ ID NO: 99706 - DNA, 612 bp, Homo sapiens
ttacaaatatcctgagctattcattttgtattaaaaatattcagtaattattttctctgcctcttaatcactgaacctattcagtgtgccaagaaagcatgatcacatggaaggacatctgaatagtggagaaatatgaggagtggagggaaaagatccaatatgtttccatttgctctgtgtttgcagtttatcacataggtttctaaattatccttgtctatgaaattcattcccatacaccaacgttaatttccattcaaacccacgggcttgctccctgattgtactctgcacgtgagagttcatggttttcaatatatamagcccgtttgaatcattaacgcttctggctgagaatgagagttaacacaagcactttctaaaaacagaaaaagagggcaaaatacatatacgcttttgcctagccagtttcaatttgcttctagcaaaattatccatttcatccctactcctgcacttctatttcacattaacgaaggagaatatgtacttattaaaatggaaagttgtctcacataaaatgctactgagccaatccaatgaatgttcgcaattaaaggtataataatcataaaaagaagaaaactt

SEQ ID NO: 99707 - DNA, 612 bp, Homo sapiens
ttacaaatatcctgagctattcattttgtattaaaaatattcagtaattattttctctgcctcttaatcactgaacctattcagtgtgccaagaaagcatgatcacatggaaggacatctgaatagtggagaaatatgaggagtggagggaaaagatccaatatgtttccatttgctctgtgtttgcagtttatcacataggtttctaaattatccttgtctatgaaattcattcccatacaccaacgttaatttccattcaaacccacgggcttgctccctgattgtactctgcacgtgagagttcatggttttcaatatatacagcccgtttgaatcattaacgcttctggctgagaatgagagttaacacaagcactttctaaaaacagaaaaagagggcaaaatacatatacgcttttgcctagccagtttcaatttgcttctagcaaaattatccatttcatccctactcctgcacttctatttcayattaacgaaggagaatatgtacttattaaaatggaaagttgtctcacataaaatgctactgagccaatccaatgaatgttcgcaattaaaggtataataatcataaaaagaagaaaactt

SEQ ID NO: 99708 - DNA, 532 bp, Homo sapiens
gaaggaaggacatcatccagggaatagtgcctcctaagcctgtctgcctgatgttattttctctctattttctgggaaagaataaaacaaatccaagaacatctaaagtagcattgacattttttggataaaatctcttcctacattagaaaagcatgatagctgttctcatgatgcctctgtcctgcagtatcatgcaatacataaaacagcactgggcgtttcacgtgtccctggattcctgcagtatcatgcgatacatgaaacagcactgggcatttcacwtgtccctgggattcctggctgacatgtctaactctctctgtggaatcatgagctcttgaaggcacaataaaagtctttcccaacttcatgtgctctatacctagcgcagaatctgaaagatagcacatgctcaataaacttcaactgaatatttactaaatacgtaaaagagaattatcattaaccaatacacttaattaaacttagtcttcctaagttagcagagtacaatttattaaagttcaaa

SEQ ID NO: 99709 - DNA, 309 bp, Homo sapiens
accggcagcttcctccgtccctctctcccaccggggcggggcggccgcggtgcacggactcgygccaaagaccgcgccgtcagcctccgcctgcaggtggagaacgccaggctttatcactctgctgttcacccaacgcaggggctgcacccaggaaaatcctgtcctgtttgagttcaaatagggaagatggggcagaaataactctgcggcgtgtactcgggcagacgcgcgcacactttgattttgctaggaattctgacttgtagagaaccaagctgggaaaccgggccaggagcagggagaggc

SEQ ID NO: 99710 - DNA, 309 bp, Homo sapiens
accggcagcttcctccgtccctctctcccaccggggcggggcggccgcggtgcacggactcgtgccaaagaccgcgccgtcagcctccgcctgcaggtggagaacgccaggctttatcactctgctgttcacccaacgcaggggctgcacccaggaaaatsctgtcctgtttgagttcaaatagggaagatggggcagaaataactctgcggcgtgtactcgggcagacgcgcgcacactttgattttgctaggaattctgacttgtagagaaccaagctgggaaaccgggccaggagcagggagaggc

SEQ ID NO: 99711 - DNA, 511 bp, Homo sapiens
acaccaggaatcctagctactcgggtagctgaggcaggagaatcgcttgaacctgggaggtggaggttgcagtgagctgagattgcattgaatcttggcctgggcaacagagcgagactccgcctgttgtaaaatgtaaaaaaaaaaaatgtaaatgcaaaaatgtaaaaaatgtaaaaaaaaatttatatatatatatatattcatagcaacattattcatagtagatgatatggtttggctgtgtccccactcagatctcatcttgaattgtagctctcataattcctaggtgttgtgggagggacccagtgggagataactgaatcatgggggcggtttcccccatactgttctcgtagttgagaatcaatctcacaaggtctgayggttttataagggggacccccttttgcttgatagtcattctctcttgtttgctgccacgtaaaatatgcttttcgccttctgccatgattgtgaggcctcctcagccacatggaaatgtgaa

SEQ ID NO: 99712 - DNA, 511 bp, Homo sapiens
acaccaggaatcctagctactcgggtagctgaggcaggagaatcgcttgaacctgggaggtggaggttgcagtgagctgagattgcattgaatcttggcctgggcaacagagcgagactccgcctgttgtaaaatgtaaaaaaaaaaaatgtaaatgcaaaaatgtaaaaaatgtaaaaaaaaatttatatatatatatatattcatagcaacattattcatagtagatgatatggtttggctgtgtccccactcagatctcatcttgaattgtagctctcataattcctaggtgttgtgggagggacccagtgggagataactgaatcatgggggcggtttcccccatactgttctcgtagttgagaatcaatctcacaaggtctgacggttttataagggggacccccttttgcttgatartcattctctcttgtttgctgccacgtaaaatatgcttttcgccttctgccatgattgtgaggcctcctcagccacatggaaatgtgaa

SEQ ID NO: 99713 - DNA, 587 bp, Homo sapiens
ccacagctgggggtgcggtgtatggaagctcatcctagctagcacttggagaagaactcacacattgcaaacatatccggttaaaaactggcatttgctgcaactaaaaaaggcaagtgatggtctaggtgaactgccttttctttctctccttccaaaggacaaaattaattttttttttttttttttgagacggagtcttgctctgtcacccagactggagtgtagtggtgtgatctcggctcactgcaagctctgcctcccaggttcacaccattctcctgcctcagcctcccaagtagctgggactacaggtgcccrccaccacgcctggctaatttttagtattttttagtagagacggggtttcgccatgttagccaggatggtctcaatctcctgacttcgtgatgtgcccgccttggcctcccaaagtgctgggattacaggtgtgagccaccgcacccggccccacaaaattaaattcttaattaaggaaactgtttcttttacatctattttttcatcccaaactcaaatgccaaatatttagctattatacatgtattcattttcttagaatacac

SEQ ID NO: 99714 - DNA, 587 bp, Homo sapiens
ccacagctgggggtgcggtgtatggaagctcatcctagctagcacttggagaagaactcacacattgcaaacatatccggttaaaaactggcatttgctgcaactaaaaaaggcaagtgatggtctaggtgaactgccttttctttctctccttccaaaggacaaaattaattttttttttttttttttgagacggagtcttgctctgtcacccagactggagtgtagtggtgtgatctcggctcactgcaagctctgcctcccaggttcacaccattctcctgcctcagcctcccaagtagctgggactacaggtgcccaccaccacgcctggctaatttttagtattttttagtagagacggggtttcrccatgttagccaggatggtctcaatctcctgacttcgtgatgtgcccgccttggcctcccaaagtgctgggattacaggtgtgagccaccgcacccggccccacaaaattaaattcttaattaaggaaactgtttcttttacatctattttttcatcccaaactcaaatgccaaatatttagctattatacatgtattcattttcttagaatacac

SEQ ID NO: 99715 - DNA, 587 bp, Homo sapiens
ccacagctgggggtgcggtgtatggaagctcatcctagctagcacttggagaagaactcacacattgcaaacatatccggttaaaaactggcatttgctgcaactaaaaaaggcaagtgatggtctaggtgaactgccttttctttctctccttccaaaggacaaaattaattttttttttttttttttgagacggagtcttgctctgtcacccagactggagtgtagtggtgtgatctcggctcactgcaagctctgcctcccaggttcacaccattctcctgcctcagcctcccaagtagctgggactacaggtgcccaccaccacgcctggctaatttttagtattttttagtagagacggggtttcgccatgttagccaggatggtctcaatctcctgacttcgtgatgtgcccgccttggcctcccaaagtgctgggattacaggtgtgagccacygcacccggccccacaaaattaaattcttaattaaggaaactgtttcttttacatctattttttcatcccaaactcaaatgccaaatatttagctattatacatgtattcattttcttagaatacac

SEQ ID NO: 99716 - DNA, 582 bp, Homo sapiens
tggctgcggtgtgtagggagctgtctttcacagtgatgaaaagaactctaggttcagagtgggcaggtatctggaagaacattttttcgccagcatccctttatttattgatacgtcgatgagaatagtaccacagcccaatgacatttatcatttcagttggcagtgtctctgagagcaagctgcaagaatttcaagccttcactgagtcttctactgacatttagcttaatcttgacaagtatatctgactactgcaatgtgttaatgatcaaggagtatgtcaaattacaacatgtctgctgcaggaaattatggggtaatacagacagtgtgcactggatcaaccattatctrtgcctggtgttatgacaaaaagtgattgattttggcatcaaaattaaagtgttcatctggttcaacttgttctttgtacaccgtccttcattatgacaagcacatatagcaaaaatactgtcttcaatatgaactgttgattattgattaaacagatcacatttggatgggctgcagtttctgcacgtctaacggatgggatccttctgagaatgctagagtagg

SEQ ID NO: 99717 - DNA, 582 bp, Homo sapiens
tggctgcggtgtgtagggagctgtctttcacagtgatgaaaagaactctaggttcagagtgggcaggtatctggaagaacattttttcgccagcatccctttatttattgatacgtcgatgagaatagtaccacagcccaatgacatttatcatttcagttggcagtgtctctgagagcaagctgcaagaatttcaagccttcactgagtcttctactgacatttagcttaatcttgacaagtatatctgactactgcaatgtgttaatgatcaaggagtatgtcaaattacaacatgtctgctgcaggaaattatggggtaatacagacagtgtgcactggatcaaccattatctatgcctggtgttatgacaaaaagtgattgattttggcatcaaaattaaagtgttcatctggttcaacttgttctttgtacaccgtccttcattatgacaagcacatatagcaaaaatactgtcttcaatatgaactgttgattattgattaaacagatcacatttggatgggctgcagtttctgcaygtctaacggatgggatccttctgagaatgctagagtagg

SEQ ID NO: 99718 - DNA, 571 bp, Homo sapiens
ggaattctgcccagcgcaaaccacccagtctccctagcactggtgggggaaaaccaccggctagacccgcagtaatggtrgtcacccttccccccaggaacttggtcttcttaggcagactccaagtgctgtgctagccagtggggattccatgccagtgggtcttagcttgtggggttctgtgggagtgggtctgcttggctccctggcttcagccctcttctcatgggagttgatggatctcctgcttcactggattactgcgagccaccagagtacgcagaaactcctacagctcagtacctgcccaagtggctgccagctggagcccctgctatgggtctgcacagctttgtgcttgggacccaaggccctggtggtgtggactcacaaagggattacctgttctggggtttgcaaaaatctgtgggtaaagcacagttctccgggtgggtagcacaatcccccactgcctcccttggctggaggagggaggtctctttgccctgtgtagctcttgggtgaactgtcgcccaactctgcttttccttgctctccatgggtcacacca

SEQ ID NO: 99719 - DNA, 571 bp, Homo sapiens
accttattccaaactaaattataaagctgtagtaatcaaaatagtatgctactagcataaaaacagacatgtaggccaagggaacagaatagagakcatagaaagaaataaatccatgactttacaatcaattgatctctagcattggtgccaagagtacacaatgataaaatttagtctctttattaaatggtgttgggaaaactggatatccacatgcagaagaatgaaactgaacccttatctcactgtacatacaaaaattgtctcaaaatggatgaaagacctcaacaaaggaccaatattgtaagactcttagatataaatatcggagaaaagctccttgatactggtattggtaataaattttcagatttgataccaaaagtatagacaacaaaagcaaaactagacaaatgggagtaaatcaaactaaaagcttcagcgcagcaaaggagacaaccaatacaatgaaaagataacctaaagaatgggagaaaatatttacacactatacatctgataagaagttaatatccaaataaattaggaactcagacaattccaaagg

SEQ ID NO: 99720 - DNA, 621 bp, Homo sapiens
aagagacttaagtggtcatctggcataactcccttatattgcagatgaggaacctggggccatgagaagtgaaattatgagttatccaagtcacacagctaattaagtagcagagctgggattagaactcaggtttcytgcttcccaagtgagtactctgtgttgtatcaggcagtctctctttgaactgtggcatagtagatactagaatttaaaaatttgtttacatcacctgggttattctctccttttaaaagtgtactaacagattttaatcatcggagagacctgtaacactgaaaaattggaaagtgatcattttcatggccaagactagaaatccattatttagaatggcaaccccttcaagattttgacagttgttttcaggttccctatatgttagaataaaacacccctgattaattataacctacactccatcatttggttagaatgtagcttttggttatcatttgcggtaccttggagatttctttaaaactcctcactttaaaaccaaagaacaattttttttatttttatttatttttatttatttttttatttagggcttatagcagagattgtcaacttccattgacattttgtgctgggcag

SEQ ID NO: 99721 - DNA, 621 bp, Homo sapiens
aagagacttaagtggtcatctggcataactcccttatattgcagatgaggaacctggggccatgagaagtgaaattatgagttatccaagtcacacagctaattaagtagcagagctgggattagaactcaggtttcttgcytcccaagtgagtactctgtgttgtatcaggcagtctctctttgaactgtggcatagtagatactagaatttaaaaatttgtttacatcacctgggttattctctccttttaaaagtgtactaacagattttaatcatcggagagacctgtaacactgaaaaattggaaagtgatcattttcatggccaagactagaaatccattatttagaatggcaaccccttcaagattttgacagttgttttcaggttccctatatgttagaataaaacacccctgattaattataacctacactccatcatttggttagaatgtagcttttggttatcatttgcggtaccttggagatttctttaaaactcctcactttaaaaccaaagaacaattttttttatttttatttatttttatttatttttttatttagggcttatagcagagattgtcaacttccattgacattttgtgctgggcag

SEQ ID NO: 99722 - DNA, 618 bp, Homo sapiens
tggttaggggtcatacagatctccagcagagcaggcatcttacatccagccctctgtctataaaactataggccctgatgggacctagacaataaactatagatttaaaatcagtcccaacaccacccccagagaaatcttatcaaataaaggaaggagaaaaaaacccacccaagggtgcttggtacacagatgactccaatgtgggtcagcgacacagatggacttccgtggctacgcaaccaactatccacaccatatgggtgcagtctggaacagggtatagcagccagtgggcagagccctgagctgtctggatagtgattatgaaagagccacacccagtagctctgtgtactgattcctgagcatctgtgaaagggttgacactgtggataactctataggaaaaggatcaatggtccataaatggaaggccactttgggggcagaactatgaacagacatttaggaccgattacaacaaccaaggctaaagtcgcagtgttctacawagtagctcaccaacagtcaccccctgtagaaatatgaaagcagaaactctgtcccaaacctggtcagtggtcacctgaagaagcaggtatagcatattgaata

SEQ ID NO: 99723 - DNA, 625 bp, Homo sapiens
tgtcaggaacaaagtaatcactccaaggacactcaggtaaacaataccagatactagggctcytcccaactgctggatgaaaacacattgttatacttagggacacagactggtttgccacagactggttttgtagggcagcaacatattggactgccttgattggtgaccagtagctcagtagtactcacctctgaccctaggttctcctaagatggcttggatgatatgcccttggcttcatgtaggtaccctgcaggatctctgaccctatccctgtccccctcactgagcccatctgtaggggttggtgaagtgggtctgtttttgtttgtttgtttgtttgtttttggtgggatgactgattgactgtatttgtacccctggaaagctctgttgatattgtgcagaaggtggaagcccttcagagatgtgtctccagagctctgaatgacactgagcatggtttggagtccttcaacattgaaacagccacaatgaggaaagtgtcctacagaactgaatagctctagaaatgctgacagctgagcagggaggaatctgtgcccttttaaaaactgagcattgtgtatatatgccagacaaagaaactgatattaatcaa

SEQ ID NO: 99724 - DNA, 583 bp, Homo sapiens
actggctttggtgactcaactgtcactaggatcaaacttgtgataccatcttcctaggaggaaagggcaaggagaaggaagatgctttgtatgcatgtgaacacctcaatgttggatcctccatatattttcaaagtgtacgttttctccatttatgatattcttcccaatggattcacttatttattaattgataattaattgattctagagaggctgtcaaaatgctctggaggcttgcttcatggattagtaaaggctttgcaaaggcaatgcctttgagaaaagccttgaagggcaagaaaaacttcaagggaaggagatggccattcttggatgarcaaaggtaaggaagtagaaacatcagtggattgttgtgaactttagatgtatgaggtttgtattagatatacggcaagatgtaggaaaggtggatgggaccaatcacagctgccatgtgttcgctaaggcctcccacagactaggtattccatgaatcatgctttgcataggggtttggactttgttgcgagaacaaggaggagtcattgaaagttacattaaaaacatttttggtgcttca

SEQ ID NO: 99725 - DNA, 533 bp, Homo sapiens
cctttttccctctttttataacagataagaatatattgagtggttagtggaattggggcagtggagaagacatatctgagaaaaaaaaaagcacttcactaactgactaaagcactttaacagagcctatttatgcaattgtatgaaactgaaaacagattgacctacagcctcaaaaggaaagggggaaaattaatctgtgcaaaggcagcatgagagggagaggcagagttataacatctgacaattggkagatgggcattggacaacttgagatgaaggatctgccttacaacagcctgaatgtggtcctgtctccaggttttgggtcttgtcacctacttggacatgtagataataaccttgcctttaacagtaacttgacatatgaaagagataacttgtacccattaacacacatacatacattaacaacaacataaggagatgttgtgaggacgtaaaagtggttggtgccggattaaagaaagatgaaaccaagtgatactatgtaaagcaaaaccaacaccacc

SEQ ID NO: 99726 - DNA, 636 bp, Homo sapiens
  misc_feature (1)...(636): n = A,T,C or G
acaataataggccaagcgattaggatacaagtttccaggatcttttcctatatttccaaaaagataaatcacccctaggaacagaatctgcatattgtaattaactgataaatatttcatgcctggctcaaactttctcctcttctatttaatggccacaaacttgatctcagaggaaacagcagtgaggagagtggsggttggctgtaagggggaggttctaccttggcttcagggagggagaaactgtcttggttaattatttactgtcctcctgttcttttaagaaaacattgctcacctggagaaaatcaggtcccacgtggtaaagggtgtgacttgggcttgttggcctcagccctgacctcccccnagagaggccaggttttggtgaccctgggggtgctgggaactgcaggctttggagtcaagggcccagtgtttaaacaagagctctgttctgtcacttattaactggatagctttaggtaatttacgtaatttatgtgaaactcagtttcttcatctgtaaaacagacataatttttaccttgtaaggtggcctatgctcagttggctctcattgcatgataactattattatcaacagtaacaatgaataattaatagccccat

SEQ ID NO: 99727 - DNA, 405 bp, Homo sapiens
ggctaccactgtggcacaggatctcactgcctctttcctgggccagtgcaatggcctgcctttatggtcttagtttccagcaatctatcccacatgccactgccttatgaattgtccttacacatgacctgattcacacctcaacagatgacaaatcctctgtgactgtccattgactacctaagccaaaatagttggcctttcaaaagctgccatggtggtctttcctttacyaacatttctttccatgcatcttccatagatccttagtttcggccagttgaatcacacaccgttctagatcattcttctggtttccttacctccaagcttcctccatgactttgctcatgctaacctctctgatggagatatcttcctaaaatttaatccagactgccaacc

SEQ ID NO: 99728 - DNA, 498 bp, Homo sapiens
aaactaactcttcttctgtttacctccatctcttagagctttttcatgttagtcacatgtgtcattttcaaaatatayagttgtgcataacaaaaagaggcgggaaaaacatggatctgtgccatattgtctgaatccgaagttccttgcatactttatactaaataagctttatctgtgagctatattactagtattttctttgcctataattgtttcaggtgtcacatttaagagtttgcttgattatgatatttaaatattacagaatgtatttgcagaatatatttgcagaataacaatattctgcaaataatgcccttgatattaaaattgaaaatcacttttcgtaatagatcaaggaaattagaacctaatgatttaatggtgtacacaattgcagcattagttttctattcaaagcaacataaaataaatgacaaattgaaagaaaaataggactttatttactctattcaaatattaaaataaataata

SEQ ID NO: 99729 - DNA, 498 bp, Homo sapiens
aaactaactcttcttctgtttacctccatctcttagagctttttcatgttagtcacatgtgtcattttcaaaatatacagttgtgcataacaaaaagaggcgggaaaaacatggatctgtgccatattktctgaatccgaagttccttgcatactttatactaaataagctttatctgtgagctatattactagtattttctttgcctataattgtttcaggtgtcacatttaagagtttgcttgattatgatatttaaatattacagaatgtatttgcagaatatatttgcagaataacaatattctgcaaataatgcccttgatattaaaattgaaaatcacttttcgtaatagatcaaggaaattagaacctaatgatttaatggtgtacacaattgcagcattagttttctattcaaagcaacataaaataaatgacaaattgaaagaaaaataggactttatttactctattcaaatattaaaataaataata

SEQ ID NO: 99730 - DNA, 498 bp, Homo sapiens
aaactaactcttcttctgtttacctccatctcttagagctttttcatgttagtcacatgtgtcattttcaaaatatacagttgtgcataacaaaaagaggcgggaaaaacatggatctgtgccatattgtctgaatccgaagttccttgcatactttatactaaataagctttatctgtgagctatattactagtattttctttgcctataattgtttcaggtgtcacatttaagagtttgcttgattatgatatttaaatattacagaatgtatttgcagaatatatttgcagaataacaatattctgcaaataatgcccttgatattmaaattgaaaatcacttttcgtaatagatcaaggaaattagaacctaatgatttaatggtgtacacaattgcagcattagttttctattcaaagcaacataaaataaatgacaaattgaaagaaaaataggactttatttactctattcaaatattaaaataaataata

SEQ ID NO: 99731 - DNA, 570 bp, Homo sapiens
ggacgatatttgctatatttgtatttctctgtcttgttatttttttttctattagctgaacataaaaatttcaaacacgaaactaaaataaatgagtaaaataacatcattatgggctgacatacttttggtgtgttaaggtgtattactaatatgatacatattgtaaaaaccatyaataataatttaaaattataatatttaacaataaaattactacgttttgtaattaactatgctaactatatcattaactatattaatgactgatattgcataaaaatatatttgtatagcagataaaaagatgggggagggatagcattaagagaaatatctaatgtaaatgatgagttaatgggtgcagcaaaccaacacgacacatgtatacatatataacaaacctgcacattttgcacatgtgccctagaacttagagtataataaaaaaaagttgtaaagataaattttgtctagaattcaactaagaggcacctagaaatttttaaggataattaaaattcgaagatgaaatttgaatgttaacataaagcaaaataaaagaaatgc

SEQ ID NO: 99732 - DNA, 570 bp, Homo sapiens
ggacgatatttgctatatttgtatttctctgtcttgttatttttttttctattagctgaacataaaaatttcaaacacgaaactaaaataaatgagtaaaataacatcattatgggctgacatacttttggtgtgttaaggtgtattactaatatgatacatattgtaaaaaccatcaataataatttaaaattataatatttaacaataaaattactacgttttgtaattaactatgctaactatatcattaactatattaatgactgatattgcataaaaatatatttgtatagcagataaaaagatgggggagggatagcattaagagaaatatctaatgtaaatgatgagttaatgggtgcagcaaaccaacacgacacatgtatacatatataacaaacctgcacattttgcacatgtgccctagaacttagagtwtaataaaaaaaagttgtaaagataaattttgtctagaattcaactaagaggcacctagaaatttttaaggataattaaaattcgaagatgaaatttgaatgttaacataaagcaaaataaaagaaatgc

SEQ ID NO: 99733 - DNA, 614 bp, Homo sapiens
gacttggcaccctgtgtcccagctgctccagccatggctgaaaggggccaatgtagactttaggctgtggcttcagagggtacaagccccaaaccttggcagcttccacttgatgttgagcctgtgagtgcacagaagtcaaaaatgggggtttgggaatctctgcctagatttcagatgtatggaaatgcctggatgtccaggaataagttcactgcaagggtgaggccctcayaaagaaccactgtttagggcagtgtggaagggaaatgtggggttggagcccccacagagagtccctactggggcactgcctaatgcagctgtgagaagagggccaccatcctccagaccccagaatggtaaatccactgacagcttgcactgtgcacctagagaagactaagacactcaatgtcaccctgtgaaagcagccatgagggaggctgtaccctacacagccacgggggaggagctaccccagaccttgggaacccacctcttgcattagcatgacctggatgtgagacatagagtgactgggagatcattttggagctttaaaaattgactgtccctctggatttcacacttgcatggggcatgtagccctg

SEQ ID NO: 99734 - DNA, 535 bp, Homo sapiens
actacaaattgattaaacctctttcttttgtaaattgtccagtgtcaggtatgtctttatcagcagtgtaaaaaaagactaagaaactccccttgggctggggaaagaacaaaatcctggttgcttcactagcaccttcatcatgacacagctgccatatagcgtagagcccagtctctcttccttgtgagctcccaactcctatccttcactaagcagaactccttgcttgggcctgcagagtagctacctcacccaagctgaacatttctattgccagtggctctgtgttatcctgtgatggagctcccagaggcaaatgacagccaactgccactgccaatgcagtggtacctgcccttgctgtcttagactgggaaagaaataaaakagcctgaatgctttactcatgcttccagcacactatgattaccatatgatcaccatatggcatggagcccaatctctattctctgtgagcccctgatcccctgctcttcaccaggcaggggtcccaggaaaggctcatagtgca

SEQ ID NO: 99735 - DNA, 673 bp, Homo sapiens
acctgcccttgctgtcttagactgggaaagaaataaaagagcctgaatgctttactcatgcttccagcacactatgattaccatatgatcaccatatggcatggagcccaatctctattctctgtgagcccctgatcccctgctcttcaccaggcaggggtcccaggaaaggctcatagtgcagcagccccactccaggctgaaaatgcccagtggcagtggttctgcatttctctggggtggagatcccagaagcaactgaaagtttttctgcaaccgctattcagcagtactgcccttgctgccctccaactggggagggaacaagaccccaagtgctttactcacacctccagcacactgcagctaccctacagagaagagatkaatctgtcttctcacaagccctgacaccctctgctcatcaccagtagtgtcccccagcttggttccaaaatgcacaggccccatcaaaggttgaccactccatttggcagcatctctgcatttctgtatggtggagctgcaaaagacaagtgatagacctccacacattaccactgccaaggtcctcaccccttttgtccccaagcttgtgaggaaacaaaaaccttgagctcatcccagggctgtgatgtgcagcactgcagtgacaagccaagctatgcagcca

SEQ ID NO: 99736 - DNA, 485 bp, Homo sapiens
attgttaaataccatcaacatgcctgctgctccgttttgaaatgttcctgaattcaaaataccccaaaatagttcagaatatcttgcttctgatgtcaggatttactctgaacagaaatattttgaatgaagaaacacaaatatgtaatgaggtataatagtacccctcactaattattaaagaaagactacccgaaggctagatttatcttcttgcttgaaaaacaaaatcaaggaaacacccacagaaatacaagactctggatatgagggaatgaagtacttcccgaaagacagaaaacaaaggagttaaaccctgctactgccctaatttagtggctagagtttccagcagtggggcagagaaagtgggctcctagagttgtacaaagccaagagttccaggagactaaggtaaytagagtttctaggtctgagaagctagagattcaaagagagaaatctctgatatctacagatgttct

SEQ ID NO: 99737 - DNA, 566 bp, Homo sapiens
agaagctagagattcaaagagagaaatctctgatatctacagatgttctcctttcagtgcttagcagaatactgattagtgtatacatgtgagtaatctgctcactgccagggaaacaagcatcttcaaagattaaaaacaaacaaacaataacaacaacaaaaaccagtgcctgacattcacayatgacctggattatacctgtatttgccagccaaatgaaagaaaaaagctcaattcacagtgcatttggtaaagcaatttaaaaggtcttgcctcaggggtagaaattaattagatttaaactgagtactgagttgaatgcatcaaaaaatcataaaagaagtatctaaaaggatcaagcggttttgaacaaattaactgtgtcctagagaaaaagctcatattttgtacagaaatacaaaatatccagcactcacaaagataacattaacaaaaacttccattatattaaactgtagttaggttaaaatttctttaacagattcacagagactggcagcacaaagttttgtaaggatttagagctactggaactctcatac

SEQ ID NO: 99738 - DNA, 550 bp, Homo sapiens
ggcgccaagacctccactggccagcaccccaccccaagccatcaccacctacagtgcagcagtgcactctgtctccagcagaaggcccttactcccccaacagctgccttgcctccaatactgtggtgaacacctgcagagaggcagacacccctatatccactagtactttgctgcaggtactgcagtttgctatccccagcacagtggactccaaatctcgaggagccacagtgtaagagatcgatcaggttgttgtgggaatcaggagactggagagattggtaggtgaaacagaaggatttttattgagtgcactcagaaccagmagattaatatccaaagactggaccctgaacaaagacagcacttgccttttacgcacacttctaaaagggggtggtctaacttgaaacaagcttacagtggtgcaaagtataatgattcaaaagcaaggatacagaagaagaacaaaggcagtcaatcatactacgacaagttcacaactcaggcttacatatgactcttgctatgcagcccagatagctgt

SEQ ID NO: 99739 - DNA, 639 bp, Homo sapiens
gctgccttgcctccaatactgtggtgaacacctgcagagaggcagacacccctatatccactagtactttgctgcaggtactgcagtttgctatccccagcacagtggactccaaatctcgaggagccacagtgtaagagatcgatcaggttgttgtgggaatcaggagactggagagattggtaggtgaaacagaaggatttttattgagtgcactcagaaccagcagattaatatccaaagactggmccctgaacaaagacagcacttgccttttacgcacacttctaaaagggggtggtctaacttgaaacaagcttacagtggtgcaaagtataatgattcaaaagcaaggatacagaagaagaacaaaggcagtcaatcatactacgacaagttcacaactcaggcttacatatgactcttgctatgcagcccagatagctgttatctaggcttgttccagtgctttgcatgggcttatctcataacatttgctatggcatctaggggactgcaatccaggcctgctcaggtgtctcatgatcttcactgtgctgcttagatgaataacagaatcaaaagagaaaggaaaatttgtttttcttctccctatgttgagggagccctgggagactc

SEQ ID NO: 99740 - DNA, 639 bp, Homo sapiens
gctgccttgcctccaatactgtggtgaacacctgcagagaggcagacacccctatatccactagtactttgctgcaggtactgcagtttgctatccccagcacagtggactccaaatctcgaggagccacagtgtaagagatcgatcaggttgttgtgggaatcaggagactggagagattggtaggtgaaacagaaggatttttattgagtgcactcagaaccagcagattaatatccaaagactggaccctgaacaaagacagcacttgccttttacrcacacttctaaaagggggtggtctaacttgaaacaagcttacagtggtgcaaagtataatgattcaaaagcaaggatacagaagaagaacaaaggcagtcaatcatactacgacaagttcacaactcaggcttacatatgactcttgctatgcagcccagatagctgttatctaggcttgttccagtgctttgcatgggcttatctcataacatttgctatggcatctaggggactgcaatccaggcctgctcaggtgtctcatgatcttcactgtgctgcttagatgaataacagaatcaaaagagaaaggaaaatttgtttttcttctccctatgttgagggagccctgggagactc

SEQ ID NO: 99741 - DNA, 639 bp, Homo sapiens
gctgccttgcctccaatactgtggtgaacacctgcagagaggcagacacccctatatccactagtactttgctgcaggtactgcagtttgctatccccagcacagtggactccaaatctcgaggagccacagtgtaagagatcgatcaggttgttgtgggaatcaggagactggagagattggtaggtgaaacagaaggatttttattgagtgcactcagaaccagcagattaatatccaaagactggaccctgaacaaagacagcacttgccttttacgcacacttctaaaagggggtggtctaacttgaaacargcttacagtggtgcaaagtataatgattcaaaagcaaggatacagaagaagaacaaaggcagtcaatcatactacgacaagttcacaactcaggcttacatatgactcttgctatgcagcccagatagctgttatctaggcttgttccagtgctttgcatgggcttatctcataacatttgctatggcatctaggggactgcaatccaggcctgctcaggtgtctcatgatcttcactgtgctgcttagatgaataacagaatcaaaagagaaaggaaaatttgtttttcttctccctatgttgagggagccctgggagactc

SEQ ID NO: 99742 - DNA, 550 bp, Homo sapiens
ggcgccaagacctccactggccagcaccccaccccaagccatcaccacctacagtgcagcagtgcactctgtctccagcagaaggcccttactcccccaacagctgccttgcctccaatactgtggtgaacacctgcagagaggcagacacccctatatccactagtactttgctgcaggtactgcagtttgctatccccagcacagtggactccaaatctcgaggagccacagtgtaagagatcgatcaggttgttgtgggaatcaggagactggagagattggtaggtgaaacagaaggatttttattgagtgcactcagaaccagcagattaatatccaaagactggaccctgaacaaagacagcacttgccttttacgcacacttctaaaagggggtggtctaacttgaaacaagcttacagtkgtgcaaagtataatgattcaaaagcaaggatacagaagaagaacaaaggcagtcaatcatactacgacaagttcacaactcaggcttacatatgactcttgctatgcagcccagatagctgt

SEQ ID NO: 99743 - DNA, 550 bp, Homo sapiens
ggcgccaagacctccactggccagcaccccaccccaagccatcaccacctacagtgcagcagtgcactctgtctccagcagaaggcccttactcccccaacagctgccttgcctccaatactgtggtgaacacctgcagagaggcagacacccctatatccactagtactttgctgcaggtactgcagtttgctatccccagcacagtggactccaaatctcgaggagccacagtgtaagagatcgatcaggttgttgtgggaatcaggagactggagagattggtaggtgaaacagaaggatttttattgagtgcactcagaaccagcagattaatatccaaagactggaccctgaacaaagacagcacttgccttttacgcacacttctaaaagggggtggtctaacttgaaacaagcttacagtggtgcaaagtataatgattcaaaagcaaggatacagaagaagaacaaaggcagtcaatcatactacracaagttcacaactcaggcttacatatgactcttgctatgcagcccagatagctgt

SEQ ID NO: 99744 - DNA, 507 bp, Homo sapiens
tgagctactacttacaggctaagactggaatcagatcaactctttcactcctatccctgaagctagtcctgcaactggggctgcatatgagggcttggggagagatcctataaccctggaatctgggatatccaagtccttcctctgctctagctcttgggttggtggtccctccaagacccatagactcgaagtcacttctttttccctcagcagggttggggtggggctggtaatgggagaattactttcttggtctrataactccctttagtagagagttagtcctgggagtgtgagttgggggaggttgggtagagcagaggagattaaatatcctttatgtaccagcccacacacacttgacctcaccagagggttgggaagacagagattcaaagaggggaagtgatctgacaaagtcctaaagctagaacttggcagagttggcatgtgaactctgatctgcttgatggcaaacttaaagcccttccattgctgcatgct

SEQ ID NO: 99745 - DNA, 507 bp, Homo sapiens
tgagctactacttacaggctaagactggaatcagatcaactctttcactcctatccctgaagctagtcctgcaactggggctgcatatgagggcttggggagagatcctataaccctggaatctgggatatccaagtccttcctctgctctagctcttgggttggtggtccctccaagacccatagactcgaagtcacttctttttccctcagcagggttggggtggggctggtaatgggagaattactttcttggtctgataactccctttagtagagagttagtcctgggagtgtgagttgggggaggttgggtagagcagaggagattaaatatcctttatgtaccagcccacacacacttgacctcaccagagggttgggaagacagagattcaaagaggggaagtgatctgacaaagtcctaaagctagaacttggcagagttggcatstgaactctgatctgcttgatggcaaacttaaagcccttccattgctgcatgct

SEQ ID NO: 99746 - DNA, 536 bp, Homo sapiens
tgcctctgccctcatggaccttgcagttctagtggtgagagtaagatgaatacaagtgaacaaaatgatggcaagttgttcaagcttgttcaaacttctaaacactgttcaatgaatgaatgaaccaacaagaacttactatgtgctctggaaagaaaatgtgaaaaatgtcgagttgtaaatcactttctgctaccgctacctttcctagtctggaagtcagcattacttctccatcccttggaggagatagtgggcagatattacaaaatgttagctaaaaagagctaccatttattggaccagacatacaccaaggggtttctatagttcattaattttcaccctttgaattaggcatcaatatttccattttgaagatgagaaaaaccgmaactcagggtttaagtagctatctgaaatcacacccatagcagtaagtggcagaacatttgctctggacactgggataagtatgtgtgtatgggtttttttgttgttttttgttttctgtttttgttgttgttgttgtttgt

SEQ ID NO: 99747 - DNA, 527 bp, Homo sapiens
tcaagtcctagctctgccactgtggtagggacataatrccagctttcctgggggaggcagagggctcctgtttgagaaaaagcccgaagaatggttcatttccaagaagagagctcacctgaggcagggaagtgcctggccaaggaatagaggtacagtgaaggcataactttattggaggcctggcttataagcatcataaactctgaggacagccttgacctggtccagacccctgtttccccatcccccaaagccagcaggaaacacggcagaggccgagacaccaagtagtaaacagtgatctaggtccattgatcgagctttcaaagagaaagtgtccatgggttgggctgctctccattgccctgttgccatctcaatgttataaataattctggcactaagtgccctgtcacaccgagtggaagtagttcttatagagtgaaacctgagaatatgggtcatgggaggaggggtgactggggccaggggtagagatggggagtgatcaccccaaggctcct

SEQ ID NO: 99748 - DNA, 527 bp, Homo sapiens
tcaagtcctagctctgccactgtggtagggacataataccagctttcctgggggaggcagagggctcctgtttgagaaaaagcccgaagaatggttcatttccaagaagagagctcacctgaggcagggaagtgcctggccaaggaatagaggtacagtgaaggcataactttattggaggcctggcttataagcatcataaactctgaggacagccttgacctggtccagacccctgtttccccatcccccaaagccagcaggaaacayggcagaggccgagacaccaagtagtaaacagtgatctaggtccattgatcgagctttcaaagagaaagtgtccatgggttgggctgctctccattgccctgttgccatctcaatgttataaataattctggcactaagtgccctgtcacaccgagtggaagtagttcttatagagtgaaacctgagaatatgggtcatgggaggaggggtgactggggccaggggtagagatggggagtgatcaccccaaggctcct

SEQ ID NO: 99749 - DNA, 555 bp, Homo sapiens
acgggagaaaccgctcgcgcctcgcgcatgcgcattggctgagccgactcgcgctccgctcctgacagataggctgcgtcccctttaaatatcgctgccgccgcggcggcggctggatcctgggtcctgtttggggcggcgtgggagagggggcckcgggtgtctcgtcctgtcccaggcccaaacccccaggggtcctgtcctcaggatctgcttgagccgacttccaccgagggagggggagcttcaggacgcctgctgtgttctccggactcccgttgagatccgattctggccccctcccactgagataggatgggctcaccacatctggagaggccggcagggcctcgctgcagcacacaatgatcccataggtctcaaggcctagcgtcagctgcaaattcactgatccatcagccctctgcctcccacctcctttgaaatatcagtggcttgccccgcttctaaaagcccaggggctccggaaagccgaccgcgctttacaggacacgtgccaccaggaacaggggcgaatccgaggtggagaccgtg

SEQ ID NO: 99750 - DNA, 406 bp, Homo sapiens
cagacactggacctgcgaaaagaatgacattgagatgtattttcacattgctaagttggttttttctttgccattcaatttctgcagtccctactctaagcccatggtccacctttttatttttcctcctaagatgtcttcccttcttgtaagatttacttttccttaaawagggcccttttcatccacccactcttttgcccttcccagaagttggttaatggacacaaaaatacagttagatggaaggaacagaaaaatttctagtgttcaatagcacagtagggtgatgatcattaacaataacttatatatttcaaaatgagtagaggaaagatgtggaatgttctcaacacaaataaatgataaatgtttgaggtgatggatatgcaaattatcctgattt

SEQ ID NO: 99751 - DNA, 406 bp, Homo sapiens
cagacactggacctgcgaaaagaatgacattgagatgtattttcacattgctaagttggttttttctttgccattcaatttctgcagtccctactctaagcccatggtccacctttttatttttcctcctaagatgtcttcccttcttgtaagatttacttttccttaaaaagggcccttttcatccacccactcttttgcccttcccagaagttggttaatggrcacaaaaatacagttagatggaaggaacagaaaaatttctagtgttcaatagcacagtagggtgatgatcattaacaataacttatatatttcaaaatgagtagaggaaagatgtggaatgttctcaacacaaataaatgataaatgtttgaggtgatggatatgcaaattatcctgattt

SEQ ID NO: 99752 - DNA, 498 bp, Homo sapiens
tacactaatttttttactcttccccactctcagcctagctggtctgctcactgtattctctccatscttcagcacccttccatctcttccttcatcttaaaaatctttcctttaatttcaacagtgctgcctgggtttgtcatttcaggggttgggcatgttccaggatctgtctatagacttctctcaggaggaatgggagtgcctggacgctgctcagaaggactgatacagagatgtaatgatggagaactatagcagcctggtctcactaggtaaggatgtctatccccaaataactcatgaattttgggtgtagcttccacttgtctgggtgacttttcacctgctgcttagggaattgttttgtgttttgtagattaatagatgggcagctctttggggtccctccatcttctccatgcttcagacctttacaccttcctctagtccttcgtgactactaagggactaactttgaattcaggaacagcacga

SEQ ID NO: 99753 - DNA, 498 bp, Homo sapiens
tacactaatttttttactcttccccactctcagcctagctggtctgctcactgtattctctccatgcttcagcacccttccatctcttccttcatcttaaaaatctttcctttaatttcaacagtgytgcctgggtttgtcatttcaggggttgggcatgttccaggatctgtctatagacttctctcaggaggaatgggagtgcctggacgctgctcagaaggactgatacagagatgtaatgatggagaactatagcagcctggtctcactaggtaaggatgtctatccccaaataactcatgaattttgggtgtagcttccacttgtctgggtgacttttcacctgctgcttagggaattgttttgtgttttgtagattaatagatgggcagctctttggggtccctccatcttctccatgcttcagacctttacaccttcctctagtccttcgtgactactaagggactaactttgaattcaggaacagcacga

SEQ ID NO: 99754 - DNA, 498 bp, Homo sapiens
tacactaatttttttactcttccccactctcagcctagctggtctgctcactgtattctctccatgcttcagcacccttccatctcttccttcatcttaaaaatctttcctttaatttcaacagtgctgcctgggtttgtcatttcaggggttgggcatgttccaggatctgtctatagacttctctcaggaggaatgggagtgcctggacgctgctcagaaggactgatacagagatgtaatgatggagaactatagcagcctggtctcactaggtaaggatgtctatccccaaataactcatgaattttgggtgtagcttycacttgtctgggtgacttttcacctgctgcttagggaattgttttgtgttttgtagattaatagatgggcagctctttggggtccctccatcttctccatgcttcagacctttacaccttcctctagtccttcgtgactactaagggactaactttgaattcaggaacagcacga

SEQ ID NO: 99755 - DNA, 554 bp, Homo sapiens
tttcccagtctgtctgtgtcttgttattgaacaattgcaatggacctgcccagcaaagtcctcttttgtgtggttatctgggactccttttggagggaacatttaaaattttccatttcaaagcattctgttggcactcttacactgtttttctctgcctaccctcggacctgagttctcctggackcgaatctccagccacagagcctagaagcccattcctccacattctgtgactgttccccaaacacagggagaattttcagaaaataagcctaaaaatcttgccattctttgcaataaaaccccacattacaaactgctgaaaacaggattttagcctgaataggtttttcctctatttgaaaccctttacaattttggagggaagtttccaaatcaatcagtaagtaccccccatcccaggtttatccttatgtaaagtgccccctttgcacatgcaagattgaataaaccttgaaaatattatgctaagtgaaagaagccggtcacaaaggaccacatgttatgtaattccatttaaataaaatgtc

SEQ ID NO: 99756 - DNA, 345 bp, Homo sapiens
caagggcagaggccacaggcatccacgccagcctctgtgtgttcagtctgtgagcggcccarcgctccccatgcactcctccttaaagcctactcaaccctggggtctgcaggcaagttcctcgcgggtgccttcccttgtcctggctgctgctctgcttcctttgcaagctccttctcgcaccgttgcgctggctccctccagagggctccatcccctgcccactgtgccttcgtgggtggtgcccagatctctgtctcctctgccctggacccctctgcccctgactggcagatctatagagttcaatgcccctggagggctccacgtccatcccacagggac

SEQ ID NO: 99757 - DNA, 431 bp, Homo sapiens
gaattccatctcagctctgcttccaggaaacctgacccaagacagaggttgttgcaagggcagaggccacaggcatccacgccagcctctgtgtgttcagtctgtgagcggcccaacgctccccatgcactcctccttaaagcctactcaaccctggggtctgcaggcaagttcctygcgggtgccttcccttgtcctggctgctgctctgcttcctttgcaagctccttctcgcaccgttgcgctggctccctccagagggctccatcccctgcccactgtgccttcgtgggtggtgcccagatctctgtctcctctgccctggacccctctgcccctgactggcagatctatagagttcaatgcccctggagggctccacgtccatcccacagggacccggactctcatcttcctcctgagtgtgctct

SEQ ID NO: 99758 - DNA, 431 bp, Homo sapiens
gaattccatctcagctctgcttccaggaaacctgacccaagacagaggttgttgcaagggcagaggccacaggcatccacgccagcctctgtgtgttcagtctgtgagcggcccaacgctccccatgcactcctccttaaagcctactcaaccctggggtctgcaggcaagttcctcgcgggtgccttcccttgtcctggctgctgctctgcttcctttgcaagctccttctcgcaccsttgcgctggctccctccagagggctccatcccctgcccactgtgccttcgtgggtggtgcccagatctctgtctcctctgccctggacccctctgcccctgactggcagatctatagagttcaatgcccctggagggctccacgtccatcccacagggacccggactctcatcttcctcctgagtgtgctct

SEQ ID NO: 99759 - DNA, 644 bp, Homo sapiens
tattattttacttttccactagcaacttatgagtgatcgtattttttacatcctgaatagcttttgctattgtcacaatttttaaaagtcattttgataggtgtgtagaaatatctcactatggttttatttgacatgtccatgatgattaataatattgaacatgtttcatggattatttgacatctgaatatttttcttgttaaaacgtccattgatgtcttttgtccattacctaattggatcatttgcatttttwaaaaaatttgctgttgtgttttgtgtcatctctatttatttttgtcggttttgatagatgtttatcaattgattgattttttcaataaaccagctttttgtttcacatttttttctgttttcaatttcatgaatttttgttattgtgatgattatttttcttcttctgcctgctttcagtttactctgttctttttctagtttcttgagatacaagtgtaagttattgatttgagatcttttcttatttttaatgaagcatttagtactataaatttctttcccaccacagccttagctgtatttcctatattttgatatgttgtattttctttcatttgttgaaatatatttttagatttttatttaagactttatatttaatc

SEQ ID NO: 99760 - DNA, 644 bp, Homo sapiens
tattattttacttttccactagcaacttatgagtgatcgtattttttacatcctgaatagcttttgctattgtcacaatttttaaaagtcattttgataggtgtgtagaaatatctcactatggttttatttgacatgtccatgatgattaataatattgaacatgtttcatggattatttgacatctgaatatttttcttgttaaaacgtccattgatgtcttttgtccattacctaattggatcatttgcattttttaaaaaatttgctgttgtgttttgtgtcatctctatttatttttgtcggttttgatagatgtttatcaattgattgattttttcaataaaccagctttttgtttcacatttttttctgttttcaatttcatgaatttttgttattgtgatgattatttttcttcttctgcctgctttcagtttactctgttctttttctagtttcttgagatacaagtgtaagttattgatttgagatcttttcttatttttaatgaagcatttagtactataaatttctttcmcaccacagccttagctgtatttcctatattttgatatgttgtattttctttcatttgttgaaatatatttttagatttttatttaagactttatatttaatc

SEQ ID NO: 99761 - DNA, 618 bp, Homo sapiens
gttactgacttttattttaattccactatggtcagagaacatactctatatgacataaattcttttaaatgtatcagggtttgttttatggtgcaagaaatcatctagtattttagttaatatttcatgagctcctgaaaaactgtatattctgctgttttttgtggactgattctatatttagagagagatatatatataattgacatatatttatctgtatatgtgtgtytgtgtgtgtgtgtgtgtgagtttgtgtgtgtgaataaaatcttgttggttgattgtgctgtacagatcttctacatgcttgctgattgtcaaatttttgtccaataattctatcaattgctgagataaggctgttaaaacccacaactataatttattattttttagttctataatttttctcttcatgttgtttaagactttgttatttggtgcatatatatttggaattgttatgtttactggtgaattgatccatttattattagtgttgcagtctcctcactccttaatttagtgaggtccaagatcttgtcccacaaccaagagaataaggcacacaaataccagagagtgagtaaggcaaattaacattcattaagcaac

SEQ ID NO: 99762 - DNA, 618 bp, Homo sapiens
gttactgacttttattttaattccactatggtcagagaacatactctatatgacataaattcttttaaatgtatcagggtttgttttatggtgcaagaaatcatctagtattttagttaatatttcatgagctcctgaaaaactgtatattctgctgttttttgtggactgattctatatttagagagagatatatatataattgacatatatttatctgtatatgtgtgtctgtgtgtgtgtgtgtgtgagtttgtgtgtgtgaataaaatcttgtyggttgattgtgctgtacagatcttctacatgcttgctgattgtcaaatttttgtccaataattctatcaattgctgagataaggctgttaaaacccacaactataatttattattttttagttctataatttttctcttcatgttgtttaagactttgttatttggtgcatatatatttggaattgttatgtttactggtgaattgatccatttattattagtgttgcagtctcctcactccttaatttagtgaggtccaagatcttgtcccacaaccaagagaataaggcacacaaataccagagagtgagtaaggcaaattaacattcattaagcaac

SEQ ID NO: 99763 - DNA, 618 bp, Homo sapiens
gttactgacttttattttaattccactatggtcagagaacatactctatatgacataaattcttttaaatgtatcagggtttgttttatggtgcaagaaatcatctagtattttagttaatatttcatgagctcctgaaaaactgtatattctgctgttttttgtggactgattctatatttagagagagatatatatataattgacatatatttatctgtatatgtgtgtctgtgtgtgtgtgtgtgtgagtttgtgtgtgtgaataaaatcttgttggttgattgtgctgtacagatcttctacatgcttgctgattgtsaaatttttgtccaataattctatcaattgctgagataaggctgttaaaacccacaactataatttattattttttagttctataatttttctcttcatgttgtttaagactttgttatttggtgcatatatatttggaattgttatgtttactggtgaattgatccatttattattagtgttgcagtctcctcactccttaatttagtgaggtccaagatcttgtcccacaaccaagagaataaggcacacaaataccagagagtgagtaaggcaaattaacattcattaagcaac

SEQ ID NO: 99764 - DNA, 289 bp, Homo sapiens
tattccgtgtagggtatcttaggcttcttgaatctatacatttgtgtcttctgcaaatttgaggtttttttgaagcactatttcttcaagtattctttcagcctcattttactttttttctggtacacgtaataaaaatgttggatcttttgttgttgcctcacacatacctacatctctgttcattttatgtatcagtctrttttatttatgttgttcaaattggttaaattctactattctgccctcacattcactgattttaccttctcgcatctcaatggcacta

SEQ ID NO: 99765 - DNA, 471 bp, Homo sapiens
cactgcaaaggccatcaaaaggcatcagatcccattgctcagggcaatgcttatgctgataaaatagctaaagaagcagctagcattccaacttctgtccctcacggccagtttttctccttctaatyggtcactcccacctactcaccgactgaaacttccacctatcaatctcttcccacacaaggcaaatggttctttgaccaaggaaaatatctccttccagcctcacaggcccattctattctgttgtcattgcataacctcttccatgtaggttacaagctgctagcccacctcttagaacctctcatttcctttccattgtggaaatctatcctcaaaaaatcacttctcagtgttccatgtgctattctactactcctcagggattattcaggccccctcccttccctacacatcaagctcagggatttgcccccacccaggactggcaaattgacttcactc

SEQ ID NO: 99766 - DNA, 471 bp, Homo sapiens
cactgcaaaggccatcaaaaggcatcagatcccattgctcagggcaatgcttatgctgataaaatagctaaagaagcagctagcattccaacttctgtccctcacggccagtttttctccttctaatcggtcactcccacctactcaccgactgaaacttccacctatcaatctcttcccacacaaggcaaatggttctttgaccaaggaaaatatctccttccagcctcacaggcccattctattctgttgtcattgcataacctcttccatgtaggttacaagctgctagcccacctcttagaacctctcatttcctttccattgtggaaatctatcctcaaaaaatcacttctcagtgttccatstgctattctactactcctcagggattattcaggccccctcccttccctacacatcaagctcagggatttgcccccacccaggactggcaaattgacttcactc

SEQ ID NO: 99767 - DNA, 601 bp, Homo sapiens
actactggtcaatgcattcattctaaaaccttccagtgtcaccagtttttctccctaagaggacctggaartattatgtggactcctgtatcaaaaaaaaaagtctgaatttctttcttttctcctcttaccttgacagaaatataaggcctttggcctccatttggggaccccgagaacttggtcccatttctgactctgccattcagcccaagacattggatttgcaatgtcctttcatcaaagaaacatgcctggcctttctctatatctgtcctttagataatgagtctccctttctgtgaaggcctttatcacatgtattgattccttctcagatgcctcaaggaagatctgaggacccctttcttctttccctctcaggtgccttagtgtctggttgagtacacacttccctcactctctgcccccatgaatgacagggtaattaaataaatatccccaaccaagggacctatgctcctctatttcctcattgccttttgtttgccttgatccatgcagccatctcattcacatctgtgggaagtggcagacctaaatccgacttatcacccttccttcctctgaaaatattcaa

SEQ ID NO: 99768 - DNA, 601 bp, Homo sapiens
actactggtcaatgcattcattctaaaaccttccagtgtcaccagtttttctccctaagaggacctggaagtattatgtggactcctgtatcaaaaaaaaaagtctgaatttctttcttttctcctcttaccttgacagaaatataaggcctttggcctccatttggggacccygagaacttggtcccatttctgactctgccattcagcccaagacattggatttgcaatgtcctttcatcaaagaaacatgcctggcctttctctatatctgtcctttagataatgagtctccctttctgtgaaggcctttatcacatgtattgattccttctcagatgcctcaaggaagatctgaggacccctttcttctttccctctcaggtgccttagtgtctggttgagtacacacttccctcactctctgcccccatgaatgacagggtaattaaataaatatccccaaccaagggacctatgctcctctatttcctcattgccttttgtttgccttgatccatgcagccatctcattcacatctgtgggaagtggcagacctaaatccgacttatcacccttccttcctctgaaaatattcaa

SEQ ID NO: 99769 - DNA, 601 bp, Homo sapiens
actactggtcaatgcattcattctaaaaccttccagtgtcaccagtttttctccctaagaggacctggaagtattatgtggactcctgtatcaaaaaaaaaagtctgaatttctttcttttctcctcttaccttgacagaaatataaggcctttggcctccatttggggaccccgagamcttggtcccatttctgactctgccattcagcccaagacattggatttgcaatgtcctttcatcaaagaaacatgcctggcctttctctatatctgtcctttagataatgagtctccctttctgtgaaggcctttatcacatgtattgattccttctcagatgcctcaaggaagatctgaggacccctttcttctttccctctcaggtgccttagtgtctggttgagtacacacttccctcactctctgcccccatgaatgacagggtaattaaataaatatccccaaccaagggacctatgctcctctatttcctcattgccttttgtttgccttgatccatgcagccatctcattcacatctgtgggaagtggcagacctaaatccgacttatcacccttccttcctctgaaaatattcaa

SEQ ID NO: 99770 - DNA, 601 bp, Homo sapiens
actactggtcaatgcattcattctaaaaccttccagtgtcaccagtttttctccctaagaggacctggaagtattatgtggactcctgtatcaaaaaaaaaagtctgaatttctttcttttctcctcttaccttgacagaaatataaggcctttggcctccatttggggaccccgagaacttggtcccatttctgactctgccattcagcccaakacattggatttgcaatgtcctttcatcaaagaaacatgcctggcctttctctatatctgtcctttagataatgagtctccctttctgtgaaggcctttatcacatgtattgattccttctcagatgcctcaaggaagatctgaggacccctttcttctttccctctcaggtgccttagtgtctggttgagtacacacttccctcactctctgcccccatgaatgacagggtaattaaataaatatccccaaccaagggacctatgctcctctatttcctcattgccttttgtttgccttgatccatgcagccatctcattcacatctgtgggaagtggcagacctaaatccgacttatcacccttccttcctctgaaaatattcaa

SEQ ID NO: 99771 - DNA, 540 bp, Homo sapiens
gtctgaaatagccgatggtccagcttaagactattcaatatccatgcacctgccttttctaaagcttaaacttcaaaagagtaacagtaacaagtacatgatcctgtcaaatataattcaaatatatgttgcacaaattaaaatgcagtggtcctatccaaaataggtatccatgatattcactcctcttcggattcagtctcaactatgtcttaatatcctgaaataagataataaattatgaagttattcaaaccagcctaccctaaaaatgatgggaaaaatggaagataaaataagacaaacaattatatacatgacaatgcagaagagaagaaaacccaagaatgtattacayacttaattttataactgatcatggaactgtggatggtatttgtaccattctttttatattattcattccacacttctctatagtatcctaaattatccaagtttccacagcaagagcccactcttcatgaacagtgcccttagttgtcttgtcaaattggagttgttttaatcttccattaa

SEQ ID NO: 99772 - DNA, 525 bp, Homo sapiens
actgtacttataagtgaatccactgtcattactatagttcaggtcaccttaagtttcttcttggacttgccaatgaactgtggaattaagaagctctctgcctacagtcttgtttatctattgtaatctgtttcttgtagtccctattttagatctcattaatgtcttgtcacttccattagaataaattataaacactttggatggcctgaagacatttgtaatttatcctaaactcatctctactctcatcgcttgacatctccctcttctacccacacatatatatttaagcccacgtaattactgcaattaccccaaattctgtacttctcaccagtgtcttgcaaaacccactccawctaactaataagacttttcatttaactctccagttgtagttgatattctagtttcaaactctattttctctgtgaaggctgtactgatatcacaattttgtttcttcagtgtgagcattggcagcctgtggcctatggttttggtacagcctgcaaggtaata

SEQ ID NO: 99773 - DNA, 485 bp, Homo sapiens
tacttagtttggaggagtggactcagcagcatgtatgttatgggaaaaaaagagatttggaaaaattacttacataagtttgaaaggcaagatgaatctggccatatggtaaaatccaacagaactcttctggttatgagtaatttgtaaaataattcatacattgcccattatatgmgttagatatatgtaaattttaccatgcttattcttcagaacacaaaaagtgaaatacaaaggcaaacatggtaaagcaatttattttagtttttgtgagttgttcttctagagtatgttatatgactctatgccctcagtttgaaactctcattgaaccatatctaaattaactaataaaatgaactttgaattatatatgccactgtgtgcaaattaacattcattgactgtatgtgtatgtaaatattggccagtaaacagagccatttacatcttcataaagagaataacacttccaactaaaa

SEQ ID NO: 99774 - DNA, 433 bp, Homo sapiens
ggctctggcctcagtcttccccttgctgcctgtcttctgtctcctgaccacccttgtgtctttcccatgtggtcccatgtggtcccatatggtgtgctatgcctcctgtctttgggacccgtgagcataataaacattgttttttcctgagcttttcctgtgtctcctcttgtgatcacactggactgaccatcacataaaagaatacataacagtggcctgtgttaaaaagtaggtagagagatggaaagtggtagattaatcaaaatataccttggcaagagaattgataggatttggctggtcatgtaggtgtcagggacaagggagaagaaagaaacaaggtttctgtctaagcagtcaggtggacaattgtagcattttctgagatgtgttggatggaasaggaattggtttgaggggtaagaatcat

SEQ ID NO: 99775 - DNA, 565 bp, Homo sapiens
gggaatggccagtcattggaacagtcagatcgcacacaacacttacggatcaagtttgccatcttatatgggcacacttcgtggagccccaaaacaattacaataataacatcaaagatcaatgattacagatgaccataacacatataacaaaaatgaacaagtttgaaatattgagagaactgccacaatgtgacacagagacgtaacgtgaggacatgctgttggaaaaatggcgcccatagacttactcaccacagcgttgacagaaaacttcggtttgtaaaaaatgcaatatctgcraagtggaacaaagcaaagagcagtgaaacaaggtgtacccataaacacatttttcttcttgctaatgtagctaacgatctcgccactgccaaatccactcaggacgttgaatttggtttcatccttatttggtttcatgcttgccactgttgcccactctctccccttaaaactcttccctccctgtcattttcattgtcactctctacaggctctcctccttatccatggtacctctgcccattcagtactgggtgttctc

SEQ ID NO: 99776 - DNA, 599 bp, Homo sapiens
gatccaaaccatatcattctgcctctggcccctcccaaatctcatgtccttttcacacttcaaaaccaatcattccttcccagctatcccccaaagtcttaactcattctagcattaacaccaaagtctcattttagacttggacttttcagttaaaagtcaaaaacttttgagacaagacaagttccttccacctatgagcctgtaaaataaaaaacaagttagttactgccaagatacaattgaggtacagggactgggtgaatgttcctgttctaaatggaagaagttgatcaaaacgaaggggccacaggccccatgcaagtctgaaacccagtggggcagtcattaaatcttaaagctttgaaatgatctcctttgactccgtgtctcacatccagggcatgctgatgcaaagggtgggctcccacagccttgggmagctccacccctgtgggtctgcagggtatagcctggcattgagtgcctgtggcttttctaagtgcatggtgcaagctttcagtggatctacctttcgggggtctggaggatggtagacctcatctcacagctccactaggcagtgccccagtggggaa

SEQ ID NO: 99777 - DNA, 562 bp, Homo sapiens
tctgtgtgagttccaggtactgatccttccagatggttcttttcccatgtcagtttcctcacatgcatgcactgattgaacccttttcagatctctaggtttttctctctatgcaactctccagagtagtatgttctgcagactgtagccaccttggtctcccaggactctcagcttagtattctcaaatcagggagtccrccttggtttcctcttcctgagccatagtctaaaaattctcttaaagcaataataaagctcaggcaatcacttgcttcctgtctttcaggattattgtcctttactgactgatgcccagtgccttgaaaactattgcttcatatattttgtttgtttttagttatttcagatggaaaggtaaatcttgttcctgttagtctattggaagaatgcttcctttctctttaaatattttaaaacatagattgtgggccttgtcctgtgctgggccctttagtcaatctttaatagctatacaatattatcttcactccttacgtcaataaatttgacaggatggaaaggatgtcctagataaata

SEQ ID NO: 99778 - DNA, 616 bp, Homo sapiens
tttaaaatatactagctgagaatttccagaaataataaaatccatcatatcgcaaatctaaaaaattcagggctccccaagcacaaggaaacacaaacacatgcccctagacaaatcataatcaaactgctaagaaaaaatagagaaaagtgaaagttttgaaagcagtcattggaggttgggggaggggaagaacacattagacacataaaaataaaggtaaaaattatagcagatattttgtckgtacagtcagaagacaacagagtgacatctttaaagcgcagaaaaaacactgtcaaactgggattctctaccaaacaaaaatatatttccaaatgtaaggacaaataaagactttgtcagactaacaaaaattgagagaatccattttcagtagatttgcattacaaaatgaaaaaagttaaaataatttgttcaagtagaggagatatgataccagacagacttggatctacacaaagaaatgaagagatctagaaataacataaatgagggtaaatataaaatttttaagaaaaatttttaattgctactaaatatagttgactgcctaaagcaaaaaatatagcaatgtgttttgagtttataacat

SEQ ID NO: 99779 - DNA, 616 bp, Homo sapiens
tttaaaatatactagctgagaatttccagaaataataaaatccatcatatcgcaaatctaaaaaattcagggctccccaagcacaaggaaacacaaacacatgcccctagacaaatcataatcaaactgctaagaaaaaatagagaaaagtgaaagttttgaaagcagtcattggaggttgggggaggggaagaacacattagacacataaaaataaaggtaaaaattatagcagatattttgtctgtacagkcagaagacaacagagtgacatctttaaagcgcagaaaaaacactgtcaaactgggattctctaccaaacaaaaatatatttccaaatgtaaggacaaataaagactttgtcagactaacaaaaattgagagaatccattttcagtagatttgcattacaaaatgaaaaaagttaaaataatttgttcaagtagaggagatatgataccagacagacttggatctacacaaagaaatgaagagatctagaaataacataaatgagggtaaatataaaatttttaagaaaaatttttaattgctactaaatatagttgactgcctaaagcaaaaaatatagcaatgtgttttgagtttataacat

SEQ ID NO: 99780 - DNA, 477 bp, Homo sapiens
cttcttagaattcccccttcatccctttcccatccaatgttttcacatactgtagcagcgctttttttttttttcaacgactgtcccttccctgcaaaaaactctgcaatgggggcctctttccttcttcctttcttcttaattctccactgaaacaaaacaaaacaaaacaaaacaaaacaaaacaaaaagctggtctggcaaggcaggaccctccttggaaagcaggggaggggaaraatctgaataggccaagacagaatcttctctggtggacaggagaaggaaacattttcttggggacattatcgtgttactgctgcttggttatctaatgttacataaccatcctttccaaaacttagtgccataaaacaactactgtttttttgtttttgtttttgagatggaatctcgctctgtctcccaggctggagtgcagtgacgtaatctcgggtcgctgcaatcaccgcctcc

SEQ ID NO: 99781 - DNA, 477 bp, Homo sapiens
cttcttagaattcccccttcatccctttcccatccaatgttttcacatactgtagcagcgctttttttttttttcaacgactgtcccttccctgcaaaaaactctgcaatgggggcctctttccttcttcctttcttcttaattctccactgaaacaaaacaaaacaaaacaaaacaaaacaaaacaaaaagctggtctggcaaggcaggaccctccttggaaagcaggggaggggaagaatctgaataggccaagacagaatcttctctggtggacaggaraaggaaacattttcttggggacattatcgtgttactgctgcttggttatctaatgttacataaccatcctttccaaaacttagtgccataaaacaactactgtttttttgtttttgtttttgagatggaatctcgctctgtctcccaggctggagtgcagtgacgtaatctcgggtcgctgcaatcaccgcctcc

SEQ ID NO: 99782 - DNA, 575 bp, Homo sapiens
agtaagtgcagcaaacaccagacttcagccaagcagactgggactgaatccagagtgtgactcaggttgctgggctggcacagaaaggaggcaggaggccggaggctggctgctcctggaggctggctgctcctggaggctggacaaaggcagtcagtgaggaagaaggagaggggaatagtggttgaaactgagctgagcgagcaccttttgtaggttcacagactatgttttgcattctttgtctcttcaattgcacacaactcttttaggtcaatgttatgactccccatgttacaaaaaaagaaactgaagctcagagacaaagttacttcccaacatccttgcaccgggtctgcactcagtcctcaggaaagacttccagggttaggagggagaaaaaagrgaatagagacacgaagaggttctgttctggttgctctagctggctggtggctttttatagaagtcttttttttttttttaatcattttgcctcttttatttagccgagaatatagtagtggtccccaaaagattcagtgaataggtgaattttcatttgctaatatgat

SEQ ID NO: 99783 - DNA, 564 bp, Homo sapiens
ccccgccccgccaaccaaaggggaacactggaataatggagagagagaatcaaagagcattcaaatgacaaaggacttcagaggaggaaaccgagacagagagaggacagtgatcattcctgacttcccacctcccccygcacccagttctgtactgtgctttcctagcttggcttgtttctttctccaaatgcagcaggcccacaactaaccagaccaggctgtttttcccagctgttcctttcattgctgaaacctaatgctgcagatttcagttccaacttcacctggcagccatggcctaccagaattcaccctttccctacttcttgagcccctctgatccttccccaagcccctagtcttgtgagcaacaccatttaacctctgctgcctgcttcaacaaaagcagcttgctccctttgatcagtttcctacatttgcttctgaataaagatcctatttaaagataacttctaatattaggattttttccaagtttgaaacccactgatttagatcaacccttttattttatggaaagttgcagagctgggattcaaa

SEQ ID NO: 99784 - DNA, 390 bp, Homo sapiens
tctgttttattcactgtggtatgcccagtacctaaaacagtgcctaaaagtttttgaaattttcagtgacttttttttgcaatagagtaagctctatcttkatctgcttctaaagacagcaccagagaacatttctctgaaacataaataaacgtagagacacagctcaaaactcttgatcagactcagtaaagctagaaagctaattggaaaaaggtagcagggtgttttcaagctgtcttgaaaagagatgagtggtgaatctcttcatttttaaattgggagcaatgtttgtagtagcatgagagtttatattaggctatcaaaataaaaaaatgacttaaaccctattaactcagaaaaatgttgtctctgtaatttctttgtcta

SEQ ID NO: 99785 - DNA, 579 bp, Homo sapiens
cttatattagaaagccagtcttcaagctgagatctttttgtctgcttgttctattctgctattaatacttacgattgcattacaaaaatcttgtaatgtgttttccagctctatcaagtcacttgtgttcttttctatatggctattttgtctgtcagctcctgtattgttttatcatgaatcttagcacccttagattgggtattaatgtactcctgtagctcagtcatctttgttcatatccatgttctgaattctatttctgtcatttcrgccatctcagcctggttcacaacccctgctggggagataaaacagtcttttggaggaaagaaggcactttggcttttttagttgtctgggttcttgtgctggctctttctcatctttgtgtgtttatgttccttcaatttttgaggttgctgacttttggatttttttttgtattttatcctatttggtgacccaagggtttgactgtggtataaggtggattcagccaactggcttggtttctggaaaattttaggggaccaacactcagctcccaactcctggactacatgctctaactctagg

SEQ ID NO: 99786 - DNA, 644 bp, Homo sapiens
tactgttcaaaattaaagcattggcatcagtgttcaaaggattggcattgggttatttatggctcgcctcactgatactaagcacacccttgcctttgtgatcatacttgcggagttattgccatgaggttgtgtgagcttggcacaccaaactgcttgactctctaatatgctataaaaacttatagccacatggcagcaggcgcacttccctttacattatccaacagatatggaccaaaattagaaaattgagacatttgggtttttttttcccttagaacwgggatttatttagaaactctaatctgaagacactcacttttgaaatgctgaggaaattgcaaacaatttatcacacagaaatatttggaagcatccgcatcattaaaagtgtccctttctagtttataactgaaaatcaaataatgatcaacaacggtatttatttcttcctaggcaatcttcttttgaatcgctaattcgttaaagaaccatttaaactgataaggtccataattttcatggtcacagatcttcaaggagaaaatatgattattttttaaaatgttctaatatggtaatggactaatgtcacttaaagaaaaaatattgaaaaatctgtatgaatcaactaacatgca

SEQ ID NO: 99787 - DNA, 644 bp, Homo sapiens
tactgttcaaaattaaagcattggcatcagtgttcaaaggattggcattgggttatttatggctcgcctcactgatactaagcacacccttgcctttgtgatcatacttgcggagttattgccatgaggttgtgtgagcttggcacaccaaactgcttgactctctaatatgctataaaaacttatagccacatggcagcaggcgcacttccctttacattatccaacagatatggaccaaaattagaaaattgagacatttgggtttttttttcccttagaactgggatttatttagaaactctaatctgaagacactcacttttgaaatgcygaggaaattgcaaacaatttatcacacagaaatatttggaagcatccgcatcattaaaagtgtccctttctagtttataactgaaaatcaaataatgatcaacaacggtatttatttcttcctaggcaatcttcttttgaatcgctaattcgttaaagaaccatttaaactgataaggtccataattttcatggtcacagatcttcaaggagaaaatatgattattttttaaaatgttctaatatggtaatggactaatgtcacttaaagaaaaaatattgaaaaatctgtatgaatcaactaacatgca

SEQ ID NO: 99788 - DNA, 618 bp, Homo sapiens
catttctaaaaagtttttatatgatgctgatgtggctggttcagagaccacactcagaaaaacactaatgaaagaaaatatcaactgacaaaacaggaaacttttagaaaaaaagttcaacaactaaaaaataaaaaagttcagtgctatgtttaatagtacacaaagttggagaaaacaaaaaatatgtgaataatatctaaaatagtttcggcataaggcctttagtccttaagcttccctcgayaaaccaatcaactgtaattagtaagtgattatttaacaatagtatattttctcttggtcatacatctaaacatcacctttagatcatcagctctaaaaaagagcacacaactttgccaagaaaggccagtttaagagacccataaagacaggaaaacaagaaaaggaaccagacttttacacttaccctattcaagaaattccaaatgcaaacatctcatgtgaagataccttggcctttgtacctaaattacagtgtttgggaattagcctttttctgggcaattaaaaaaattattagctcaactctgtgactaatacagttaaagtcaccatgaaagagctagaattaagcccacattactcatgcga

SEQ ID NO: 99789 - DNA, 601 bp, Homo sapiens
tgagataaagtcattcacagagaaacaaatgctgaaggatttcattaccactagactagctctgaaagaaatactcaaaggaattctaaagctagaagtgaaagggtgacatttaccatcatgaaaacacactaaactataaaactcactggtgaagcaatcatacacaagaggaagggaaaggatgcaaaygataacactacagaaatccaccaatccacaagagaaaactataagacaaaaagaaaggaacaaagaatatataaaacaagcaaaaaatagttaacaatatgacaggaacatagcctcatatatcaataacaaccttgaacataaatggattaaattctgctcttaaaatatatagaatggcagaataaatttaaaaaacatgattcagctatatactgcttacgtgaaactcaccttgccagtaaagccacatacagactgaaagtaaagagatagaaaagcatattacacgcaagtgaaaaccaaaatcaagcagaagtagctatacttatataacagagactttaagtgaagaacagtaaaaaagacagagaagattattattattatttttgaattctgtttattt

SEQ ID NO: 99790 - DNA, 630 bp, Homo sapiens
tcaagcagacaaggaaggtccaagtctttgctgttctttggttttctatatgcacatgtgtgttcatgtttgcaaggacacacacacacacacacacacacacacacacacacacaccctgcatttaccagtatcattcaaaacttcttagtgatcacccactggctatctaaggacagagggtaatatcctcctaacagagatgctatggtctgagtgtgttccccaaaactcatgtgttggaaactgaatacatacccagtgcaacagtattgggaggtgaggcttgatggaaggtgttaaatcttcatcaaggctccaccttcattaatgaactaatgctactattaaaagggcttgcaggagtgggttttctctcaagcacttttctgccatgtgaggacattgggtttatccccacttgtccttctgccttctgccatgtgaggagggcatagcaaggaggccctcaccagatgttggtgtcttgagtttgaacttcccagcctccagaactgtgaggaataaatttatgttctttataaatcactcagtctatggtagtccattayagcagcataagacgatccaagatgagataatttcacaaaaggacaaaatacacttaaa

SEQ ID NO: 99791 - DNA, 598 bp, Homo sapiens
ctgctctgttcttgcatactggattctgttgtaaatgtcattagtatgtatttcaatgtgtttgactcatggaggtgtttaaaggctgtgcttcatgaatcacatgttaccgtgttaataagagatatggcaataaaattctagatctgaggtggaaaaaaattcaaaaaaaattgaatcagttttactgagtgacatcttacaggcaatccaaattccgtttaatgaactcctgcgtgtttttaagtgtaaagaaatgctaaatcatattcctacacctccaaggtaattctgcagtttaagtgaagtttgcaaagttcagcatgaccttgcaaggtaaccaggcagaattaaaacttyccttctcccaccccaatccattaatatttctgttttaattcctttatcaaatgtttcctttcccatggtgcagatatagtgctgaaagctttgaagatagactttgttttagtccctatttcctgttacccttgagatttggggctcgagtgaggtaaggagaaaaaagggaatcagatttacaatcattttaacagctctaaagacaggtttaatcttcaccctgatcaagataatg

SEQ ID NO: 99792 - DNA, 538 bp, Homo sapiens
tgattagttagcattacatattcaataaacgtttgaaatgtactctcctgsttttccctgagataacttgaacttctaaagcattgtaatagaatgtcttttctagaaaaattccaaatggttgcaagtgcatgcaattttaggccaaattgatcaactcctcttgttttgttttagaatacagacataacaaaaccagtaagttacctaacatcatatagcttatattctggtgagatgacaatgtaagtggaaaaacaaatgatatgaatgacagttttaataagcattatttttaaaaaactaagccaacataagtgaaatggaagtcataaaattttctactttagtagatcattcataaaagacttccatgaggagataatgtgatttgaataaaaaataaaacaagtcatgagaatatttaaggaaaggtaatttcagacaggaaggacagcaaagggacagcaaattacgtgactataataaataatttgctttgtatgttcaagaaacagcaagatgatcattgtgactg

SEQ ID NO: 99793 - DNA, 538 bp, Homo sapiens
tgattagttagcattacatattcaataaacgtttgaaatgtactctcctgcttttccctgagataacttgaacttctaaagcattgtaatagaatgtcttttctagaaaaattccaaatggttgcaagtgcatgcaattttaggccaaattgatcaactcctcttgttttgttttagaatacagacataacaaaaccagtaagttacctarcatcatatagcttatattctggtgagatgacaatgtaagtggaaaaacaaatgatatgaatgacagttttaataagcattatttttaaaaaactaagccaacataagtgaaatggaagtcataaaattttctactttagtagatcattcataaaagacttccatgaggagataatgtgatttgaataaaaaataaaacaagtcatgagaatatttaaggaaaggtaatttcagacaggaaggacagcaaagggacagcaaattacgtgactataataaataatttgctttgtatgttcaagaaacagcaagatgatcattgtgactg

SEQ ID NO: 99794 - DNA, 544 bp, Homo sapiens
aggatccagactctgccagccctgcatcctttcttcaatctcaccattttttaattttagggagagatgggacacgatctcctttatggtattacaggatcactgtgacacatagaagcagaaagacttctaagactacagcagcggctggggcaaggactgatccagagttgatgaggctgagactggaagcagaaaggagttgggtgcactcaaggaatctggaggtggggccacagtgggctctactgcagccttgatggggtaggcatggaaccgagggggataccgcaccttcggttgcggaaactgggaagccggcagggccgctggctgagatggatgctgtgctgacggtgcacccggcgtgtcgtcctctgagccttatgatctgtccatgtcacgggatttgcycctcagtctataaatgcgatgacttattaatcactcagaatcctgtttcccccaagataaaaaatatagacgctctcgtgagaataaggttgagatagaagatataaacatgaggaaaccacagagccgt

SEQ ID NO: 99795 - DNA, 544 bp, Homo sapiens
aggatccagactctgccagccctgcatcctttcttcaatctcaccattttttaattttagggagagatgggacacgatctcctttatggtattacaggatcactgtgacacatagaagcagaaagacttctaagactacagcagcggctggggcaaggactgatccagagttgatgaggctgagactggaagcagaaaggagttgggtgcactcaaggaatctggaggtggggccacagtgggctctactgcagccttgatggggtaggcatggaaccgagggggataccgcaccttcggttgcggaaactgggaagccggcagggccgctggctgagatggatgctgtgctgacggtgcacccggcgtgtcgtcctctgagccttatgatctgtccatgtcacgggatttgctcctcagtctataaatgcgatgacttattaatcactcagaatcctgtttcccccaagataaaaaatatagaygctctcgtgagaataaggttgagatagaagatataaacatgaggaaaccacagagccgt

SEQ ID NO: 99796 - DNA, 590 bp, Homo sapiens
cagcaggtccacactgaatatgccacacacccatgagtcacttagtagcctaagttatcacatcatcacaagaagaaaaaaatgatgagtacagtacagtaagatattttgagagtgagagagaccacattcacataacttttattgcagtatatggttataattgttctattttattagtagttaytgttaatctcttgtggtatctaatttataaattaaactctatcatgggtgtgtatgtgtaggaaaaaacatagtgtatatagggttgggttctacttgaggtttcaggcatccactgaaggtcttggaacagatcccctgaggaaaaggaggctgtcttgtaactaagtggaagatatgtaagtcatgggcagggcaccaaaagcagatctgtcttcctggagcagatagagcagaatgttcaagctgaaaataagtcagccaagaagattttatcaaagggaggatacagctctccaatggcaagctgaaagcaatagtcagagttcattgaccttgaacctacagcaggagcaaccagctctgatgaaggcagaccactaggccagaacgcctgggctcaa

SEQ ID NO: 99797 - DNA, 629 bp, Homo sapiens
gcttttgtttgtcaagaaagaacagagagagtgacaattatacatactgaggagtggtttacagaacttttttggaagaaatttgaagcgtaaaacaagtaactacttactatatcaactcaaatcaaagtttctgggcatttttctttgtaatactgcaagaaattagagaaaatcaatgatgaccaatatgaacagagacactggaactgccccatctaccagaaagatgaccatcacaactccaacctggttagatatggcagccaaaagacaaggtttgctccatgactcaaacataccattttattcaaagccctctatgatcaaagtcttaagaattactatttctttatttcttcatatctgagaagtcctgacaattctttcaaaactagcctcagattttattttcctatttccaaataataataattaacattcattgactatctaccttgtatcaaccatttaggtaagcactctacatgaattctctcatttaaatcctcccaaaaaccaccaaccacatatatatatakagagagagacaatcagtattccaattctggcagtccaattctagggccttttaatggtagtgctataccacctcttagatctagcac

SEQ ID NO: 99798 - DNA, 671 bp, Homo sapiens
cgagtactagcacgtgtcagtgctttattccaytttatgattgaataatattccattgtatggagttatcacattttatttgtctgttcctcagctgatggacatttggattatttccactgcatatccgtaaatgtttaacaattagcagtccattaaaaaaaaaaaaaccctgacacataacatttgctgatttccatggtgtaaacattcccgttgtgactgattgcaaactccatgatgtgactgaatacagaattggaaagagattttaaaataggcacttgtgagtccttacaagccagtttcaacatatcactaaccatctttactgatagatcactcaagtgaccagagacatagctacattcagtaaagtttccatacatcgtcaccttagaataataataataacaaaagtaatacaacagctaacatttactgagcactttttatgtgccaggcactatgctaaacgttgttttttttctttttaaatcttgatcaccactcaccttcttggaaaccagcagctccaaattaccaggattctatgcttggtttactgtctcctagctggtctccctgctgttaattaaatactccagactcttcagcacttacttcctctacctggtaaactctttttctgtactgtgttttacaccctt

SEQ ID NO: 99799 - DNA, 582 bp, Homo sapiens
agccagtgctgatagatatggtctacactcatgttattgagttgctgagatttgtctaaaaaggcagatgttgatcctactccaacactgatattataaaggagtttcatgaaatcttattccagctttgcacagtgtttaaaaaaaattcccccaagcgcgcaaacatgttcactagcccagaaccagagttgattttgtgtttgaagtaggaaactctgctatttcagcctctcttcctgacagacacatgatcgtgataaacacaaggacaaattacatttgctgctttgtacatgaggatagattacagaaaggcacagttcctacagaatcatgtaaaggtaatttaaggttaactaaatttttttcccaacccataagctaaatgtttactattctgaccaatttattttggttcctgaggtttgggtcacctgtttattgacaagcctggcttaatttggaagttagggtttcatgwtgaatataatgttgaagagtcatacaaacttttctctgaaacagcttttagttgttttataggaaagtcaacaaggtccttgaggtacattgcttgct

SEQ ID NO: 99800 - DNA, 567 bp, Homo sapiens
tcggaaaggacaagagcttcagttcttcaattttcattatattgtccattgcctttaaaaaattgtgaaatgcatcatatattcaaatggaagaataaaatatatacgtacagcataaagaagaataaactggacatccttctactcacaccagattaaaatgtaaaacactagctgggtgcgatggctcacacctgtaatcctagcactttgggaagccgaggtgggtggatcacttgaggtcaggagttcaagaccaacatggtaaaaccctgtctctactaaaaatgcaaaaattagccaggtgtagtagtgcactcctgtaaccccagctactcaggaggctgaggcagaagaatagcttgaatccagaaggkggaggttgcagtgagctgagattgcgctgttgcactccagcctggggaacaagagtgaaactctgtctcaaaaaaaaaaaaaaaaaaaagccactacattgaaatcttctggtgccctttcacaataatattatccttcctcttgtcaccaccaccttcattgtcatgctgagtgttgtgtgaaatatcc

SEQ ID NO: 99801 - DNA, 670 bp, Homo sapiens
attgttaaagtgaggacctgagaactcccttaactcccttgagtgaagttgaatactccacctgttttggcggcttgacactcttttttcttacttcctggtttatgattgtgatgtgggaaatataaattgtgccaagttctttggagtttatgcaaataatacatggcacacattgttatgttgctcttcattccctgtgaaggccttttgtcatcaactttatatcctgttcccatgagaactttacctttttctcctctttgcattctgttcttgatggattgtctagtttmtcacttggacaacttatcctctttctctgacagcctatttaaaaccacctactattaaaaacagttttccatcaaggcatctagatagtcatttcccttgtttttcatctgccttttatctgaggcgatgccaatggttttacagtacgcagctgccactagatactaatgacattttcactgggcaagttgcatttcccagccttgtttctgtatatttgattgtctttagtattttatgtgagttgtaaacacactgggtagaaacaactcaataaatgacaaacagtaaaatgaatactaaaaagttatagtctcataaaatgagaacgagtggggcccctctcccaaatagaagtaagccagggacatca

SEQ ID NO: 99802 - DNA, 393 bp, Homo sapiens
gaatatgcagtccacgaataatgaggatcaactacgttaaaatttattttattacacagaaaatttccaacaaacacaaaagcagagtgaatagtataatgaacctctctacatatacatcacataacacaattatattttgaagggaagaaatgctagaaaaaggtctgataaaattcaacatctcctcctgacaaacagaaaacttggctgggaaactacttttaatctactttttaaaactttgccatttattttctaatgacattttatgtagaaccttaaactcaaaatcattcatttagaacyggaatttctgctctttcaaaaattcttcattgtgtgaatccctgaagtactagagaacctactagtattgcaaagagaaacaag

SEQ ID NO: 99803 - DNA, 595 bp, Homo sapiens
ttagatggggtgagggataaakggttagagctacaaatagcagttaagaacatgtcacagggaagccaaatctttatagaaatcatttgacaaagttttgggtttaaattctgtacactgagtaaggaaacaaatatattgaaacttaagaggcatcagtagttaaaaacacatataaaaacacatatgtgtcttaaatattttgcttttaccaagaacatatcaatgataataaatttttgttaacctttaccatgggccaagacattttagcaaaacattcttgattgaagttccaaatttcttttttgcatgaactgaatctacaatgcagatgcagctgctgctacttccagtttttgttttacttaaaataagaccataaacctgaagcaaagaatgcagaatcttctttatttaaatgattctcccttttattcttatccatacctcattatactgtttttattattttttgcaaaacatatctatgttttatgaaagataatcatttttcatactcatgttaatttgtttacataataattgaattatgttattgcactaactaataaatgtggagtaatttggtttg

SEQ ID NO: 99804 - DNA, 595 bp, Homo sapiens
ttagatggggtgagggataaatggttagagctacaaatagcagttaagaacatgtcacagggaagccaaatctttatagaaatcatttgacaaagttttgggtttaaattctgtacactgagtaaggaaacaaatatattgaaacttaagaggcatcagtagttraaaacacatataaaaacacatatgtgtcttaaatattttgcttttaccaagaacatatcaatgataataaatttttgttaacctttaccatgggccaagacattttagcaaaacattcttgattgaagttccaaatttcttttttgcatgaactgaatctacaatgcagatgcagctgctgctacttccagtttttgttttacttaaaataagaccataaacctgaagcaaagaatgcagaatcttctttatttaaatgattctcccttttattcttatccatacctcattatactgtttttattattttttgcaaaacatatctatgttttatgaaagataatcatttttcatactcatgttaatttgtttacataataattgaattatgttattgcactaactaataaatgtggagtaatttggtttg

SEQ ID NO: 99805 - DNA, 469 bp, Homo sapiens
aaagagcaaagtagaagtatggacactacccaactctacaacttactataaagctaccttgatcaagatggtgtggtattggtgaaagatagataaatagattaataaaacagaagagagatcccatgaaatagacttacattgatatgatcaattggtcattgacaaaggaacaaaaacaatacagcgaaaaaaaagtcttttagacaaatggtgttggaacaactggaaatcaatatgacacagatccattagacacagatcttacaccctttacacaagtgaactcaaattggattatattcctaaatgtaaaatgtaaaactatatgaacccatagaagacaaccaaggagaaagcttagatgacattggctatggtgytgactttataagtagaacaccaaaggcacagaccatgaataaaataattgataagccagggtttttgaaaaattaaacacgtttgt

SEQ ID NO: 99806 - DNA, 473 bp, Homo sapiens
taaaaatgacagatgtaaaattaacattcagagaaattaaagatacaaaagacaaaggagattcaaaatgcagttagtacttttgatgaagagaacaaagataattgatacataaagagacatatctgtaatcatgtccatcgaatgtaagatataggtatttctgaagtagtaattttggtgatttttattttctttcttttactttcctgtgtttcattatttctgcttttgctattctcttttataatgaatatgaatcatttaaaaattaaatcacccttctaaaatgaattgactgctttggaaaggagtgaaacagccaagattatcaggaaagcctaggagctgcatgctggycctctcttcatgtctgggtgctcttccagtcagcaggggctcactagaggctctctctggacctcacattcaactgtgcaacaaatggctttgcctagttgatttcttaacta

SEQ ID NO: 99807 - DNA, 562 bp, Homo sapiens
agagaaacatagctggatgcagaaacatatatttaatatgaaggtatatatatgtgtctttgtgtgtttatgcttatattcaacagaaattttgggaaaatgatggtggcagagtataggttttgaaattctccaaatccccaataaaaacctgcataataaatacatacctaaaccaatatcaataaacatttattaaccaaactaggtaaaaaggcttatctgcagaataaaatgcatttaggtagtaataaaccaccaattgctacaatgttcacataaattatattgtcatctgcaggagagagcagagagaaactgtataccaatatgcagaagaataaaactggacccctgtctctcatcacatacaaaaattaactcaagatggattaaagacttaaatggayggctgaaactatgaaactactggggacatatggcaaacttgagaacagaaaaaaacccaaaatagccaataggttttccttggaaagcatgtcagacaatctgaaaatatcagctgaagcaggaaaaatgaaaggattgaatattgttaaat

SEQ ID NO: 99808 - DNA, 528 bp, Homo sapiens
cctggagccagaaaagacttctcattgtaggtgaagaggtaaacagaagattcccagtagcccccaatgctaccgccaacacctacaacccttagaacaagagaatcccacagtgctttcaagccctgagcccactttaggaagctcccagaattcactcactgcattccccagattaggagcatgagagactcactctccacccggaaaccattctytgtaagccaagctgctgctgcacagcaccatcttgaggccagagccacttgtagagtgcaccatcctctgggggccagtagccacagcaactctttagccatggggctccatctttattatgcgaagccaacaaaggtggctgaacactataacccctatacatggaccttgggcctaggatctgctgtgaatttggttctgcatggcagggaaaccaactgtcactgctgtacttccagccagaggaagagtctgctagtccaccccaagacaaacctgtccttgagatggccaaatcactgtgtacct

SEQ ID NO: 99809 - DNA, 562 bp, Homo sapiens
attaaagtatgtgacaccctatgaagtgcattgttgacattttgtgtgcatgtattatgtgtgtgttattacagttgttatttcctgggaaggaatggtcgtgtacgttagtggaggtttgtatagmttttggcattggaagtggtctcctaatttagtcttaaacctgacagtatttttcatatgtgagtgtctctggagcatttgaaaaaatagtttatccttacctttaaatcttctgctaactatatatttcaacttctgggtagctttgatgattctagacaagtggcttgccagacacctaggtcaggatccaggcaaaaatgaatcaaaccacagaccctctaaggcagctgtctatttctcaacaggaatatgctctcctacaaagatacttttatcaggttaacaatgtggtatcagggagatttcagggctgtaccaggccaagctaataaaggtctatagtgaagttgagccacagtcaccctgacttacatgtttttgctcttgaccaagaatagctgaggtcaaaagtagaggacttacttgtcacagt

SEQ ID NO: 99810 - DNA, 562 bp, Homo sapiens
attaaagtatgtgacaccctatgaagtgcattgttgacattttgtgtgcatgtattatgtgtgtgttattacagttgttatttcctgggaaggaatggtcgtgtacgttagtggaggtttgtatagcttttggcattggaagtggtctcctaatttagtcttaaacctgacagtatttttcatatgtgagtgtctctrgagcatttgaaaaaatagtttatccttacctttaaatcttctgctaactatatatttcaacttctgggtagctttgatgattctagacaagtggcttgccagacacctaggtcaggatccaggcaaaaatgaatcaaaccacagaccctctaaggcagctgtctatttctcaacaggaatatgctctcctacaaagatacttttatcaggttaacaatgtggtatcagggagatttcagggctgtaccaggccaagctaataaaggtctatagtgaagttgagccacagtcaccctgacttacatgtttttgctcttgaccaagaatagctgaggtcaaaagtagaggacttacttgtcacagt

SEQ ID NO: 99811 - DNA, 584 bp, Homo sapiens
cactcatacattcctccatttgtcacatgtgcctacatattaaccttaagcaaaggttatatatgcatacccacgaattaataaaagcaatgaaacaaggtaagattttatgcatactccgcatagaatactaccaattaaaataaaacaaaatccttatctgtactttgtcaataaatctacaaagatttcttaatgttagaatgttgtattataaagtatgataaataatgttgatattagtgttgtttagtagaaagcccaaagcattttatgcatctaagcaatttatattttgcaaacatttctccctctgtctgtacttagatatacatctgctattccttcatattaataagcattagggtaaaaaggtytcagtggatcaaacggaaaactttcagtttcttatcccttttcacctcataatactttaatatttttttctgtgttattctacagacagatcaagacataatttctaaataggtgaccttaggtacagtgtgtttttgtatacggctgatcttaagaaataaaacaacattcatttgtctctaagtttatcattctaaaaaatgtta

SEQ ID NO: 99812 - DNA, 584 bp, Homo sapiens
cactcatacattcctccatttgtcacatgtgcctacatattaaccttaagcaaaggttatatatgcatacccacgaattaataaaagcaatgaaacaaggtaagattttatgcatactccgcatagaatactaccaattaaaataaaacaaaatccttatctgtactttgtcaataaatctacaaagatttcttaatgttagaatgttgtattataaagtatgataaataatgttgatattagtgttgtttagtagaaagcccaaagcattttatgcatctaagcaatttatattttgcaaacatttctccctctgtctgtacttagatatacatctgctattccttcatattaataagcattagggtaaaaaggtctcartggatcaaacggaaaactttcagtttcttatcccttttcacctcataatactttaatatttttttctgtgttattctacagacagatcaagacataatttctaaataggtgaccttaggtacagtgtgtttttgtatacggctgatcttaagaaataaaacaacattcatttgtctctaagtttatcattctaaaaaatgtta

SEQ ID NO: 99813 - DNA, 610 bp, Homo sapiens
gtttcccaaaatgctggctatggagcaaatatccacttaaccttgactttttgtggatttcaatgtggtagctggacactgcatttacagtgatggggtgagtgagagctgggtatgtgtttgacactgtgtaaagctaaaagaatcctgatagaatccaagtcagaaaagcttttgtgaattctcacctgacttctctgccaacaagctctgtctacatatgtacccagggcgamgcaggtgctgttctttctgctggctggaatcttccagtgtttgcatgttccttgtcctcttccttgcacctagctttgggccaagtgttgctgctattaagtgactacacctctcatcgaaacatacatgaaccaaacttgactgcccaaggggcactgcaggaaaagtggtgacagatctaacacttctttcaaaaacaaattaaatgactatgtttatttaaaagaaaacaggaaaaaaatccatgcatgtgaatcttgttctcattgactagagaattgacaccttggaatgttctatctactactgactttttgcaaacactctaaaacattttacatatatgataagtttatattgtaatatgacaagt

SEQ ID NO: 99814 - DNA, 546 bp, Homo sapiens
  misc_feature (1)...(546): n = A,T,C or G
attcccccagactctaggtcatcacttagcaatgcagactccaggatttattattgctgtctcctagcaaatacatgaaattcactttagttcaaaccacccaagcatgacaactccaataatgatgttttaatagtgtctactgtgtaaaagtttcttgaaatctgatatctgacatgagctaatataagcaatatcacagccccccattttttttaataaaacagttccttaaatgaggaactcagttgtactgtactgataaaacctaatgatttctaaaatgacgttttactccaatatttataatttcattgttaaccaagattgtattgtggtatttcagaatataagcaataatgttcctcagcctaagtacgttgaattyacctcagaaaatttaggtaactaattatctgaaactactgaggcggtgactgtttgcttcctgtatgattacactataatgtgaggtttttctgtaatggaacaaaaacaatccanattctttgctcagtatgctaactggctactctaaaaattgct

SEQ ID NO: 99815 - DNA, 534 bp, Homo sapiens
tctttccaattcacattcagttatgtcatattggtagcttgaaatcagctatggtgggaggatttgytccttggtaattgtcaactactataactaagggcttgatttattgcactattgattttctagacttaagcaagtgatggagaaagtgtcaatgattcagattaaatttaagtgtgtcatgtctgtagatgtctcattgttaaatcacatgaaatagagaaaatattcttccagtgtgtaaaaacaatcatttgatccatcaaagaagtctttcacattatggacaaaacaataaaatttcagcatatgtttttattgtttcacccttgtcttactctttaatgtaaaggaaatgatcaaccaacacacatgtcagaaatactcttgtccgttagttgcaacaataagttggctatggatctaagagtttggcaaaaaacaatgaaagtattctgtgagaatcaatatgctatatgaaatttacaataaagggtattgtatattttattattattcataaactgtgtg

SEQ ID NO: 99816 - DNA, 613 bp, Homo sapiens
ttaagtaattttaaaaaacaaatcattctttgcaatcataaaatatttaggtagtctagaaattttaattataatcaatgtgtattaattcactgctttcaatcacaaatatctagttgaggtatatcaacagtgaggcattagcaacttccctctgcagtatttatataacatgaagtctattggttatttccttaaaatctgctaccactcttgatgctctttagttacaacttacggtaatctctaaagcaaaaacagtcattctcttatttcaacttgtgataaacggaacctttctctgatccagttgaaacatttatcacactcagggtaaataggaaggmaggcatcatcaactatctttaaacacagaatatcctgaatgttcaacaagactatgacagaagcaactaaaaatcttttttagttgctaagaatagctaggtttttctccacccctttactgtatttttacatgtataattttaagcacaatattcccacaactctgatacctgtccaggatccacatgaaacaaacaaacagctgaccttgcaatacaactttaagtccacaaaataacacttgtttaaaaatacaacagcccaa

SEQ ID NO: 99817 - DNA, 609 bp, Homo sapiens
aacaactgtgagagcctgattgttggtctcatcaaactggccaatcagggctgagatggaactgcccggctcattctcatttgttaaagtgacattgtcaataagatgggaaattacactctcctgcagaattgcagttgaatgtaggtcaggtatgtcagaacagagcatggagacgtctgacaaagaaaaggatgttgcagctcggcccttacccctattaccttccaggttcttaatttctaggttgctatgagaaaggacgcttcctgacaagatgcttttcccttccacaaagtcctcaggattacccttttccttgattttcacaccatgcagatcttgtgtggggttaactacaggatckggagccaaatgctgctttggggagagagacttgctgggacaggggttttcctggcaattgcttgtggcatttgatgtggttctcccacccctaggacttgacatgcccagctgttctcctgtgactgacatgtgggcagtagatacaatggtgtccccttggctggtatctttgtggagcagagcactggaggaggatgataactttttgttgaaatttagaaaatgtggatcttttatact

SEQ ID NO: 99818 - DNA, 548 bp, Homo sapiens
cttcctctctcagaaaatctgtttatgaaatgtcattctgttcacctactgctctttcacacgtacatgagtcctgtggggcattattatgtctgtgcctgtgttcctctttgaagtgagctcttctcacttgcataaccaagactgatcaaccatgaagctttttgttttttttggtttttttgacagacagttattggagcttgaaatgggagaaaaagtctgaaagaactgctttcagatatggatacaaggagccttctcctttcctgaacctcacgctcctacacacacatttctctctagtgtgaactattacagactaaaatatcaaacatttggcttacagtattgatgtttccacttcataagtacaaatctcagaatatgtgctcactcaacaataagcttcttctgaagacacgactataaaaaaattggaataaggcgcatacatagatctagacaawccttcatatattgattctaattattattctcccttgaaacccatttttattctttaagggagggcaggcttagctgat

SEQ ID NO: 99819 - DNA, 414 bp, Homo sapiens
ttaatgaaattccttgccaaatttaagaggtaattgttgataaygaatgccataggtaacattaccctgacacacacgttttgtaaatttgtctaaactaagtttgctatgtatatgatactattaataatgattaaaaactaataatttattgagcaccagaaagtgactatttttcttcctttgttagtgttttcttctacaaattttcttctaagaatggttttagctacatctcacaaatattgatattttgtgcttttattatcatttagttcaaaatattttctgacttctcttataagtacttctttgatctatgggttatttggaagtgtgttgttaatttccaaatatatgaaagtttccttgagatcattttgttattgattcctaattcagttatactgcggt

SEQ ID NO: 99820 - DNA, 537 bp, Homo sapiens
tcacaaaccacaatgctaggggctgtaccttgtatgtgactggattctgccatagccagagaacagtctttaaaaacaaatcttagtttggacactggtttcactgtaacctaggaatttaacctccttgggctttcacttttagctctcgtaatatcagcctaaacataactaccctgtatggttgtgtaaagttaaatgcaataacttcacaccagcaccccctttctacccacaatcccctagaagttatgattaggataattatcttcagtctgttacctattgagttctagcattcctcttaagtggctcttgggatggcagaagatatagacactgtttaaaccttttatctctttattgtattctgggttgacayaaattttttaaaaatagattccagccttttatttatgtatttatttattggaaaagacatttaagctaagtgcagtggagcacacttgtagtcccagctactcaggtaagtgaggcagaaggatcacttgagcccaggagttagttgaaaggtag

SEQ ID NO: 99821 - DNA, 405 bp, Homo sapiens
ttaaaatagaaatttctataataaggtcatcttagtcgcccaatttccaatcccctcctcaatccatttttgccaattacaaccagcatgatctaaagtgcaagtctaattttgtcaataccctgcaagaaatcatttgatgactctgcatattcttggaataaaagctaaacatctctatatgtcccctatctacctctcctgcctcatmtattattacccagccccttcacactcaatattacaacatatcgaatttcttttagttattcaaactccccgtaatctgctatgcctccaagcatgtaatatgttcttctctttgcctggaataggcttctcctgacactgatcactcccattcacttcttaaatcttaataacccttcagctctcagcatagta

SEQ ID NO: 99822 - DNA, 596 bp, Homo sapiens
gtactgtggggaaaaaactttagatttttttttagacatgcatctaaagtgcttcaagtttcctcttttccattctaaccctgaatgactactaaaaactttatttcatgtattttggtctccgtgaagtccctctacttagatcaagcaggatcctcaatccatgcctagaacaggcaaaagccccagagggaggcatttgttcattcacctaccctctctagattcttccccctctaggattttagtattataaacttgctcttacaggtatctgatacctttaaaaacgtatttgtaatttatctggccattgcaatggaaacattggcctgctgcaatctacatacatcttacctgttagtagatgtcaatatccctagtrgattctaatgagtagccaatcttaagcaatactgactgcatctaagaaactattacaaggttgaggtctaagttgaagtacttaggttctctcagctttccctcactgctacaagataaatgggtcttcacctatcatgcctatcatgttccatgctggagaaaggagaccgtccatagagcagaaaaggcataccagcagtggatcacta

SEQ ID NO: 99823 - DNA, 372 bp, Homo sapiens
gactacaggaacaagccaccatgcccagctattttaatgcatttttagtagcaatagggttttgccatgttacccaaggctcaagtaatcctcccrcctcggcctcccagagtgctgggattacaagcatgggccactgcacctggtaagactatttctatgtagtagtttattcccacctcctttcctatccctcctgggaataactgacctaattgatctatagaacaaacactcttaccacaaagatcacacacacacacacacacacacacacacacaaacacacacacacacacatagagtcatgtaccacataatgatgtttcagataacagacctcatatatgatagtggtcctataagatataa

SEQ ID NO: 99824 - DNA, 572 bp, Homo sapiens
tttgggggggtagtgcaacccatttattgtaaatatgaagaaatgcctggttgtcctcctacctctctggctgctcttctcaatctcctttgctggattctactctttttctaccatctaggctctttaggactctgtccttggacctctcctctttccacactcatattatttgatgattctttctaatcttatagcttttaattccatctgtgcactcttgattcacaaacttatacctccaggccagatctccctttggaactccagtcatatttccaactgcctaattgacaccyttctgggaaatctaagagattgctcagagtttgcacgcctcaaatgagactctgggacttctgcaaagtctattctatcgtatttaatggcaactctgtccttccagttgctaggacccaaatatcttagtcatccttgactattcttttttttttttcgtatggcatgcatcagatccaccaagaaatcctgtaggttctcccatccaaatatattttgaatcaaaccacttctctttcatcattattaatctgtgtcataccatcatcatt

SEQ ID NO: 99825 - DNA, 572 bp, Homo sapiens
tttgggggggtagtgcaacccatttattgtaaatatgaagaaatgcctggttgtcctcctacctctctggctgctcttctcaatctcctttgctggattctactctttttctaccatctaggctctttaggactctgtccttggacctctcctctttccacactcatattatttgatgattctttctaatcttatagcttttaattccatctgtgcactcttgattcacaaacttatacctccaggccagatctccctttggaactccagtcatatttccaactgcctaattgacacccttctgggaaatctaagagattgctcagagtttgcacgcctcaaatgagactctgggacttctgcaaagtctattctatcgtatttaatggcaactctgtccttccagttgctaggacccaaatatcttagtcatccttgactattcttttttttttttcktatggcatgcatcagatccaccaagaaatcctgtaggttctcccatccaaatatattttgaatcaaaccacttctctttcatcattattaatctgtgtcataccatcatcatt

SEQ ID NO: 99826 - DNA, 572 bp, Homo sapiens
tttgggggggtagtgcaacccatttattgtaaatatgaagaaatgcctggttgtcctcctacctctctggctgctcttctcaatctcctttgctggattctactctttttctaccatctaggctctttaggactctgtccttggacctctcctctttccacactcatattatttgatgattctttctaatcttatagcttttaattccatctgtgcactcttgattcacaaacttatacctccaggccagatctccctttggaactccagtcatatttccaactgcctaattgacacccttctgggaaatctaagagattgctcagagtttgcacgcctcaaatgagactctgggacttctgcaaagtctattctatcgtatttaatggcaactctgtccttccagttgctaggacccaaatatcttagtcatccttgactattcttttttttttttcgtatggcatgcatcagatccaccaagaaatcctgtaggttctcccatccaaatatattttgaatcraaccacttctctttcatcattattaatctgtgtcataccatcatcatt

SEQ ID NO: 99827 - DNA, 572 bp, Homo sapiens
tttgggggggtagtgcaacccatttattgtaaatatgaagaaatgcctggttgtcctcctacctctctggctgctcttctcaatctcctttgctggattctactctttttctaccatctaggctctttaggactctgtccttggacctctcctctttccacactcatattatttgatgattctttctaatcttatagcttttaattccatctgtgcactcttgattcacaaacttatacctccaggccagatctccctttggaactccagtcatatttccaactgcctaattgacacccttctgggaaatctaagagattgctcagagtttgcacgcctcaaatgagactctgggacttctgcaaagtctattctatcgtatttaatggcaactctgtccttccagttgctaggacccaaatatcttagtcatccttgactattcttttttttttttcgtatggcatgcatcagatccaccaagaaatcctgtaggttctcccatccaaatatattttgaatcaaaccacttctctttcatcattattartctgtgtcataccatcatcatt

SEQ ID NO: 99828 - DNA, 584 bp, Homo sapiens
ggggaggagaggcactcaaccatccatcctattgtgtcctatttattaaaaataaatcagtaagggctgggcacagtggcccacacttgtaatcccagcactttgagaggccgaggtaggcggatcacccagagttcaagacaagcctgggcaacatagcgagactccagtctctacacaataaaaaaaaattggccaggcatggtaggaacacctgtagtcccagctactttggaggccaaggtgggaggatcacttgagcgtaggagatccaggctgcagggaggtrtgattgcaccactgcactctctctgggaaacacaacgagacgtcatctctaaaacaacaacaaaaaagacgataaaataaagtgatacccaggtgggcctagatgctccccctgcagtggtcgcagagcctacctggccttaccttgggagggctgaggctgcgtgaacgaggactttcatgtttctcctctacaaacttgtgtggcttcaatattttaaaacaagagaatatttacatgtttcttgtacaaaaacaacattgctccagaggttgggaggtgaccccaagaggag

SEQ ID NO: 99829 - DNA, 622 bp, Homo sapiens
ctttcatgtagtaatatgcatttatttatttaagttgcttccatatttttccacagctttrtggctcatttctttttagtgctggataatattccattgtctggatgtaccacagtttatttacccattcacctactgaaggacatcttggttgcttccaagttttgacaattatgaataaaactgctatcaacactcatatgcaggtttctgtgtggacatgttttcaactcttttgtgcacaattggtgggtcgtatggtaaggatatgtttagttttgaaagaaactgtcaaaatttcttccaacttagctatacaattttgcattcccaccagcaatgagtaagagttcctgttgctacacatcttcaagaacatttggtattgtcagtatattgaattttggcaattctaatagggttatagccgtatcacattgtagttttaattcacaattatgttaagcatcttttcatatgtttatttaccatctgtgtatcttctttggtgaggtgtctgttcagatcttttgcccattccattttttaattgggttgttcattttattgttgtgtttttaaagttctttgtatattttggataagagtcctttaccatata

SEQ ID NO: 99830 - DNA, 619 bp, Homo sapiens
ctaggttcaaagtaggcaaggttagatatggtggatttatcggtaaatttagcccaatgtaagaggcatgtcttcaaacctattaaagatggtgcttatgtgatagtctgtgatgtcttccgcctaaggatttgggcaatcygtgcactttacttcagccttgaaagtggatttataagagagaaaaggaaagtgctgggattttttgttttcttggtttaacatcctccctttgaccacataatagtccccaaactcacacaagcagttccatatggagatgaggaatgtctagccaaaacaagttgttcagcttattagccttgggctgaataagttactcagaatatctggcatgacaaccccatttgaaaaggaggggtgggatggctgtgtttgccttttcattctccccctagagttttagaggagaaaacaaatagtgaggcaacactgcaggccagaagccctgtgctcaactgttttctctgaccatttgaaaagcctcccaagaacaatgacccagatttctttgcacttgactggctgcagagagacgggcacattgcacaattttcattgttgtctagtttcacatttgatccttcttggacaagac

SEQ ID NO: 99831 - DNA, 619 bp, Homo sapiens
ctaggttcaaagtaggcaaggttagatatggtggatttatcggtaaatttagcccaatgtaagaggcatgtcttcaaacctattaaagatggtgcttatgtgatagtctgtgatgtcttccgcctaaggatttgggcaatccgtgcactttacttcagccttgaaagtggatttataagagagaaaaggaaagtgctgggattttttgttttcttggtttaacatcctccctttgaccacataatagtccccaaactcacacaagcagttccatatggmgatgaggaatgtctagccaaaacaagttgttcagcttattagccttgggctgaataagttactcagaatatctggcatgacaaccccatttgaaaaggaggggtgggatggctgtgtttgccttttcattctccccctagagttttagaggagaaaacaaatagtgaggcaacactgcaggccagaagccctgtgctcaactgttttctctgaccatttgaaaagcctcccaagaacaatgacccagatttctttgcacttgactggctgcagagagacgggcacattgcacaattttcattgttgtctagtttcacatttgatccttcttggacaagac

SEQ ID NO: 99832 - DNA, 538 bp, Homo sapiens
atcattctattcccagccaaatggtttcttaatttacctgatggccaggattctgattgtgatctcctaacatatgcttgaattcagtgaaatgctaatcactgttacacattagatagttaatttactaagcatgctgttataaaaatcyccattctaaaattctattttcatattggtaggccataggttcaaggtctgatattggtagtagatattctcaatttaaaccaaattgacaaactaaatgttgataaatttccaggaccaagtgacctccacctaacaacttctgggggaagaaaactcacagtgaaattacccaagttatggctaaatctataatctgttgttctaaaatctctggtccagaggtcagtcagattgctaatgtaactcacacttttccatgcattccagaatcacttacttgttagaactaacaatcagttttattaatgggactatttatgaagtaaatacataaaaaccaagcagtcttctatttatattatcaataagcacttattttatttaa

SEQ ID NO: 99833 - DNA, 537 bp, Homo sapiens
aggaaagccttttaacattaatagacttaacaggaaagatcagctttaactctacctgtaagtaaaatattgtgacctgtggtcatgagtttttaattgatacagcctattttaacttttcacagatgtcctattggaacagcactttaagatacattctgacaacttaagtagttttggttcaggatctgtaaaggagagagtaaaggggtaaagagttcttgtttagtgaacttgtttagtggaaagttggatttgattttcaccatggggagtcacaatgaaaattgctactgaaatagtcctttattatagcatttcagacctagttgaaaggagatgaatcacacagggaaactttagttcacatgtggtctgaagggatagactgcaagggacaataccatgatttgtattagtggatgttaaaaggagctttgattatagcctgttaataattttatggtgrtctactatgcagtcaagatttacataattatatcacattaaaaatgatgatgaaaaataactgtatca

SEQ ID NO: 99834 - DNA, 597 bp, Homo sapiens
aacaatcatgatgccttatggaatttaaaatctatttagaattaaaggactgacaccaaaaagaacagaagctaaagtattgtaaagctctggcattgcctgaaaaaattgtcaaaaaaatacaaatttatacataaagtgaggcacacagaaaattaatatgatagataaaatatcactaattgttttcagtgtaactggacaataattgctgaagtggattaaaagaaacaactaataatatatagcatatatatatatgcaagagacacaccttaaatacaaggataaaaatagaaagttaaaaacggaaataccatgaaaacactaaataaaagaagctggtgaaggctaagtagaccatagacaagatacatcactaaaatttaaaaaaggaatattccataataattaaaaggtcagtctatgaggactagaaagcaattctgaatgtttatgtatctaataacatagtttcaaaatacatataattaaaaggaagaaatagaaaaacctgcartcacactggaagatgatcagtaattgataaaataagcaaagaatccatatgaaacaacaaaacaaacaaaatttacc

SEQ ID NO: 99835 - DNA, 537 bp, Homo sapiens
atggttttcatcagttctagaaagttctcagccatgttctcttcaatactgcttctcctcccaaaagaaaataagtgcactaataagcaagaaagggaaaygaatgccaaaaaataattgtccacacatgctgcagaccagtcctcacaaaactgacatccttagtgatgagaggacatggatgttgatgcagagtattcgtgcatgtagatacaaagtattcaagcatggccacacaggcatgcagacctacacccaaggagggggctatcatggcctcgcctcatcatcatgctttgctagcaggggcattccttagtcctattcttggtccctaaatcagcatctgaaaaaccatcttttttaaaaaaaaacccaagcctctgacttaatatccccaaacattttttctcaaaagaatgaattttcttcttactgctttattgaagcatttcccaaagtatgttccatagaatccaagtgcttgggatgctactgggtattatacattctcttaaatccattactaaataagtc

SEQ ID NO: 99836 - DNA, 537 bp, Homo sapiens
atggttttcatcagttctagaaagttctcagccatgttctcttcaatactgcttctcctcccaaaagaaaataagtgcactaataagcaagaaagggaaacgaatgccaaaaaataattgtccacacatgctgcagaccagtcctcacaaaactgacatccttagtgatgagaggacatggatgttgatgcagagtattcgtgcatgtagatacaaagtattcaagcatggccacacaggcaygcagacctacacccaaggagggggctatcatggcctcgcctcatcatcatgctttgctagcaggggcattccttagtcctattcttggtccctaaatcagcatctgaaaaaccatcttttttaaaaaaaaacccaagcctctgacttaatatccccaaacattttttctcaaaagaatgaattttcttcttactgctttattgaagcatttcccaaagtatgttccatagaatccaagtgcttgggatgctactgggtattatacattctcttaaatccattactaaataagtc

SEQ ID NO: 99837 - DNA, 537 bp, Homo sapiens
atggttttcatcagttctagaaagttctcagccatgttctcttcaatactgcttctcctcccaaaagaaaataagtgcactaataagcaagaaagggaaacgaatgccaaaaaataattgtccacacatgctgcagaccagtcctcacaaaactgacatccttagtgatgagaggacatggatgttgatgcagagtattcgtgcatgtagatacaaagtattcaagcatggccacacaggcatgcagacctacacccaaggagggggctatcatggcctcgcctcatcatcatgctttgctagcaggggcattccttagtcctattcttggtccctaaatcagcatctgaaaaaccatctttttwaaaaaaaaacccaagcctctgacttaatatccccaaacattttttctcaaaagaatgaattttcttcttactgctttattgaagcatttcccaaagtatgttccatagaatccaagtgcttgggatgctactgggtattatacattctcttaaatccattactaaataagtc

SEQ ID NO: 99838 - DNA, 649 bp, Homo sapiens
catacatttaacgggggctgtgtcacaatatgcaggtatgagctcaaatgtctccctttcaaagatgcattctctgaccacccaaaccagtgacttcatgctttatccctttattttactgactttgtaatatttatcctgatctgaaatgaatttgcctatttattttcttggttactatctgtcctcccaattcccatggaatagaaattctatgagaatcgagctttttacctgccttctgttgtattccagagcgcagtcactgcacagtgtatatttaacaccagagacagagcagattccactgtgactgagggaaaaatatcatatccttaaaatcagaagtctccttctccctcggctctcggcttcctcccctatcaggaatttttgtctattttattagctgaattacccraatatcctcaaaacacctgactttgatttagttccatgaaatgaatactgggtcccagctatgcattccatcacttttttaccaaatagatattcccagattttctaaggcattttccttcctttcaagaagcacacagtgcctgcaaggttactaaacatcaacacaagcatcactgctgaggacttccaaatatggcatcaaaacagccacagagacttgtctaaa

SEQ ID NO: 99839 - DNA, 573 bp, Homo sapiens
ttgtctttcacataaagatctacataactgcgaaatccatttacctattaatttaaaaaacaaaaacaattaaaaatcttacactggcagctcaaataggtgaatcaccttcagtacgtatactttcatttcctctcacttacaacagttctaagtgcaccgatccaaaccttagyggcatttcccagatctattccttaacccttgacctttaaaaaagaaattcatttctatgtgtacttgacaaaaagaggatgtgaagggacaggtaaattgttataaaatatttcagaaatttctatttttaaaatgataaggtagacttccagtttcagttcagacagataatgaactagcaggaaaaaaagcttccatccttgtaagaaaacgggtgatcagacaacaaattaatgggtttttcatgaacccactgaagaactgagatcacaggagagctggccatcctgaagtctggagagacataagtgtctgtaggagaccacaaaacctaagcttttgcttacctggggcagatatttaataagctagtaggaactttaaactagaaatttt

SEQ ID NO: 99840 - DNA, 568 bp, Homo sapiens
ctcagtcacagggacacgtgtttaattttattaaaagcagttcgttttccaagtggttattctacctgccattttaccctccatcagcagtgtatgggaattccacttgttccacatccttgccataccttgatatttcagtcttttaatttcagagatcctcctgggtctgaagtggtagctcattgtggttttaatgtgcattttcctgatgactaatgatgttccatttctttttaatttaataaaaaatttattargttagaaagtataaaacaaaattatgcacagtttgatctcatatttgtaacaacacataagatttgaaagataaaacccaaaatgtcaaaagttattgccacgttttttaagcttacctgtatttttatcacttatcattttagtgcacatttgtttgtgtgattaaaaaaaagaaaagctacttttaaaaagcgaattaactcagattattctgagataaaacttcagttttcctgattttctaacactaagtaatgttgggcattgacaatgctttagatagaaatggttgagaaaaattgaggcc

SEQ ID NO: 99841 - DNA, 568 bp, Homo sapiens
ctcagtcacagggacacgtgtttaattttattaaaagcagttcgttttccaagtggttattctacctgccattttaccctccatcagcagtgtatgggaattccacttgttccacatccttgccataccttgatatttcagtcttttaatttcagagatcctcctgggtctgaagtggtagctcattgtggttttaatgtgcattttcctgatgactaatgatgttccatttctttttaatttaataaaaaatttattaagttagaaagtataaaacaaaattatgcacagtttgatctcatatttgtaacaacacataagatttgaaagataaaacccaaaatgtcaaaagttattgccacgtttkttaagcttacctgtatttttatcacttatcattttagtgcacatttgtttgtgtgattaaaaaaaagaaaagctacttttaaaaagcgaattaactcagattattctgagataaaacttcagttttcctgattttctaacactaagtaatgttgggcattgacaatgctttagatagaaatggttgagaaaaattgaggcc

SEQ ID NO: 99842 - DNA, 601 bp, Homo sapiens
ttctgtccctttttcctcccatgtttttatttttcttttttatcattattttttttcatgagatacagtctcgctttgtcacccaggctggagtgcagaggcacaatcttggttcactgcaacctctgcctcctgggttcaagtgagtctcctgcctcagcctcctgagtagctgagattacaggtgckcaccatcacacccagctaatttttgtatatttatagagacagggtttcatcatgttggcccgactggtctcaaactcctgacctcaggtgatccacccccctcagcctcccaaagtgctgggattataggcttgagccaccacgtccagccctttgtatatttttaaaaggtcttcttttctagctcttggaaataaaatcagaaattatactttatgtggaaaatttcagtgtacctcataacattataaagtgttctgacaaagctcttcaaaagtccatatgttcatggtgttaaatagatgaggggaaaatagaacactcaaagatctagctcagaaagaaaattctcagaatgctaggttatcctgttcattttggaggcaacacaagacaggcagaatgaaagtgt

SEQ ID NO: 99843 - DNA, 601 bp, Homo sapiens
ttctgtccctttttcctcccatgtttttatttttcttttttatcattattttttttcatgagatacagtctcgctttgtcacccaggctggagtgcagaggcacaatcttggttcactgcaacctctgcctcctgggttcaagtgagtctcctgcctcagcctcctgagtagctgagattacaggtgctcaccatcacacccagctaatttttgtatatttatagagacagggtttcatcatgttggcccgactggtctcaaactccygacctcaggtgatccacccccctcagcctcccaaagtgctgggattataggcttgagccaccacgtccagccctttgtatatttttaaaaggtcttcttttctagctcttggaaataaaatcagaaattatactttatgtggaaaatttcagtgtacctcataacattataaagtgttctgacaaagctcttcaaaagtccatatgttcatggtgttaaatagatgaggggaaaatagaacactcaaagatctagctcagaaagaaaattctcagaatgctaggttatcctgttcattttggaggcaacacaagacaggcagaatgaaagtgt

SEQ ID NO: 99844 - DNA, 575 bp, Homo sapiens
atagatgggtgagtgagggatgtatagtgaatgtgtgctgaaactttggattatataatcagatgagaagaatttaaaatgcctgcatcagaaaataatgcaacagcaaagagaartgtagttcattgaaaactctcttcatgagatacaatgtctttctcttcctgcctttcaaatgaaaaaaatcttttagatataacttatttcattttctacaatattcttgaagttttgccaataaaagagattttcttataccgaaggaacatttaaatacaaccaggataaggattgcaagcacatggaaggcataatgcccctcatcaatacaccacgagcagtcattgcaatagttgttgatactcttggtcagtgcaatggtaaatcttgtgtgtcaacttgactggactagggtgcccagctgtttagtaaaacaacacccaagatgttctgaagactgtatttaaatgtgattgacatctacaatcagtaaatcagtttgagtaaaacggattaccctccatagtatgagtgggtatcatccaatcagctgaaagctttaagaacaaagaatg

SEQ ID NO: 99845 - DNA, 583 bp, Homo sapiens
acattgttgaaatgacaacaaaggattgagaagattacataaacttagatgataaagcagtggtaacatttgagaggactggctctaattttgaaagaagttctactggaggtaaaatgttatcaaacagtatcacatgttgcagagaaaccttccgtgaaaggaggagtcaattggtgcagcaaactttgttgttgtctaattttgaggtgaaaacctcagctttcagcaaccaccaccctgatcagtcaacagtcgtcagcatcaaggcaagaccctccaccagcaaaaagttgatgactgggtgaaggctcagataatttttagcttttttttttacaatgaagcattttcaaattcaggtatgtatattattttcagacaaaatgttacayacttcatagactacagtatagtgtaatcgtaacttgtatatgcactgggaaaccaaagtttgtctgacttgctctattataatactttattgcagtggtctacaaccaaacccacaatatctctgaggtatgcctgtaaaacaatataatgtgataaatggacagggaggggatactttaggtcaggg

SEQ ID NO: 99846 - DNA, 584 bp, Homo sapiens
agctccctgaggccttcccagaatccaagctaatgccagcaccatgtttgtacagcctgcagaactgtgagccaactaaacctcttttttttataaattactcagcactaggtatttctytatagcaaagcaagaacagcctaacacaattatcttactctaaaaatgtaaaaatgtcagttaatgtggtgcttaagtagtagaatgccatataaatcaactccatccacaaatctagaatatcattatttctaaaatgttccaggaaaatcataaccttagacttttgtatgcgacagcaatgttccaaatgcaaaactgccaaaaaatatgctgacttgtaaatccagtttgaatgacgcactaatatgtatagtgttggaaaaacctcattgaatagctagtaaacatcgagacaggttctaagaaagatgtttataacaattgatatctacattaacataaaagttgtcaaataaacaacctaactttacacttcaagcaactattaggttggtgcaaaagtcgttgcgttttttttttttttgccattaatataaataaaagaacaaactaagcccaaa

SEQ ID NO: 99847 - DNA, 584 bp, Homo sapiens
agctccctgaggccttcccagaatccaagctaatgccagcaccatgtttgtacagcctgcagaactgtgagccaactaaacctcttttttttataaattactcagcactaggtatttctctatagcaaagcaagaacagcctaacacaattatcttactctaaaaatgtaaaaatgtcagttaatgtggtgcttaagtagtagaatgccatataaatcaactccatccacaaatctagaatatcattatttctaaaatgttccaggaaaatcataaccttagacttttgtatgcgacagcaatgttccaaatgcaaaactgccaaaaaatatgytgacttgtaaatccagtttgaatgacgcactaatatgtatagtgttggaaaaacctcattgaatagctagtaaacatcgagacaggttctaagaaagatgtttataacaattgatatctacattaacataaaagttgtcaaataaacaacctaactttacacttcaagcaactattaggttggtgcaaaagtcgttgcgttttttttttttttgccattaatataaataaaagaacaaactaagcccaaa

SEQ ID NO: 99848 - DNA, 639 bp, Homo sapiens
tttttgttctaatattcaacaaacttagccaatgagatggtctgacaatagcacaattgtctccagtacctattttagcttaataaatgcaaaaaaaacattcaytatccttagtaaatgatttctatctaataggttatattattatctttataaacaaatatatttaaaattaaacaacacctaaaattgcaacctgaacacttacagaaccttaagaacaagaaccataatttcttattcatggttagattattaggttttcgcagaatacttggaaaaaaacagaaaataaatattgaatatggattaattgatgaatgtattgacaaatgttaataggataacttttttgttttgtgattaagtgggcagaaagaagtgcaaaggtcattttcatatttgaggcatgtaagtaaggaatttcagctattgtgggagatccacagagggagaaacagtgacttatatgtaatgcatattttgtcccaatgtagaaaaaataggatggttggtcttactgggatagaacaaagtaaagattcaattaaaacggcaagagtttctgatcagccagtactgagtcttgagaaaggtagtatgggaagatgagaagtactcactcttttccttgtccca

SEQ ID NO: 99849 - DNA, 639 bp, Homo sapiens
tttttgttctaatattcaacaaacttagccaatgagatggtctgacaatagcacaattgtctccagtacctattttagcttaataaatgcaaaaaaaacattcattatccttagtaaatgatttctatctaataggttatattattatctttataaacaaatatatttaaaattaaacaacacctaaaattgcaacctgaacacttacagaaccttaagaacaagaaycataatttcttattcatggttagattattaggttttcgcagaatacttggaaaaaaacagaaaataaatattgaatatggattaattgatgaatgtattgacaaatgttaataggataacttttttgttttgtgattaagtgggcagaaagaagtgcaaaggtcattttcatatttgaggcatgtaagtaaggaatttcagctattgtgggagatccacagagggagaaacagtgacttatatgtaatgcatattttgtcccaatgtagaaaaaataggatggttggtcttactgggatagaacaaagtaaagattcaattaaaacggcaagagtttctgatcagccagtactgagtcttgagaaaggtagtatgggaagatgagaagtactcactcttttccttgtccca

SEQ ID NO: 99850 - DNA, 604 bp, Homo sapiens
ggcagaaagaatattattttctttccctctaaaatgtttttaaggtatttcagtagytattgataaattttaacctggaggtaagcatgtctttcaaaagaaaatatggaagttcatatagactggctttctcttctacagggaatttgttagatttattttctgtatgtccatacctggtaagaatccccacgtaggccaacgtagttatatgtgacataagtcacagataaaacagccctgaatctgtgggtaaaatagagccataatattgtcccacataactcactcttttacttccagctcctaccttcacattctgttcaaaaagagaaagagatgtaatccaagagataatcaggtctacttccctttacagagagttgcagagtcagtgtacagacacagggtttagctgacacctcctacagtgcttttgctgttaaaattgagtgttaaggaggtctgggtcataagttcagtccccactgatgtcccgttatctttaacaacgtggagataagcttttccatatggcctattgtgagttaggtttatgatgaaataaattgcatgcttctgtttagacggtttgcacagtaat

SEQ ID NO: 99851 - DNA, 604 bp, Homo sapiens
ggcagaaagaatattattttctttccctctaaaatgtttttaaggtatttcagtagttattgataaattttaacctggaggtaagcatgtctttcaaaagaaaatatggaagttcatatagactggctttctcttctacagggaatttgttagatttattttctgtatgtccatacctggtaagaatccccacgtaggccaacgtagttatatgtgacayaagtcacagataaaacagccctgaatctgtgggtaaaatagagccataatattgtcccacataactcactcttttacttccagctcctaccttcacattctgttcaaaaagagaaagagatgtaatccaagagataatcaggtctacttccctttacagagagttgcagagtcagtgtacagacacagggtttagctgacacctcctacagtgcttttgctgttaaaattgagtgttaaggaggtctgggtcataagttcagtccccactgatgtcccgttatctttaacaacgtggagataagcttttccatatggcctattgtgagttaggtttatgatgaaataaattgcatgcttctgtttagacggtttgcacagtaat

SEQ ID NO: 99852 - DNA, 604 bp, Homo sapiens
ggcagaaagaatattattttctttccctctaaaatgtttttaaggtatttcagtagttattgataaattttaacctggaggtaagcatgtctttcaaaagaaaatatggaagttcatatagactggctttctcttctacagggaatttgttagatttattttctgtatgtccatacctggtaagaatccccacgtaggccaacgtagttatatgtgacataagtcacagataaaacagcccygaatctgtgggtaaaatagagccataatattgtcccacataactcactcttttacttccagctcctaccttcacattctgttcaaaaagagaaagagatgtaatccaagagataatcaggtctacttccctttacagagagttgcagagtcagtgtacagacacagggtttagctgacacctcctacagtgcttttgctgttaaaattgagtgttaaggaggtctgggtcataagttcagtccccactgatgtcccgttatctttaacaacgtggagataagcttttccatatggcctattgtgagttaggtttatgatgaaataaattgcatgcttctgtttagacggtttgcacagtaat

SEQ ID NO: 99853 - DNA, 629 bp, Homo sapiens
actctagtctgttttcatgttgctgataaagacatacctgagaccaggcagtttacaaaggaaagaggtttaatggagaactcacagttccacatggctagggaagcctcacaatcatggtggaaggtaaggaggtgcaagtcacaccttacatggatggtggcagtcaaagaaagaggttgtgcaggcaaactcccatttttaaaatcatcagatattgtgagacttattcactataagaacagcacaggaaagacccgcccccttaatttaatcatctccatctgggtccctaccacaacacrtgggaattatgggagctacaagatgagatttgggcgtggacagagccaaaccatattaatggctctgaatgtttgctgctaatattttattgatcactggtttgaaaataaaattgcttgctatttgagacaatattaatctattttaattttttaaaagagtttttgaattatagatttggagatatttattaaaatcttttctctaaatgccaaatctttttcataaatcttttaaaatgaccttatttaagaaattcaacctagtcatataaagtaacatatcctataccctgattttcaacctcttgaatgtctaaaata

SEQ ID NO: 99854 - DNA, 629 bp, Homo sapiens
actctagtctgttttcatgttgctgataaagacatacctgagaccaggcagtttacaaaggaaagaggtttaatggagaactcacagttccacatggctagggaagcctcacaatcatggtggaaggtaaggaggtgcaagtcacaccttacatggatggtggcagtcaaagaaagaggttgtgcaggcaaactcccatttttaaaatcatcagatattgtgagacttattcactataagaacagcacaggaaagacccgcccccttaatttaatcatctccatctgggtccctaccacaacacatgggaattatgggagctacaagatgagatttgggcgtggacagagccaaaccatattaatggctctgaatgtttgctgctaatattttattgatcactggtttgaaaataaaattgcttgctatttgagacaatattaatctattttaattttttaaaagagtttttgaattatagatttggagatatttattaaaatcttttytctaaatgccaaatctttttcataaatcttttaaaatgaccttatttaagaaattcaacctagtcatataaagtaacatatcctataccctgattttcaacctcttgaatgtctaaaata

SEQ ID NO: 99855 - DNA, 585 bp, Homo sapiens
atcatttttttaaatcttgaggaattctcactgacctagttttctttattttccatttccatttggaatttcattacacctaacatgccatacaacaggcattataatgaatagataactgattaattgggacccatttaaactcagttgtagcataatttcacttccatttgatcctaagtcattcaaggtctckcttcagcttgcctctcagcctctctcttaatactcctctcaatagccttggctgtagaccaataggtgtttgccattctccaaacacttgctcacttgcagtttttatggagtccctaatgtttccttggcctaaaacgtactccttccatgctaccctgatttcattacagtagtgcccccatatctggagttttgctttcgaaggtttcagttacctgtggtcagttatggtaaaccatggtctgaaactattaaatgggaaatttcagaaataaaaaattcataaattttaaaacatgcacctttctgagtagcatgatgagatgaaatcttgtgccatcctgatccatcctacccaagcctgaatcatccttttgtgcagtgtgt

SEQ ID NO: 99856 - DNA, 508 bp, Homo sapiens
gaattctgcatacgtgctttcccagcctggcttgcagctaggttgcagagagttttgacatgagatgtggaaagccaaaaagaaaatgataagaaaacatctctcctccccacctttctcctccacctcctacctgccactcttcctcctccacctcctgtcctttctccttcttctcttcctgaccctcccacctgctatttttgtagtaacaacaattttctcagcaratatgatctggtataaaatctagggtgatttttctagctgtttattgtacgcatagttgtctagccttcctaatatgtctgtgagttagccaatgtctttttaataagttgctgttttcattatttcagggtgagccagcttcgggattgcaactgagaagtgggactattaaaaggtactaaagcagagaatacgaccagtaaacaaacaaaaaaaaagcactttaaataggaataaaatatattaataaatgtgaccacatggagattagtgacca

SEQ ID NO: 99857 - DNA, 599 bp, Homo sapiens
tcttacatgtgcatattaaataactatgatttgttactaattattgcataaaatatgtatttctacatatcaataattaaccataggtctatgagtgccagagacccatagagctctagaaaattcaggtggcaaaaggaagatctagagaatgtgtacaaggcaaaggccagctgggatagtaaaagaataaacagactttatttttatagaagccaggaatgtagacctacctccaaggtagggaggaaggtacagtcaataaatcagactgggtcagtagtggatatggagaagagacagataagctgttcaagatgatttgaagtgaaaagataatgtawccttacaaaaggcccaggaaaccttcacctcactctcatcaggaatacgcataagagaataatgccaagacaatttctcctatattggcaaaattgagttttccacctatattatgtgtagttacttatctacatgtaagatgtgctccaattcattctaatcaccagttgtactttgggaggttgatctattacagaggttctcatcttgaaagaacatcagaattacctgaaaggcttgttagaatgcagatg

SEQ ID NO: 99858 - DNA, 633 bp, Homo sapiens
ggtgggaatgtaagttaatataaacattatgtaaaacagtatggagatttctcaaagaacttaaaacacaactattggatcctgcaatcctagtactgggtatatactcaacaaaaacaacaaaaagtgttacatgaaaaagmtacctgcagttgtatgtttatcatagcactatttacaatagcaaagaatcaacctaagcgtccatcagtaaatgattggataaagaaaatgtgatatgcacatgtatatatgtgtgtatatacgcatatatatatatatacacacacatacatatatatacacacatatatacacacacaccacagaacactacacagccgtaagaaagtatgaaatcctgtcttttgcagttacatgaataggaactataggccattatcctaagtgaagtaacttggaaacagaaacctaaatgcaacatgttctcgcttataagaagaaactaaacaaagggtacacacggacatctagagtggaataatataaactggaaactacaaaagattataggctggtaggggggtgaggggtgaaaaattacctattgagtatagtgttcgctattcagattatggatatactaaaatcccagactccaccactacacga

SEQ ID NO: 99859 - DNA, 634 bp, Homo sapiens
atattttaacacgggattggatttacggacatgcattttgttataagatacggtcatacatttgataaggaaaattattgccttaaaattcatgttatcatgtgtgtcttagctttcttgtaaggtttccctaaaatgcattttaaaatgttttttataattagtttatctacattattaattttgtattacctatacgaaagaactgaaattgattgttacagtactggttcagagagagagagacattttacatgagactaactcagtaaattagaaatagggtacttatttttttcctttaaacaccattggagaggtcagtgtcttctcatgaggaagtattacaagagtaatgaagtataataactaatgttagtgcctctaagatgacagagtcttgatcaggtataattttcgtagctataccgatatactgtcaaacaaagctgtgacattctaagtaatgttactgaatcaatactcagtaatttctaataaagtaaataataatctgatagctagaaatacttgatttgtaaaataagaatatgggcatggattttatawtattattattttaataatctatagcattactgtgcaaatatacccttggaatatgatgcttgtt

SEQ ID NO: 99860 - DNA, 502 bp, Homo sapiens
tgacttatcaatgttaaatgtgaccacctggctaaagtaataggtgtcatgtttatccactataaagttactctttccccctcttttcacactgttttttaataagaaagtcactatacacagcccctgtggagtggggagttacattccctctccgtgagggcagagaagttacataagtttttggagttttttctgcattggagatttgtctctattcctccatttatttatgaaattatttatttacatagcatggactcatgtatagttatttgatactttgggctaaatccaatactagtttttgctttggatttttgctcaaatagttccagctttggacattgggaagtctcttagttggcttctttgacacatcccatcartgttttttgtttagagcgagaccgtggagtttagcatgttcttactatctggcactaccaaatgttccaggctcattttctatattccctttcctagtgttagaatcagctgt

SEQ ID NO: 99861 - DNA, 613 bp, Homo sapiens
acgcaatacgacaactccacaatgaaatcacattgtcaatacctgaatagaccaagcagaggaaagaatctcagagcttgaagactatcttgctgaaataagacaggcagaaaagattagagaaaaagaaaagaataaaaatgaatgtacaaaacgtctgacaaatgtgggattatgtaaattctgaagcaaagactgtttggggaacctgaaagagayggggagaacggaaccaagttggaaatcacacttcaggatatcatccaggagaacttctccaatctagaaagccagccaaacattcaaattcaggaaatacaagatactcactgagcagaagccagcccaacattcaaattcagggaatgcaagatactgagcagaccaaccccaacatacgtaatcatacaattctccaggtttaaatgaaagaaaaaatgttaaggacagccagagagaaaggccaggttacctacaaagggaagcccatcacggtaacagcagatctctcagcagaaaccctataagccagtagagattgggggctaatattcaacaccgtgaaagaaaagaatttccaaggcagaatttcatatccagacaaagtaagctt

SEQ ID NO: 99862 - DNA, 613 bp, Homo sapiens
acgcaatacgacaactccacaatgaaatcacattgtcaatacctgaatagaccaagcagaggaaagaatctcagagcttgaagactatcttgctgaaataagacaggcagaaaagattagagaaaaagaaaagaataaaaatgaatgtacaaaacgtctgacaaatgtgggattatgtaaattctgaagcaaagactgtttggggaacctgaaagagatggggagaacggaaccaagttggaaatcacacttcaggatatcatccaggagaacttctccaatctagaaagccagccaaacattcaaattcaggaaatacaagatactcactgagcagaagccagcccaacattcaaattcagggaatgcaagatactgagcagaccaaccccaacatacgtaatcatacaattctccaggtttaaatgaaagaaaaaatgttaaggacagccagagagaaaggccaggttacctacaaagggaagcccatcasggtaacagcagatctctcagcagaaaccctataagccagtagagattgggggctaatattcaacaccgtgaaagaaaagaatttccaaggcagaatttcatatccagacaaagtaagctt

SEQ ID NO: 99863 - DNA, 613 bp, Homo sapiens
tgtgaccttcattgcagagttttggggtttgccaataggaatcaaatgttggtctagtaaaaaagagacaaaaatcacatttattttaaaaatcaacttttcaccattgaggttaatgtcagctgtagggttgttatatatggcctttattgtattgaggtacattccttccatacctagtttgttgagaatttttattatgaaaacaagttgaatttttcatcaaatgctttttctgcatctaatgagattagcatatggtttttgtccttcattttgctaatatgatatttcacatctatagattcacatatgttgaaccatcgttgcatccctgggataaattctacttgatcatggtgaatcayacttttaatatgctgttgaattcagtttactagtactcttgttgttgttgaggatttttgcattgatgttcatcagggatattggtctgtaataattttcttttattgtaatgtctttgtctggctttggtatcagagtaatgctggcctcatgaaaagagttccaaagtactccttcttctttattttttagggagcacttgagaaaaattggtattagttcttctttaaatgacccatgaagt

SEQ ID NO: 99864 - DNA, 613 bp, Homo sapiens
tgtgaccttcattgcagagttttggggtttgccaataggaatcaaatgttggtctagtaaaaaagagacaaaaatcacatttattttaaaaatcaacttttcaccattgaggttaatgtcagctgtagggttgttatatatggcctttattgtattgaggtacattccttccatacctagtttgttgagaatttttattatgaaaacaagttgaatttttcatcaaatgctttttctgcatctaatgagattagcatatggtttttgtccttcattttgctaatatgatatttcacatctatagattcacatatgttgaaccatcgttgcatccctgggataaattctacttgatcatggtgaatcacacttttaatatgctgttgaattcagtttactagtactcttgttgttgttgaggatttttgcattgatgttcatcagggatattggtctgtaataattttcttttattgtaatgtctttgtctggctttggtatcagagtaatgctggcctcatgaaaagrgttccaaagtactccttcttctttattttttagggagcacttgagaaaaattggtattagttcttctttaaatgacccatgaagt

SEQ ID NO: 99865 - DNA, 516 bp, Homo sapiens
tcagtatagtgggcggactccatcaacacttgttggcaccaccactcatgccttctaaagaccccctttggcttcctcttttagaggaaataaaacattaaaaactcttgaaaggatgcttacttacctgccttttaatttatttctcattcagtgaatgtgtattgagaccctgtgtttgcccttccagatagagtgtaaatgagacaggccaggtacattacctcatggagtttatagactgatagggaaatcagaccacaaataagacatatgatttataattgtgggaaatagcacaagggagaaatgcatggtgccaggatatttccragaatatcctgtagttcatacataaaaatatttcttgtatagatttatgttcttaaagcattgaatagacatgagtttgaaatgtgattacaaatgctttgcattgttattgaaaagcataggacattctgagactccgtctaaactccaagtgcatggaatgtcctggttctgtgtcagctc

SEQ ID NO: 99866 - DNA, 585 bp, Homo sapiens
cattcctaatgtttacagtactattttgcttcaagcagtactcttttttttctgagatgtgcattttctttttagtcaataacttgtttccgctagttacagccaatactatatagaatatgccagtggaatgtcataaaagcactcgtgtggctttgggggaaacatgccaagtaagtcagatgctcttcctagcaatgactgtgtgtctgttcaagttagctatgaggcttaggacagaagccagctcaggtgtccagatgctcttcctagcaatgactgtgcatctgttcaaattagatatgaggctcaggacagaagccagctcaagtgtcctccttgacctcaggtcaagttaggtgccctgctgaatgttcccacaatgtcctgcacatttactgttgataggtatctgtttagacctttatcatgctcattagactgtaagtatcctgagggcaggggtaggacactgggatgtcatcagttttatatcactatatcascaatgctttaacaatgttgacacagtatagatgttcaacaaaaatggttttcgaataaagtaaagactttatggctcat

SEQ ID NO: 99867 - DNA, 583 bp, Homo sapiens
catatatgaaaggttaaagctatgatttttaatgagagctaggacaactcaggatatcgataagctttgcacctgacacctccagttatatgaaggttttcatcttttgattgcattgattcaaacttatttctgtcttgggctcctgagtgacctatatgagatgagttgctggctctgatccattctctcatgattagatgaccacaactcatgatctgtattggtgggtactcagagagtttgtgcattgcttggccagctgggggcacacttatctcctgagttattcctcagttcagaggcctactccatttggttgggggcaggttgcagagttgggggaagggatggactgaatgtacaccttttcactgtgaccttagagrcaattagactatgacaaaaggccaggcggacaaagtaatacacacagactggtgttatgccatgaataaaagagaatacaacctctgcaggacctgtggtctaggatggaggcagtgagctagttaaaagaagaggggagaatgaagtgaggaagaggaggctgagcctcacatactacatttcattttccttc

SEQ ID NO: 99868 - DNA, 573 bp, Homo sapiens
ttgagaatgttttgaaatgtatgatacatgcactctgttgactttctaaaatctgtacaattctgaatctgggaggcatcgaaccacaagggttgtagataagggattgggagccaatttttacttcttaggtttctggggtggggaggaattaaatgagatacaaatgtgtagtacataacwtattgtcctctccccttcccttttctccaactctatcattgtaaaattccagaaaagtagaattggaaatgcaaaatatgttttattcagtgcaaagcgggaagtcagcaaaatttttcttcttcatcactgcatgtgagtttgagaccctctctcccttcacttctggtgtttctgtcttcatcctgtcactacttaatttttttccttagtttacaactgagatatagaagtttaaatattttttaaacatcgcaaaaccccaaggaaagaatctaatcatgtaataaaagaagcacttattatacagggatataggccttcacagttactttcctagcacgtaaccttgagttggtcacataatctcacagagtaccagttacctca

SEQ ID NO: 99869 - DNA, 658 bp, Homo sapiens
caaaacattgtaatacataggaaatttaaaaatatttacaatacatggtcagtcagaagtatgggaggccctggacttgcgactggcatcgaaaaatgagagcagtcttatgggattgagactttaacctgtgttgtctgcaataagtccaggtgtttagtaagtatcagaattgaatagaattgttgaacacacagttggtatctggagaatcagktgactgccagtattaggaacccttccccagcccataccaaggcacccaaatgtgtgatcacagttgggtacctgagctttggcaggcaggcagtcatgtcaccaggtgcacatgacaaatgtcatgcatgttttaactaaatacaaggtgagagtcagaaattctcttctggtgtttagtagcaatgaagactgcacctgaccaaaaaataaaaattcacgaaacttaaatgctaaaaaaaaaaaaaaaaaaattttaccgaagagaatctttccatttaagggcctcaagcacacaacttttttcacagaagccatcttgaatgttcaacatacatagattgcttttgctctcaaaattgacagagatggggagcaggattgactaaaccagtaacaaaaaatattttagggatgatagaaatgttctcacactgaattg

SEQ ID NO: 99870 - DNA, 618 bp, Homo sapiens
ccattccaactgggtttctaagtgccagagccagagcaagaaaaaggcagtgcattgaaaccaggcctgccactccagtgttgttctcaggcatgcctacggaggagtayttatcataaaggaagaaaacagtaatagcccagaactgtctgtttgttcaactccaacttgaatgataccaaagattaaatcttggtttccaattgtttcatgccaaggctgttatatttaaggtccaaatatgtgcaccatatgtcatactgtagcttgacaattacctcaacaggcagtgtcagacagatggtaaacattactaccaggcatacgtacatttagaattagacatttaaataaattcaggcctatcttaagcttattaaaaggatttgggtctataaagccatttcgggcccctgcatatgctaaagtgtcttttgcatcctgaacagatttggtttggttcaagtaccttcgggctacagatggcaagtgacatgctttctctttgagccctgtacctgcaattaggccaataatggcaattaaggaaaatgtaaagagatttaaacttcagttcttaatatcataaccatgcaatactgcctatgaagtgacaga

SEQ ID NO: 99871 - DNA, 613 bp, Homo sapiens
tgtgtgggtttttttttttttccagttggttcatttatttatttattctttgagacagaatttcactcttgtcacccaggtgactttatttatttgaaaataaagtaatatgaraagaaatgtaaagctctctttcccattttaccctactcttccccaaaaccaacttaattacttttaatgattgttccctggagaagagtaacatgttcaggctcattagtggcacctacaattctgtttacaatggcttgcattagagaaataataatttttatttaggaagaagacttttgtttaatatattgcctatattctagtctccctaagagaatggaaaaggacagaaaaaacatttaaaatatcagacataaaaataagaacagacttcttttctccttctctttctaatagaagagatggataataagttaggagattttcaattccagtccaccatggtgagcctcaaattgtctatgagattgtgtacagttatttaaattaattaaggtatttacccattttaattgacaaaattatatatattgtgtacattacgttttcaaaaatgtatacattgtggaatggctaaattgagctgatttaacat

SEQ ID NO: 99872 - DNA, 613 bp, Homo sapiens
tgtgtgggtttttttttttttccagttggttcatttatttatttattctttgagacagaatttcactcttgtcacccaggtgactttatttatttgaaaataaagtaatatgaaaagaaatgtaaagctctctttcccattttaccctactcttccccaaraccaacttaattacttttaatgattgttccctggagaagagtaacatgttcaggctcattagtggcacctacaattctgtttacaatggcttgcattagagaaataataatttttatttaggaagaagacttttgtttaatatattgcctatattctagtctccctaagagaatggaaaaggacagaaaaaacatttaaaatatcagacataaaaataagaacagacttcttttctccttctctttctaatagaagagatggataataagttaggagattttcaattccagtccaccatggtgagcctcaaattgtctatgagattgtgtacagttatttaaattaattaaggtatttacccattttaattgacaaaattatatatattgtgtacattacgttttcaaaaatgtatacattgtggaatggctaaattgagctgatttaacat

SEQ ID NO: 99873 - DNA, 635 bp, Homo sapiens
cctgtggcattgaacacacacaaattccaggtcgggggagtccccatgaagcatgttcttgccacctcttcactgtctctataaatctattcttggggctggttcttcccctgaccctggatgaaagttttggtccatgaatttttttggtctctccaaggtaataaaaatagtttcccagtcaactttctcaagtcaacttaagttgcaaaatatggtctcgattcagtaataaaactatccagtttcgtggcatratacaactctgaatttcgtttaaagttgaatctattctttctcttctggcttcaggaggaagattgcctgggggaagagtccacagtaagcctgttagagctttccccacctgggaattctttgtcttccatgggctgggggcaggtggaggggaaaggggaccaggaaggttccttcttggcagatactgatgtgactatcaaatatgattgttctctgggccttgcaagtgctcagagctaactttgcctcctagagcacgttcataggtggcctggagatacacatccatcaccctgttatctgctgacatctctctcctgcaggctgatgtagaagatgggcttttctctacttgcggttagtactccttcttc

SEQ ID NO: 99874 - DNA, 635 bp, Homo sapiens
cctgtggcattgaacacacacaaattccaggtcgggggagtccccatgaagcatgttcttgccacctcttcactgtctctataaatctattcttggggctggttcttcccctgaccctggatgaaagttttggtccatgaatttttttggtctctccaaggtaataaaaatagtttcccagtcaactttctcaagtcaacttaagttgcaaaatatggtctcgattcagtaataaaactatccagtttcgtggcataatacaactctgaatttcgtttaaagttgaatctattctttctcttctggcttcaggaggaagattgcctgggggaagagtccrcagtaagcctgttagagctttccccacctgggaattctttgtcttccatgggctgggggcaggtggaggggaaaggggaccaggaaggttccttcttggcagatactgatgtgactatcaaatatgattgttctctgggccttgcaagtgctcagagctaactttgcctcctagagcacgttcataggtggcctggagatacacatccatcaccctgttatctgctgacatctctctcctgcaggctgatgtagaagatgggcttttctctacttgcggttagtactccttcttc

SEQ ID NO: 99875 - DNA, 606 bp, Homo sapiens
ccttttaccattatatgatgtctcactttgtctcttttaactgcrgctgctttaaagtttttttcgtctgatacgagaatagctacccctgctcacttttgctgtctatttgcatgaattgcctttttccacccctttactttagtttatgtgagtctcctgaaggtagcagatggttggttggtgagttcttacccattctgtggttctgtatcttttcagtggagcatttaggccatttacattcaatgttcctattgggatgtgaggtaccgttgcgtttgtcatgctatttgttgcctgtgtaccttgcttttttttttctttttgttttttaacttgtatttttgttttaaaggtcctgtgtgatttatgctttaaagaggttctgttttgatgtgtttccggaatttgtttcaagatttagagctcctttgagcagtccttgtagtggtggcttggtagtggcgaattctctcagcatttgtttgtctgaaaaagactgtatctttccttcatatatgatgcttacttttgctggaaacaaaatacttggctgataattgctttgtttgaggaggctgaagatagggccccaatctcttc

SEQ ID NO: 99876 - DNA, 575 bp, Homo sapiens
aatatctagagaaataaaagaccatgcactattcttagaattgcaagtacctacaatatgaacagraagcataacaggtgagaacaacagtgtgagaaataggtccagtaaagcaggatgcatttagataatgaaaaacctagaagccgagcatgtgaagttgggtttttagccatgagttgtcatgatgaaattttgcatttaagcagccactttgatgtcagtgtacagaatgaactgaagcaatgagcagagtaagcggaaccaacaaagaaagctgaagaaagacacccagtgagttcagctttacttagttaagcttcacatttatgagttgccagtcagtgctgattcctggcaaatggatggttgtgaatatgacacaatcctgccctgccccagaagagcttataggagagaaaggcaatttctccaagtgccctgggagcagagagctagaagaggaacagaaatgaaggtgaaagaggtcaagcatgaccattctttatcagcaaggccagtaccaactcctggggcttacggagttccccagagctttcagcatttctgaacca

SEQ ID NO: 99877 - DNA, 555 bp, Homo sapiens
atcagtggcaggtggggccctagaaccctcaagattatatgccatttgtcttcagttaccagggtggatagggaaggcccattcaagtgtgggcaggggtggacgcgtctgagctcagactctccttgggctggtcttgctgtggctgctatgggggatggggttgaggttcccaggtcaatggagttgtgtacctaggagggttatggctgcctctgctgagtcatgcaggttgtcagggaagtgggggaaagccggcagtcacaggcctcacccagctcccacgcaatccaaagggctsgtctcactcgcaacgtgccccctcaacagccccgagtctgtttccaggcagtgggcaagctaggcttgagaacttgccccaggctatctgcctcccagctgtgaaagaaaagggcttgtttctgcccccacctgtggaatctgcacactggatttgtgccctccccccaagttctggccaggaggcttcttgcccggttcaaattattacatagttcagctggagacttccttctccctgtggtgttcagcctc

SEQ ID NO: 99878 - DNA, 588 bp, Homo sapiens
agtggaggctcattaataattatggattataagaaaagataattgaaaattaactgttttgtgcactttgcagaatacttggcataaaaaagtgaggagtatttattttctcttattgttctgagatggtagtcgtagatttgtctcctgggggattggattttctgctttttattctgtccacctaccaaattcaggtgcacagaaactaggaaaggacattggggattaatggataacaggcactgggtttaggytctggatgaggttcagagatatctgcagaatgtgtatcgtttttgttattgtcaaatagagcatatttagctttacttcttttgtgatagtgtccctttataaacttaatttattttttcttgtaagaaatgtgtgtagataccacacaaatcagcaaaacaaaacaaaacagaaacaacttgtgtgaggtatacgtgttgaatttaaacattaaaccaaagcaatgaggcacaccagaataaacaaaagagatatttttcttctccccccatagctcaccatattatgtcatgtttcagttgcctatctcaaaatgttagaaaatgtaac

SEQ ID NO: 99879 - DNA, 611 bp, Homo sapiens
atgaagtctttaattttctgccctcaccatacagaaaagtgccttgaggaggtggtagaagwggatagctcaatggactatatccaacacaacttcttgaaattcctccagtgcacgtgtagttctaaaatcctgttctgatttgtttatctaaactactaacagcctgcttagctgcatacattttcaaagaccagatatagtctttatatacaaccatccattttcctaatgggagtggacatatatcaaactacacatgattttaagttttcttgcattctactttcaaaccctgacactgtatagaaatctatggttgctcaagatttcctatatcttactgtgctttatttttagacaagaaactaaaacatctggctgccctgtcttaggcagtcattggtctgagattaaaactcaatacctttttggtttcaggtatataagtactttgaatttttaagcaaaagtaacaaatcatagatttccgtatgtagcattttccttgtcgtaaaaaaggaaagttgccaacttggttttaggattttgtattagtttgctagggatgccataagaaaatatcaaagattgagtggcttaaacaacat

SEQ ID NO: 99880 - DNA, 571 bp, Homo sapiens
tatttataaataattatactgtttggtgccttaaaaagttgtagcttgttcctgtgacagagcttccaggggtaataggcacgcctaccatttttaagctctgcaatccctgcccctgctgccctgaagctcaggagggagcaaagcacttaaggcctatcattaacctccagtaycatgcaactgccttatggaaaagctgagacagttttccatagccatccctgctccagctatgcctcatcgggtgggacctcttcatctcagaccccagcgaccccacacctgcctgggctcttgggccagtagcagctctgcacttccttggggcagagttgccagaggtaacaggtaggagtgccattttgccactccacagcccctgcctctgctgctgtaaggcttaggagggagtgaagagcttaaggactattgtggatttccagaacagtgcacctgctttatgaaaaagcagccagactgttttccacctgtgtccttgcctctgttacccctcactgtacagggcctctcaacctgggcccccagcacaaccatcctgcctctatct

SEQ ID NO: 99881 - DNA, 550 bp, Homo sapiens
acacgcagccaacatcataccaaacaggcaatagctataagcatcctcctttagaattgaaataaaacaaggatacccactctcaccacttgtattcaacatagtactggaagttctagccattacattacatgagtttttggaactagaaaaactaattattgctgggaaaaaaaaactataaaagtggttgcctttgctagggctcagaaaagacttgattaaaaaaagcatgagaatactttctggacagtattaatgttgtgtatcttggcaagggttagattacataagtagatgcatacrtcaaatgggagccaacataaacattttattgtatgtaaattttatttcaaaagaaaaaactgtaaataaagacttaacactagctagtaatatacatgctaggctatcaagggagaactgtacttatgtctgaaaattaccttgaaattcatttaaaaaatttaaatggattgatgtgaggatagaaaaacaactaaatggatagatatgtgataaaacaaatgcagccaaatattaacagtag

SEQ ID NO: 99882 - DNA, 576 bp, Homo sapiens
tgggttatgtgggtacataaatttatcaaaactgatgtcactgtatacttaagatctgtgcatttaagcatatttaaattttacctaaatttaaaaaaaacaagaaggaatgtgtrtatgtgtctataactggaatttcaaaggttcaagaagctctaagatatatattaagagcccattaggaccatatttatcaaactgtaatgtgcacataaataatttggtgattttgttatgcagattctgattcatccattggggatgtggtcattttgcatttttaataagcttccaggtcctagtaataatactactgatgcacagactgcactttgattatagcaagggttggagatggagatgttaaagccaaagaaaaacaataatggggcaaattgctgtctgcaaatattaaaagcactctcatgtgaaagagagttctagttcctctctcttactttaatacatagaagagaatatatggtaaactatttattaagaagtaaatatttgatcaatgtaaatatataacattaaacaattggatactcttaataatgcaaattgttgttttgt

SEQ ID NO: 99883 - DNA, 576 bp, Homo sapiens
tgggttatgtgggtacataaatttatcaaaactgatgtcactgtatacttaagatctgtgcatttaagcatatttaaattttacctaaatttaaaaaaaacaagaaggaatgtgtatatgtgtctataactggaatttcaaaggttcaagaagctctaagatatatattaagagcccattaggaccatatttatcaaactgtaatgtgcacataaataatttggtgattttgttatgcagattctgattcatccattggggatgtggtcattttgcatttttaataagcttccaggtcctagtaataatactactgatgcacagactgcactttgattatagcaakggttggagatggagatgttaaagccaaagaaaaacaataatggggcaaattgctgtctgcaaatattaaaagcactctcatgtgaaagagagttctagttcctctctcttactttaatacatagaagagaatatatggtaaactatttattaagaagtaaatatttgatcaatgtaaatatataacattaaacaattggatactcttaataatgcaaattgttgttttgt

SEQ ID NO: 99884 - DNA, 589 bp, Homo sapiens
aataaaatatcaaagtcaagttagagtctccaggagagcttacgtgtttcttctttgttctgaaaaatttcccaaatgggaaatatacatagtacattttgctgaccagaaatgactctaacttttaaaagtacaaataaaactttgggacccatgggaaaatgacaacacctgattcaaaaatcaccacttgatcaagattgtctgggagccaagagaaaccccaatacagggaaagggtgagagatcctcagtgagcttcattctcactcccggaatcttagcaactgaaaagtcccttggccctcatgggccttgcaactaacataggaagctactggaagattctctgatagcactgccccagggagaaagtgcaggctgagaccgtcacattctctgagaccttagcaactatagaaaaagaccatttttaaactctacaaccaaaagattgtgcattattaaagattccagtggtactggggctgaggtttaaaagaagcatgagctactgctgccaaggtttagatayaaaccaccacaggctaccacaccaggggtggaagcacaccacaggcctttgcac

SEQ ID NO: 99885 - DNA, 560 bp, Homo sapiens
aaaatatttgagtcaattctttcaataacaaatagcataaatcacagtacccaaaatcaaataaaaattrtaaaagaaaattttttaggcttttgtaacttttttggcagaaacatatgagaattctattacagaagtgaagacattaattatagatttcttgtcaggagagatgaatgcatgtctaacaatgatgtaagaggggttctgcattagccagttctcttatcctattcttcagagattttcttttaagttttacattattaatgataaaaagaatacaaatccctggctgcccagattgctaaatcttactttaaataccacctagatactttgaaatctcaagtgtcttatgattaatatcattttcttttacagtaaattaagaagttgatactgatccattctgcttcattctgccccaggttcccaccttgtgatccaacaatcttgccttaaataaaattatgtttacccctactaaattggctacaactaaatatgtagagaaaaaagtcattttcttataggcctattgtctatcaattttatgt

SEQ ID NO: 99886 - DNA, 614 bp, Homo sapiens
tgagcttaggaccaattttatcagaagaaattggatatgtgttttaccagttatttctattcctctatctcaattgtataattggcaatggaatcaactccaaagcttccagtaaatttattttgctgagaagcagaattttcaaaagataatgtcaattctgaaggctgttttctttattaattctatgtgtagcagtaattatattcctgagataccaaatgcaatagaaagcaacgttggtcattgaataatatttatcagagattatttaaataygagcttcctaaaattcctatcttactctttattagctgacaaatacattcaaaattataattctgttaacttgtttttaaatcaaaatagaattaagtacattgcctccatttttgtatatttaataaattttacaaaagattttaagttttattgaattgacactaggaaagggagcagagaaattcatttgctatttagaactcattttaaatgttctatgaaaaataatgtaagaacggtacatgtttaattagaaaaaacaatgttgtctacttcttaaaacacattttaaaaatcataatttattaagcactactaaaacttagatacta

SEQ ID NO: 99887 - DNA, 624 bp, Homo sapiens
agtttaacactgatttggccttaatattgtggaacagcatgatgttaactaggaacaaaaatttgaaaatgagtagcaggaaatacttccatactatgtttagctttttgaccaagtcaccatgttcttgcctcagggcctttgcacttgtttttccatctgtctgggacactctcccctacttccwctccaatatctctatagcttaacccttcatcttcatcatgtctctgctcaaatattctcttctcagcaagtgtcccactaactatcttggtttaaaaaataccatcatcaccattgaagcctctaaaacccacttcctccaaaatccttttccttatttgctatagttttttccacaggacttttcattcctaagagtaaaatgttgtatgctttttttttgctagtaattctttccacgttattagtgctcaataaatatttgcagaatcagtcttgagttctaagaatagtgtgctctagaggcctactatcccagtagatcagaatcatataaatcatttagtaaaatcaacacagttaatcacagtggcctcatttcattcaaaaagagaatgaaaagaatgatgtggaagccgtttagggaatacagtgttc

SEQ ID NO: 99888 - DNA, 624 bp, Homo sapiens
agtttaacactgatttggccttaatattgtggaacagcatgatgttaactaggaacaaaaatttgaaaatgagtagcaggaaatacttccatactatgtttagctttttgaccaagtcaccatgttcttgcctcagggcctttgcacttgtttttccatctgtctgggacactctcccctacttccactccaatatctctatagcttaacccttcatcttcatcatgtctctgctcaaatawtctcttctcagcaagtgtcccactaactatcttggtttaaaaaataccatcatcaccattgaagcctctaaaacccacttcctccaaaatccttttccttatttgctatagttttttccacaggacttttcattcctaagagtaaaatgttgtatgctttttttttgctagtaattctttccacgttattagtgctcaataaatatttgcagaatcagtcttgagttctaagaatagtgtgctctagaggcctactatcccagtagatcagaatcatataaatcatttagtaaaatcaacacagttaatcacagtggcctcatttcattcaaaaagagaatgaaaagaatgatgtggaagccgtttagggaatacagtgttc

SEQ ID NO: 99889 - DNA, 624 bp, Homo sapiens
agtttaacactgatttggccttaatattgtggaacagcatgatgttaactaggaacaaaaatttgaaaatgagtagcaggaaatacttccatactatgtttagctttttgaccaagtcaccatgttcttgcctcagggcctttgcacttgtttttccatctgtctgggacactctcccctacttccactccaatatctctatagcttaacccttcatcttcatcatgtctctgctcaaatattctcttctcagcaagtgtcccactaactatcttggtttaaaaaataccatcatcaccattgaagcctctaaaacccacttcctccaaaatccttttccttatttgctatagttttttccacaggacttttcattcctaagagtaaaatgttgtatgctttttttttgctagtaattctttccacgttattagtgctcaataaatatttgcagaatcagtcttgagttctaagaatagtgtgctctagaggcctactatcccagtagatcagaatcatataaatcatttagtaaaatcaacacagttaaycacagtggcctcatttcattcaaaaagagaatgaaaagaatgatgtggaagccgtttagggaatacagtgttc

SEQ ID NO: 99890 - DNA, 633 bp, Homo sapiens
acatgtttgcgtccccctcctccattattataagtttcctgagacctccccagccatgctaaactgtgagtcaattaagcctctttcctttataaattacccagtcttgagtatgtctttattagcagtgtgagaacagactaatatagacactgtgtaaattactgaaacttaacaggtacataaaaagaaagataagaaaaaaattaatataatttttctcatacttaatttwtacattttattattcatttaaaattatacatttaaaagtatacatttaaaacattatacacttaaaattcctaatgtttctcccccctttattcctccttctatcgctttcttccttcctaccttccttgctaccttccttcctgtataaatctcctttccttattttagcatatttaggcaggaacagaatgacaggagtttgcatgttgtctgttgtctcacaggaaataggcagtgctccctcatgaaccctcagcttatcagctctggaaaagtgattacaaaattgggtttggacttattcgtgatttaacttgaaaattgcctttttgcctccctgggattccagctaaggctattagaaatggagttggacaattccctcttgctattctc

SEQ ID NO: 99891 - DNA, 582 bp, Homo sapiens
ttcttatttacatgataatttagccatttacacaaattgtagagctgctttctttatttcatataaagggcagttgttttaacccagtgttctcaactggtagcattttattttcacaattagagtagagtatgcaactggaatttagtgggtagaggctatggatattgcttaacaatgtataatgcacaggaaagccccttacaacaaaaattacctatcccaaaatgtcaatagtgctagagaaacgccgtcctaacaacaatacaataaatatgcagatttgcccctctataatctttgtaggtattttaaagcaaaagtaataaatagaataacagtagttcccatacttgataagatataagaaccacatgaaggttttgagaaccttgcattccaggacccttccttagaccggctgaatgagaatattggtgaatatagctgtgtattttaaaggcataaasagctgtgtattttaaagggataaacagctgcttctgttagctacctgcgcttcagaataacaaagataatctctgcattcctagtgtggtagataaaatggattttgttttc

SEQ ID NO: 99892 - DNA, 423 bp, Homo sapiens
gtctcaaaactatttcagaggctcttacatccaagctagtacaaaaccaaccacacagtaaaacttgtaagaaaagcagagacattttgtgtccataattcccacccctggtacagtactatatgaatcaaagggaacttccagctcccaatctttccctgaggagtgaaggcttcaaaccacacatctagcatccagatttttctgggtgctatccaagaargttccatattgtctgtgttggagtgatgttgggccagataataagctagtcccctgggggttacagagaacaatgtggtagtttgaacaagtgtgagaacaatcaccacagcttttccctacacccttcagttcaacatgaaactaacagacaaaaacaaacaaacaaacagaaacaagaacaggaacaaaccaacaaac

SEQ ID NO: 99893 - DNA, 470 bp, Homo sapiens
atgtcattgtggttttaatttgcatttctctgacaaactatgtttaacattttaaaaatataactgttggccatttgtatttcctctttggaaaaatgtctgttcagttcttctgcccattttaaaatcagattatttgttttctactattaagtttttcacttctttggtttctaaattgtaaatccatagcatacacactcaagccttgtattagtctgttctcatgctgctaataaagacatacctgagactgggtaatttataagaaaagaggtttaattgactcacagttccacatgactggggaggcctcaaaatcatggcagaagagcaagggatatattacatggccgtagatgagagagagcctgtgtagaggaattcctctttataaaaccatcagataytctgagacttattcactatcatgaaaacaattcggagaatacctgcccccatgattcact

SEQ ID NO: 99894 - DNA, 388 bp, Homo sapiens
caggtggcttagtgtcttataaccctatgatgacatagctatcccaggattactcaaggtatcactaaataggkatcttatcaattcattcaaaaaattccaagtcaatgtcacacttaatagatgaaataaaatgaccttgttacaatcacccagctagtgatattgaagctgagggttgaaatcaggtttgactgatgccaaagactatgttctctcctatcttccagcaacatccaaaataaatgtctacactacccaatgtgatattcacaagctatgtgtagctactgagcacatggtataagaacaatataaaaaacacctagatttttaatatcatttcattgtaattaatttacatttaaagtctaaaaagtcacatatg

SEQ ID NO: 99895 - DNA, 388 bp, Homo sapiens
caggtggcttagtgtcttataaccctatgatgacatagctatcccaggattactcaaggtatcactaaatagggrtcttatcaattcattcaaaaaattccaagtcaatgtcacacttaatagatgaaataaaatgaccttgttacaatcacccagctagtgatattgaagctgagggttgaaatcaggtttgactgatgccaaagactatgttctctcctatcttccagcaacatccaaaataaatgtctacactacccaatgtgatattcacaagctatgtgtagctactgagcacatggtataagaacaatataaaaaacacctagatttttaatatcatttcattgtaattaatttacatttaaagtctaaaaagtcacatatg

SEQ ID NO: 99896 - DNA, 388 bp, Homo sapiens
caggtggcttagtgtcttataaccctatgatgacatagctatcccaggattactcaaggtatcactaaatagggatcttatcaattcattcaaaaaattccaagtcaatgtcacacttaatagatgaaataaaatgaccttgttacaatcacccagctagtgatattgaagctgagkgttgaaatcaggtttgactgatgccaaagactatgttctctcctatcttccagcaacatccaaaataaatgtctacactacccaatgtgatattcacaagctatgtgtagctactgagcacatggtataagaacaatataaaaaacacctagatttttaatatcatttcattgtaattaatttacatttaaagtctaaaaagtcacatatg

SEQ ID NO: 99897 - DNA, 388 bp, Homo sapiens
caggtggcttagtgtcttataaccctatgatgacatagctatcccaggattactcaaggtatcactaaatagggatcttatcaattcattcaaaaaattccaagtcaatgtcacacttaatagatgaaataaaatgaccttgttacaatcacccagctagtgatattgaagctgagggttgaaatcaggtttgaytgatgccaaagactatgttctctcctatcttccagcaacatccaaaataaatgtctacactacccaatgtgatattcacaagctatgtgtagctactgagcacatggtataagaacaatataaaaaacacctagatttttaatatcatttcattgtaattaatttacatttaaagtctaaaaagtcacatatg

SEQ ID NO: 99898 - DNA, 627 bp, Homo sapiens
atactggcaaacagaaagtcttactatttttaggaccatagaaagcattacataaagggaagtctgtttgcatttgtagctgacaacttgactagtckcaaataaagagaaaaagacaatagatgtgaaagtgtctaagtgtcaggtgttctttgcttcctgatgtgtcaaaagctttccctagtaaaaatgcaagattcccggaggctgataaggctactaatagttccaagttgacctacaaatgtgttctgctatgaatagcaaatcgcctccttaaaatttggtcaactgaactaactttgtgataggtatatatgagggcaatctatctcatttctttagaaatagaaattaaaccttttaattgattatatatggttgagatcctttgaaaagcatccatgtcaataattaactcaactagctataaaaagagtatagtcatcataatgagtaacttctctctgtcccaatatttaatccatggacattaagagctatatgaaattcaagtacatcacttgtatttcaaatgcgcttcctttgagtcaaattaaagtgtgttttgaaatatgaaaaaatgtgtctagagacaacatgtctctacctgacagggttagggag

SEQ ID NO: 99899 - DNA, 598 bp, Homo sapiens
aggaggttcatttttttctgcactatggcctggccccaatattctctctctgatggggaaaaatggccacctgagggaagtataaattacaatactatcctgtagcttgaccttttctgtaagagggaaggcaaatggagtgaataccttatatccaagctttcttttcattgaaggagaatacacagctatgcaaagcttgcaatttacatcccacaagaggacctctcagcttactcccatatcctagcctccctatagttctccttcctattaatgataagcctcctctaatctcccctgcccasaaagaaacaagcaaataaatctccaaaggaccacaaaaccccctgggctatcagttatgtccccttcaagctgtagggggaggggaatttgggccaacctgggtacatgtcctttctccctatctgatttaaagcagatccaggtagacctgggaaagttttcagatgatcctgataggtacatagatgtcctacatctcacttggagagatgtcatgctattgttagatcaaaccctggcctttaatgaaaataatgtggctttagctgcagcccaagagtttggagat

SEQ ID NO: 99900 - DNA, 614 bp, Homo sapiens
gttttctaattttgggccctgcttcaatgccatgtkgtttatgttattatagttttataccaattactaccatatagaaacatattttctctggattttttttctttttcaagattgcttcagttgttcttattcttttgtattttcaaaaatattagcattagcttgtcaatttacctcacatgctattctttaattttcctgataatgttcccagtaactctgacactgcctttaaaagaaaattgtgtttctccatttaatttcagtgacttttagactttctattgctgaattgtactgatcgcaggtgctcccttacattttttactttaatggcaacctttgctgccattggttgtgatggatttgatcattttcaacctatataatctgttgtcatttcatgagatttgtagaggagaaagggtactcgtgactagtgcacactgcatcatttgcacgaaagagaaaatcagcccatgatacccactagctggcctggtagtataaactaggccttggcattactatgagatggtctggcactcacagctagattttggtgttcttttgttgaccataatcataacaccagataaggccacactgac

SEQ ID NO: 99901 - DNA, 614 bp, Homo sapiens
gttttctaattttgggccctgcttcaatgccatgtggtttatgttattatagttttataccaattactaccatatagaaacatattttctctggattttttttctttttcaagattgcttcagttgttcttattcttttgtattttcaaaaatattagcattagcttgtcaatttacctcacatgctattctttaattttcctgataatgttcccagtaactctgacactgcctttaaaagaaaattgtgtttctccatttaatttcagtgacttttagactttctattgctgaattgtactgatcgcaggtgctcccttacattttttactttaatggcaacctttgctgccattggttgtgatggatttgatcattttcaacctatataatctgttgtcatttcatgagatttgtagaggagaaagggtactcgtgactagtgcacactgcatcatttgcacgaaagagaaaatcagcccatgatacccactagctggcctggtagtataaactaggccttgrcattactatgagatggtctggcactcacagctagattttggtgttcttttgttgaccataatcataacaccagataaggccacactgac

SEQ ID NO: 99902 - DNA, 591 bp, Homo sapiens
gctatctgccctgtgcctcagatcatttgctccttgactttgctgcctctctcccagggagctgccagtctcatccaatgcttgacacttcagtgcttggtggactgttttttgcatggatgaatgaatcaaagaagtgcacgaagttaagtcactcccaggcctttcccaccaggagcctccaagccagttgcgaagcagttgtytgcaccactgacccccgagaagtcaggcccactaatggaaaccagcactcactaaatgccgtgggagcagcgtggctgtaacagcctgcagagggccacgggggagtggccaacatcagagctctcaaagagcagagccctgcacgcttggaaaagtgctcttaggagcccaagaaaagtggaagaaatattaagacttcacttaataaataaaatataagagggttaaaaagcatgatgttcagatatcatcacctccagactcccatcagttaaaacagcgttctcagaaaacacgtttcccagtgttgtgtataaaacttaagtcccagtcaagaggatttcataggcccacctgccacagagtgagcaacactctgacact

SEQ ID NO: 99903 - DNA, 594 bp, Homo sapiens
ctgaaataatttttatgatggagacacttgttagaggacagaaacaatctcttttacattgtgtgataaataataataagaggttggccaggtgcagcggctcatgcttgcaatctcaacatattgggaggctcgggtgggaggatagcttgaggccaggagtttgagaatagcctgggcaacatagtgagacttcttctctacaaaaaaaaaaaaaaaaaaaaaattagccaggctgctagcctgtgcctgtggtcttagctactcaggaggctgaggcagaaagactgcttgagccaaggaattggaggctgcagtgagctatgatcatgccactgaattccaccctgggcaactgagcgagatgctgtctttaaaaaaaaaaaagaaagaragaaaggaaaaaagaagaaataaaactgaaatttagaaaagtaaaaattggacctcaaccatgcctttggagttccatgtacatgtttaggagagatgaataatgatattaatttacaaaacaaaacaaaaattatcttattaactgagggagtggtaaagttggaaaatctaaagttctaaaagacttgagagaaatac

SEQ ID NO: 99904 - DNA, 607 bp, Homo sapiens
tcatggggggctcatggctcactggggcttactccactgagaagggaggtaagmgagtcagggtggagctcccaccagctcagtctcttaacttggactctgcagagcctcaaggagcacctcacaagcctgcttcgaatgcaggctcccaggcctgggagaggtgcaccccatccctattgtacccccttcctgatgaaaggagagaaatgattccagggttccagagactcaagcagcttagaaatctctgcactgagagcctactttatccagccccaccttctgctcccatttccattccaactccccctggctcttccctcctggctgcctgggactcctctacccattaaggctcagctcagatttcgccttctcagggataacatcattagcccctaaggcagaagagatagccttctctgtgcccctctaatgtgtcacgtttatgctaaaaatggcgttaccatgctgcaatgggagtagctgttagtgattcccccagtccttagagtatgggattcatgaagtcaggacttaagtcttcacattcctggagcctcccacaaaatacacactcagcaaagtgcctgggaggaagctg

SEQ ID NO: 99905 - DNA, 601 bp, Homo sapiens
tttgttatgattcaggcatgcatggcaagttggcttaaataataaccccaaaagttgttttcagatccttggattctatgactgaatcagggacttggtgttcagagaaaacaaacagcttctgcaaggggtggaagagcagcaaagtgctctgyaaggaagggtctggggcgggaatgtgggaactgcccctcttcatcccagttgtcaaacatcgccccaagcaggctgctttcccctcctccctccgttggaggcaatctcaccttctctctctgaggaggactcagctggagtctggaggtctggggtttgggggtgatcagatggatgaagaactaaagttagggctttcaggccccagttttctcccaaccttctctgatctctgctcctgacatctgcctctgggcctcatctgctccccagtgatggctggggcaacacagaggaaggttttcattctcaaggctcttagtgcagttagcatgtggtgcacagcttcaagggctccgggctgtgcaaactagctctctcctgcccagccaatcgacctaaggatccccacatcacctaagaggaagtcccaactgggcagggc

SEQ ID NO: 99906 - DNA, 601 bp, Homo sapiens
tttgttatgattcaggcatgcatggcaagttggcttaaataataaccccaaaagttgttttcagatccttggattctatgactgaatcagggacttggtgttcagagaaaacaaacagcttctgcaaggggtggaagagcagcaaagtgctctgcaaggaagggtctggggcgggaatgtgggaactgcccctcttcatcccagttgtcaaacatcgccccaagcaggctgctttcccctcctccctccgttggaggcaatctcaccttctctctctgaggaggactcagctggagtctggaggtctggggtttgggggtgatcagatggatgaagaactaaagttagggctttcaggccccagttttctcccaaccttctctgatctctgctcctgacatctgcctctgggcctcatctgctccccagygatggctggggcaacacagaggaaggttttcattctcaaggctcttagtgcagttagcatgtggtgcacagcttcaagggctccgggctgtgcaaactagctctctcctgcccagccaatcgacctaaggatccccacatcacctaagaggaagtcccaactgggcagggc

SEQ ID NO: 99907 - DNA, 549 bp, Homo sapiens
actagaatattgatgtagaaaagaaactccaccccattttattttcatatctttgcgtaagattgtgtttacagtgccattattcacaaaagccttccatagagtattttttttttcttgtaattaaaacagtaggacttaatgacaggctggggatgcttgctgtttttmtaataatggattgaactatttgaatgggtaaaaaatgttaatacagtgattatttcaggctgagctaagtcttgtcataaaagataaagtattaaatttgcattagatgtttttaaaatgaaattgaatactgtaaagtcatataaaggtagtccaactttgccaaacatgatcataattgtaaaggaatatagaagttatgattcaaataaactcactttgacagcaaaagaaacccactgatttttgtaacacaaggtcactggtttcattaaatccatttattcggtaccatgacttgtgaatgttgctttgttgttttacgctttcagtgttttatagagggtttatagttttcttatgttaaatgttaatata

SEQ ID NO: 99908 - DNA, 549 bp, Homo sapiens
actagaatattgatgtagaaaagaaactccaccccattttattttcatatctttgcgtaagattgtgtttacagtgccattattcacaaaagccttccatagagtattttttttttcttgtaattaaaacagtaggacttaatgacaggctggggatgcttgctgtttttctaataatggattgaactatttgaatgggtaaaaaatgttaatacagtgattatttcaggctgagctaagtcttgtcataaaagataaagtattaaatttgcattagatgtttttaaaatgaaattgaatactgtaaagtcatataaaggtagtccaactttgccaaacatgatcataattgtaaaggaatatagaagttatgattcaaataaactcactttgacagcaaaagaaacccactgatttttgtaacacaaggtcactggtttcattaaatccatttattcggtaccatgacttgtgaatgttgctttgttgtwttacgctttcagtgttttatagagggtttatagttttcttatgttaaatgttaatata

SEQ ID NO: 99909 - DNA, 567 bp, Homo sapiens
tgcagaaaaaaataaaaggcagaagaaccgattgagtcagagaaaggaaatcaatgcacagaaagaataagagattgtggtcagagaaagggattcttaaagaattggcattgagagcttttcacagtgatgtcaaaatgtatacgcagctatatggtagttaaagcagctatatggtagttaaagtgcagtggagataagactgtaggcaaggaggaggctccagaattataatacttaggtatttagtggggtccatggtgaaaggttktgggaccaagccaggcataattgcaatctcagtgataccaatgagcatgaacactctgagtgctggacaatgcctccaaagactgtagattatagtcacaaagataagaacctgtggtataattgtttagcatgagtcttcaaaagaagaagggcttgaatgaattttgaagagctagtatctggaatcttacagcatattaaccttggctctgaggcctgagttgaatcatggaatagacattctccattagatgaaatattccaagaaagcaagaaaggatgtgcagagtggca

SEQ ID NO: 99910 - DNA, 598 bp, Homo sapiens
tctttagtgtcaacagtaaactacattttaagactctgagaagggcctggtatatggttatgttctctcctttaaagtaaaatttagagatctctaattgtaaataaccttttaaaatatatctgtctagataaaatttttacatatctaaaacttctatacatataaaaatgtaatgaagagtttggatgytcatagtagcctagtaatgacacaaatgtagacgttgtgaagacttggcagattcaccccaaagaagaatcttttctggggagattttcactccaaccgtaaagttattggacagctatataagtttgcatgaggacaatatataagtagattgcattgaggaaaggtaaggtgaagagaaaagcaagtcaccctatagagtcacactgtattctcagattttatctctgaacactaagctccgtttctataaaaggttgctatagtctaacctcgtactcagagagtacagaattttagtgtagacattcctattctttcaattaagaagtttaaggaatctggtaagagagaccaaattctgcattccttataaatgttttcatacacttgtcaaattaaaact

SEQ ID NO: 99911 - DNA, 620 bp, Homo sapiens
ctagcagtgctgatttcctcagttttttgcttgtctggaaaataatttatttcttctttatttcaaaaggacagttttgctgtgtataggattcttggtagactaaaaytttttaaaagcagtttaaatatattatctcattttctctggaagatgtaacatgtaagctaagaaatcttttgttagtctgatgggcattgacttatatgtaacttcatctttctctcttctattatttatttatttctgaaatctctttttgtctttgacttttgacagtttgactataatgtgccttcaaaaggaccatttatgagttgaatgtatctaagaagctttgagctttctgtatatggatgtccatatctctttcagaacttggggagttttcatgctattatttcattaaataggttctttattcctttttccatttcttattctgaaaattccaaaatgaagacagttgtttgcttaaggatgtcctgtatgtctcttaggctttctctattcttttttctttttctattatctttttttgactgactgggttatttcaaaagacctatttttaaattcagaactattttgttaggcttgatgtagtttattgttgaagc

SEQ ID NO: 99912 - DNA, 620 bp, Homo sapiens
ctagcagtgctgatttcctcagttttttgcttgtctggaaaataatttatttcttctttatttcaaaaggacagttttgctgtgtataggattcttggtagactaaaactttttaaaagcagtttaaatatattatctcattttctctggaagatgtaacatgtaagctaagaaatcttttgttagtctgatgggcattgacttatatgtaacttcatctttctctcttctattatttatttatttctgaaatctctttttgtctttgacttttgacagtttgactataatgtgccttcaaaaggaccatttatgagttgaatgtatctaagaagctttgagctttctgtayatggatgtccatatctctttcagaacttggggagttttcatgctattatttcattaaataggttctttattcctttttccatttcttattctgaaaattccaaaatgaagacagttgtttgcttaaggatgtcctgtatgtctcttaggctttctctattcttttttctttttctattatctttttttgactgactgggttatttcaaaagacctatttttaaattcagaactattttgttaggcttgatgtagtttattgttgaagc

SEQ ID NO: 99913 - DNA, 570 bp, Homo sapiens
agaaagtgggaaatagtttgcattccctaacttaacctagggaaggttgcagaagtaaattgtatgctcatagacactcatcagaatctgtcattttcccctttatcctcattctccttccccagaccagaggagctttttaagttgaaaagtgggattggtggggaaagaggagtattgtgaagagtgggttctatcttatcactatttttttaaayagtgaatttaaaagtgaaaatattgtcgtttcttttctctagttcttcccatagtgccttgcagtttcctatcttgtagcctgaagaggaactcctcatgagtaaaagaatcatgaggggacagcaaaacagctatgtactaggcagtatactaaacaagttgcatgcactaactcattctgatgacgatggggcacagtaaagtgacccctgaatacgtaggggccagaactctttattacttacagctccgaaagagaggagactgccatgcagggcaacacggtgggatgcaactggggaaaattgtaatagcaagggagatagtttatgtatggcaagccaggtagag

SEQ ID NO: 99914 - DNA, 603 bp, Homo sapiens
gatgcacctaatttgatccctgtccagttactctttttgctacatcactatcctagtttcatttgttgaacaaacaaataaataaaggcataattgaatgacctagcgttttcttatgatggctgagattataaaaggaaaaagaaaaaaataagaaatctctaacctaaaaagtcacttaggaggaatttatttatgaatttttttggcagttatgaacactgtatcaaatataataaatagttaaagaagatagtgttttcatttgaatggccctgacaatgttgaactttacctgagccctttgctcctggaaagcagaaacagaaatcccacctccttttctattctgggaaattgcttacyattacaaacctcctgtccctatatgactcaggtaagatgtgagagtgaaccccttgttacctatgacaagcctcttcaaattcctactctgtgcctcataaatgattagcttcactgtttgtccccactgaaccatctttgtagaatgatcataaacaaccaaactttagtcaggcttttctctttccccaaggtctccaaactttggcccacccttgagcttaaggaagcactgta

SEQ ID NO: 99915 - DNA, 593 bp, Homo sapiens
ctacacaattgtaaaattaacagcataaaataatacactaascagtctctaaactcgatgaagaaccatggatgtgcccacccattacaacgtcattagagtgccaagcatgtatcagctatctagtaaatactgaataagatgttatacaaaatcaccttgctctctttgtggcgattcaatagtctgaaaaagtttctaacaggctttacataggaaatgtgagtcgtttgctacagcacagccttctaaggtaagttgggagagaaatagaaaagcatctcacctttgtttatgtgtctgtctttggcatcaactcttttaaagtgttcctgtttcttcttcctctctttcttaacttctaaacacaggttcaacaaattctgtcaaaatagcctttactcaatgcagcactactcttttaacctatcactctcagtttaagtgagataaaacagttcaaatccaaatattcaggcatcattgcttttcatgatcatgtgtaatcgtatttttctattccaatgcataagagctgaggtttctattctacaccaacttaggctagaaatattattactgggacattaaac

SEQ ID NO: 99916 - DNA, 592 bp, Homo sapiens
tgacttaattttttatattgcatctagtttgctaaatgataagggacatgtagtaataaaataatatcccagaggacattttcacattttacctgctgtttctcttttaaaatttccattgttaaaagagccaaacagccataggctctggatataatagcttcagctgcaaataaaagaattgtctttacggatggaaggtgtgaaaaggactattgcttgtctctcagctactatcccacrgaacattgtagtgtgttcaaacaaatgaggacagtagtgaataaaccagtcttttaaacttgtataagattttccatacctggatttcagatcattttagaggcaggtattaatttattcttttttctcctaatttttcatatggacaaatttagggacagaagagataatgaacttggcagagaatcaggagcaagacattgatggaaaatggtgctgatttaaatgcttcctgcttgcatttctcataatgaaagcacagccatactgttacacttgtattttatggctcactgaagaacctcaataacaaattttaaatacctatcaaatgtcataaaatgtcatt

SEQ ID NO: 99917 - DNA, 460 bp, Homo sapiens
cagtggctcacacctgtaatcccagcactttgggaggccgaggagggaggatcacttgaggctaggtattcaaaaccagcccagtcaacatagcgtgacaccatacataaaaaataaaaattaaaaaatagttagccaggcatggtggtgtgtgtctgtagttcctgctacgttggaggctgagcaggaggatcacttgagctcaggaggtttgaggttgcattaagccatgatcatgcttctgtactccaktctgggtgacagagagagaccgtgtctcaaagaaaaagaaaatccagaatcacagctaactacttgcagtatcagtatagaatcctaagcttccagtctgtcttttttttagtagagttccccctccctaaaatgtttgtccaccaaaaaattgtcaatatattttgggtaacctcgttgaaaagttaattataaaacaaactaaatc

SEQ ID NO: 99918 - DNA, 634 bp, Homo sapiens
ttctactttgtatcttttgagagtgttattaggggaggtgggtttttttgagaaccatggcatgttattctcaaccaattagaatttgctaaactgttggagactcaaaagaattgttttcagtccagtttacatcaaagtcctcatcttgtagtctaaaagacggtggcaagagaaagccattgatgttgatttgtactaacattgtaaccttgctgagagtaagtatatttttaaaggtgattctgaggctcataacacccaaagaaagtctccaggtagataggaaaggaccttttacacttaacaacaaatcaaatttaatctgaattggtaaatagataaataaacaaacaaataaataattttgttcaatgaatttatgkctgcccattctttgacataaagtttgaaaaatcagtcactagacttgggttttttaaaaaagaaatctgaatattttcctcttgatgaatactactagtctattctctatcttaagggagaaatataaacgtgtgttggtggggagtgcacctattatattaaatgtctctgtagtgagctttttcaaacaaatcactgaagagtcaaagttaataaaaaatgtgaattacaaaagaaatgatttgcc

SEQ ID NO: 99919 - DNA, 509 bp, Homo sapiens
tccataagactacttacctattgaaaaaacctctagaaaaaccagtgttttaggaaataagcatttttttttactttacttaaatgatytcatgctttgatctttatttttgccaactttcagtgagttccttgtaatattctagagattattaatgctttgccagtgattaatattgcaaatatcttctcccactcaaccatctttctcttaattttgattatggcatcttttgcagaatagatatcttgagtttaacatagtcaaatctaataatgtttatctttatgtttggtgcttttaaggctttgccaataataactttatccatgtcttcttctggaatacaggctcttcaggtttttattgcatgttcctttacatgccaaagaaactgaccttggctttttctgttctcacagcaggatcacaaaactcttgacaggtcctctgtgccttatcgatccacagacaccatagagacatctttaacatcctgccaactccac

SEQ ID NO: 99920 - DNA, 509 bp, Homo sapiens
tccataagactacttacctattgaaaaaacctctagaaaaaccagtgttttaggaaataagcatttttttttactttacttaaatgatttcatgctttgatctttatttttgccaaytttcagtgagttccttgtaatattctagagattattaatgctttgccagtgattaatattgcaaatatcttctcccactcaaccatctttctcttaattttgattatggcatcttttgcagaatagatatcttgagtttaacatagtcaaatctaataatgtttatctttatgtttggtgcttttaaggctttgccaataataactttatccatgtcttcttctggaatacaggctcttcaggtttttattgcatgttcctttacatgccaaagaaactgaccttggctttttctgttctcacagcaggatcacaaaactcttgacaggtcctctgtgccttatcgatccacagacaccatagagacatctttaacatcctgccaactccac

SEQ ID NO: 99921 - DNA, 509 bp, Homo sapiens
tccataagactacttacctattgaaaaaacctctagaaaaaccagtgttttaggaaataagcatttttttttactttacttaaatgatttcatgctttgatctttatttttgccaactttcagtgagttccttgtaatattctagagattattaatgctttgccagtgattaatattgcaaatatcttctcccactcaaccatctttctcttaattttgattatggcatcttttgcagaatagatatcttgagtttaacatagtcaaatctaataatgtttatctttatgtttggtgcttttaaggctttgccaataataactttatccaygtcttcttctggaatacaggctcttcaggtttttattgcatgttcctttacatgccaaagaaactgaccttggctttttctgttctcacagcaggatcacaaaactcttgacaggtcctctgtgccttatcgatccacagacaccatagagacatctttaacatcctgccaactccac

SEQ ID NO: 99922 - DNA, 509 bp, Homo sapiens
tccataagactacttacctattgaaaaaacctctagaaaaaccagtgttttaggaaataagcatttttttttactttacttaaatgatttcatgctttgatctttatttttgccaactttcagtgagttccttgtaatattctagagattattaatgctttgccagtgattaatattgcaaatatcttctcccactcaaccatctttctcttaattttgattatggcatcttttgcagaatagatatcttgagtttaacatagtcaaatctaataatgtttatctttatgtttggtgcttttaaggctttgccaataataactttatccatgtcttcttctggaatacaggctcttcaggtttttattgcatgttcctttacatgccaaagaaacygaccttggctttttctgttctcacagcaggatcacaaaactcttgacaggtcctctgtgccttatcgatccacagacaccatagagacatctttaacatcctgccaactccac

SEQ ID NO: 99923 - DNA, 581 bp, Homo sapiens
gcaatgattgtgtctaaggaaagcattattgtctgattcacattgcaagtaaaacaaatgctaatttactatgcatcactgctattgttgtcagtgggccagttcaagttcttgatttaaccgcacaaaacaatttgagagcaaattcaaagtaagagtaggcagagaagcttattgtaaacagaaagcatactctgagagtatgctggctgccaargggagagacagcagctatcgccttaagaggaattccttgtatgggatttgtacatacatacctacatatttatttatttatttatgcttatttgtatttgttcttttaacttttattttaggttcaggggtacatttgcaggtttgttgtataggtgaacacatgtcatggggatttggtgtacagattattttatcaccgagatactaagactagtacctgatagatcttttttttctgatcctctccctcctcccaccctccaccctcgagtaggctccagtgtctgctgttagcctcttggtttctatgtgttgtcattatttagctcctacatataagggagaacaagtggtatttgatt

SEQ ID NO: 99924 - DNA, 581 bp, Homo sapiens
gcaatgattgtgtctaaggaaagcattattgtctgattcacattgcaagtaaaacaaatgctaatttactatgcatcactgctattgttgtcagtgggccagttcaagttcttgatttaaccgcacaaaacaatttgagagcaaattcaaagtaagagtaggcagagaagcttattgtaaacagaaagcatactctgagagtatgctggctgccaaggggagagacagcagctatcgccttaagaggaattccttgtatgggatttgtacatacatacctacatatttatttatttatttatgcttatttgtatttgttcttttaacttttattttagrttcaggggtacatttgcaggtttgttgtataggtgaacacatgtcatggggatttggtgtacagattattttatcaccgagatactaagactagtacctgatagatcttttttttctgatcctctccctcctcccaccctccaccctcgagtaggctccagtgtctgctgttagcctcttggtttctatgtgttgtcattatttagctcctacatataagggagaacaagtggtatttgatt

SEQ ID NO: 99925 - DNA, 581 bp, Homo sapiens
gcaatgattgtgtctaaggaaagcattattgtctgattcacattgcaagtaaaacaaatgctaatttactatgcatcactgctattgttgtcagtgggccagttcaagttcttgatttaaccgcacaaaacaatttgagagcaaattcaaagtaagagtaggcagagaagcttattgtaaacagaaagcatactctgagagtatgctggctgccaaggggagagacagcagctatcgccttaagaggaattccttgtatgggatttgtacatacatacctacatatttatttatttatttatgcttatttgtatttgttcttttaacttttattttaggttcaggggtacatttgcaggtttgttgtataggtgaacacatgtcatggggrtttggtgtacagattattttatcaccgagatactaagactagtacctgatagatcttttttttctgatcctctccctcctcccaccctccaccctcgagtaggctccagtgtctgctgttagcctcttggtttctatgtgttgtcattatttagctcctacatataagggagaacaagtggtatttgatt

SEQ ID NO: 99926 - DNA, 466 bp, Homo sapiens
ctttgtaacatcaaatacctatgagtcgggtaaattcctctgytcttgagatcccaagataatttggagctcccaggcctgtcagaaagtgacattctttacttagtacagataaggagccctgtacagggactgtgtagacaaggtataaggccagatttctcaaggggcttttattggctctataagtcaagtttgattccttagaagaaagcactctattccagtcaaaaccttggtaaaataaccagtttctccaactgtgttctgttacataaaaatacaaatggcctagacattgaatgaatatctattatttatcttaatgtaactttagattttaaattataaggcaagattatctaaaagcatttattccattacatttacctaattaattagtttttaaaaatagtttacccagattacttatgaaaactgggataattatttaaagttatttcct

SEQ ID NO: 99927 - DNA, 466 bp, Homo sapiens
ctttgtaacatcaaatacctatgagtcgggtaaattcctctgctcttgagatcccaagataatttggagctcccaggcctgtcagaaagtgacattctttacttagtacagrtaaggagccctgtacagggactgtgtagacaaggtataaggccagatttctcaaggggcttttattggctctataagtcaagtttgattccttagaagaaagcactctattccagtcaaaaccttggtaaaataaccagtttctccaactgtgttctgttacataaaaatacaaatggcctagacattgaatgaatatctattatttatcttaatgtaactttagattttaaattataaggcaagattatctaaaagcatttattccattacatttacctaattaattagtttttaaaaatagtttacccagattacttatgaaaactgggataattatttaaagttatttcct

SEQ ID NO: 99928 - DNA, 466 bp, Homo sapiens
ctttgtaacatcaaatacctatgagtcgggtaaattcctctgctcttgagatcccaagataatttggagctcccaggcctgtcagaaagtgacattctttacttagtacagataaggagccctgtacagggactgtgtagacaaggtataaggccagatttctcaaggggcttttattggctctataagtcaagtttgattccttagaagaaagcactctattccagtcaaaaccttggtaaaataaccagtttctccaactgtgttctgttacataaaaatacaaatggcctagacattgaatgaatatctattatttatcttaatrtaactttagattttaaattataaggcaagattatctaaaagcatttattccattacatttacctaattaattagtttttaaaaatagtttacccagattacttatgaaaactgggataattatttaaagttatttcct

SEQ ID NO: 99929 - DNA, 466 bp, Homo sapiens
ctttgtaacatcaaatacctatgagtcgggtaaattcctctgctcttgagatcccaagataatttggagctcccaggcctgtcagaaagtgacattctttacttagtacagataaggagccctgtacagggactgtgtagacaaggtataaggccagatttctcaaggggcttttattggctctataagtcaagtttgattccttagaagaaagcactctattccagtcaaaaccttggtaaaataaccagtttctccaactgtgttctgttacataaaaatacaaatggcctagacattgaatgaatatctattatttatcttaatgtaactttagattttaaattataagrcaagattatctaaaagcatttattccattacatttacctaattaattagtttttaaaaatagtttacccagattacttatgaaaactgggataattatttaaagttatttcct

SEQ ID NO: 99930 - DNA, 570 bp, Homo sapiens
acaaacacacacatgcacccatacacagacacatcttggatgttaactttaagctggcttttaaccattgcgttcctttaaaaaatgtttttaaatctatttgctatattttagctagaacgaattgctaatattttaaaagtaacgagtatcaaactagaaagggcttgatttaggaaccaagacaggctgtcctggtggacaaaaaaaaaaaaaaagggcaaccagaaccttagctatggaactgcagcatggggcaacagccattgctctttcagtttggcttggctagcaaaaaggtggccttgttatgtaaataaagccccttaagtagtcataatrtaaatcttcccttatttcttttgctggccgttttcctccacaccccactttttttttttttttttttttggcagaaatttagccacttcagatgtcttcttcccaataatttggaactttccttcagatttgataaagtcagatagagctggtaaaacccaatgggaaaaagactgaaaacaacaaccaaaacagaaacaaacaggtaacaacaacaacaacaaaaaa

SEQ ID NO: 99931 - DNA, 570 bp, Homo sapiens
acaaacacacacatgcacccatacacagacacatcttggatgttaactttaagctggcttttaaccattgcgttcctttaaaaaatgtttttaaatctatttgctatattttagctagaacgaattgctaatattttaaaagtaacgagtatcaaactagaaagggcttgatttaggaaccaagacaggctgtcctggtggacaaaaaaaaaaaaaaagggcaaccagaaccttagctatggaactgcagcatggggcaacagccattgctctttcagtttggcttggctagcaaaaaggtggccttgttatgtaaataaagccccttaagtagtcataatataaatcttcccttatttcttttgctggccgttttcctccacaccccactttttttttttttttttttttggcagaaatttagccacttcagatgtcttcttcccaataatttggaactttccttcagatttgatraagtcagatagagctggtaaaacccaatgggaaaaagactgaaaacaacaaccaaaacagaaacaaacaggtaacaacaacaacaacaaaaaa

SEQ ID NO: 99932 - DNA, 584 bp, Homo sapiens
agtggctctgcccagtttccatgcagctgtctctccatgtttgtctgggggtccagggggtcagttaggatctcttatgcctaagattacaaaggtttatagcagaagtgtgtgtcccttgggcctcttgctcactcacccattccccacaatagggagcctccccatgctccatgccaatctcaggtgggcagcctcactcctctctgtcctccgtgggtcaccattgcttccttcaggaatcacaacatggcctcctggacaatccacttgaacactagagctagtatttatgcaccactctatctcctctctgtgacagtggtacacrctagctgcttctagtcaaccatcttggcactttcttctatattattttatctgtaattatttctgtatgtttctctaaaatacaagtgttttttaaaaacataaaatatcctattattatacttgaaacactaaaaataacttctaaatattaacaaatatccaatcaaggttcttatttatcttattttgttatattttaaaatgattttttagtttatagccaaatcagatcaatcaatttgattgttgat

SEQ ID NO: 99933 - DNA, 584 bp, Homo sapiens
agtggctctgcccagtttccatgcagctgtctctccatgtttgtctgggggtccagggggtcagttaggatctcttatgcctaagattacaaaggtttatagcagaagtgtgtgtcccttgggcctcttgctcactcacccattccccacaatagggagcctccccatgctccatgccaatctcaggtgggcagcctcactcctctctgtcctccgtgggtcaccattgcttccttcaggaatcacaacatggcctcctggacaatccacttgaacactagagctagtatttatgcaccactctatctcctctctgtgacagtggtacacactagctgcttctagtcaaccatcttggcactttcttctatattattttatctgtaattatttctgtatgtktctctaaaatacaagtgttttttaaaaacataaaatatcctattattatacttgaaacactaaaaataacttctaaatattaacaaatatccaatcaaggttcttatttatcttattttgttatattttaaaatgattttttagtttatagccaaatcagatcaatcaatttgattgttgat

SEQ ID NO: 99934 - DNA, 584 bp, Homo sapiens
agtggctctgcccagtttccatgcagctgtctctccatgtttgtctgggggtccagggggtcagttaggatctcttatgcctaagattacaaaggtttatagcagaagtgtgtgtcccttgggcctcttgctcactcacccattccccacaatagggagcctccccatgctccatgccaatctcaggtgggcagcctcactcctctctgtcctccgtgggtcaccattgcttccttcaggaatcacaacatggcctcctggacaatccacttgaacactagagctagtatttatgcaccactctatctcctctctgtgacagtggtacacactagctgcttctagtcaaccatcttggcactttcttctatattattttatctgtaattatttctgtatgtttctctaaaatacaagtgttttttaaaaacwtaaaatatcctattattatacttgaaacactaaaaataacttctaaatattaacaaatatccaatcaaggttcttatttatcttattttgttatattttaaaatgattttttagtttatagccaaatcagatcaatcaatttgattgttgat

SEQ ID NO: 99935 - DNA, 648 bp, Homo sapiens
gacagtacattcaaagattgaaggaccataacccacacagatgagaaagaaccagtgcaagaactctggcaactcaaaaagccagcgtcttcttacctccaaatgatcacactagtttcccagcaatggttcttaaccagactgaaatggctgaactgacagaaatagaaatcagaaaacrgatgggaatgaagatcattgagacacaggaaaaagttgaaaaccaatccaaggattctaaggaatataattaaataatacaagagatgaaaaaggaaattgccattttgtaggaaccaaactgatatgacagagctgaaaaactcagttaaagagtttcaaaataaaatctcaaatgctaacagaagaattgatgaagctgaggaaaaaaaatctcagagcttaaaaaccagatctccaaagtaactcactcagacaaaaataaagaaaaaacaatatagaagaataacaaagccttccagaaacatgagattacgaaaggagaccaaatctacaaactcataggtgtccctgaaagaggagaggaaacaagcaacttggaaaacatatttgaggatattgtgcatgatatattctccaacctcattagagatgccaacattcaactacaggaaaagcagaaaatcc

SEQ ID NO: 99936 - DNA, 648 bp, Homo sapiens
gacagtacattcaaagattgaaggaccataacccacacagatgagaaagaaccagtgcaagaactctggcaactcaaaaagccagcgtcttcttacctccaaatgatcacactagtttcccagcaatggttcttaaccagactgaaatggctgaactgacagaaatagaaatcagaaaacagatgggaatgaagatcattgagacacaggaaaaagttgaaaaccaatccaaggattctaaggaatataattaaataatacaagagatgaaaaaggaaattgccattttgtaggaaccaaactgatatgacagagctgaaaaactcagttaaagagtttcaaaataaaatctcaaatgctaacagaagaattgatgaagctgaggaaaaaaaatctcagagcttaaaaaccagatctccaaagtaactcactcagacaaaaataaagaaaaaacaatatagaagaataacaaagccttccagaaacatgagattacgaaaggagaccaaatctacaaactcataggtgtccctgaaagaggagaggaaacaagcaacttggaaracatatttgaggatattgtgcatgatatattctccaacctcattagagatgccaacattcaactacaggaaaagcagaaaatcc

SEQ ID NO: 99937 - DNA, 605 bp, Homo sapiens
ctttttcctgctgcagagtttcctgaatatatatttgtcctcagtatttctgtcttatgtcatatgactaatactctctacagagactgcttcttttctgaacaaatgtttaatttataacatatctctgagaaaagctactcatctttgtatttaattttcctcatatcagttagaatctgaggcacattatgttatttccacaggctgtatatgccaagcgrgatgaaaagaaacagcaaaacattaagaggtctcatatctcccttagaaattttttgttccaatacagtctataaagtgatggtagaagcagttgttacatattgttattataatttcaaaaagttgagcaataattacatccaagtctgaaattccacggtaagtctcaagaacccttctcttttttctcaaatcactaacatttctctcttctctcacataaataatttctgcaaccatttttctttacaaagtctcactagacagatatgagtaaagaagaaattgttttctaaattccataccaaactccctgtaaatagaagttacactatcctaccttctcaatgcactagtaaaacatgtattatatgcaaaca

SEQ ID NO: 99938 - DNA, 605 bp, Homo sapiens
ctttttcctgctgcagagtttcctgaatatatatttgtcctcagtatttctgtcttatgtcatatgactaatactctctacagagactgcttcttttctgaacaaatgtttaatttataacatatctctgagaaaagctactcatctttgtatttaattttcctcatatcagttagaatctgaggcacattatgttatttccacaggctgtatatgccaagcgagatgaaaagaaacagcaaaacattaagaggtctcatatctcccttagaaattttttgttccaatacagtctataaagtgatggtagaagcagttgttacatattgttattataatttcaaaaagttgagcaayaattacatccaagtctgaaattccacggtaagtctcaagaacccttctcttttttctcaaatcactaacatttctctcttctctcacataaataatttctgcaaccatttttctttacaaagtctcactagacagatatgagtaaagaagaaattgttttctaaattccataccaaactccctgtaaatagaagttacactatcctaccttctcaatgcactagtaaaacatgtattatatgcaaaca

SEQ ID NO: 99939 - DNA, 605 bp, Homo sapiens
ctttttcctgctgcagagtttcctgaatatatatttgtcctcagtatttctgtcttatgtcatatgactaatactctctacagagactgcttcttttctgaacaaatgtttaatttataacatatctctgagaaaagctactcatctttgtatttaattttcctcatatcagttagaatctgaggcacattatgttatttccacaggctgtatatgccaagcgagatgaaaagaaacagcaaaacattaagaggtctcatatctcccttagaaattttttgttccaatacagtctataaagtgatggtagaagcagttgttacatattgttattataatttcaaaaagttgagcaatarttacatccaagtctgaaattccacggtaagtctcaagaacccttctcttttttctcaaatcactaacatttctctcttctctcacataaataatttctgcaaccatttttctttacaaagtctcactagacagatatgagtaaagaagaaattgttttctaaattccataccaaactccctgtaaatagaagttacactatcctaccttctcaatgcactagtaaaacatgtattatatgcaaaca

SEQ ID NO: 99940 - DNA, 605 bp, Homo sapiens
ctttttcctgctgcagagtttcctgaatatatatttgtcctcagtatttctgtcttatgtcatatgactaatactctctacagagactgcttcttttctgaacaaatgtttaatttataacatatctctgagaaaagctactcatctttgtatttaattttcctcatatcagttagaatctgaggcacattatgttatttccacaggctgtatatgccaagcgagatgaaaagaaacagcaaaacattaagaggtctcatatctcccttagaaattttttgttccaatacagtctataaagtgatggtagaagcagttgttacatattgttattataatttcaaaaagttgagcaataattacatccaagtctgaaattccacggtaagtctcaagaacccttctcttttttctcaaatcactaacatttctctcttctctcacataaataatttctgcaaccatttttytttacaaagtctcactagacagatatgagtaaagaagaaattgttttctaaattccataccaaactccctgtaaatagaagttacactatcctaccttctcaatgcactagtaaaacatgtattatatgcaaaca

SEQ ID NO: 99941 - DNA, 371 bp, Homo sapiens
atgatcacacctcctctccagcaagggcacagaactgggtggaggttgagatgaattgacagaagtaggcttcagaaggtgggtaataacaaactttactgagctaaaggagcatattcaaacccaatgcaaagcatctaagagccttgataagaggtacaggagctgctaactagaataaccagtttagagagaaacataaatgacctgatggagctgaaaaacacagcatgggaactttgtgatgcacmcacacaaatatcaatagccaaattaatcaagtggaagaaagaatatcagaacttgaagacaatcttgctgaaataaagcaggcagacaagattagagaaaaaagaaaaaaaaaagtattg

SEQ ID NO: 99942 - DNA, 628 bp, Homo sapiens
tccttcactgggttaaatgcttcagagggtccacattgtcttccagatgagatccaaactcttcaatgcgtcttacaaggcccttcatcatgtgaccccatttatctctcctgtctcctgcctgctttctggattctgccataggctccacctggaacattctttcttccctacctttctttgggkaactttccctgaggccttatgctggattattgatgccatgctatgcttttcccttgctctgtcttcctccatcctggaatttggaatattgggctgtatttgcttatctgtcatctacatattctccttgaatatcactagtactttcaggtcgctgacacataggaagcaaccagtaaataaatgctttgaatgaattggcctaaaagtcacttctctttatccaaggtcatttgagaataaaggctaacactgacaaatatacaaggaaataaccttcatacttatatctgtggcaaactttgtatatcctacaaactaaaaattcagtaagatataagtaagtaaataaatataagtaatataagtaaataaatatcaatcttatagcaaatttaactaattgattaaactaatgaattaagcccaaaggggattcata

SEQ ID NO: 99943 - DNA, 428 bp, Homo sapiens
tagatttctggggtactgctgtatatgtgggatgttactatacatctgtatcactgattcagccaattattaagtacgagaaacagtgtggcacaggcaaaaaaaaaaaawgtgttgcataaacccgaagtttgagtacaagtcctaactgtggtgttaactgatggaataattccaggacattcttcaattagcctcttggagacagtctcctgatctgtgaaatgaggcttctgaagcctgtcctgcatctcacgcaggggtgcaagtgaagattaaatgaatcaggcttcatggaaaatttctaaaaaatacaaagctcttactaaaaattatgagtttattaacatgttatgcgtgtgtttggttatcttaatcttgctttattatgaaatatgatttctcccacaggcttctgaggatgaatt

SEQ ID NO: 99944 - DNA, 600 bp, Homo sapiens
ggccagaagctctgtgggaataatgaggcacttgcacagggcctgcccccaaggagcttgtgaccctgcctagtggcactggagacaggacatagtaaaaataatgatattttatatctctcacttatcaagaactttcaaatgtaataggtcattgagcatcacaggcaaccctgcaaggtaagtatttttatttccattttccagtccagaaagctgaagcagagcataatttgcccaaggtcacacataaagtaaccccagagccagatgaagaaacagggatttccatgcactttctgctgaggccaagcagcctgctcaggggagagcgtggctgctagcagcaccagactgcatgcaagacatccagagagagttctcgggagtgggaaccagcgcaggtgcaggtcactggagtctagtccrgaggccgagatggcctgtgcatcactcttacctgggttcaacggttggtgctattacttgctacctgtgtgaccctggatgagcagcaaaactcctctgagccctaggctgtttatgtataaagtacaggcaataataaggtttttgtggggattaacaaagatattaata

SEQ ID NO: 99945 - DNA, 591 bp, Homo sapiens
actgtgtgcttggcttctaaccacagataaatcatatgtcactagaaactgtataactataaatgatacagattattgaagtgtctactactaagcctggcacattcaattaaaagtaataaggcagcaaaatgataagattcgagattcacacaacaaagtacaaatgctgatttgaaaccttgtgataacaaactctccaaatcttgatttcatatatattattactatttctactcagctgggatgatttttgctttttagaatgttctattttttctttaaagttcagttttatctctactatctctgtaaaatataacttgtccatttttgctgaaaaatatcttgctcttgtcagatctcgaacagaaactaaagtcagggacagtcactggtttcttctttcttttaaactttgttttatatatatattatatatatatacatgcacatataygtacatatataatacacatacacatgcatacatatataatgagtttatatgtatacaaactcatttagatttataagattttattaactgctacatacatactgtcattttttgaggataaagaagaaata

SEQ ID NO: 99946 - DNA, 490 bp, Homo sapiens
cccaaagagaaactgtaaacaaccccatcattccctccctataaaccacccataacttctatatccttatctctatgaatttgcttattttagatacctcataaacgtggaattatgcagtattcattctttcacgtctggcttatttcacttagcataacatttctaagatttgtacctgttgttgcatgtctcagatattcagaccttttaaaggctgaatgacattccattgtatgcatatgctacattttgctctccctttatctgttgatgaacagttggatggttcccatctttwggctattgtgaataaagttgcaatgaacattggtggaaagtatctctttgagtctgagggcatttttaatttttttttcctgctacgtctatagggcttggaataatgtctggaatgtagtaaataggtagctgtatttttgttctcttttctgtccccctttttttctgttctattgtgtgtgtgtag

SEQ ID NO: 99947 - DNA, 628 bp, Homo sapiens
atctatcttatacatataaatgtgtccatatatatgatacataaatatatatcatacagtccatatatacatatagtatagatatatatatatgatatatgtagtatatatagcatacatacacacacacacacacaaaggtcactctttaggttccttttaaggttcctctctcttttttatttcttagtgagtcgatccagtctagtgattaaaatgccatctagatgataatctctcccaccaccattctaatctcttttccaaaatactctccccmtctcagctttcccctatatacaaatcatgctaactacatctttccagtaaatcagactgagtatcttggaggcaacctttaatcacttcccttttcttatttctcacaaacactaaaatgaatcttatcagtccttccttcaaaatatacacagaagctgaccacttgtaaatccaaaggtacagatgtagttgaaatcaccaccatctctcccctggatgtcaacatcaactctccttaactgtgattgtcaaaaatgaatattttggtttatactcttcacattcatctcctctccacccacctcattctcaaaaccacaacaaaagtgatgcttttaaagtaagt

SEQ ID NO: 99948 - DNA, 588 bp, Homo sapiens
agtgtgataaatgcaattttaaaactgtgatgaagcagagaagctaaatttcatgatagctatctttcttcagggttttgtaaccccagtgcatggaacagtgtcaagaatgtattgaacaatctaaatatctttaattaataatgagtgaayaaattattaagttaataaagaggatgtatatttatcatatgaattaataatttcagtacaacaaaatctgtctaaattgtataacaaaatggttacatagattattcacgatggaaaattcaaaattcatacagaaaaaaagattcaggatatgaatattttcaaaggtcaaaactgacagttacttcttttttgaattcctgggatttttatatggctctgattgtcatgatagggattaatgaatgatgtattcatagttatgatttaattggcatgctgaacaaatatttatgttgcgtttattgcctgattgacataattctaaacactgggaatagagctattaacaagacaaattgtgcctttgtatttatgagattgactttttaatatttacttagggatgacatcttagatttgtacaaataaaca

SEQ ID NO: 99949 - DNA, 579 bp, Homo sapiens
acactaatgatattagattagagttcaccctaattaccttattttaactgaattaacttttctttctttctttttttttttttctgaggcagagtctctctctgttgtccaggctggartgcagtagtgtcatctcagctcactgcaacctctgcctcctgggttaaagtgattctcgtgcctctgccacccaaatagttgagactacgggtgcttgccaccacgccgggccaatttttgtattttcagtagagacggagtttcgtcatgttggccaggtgggtctagaattcctagcctaaagtgatccgcccacctcagcctcccaaagttctgggattataggtatgaaccaccacaactgggctggattagctttttggattacaatttgtttatatccatgagatggaattagctaactaaatttgaaataagatatatttttataattaatttatttttgtaacattaaatattacaatgcaaacagttctctgtaactaactgaactattctttcagcttttgatgagaccacaaatcatttgcttcctcttcctctacctgaacagaaaga

SEQ ID NO: 99950 - DNA, 579 bp, Homo sapiens
acactaatgatattagattagagttcaccctaattaccttattttaactgaattaacttttctttctttctttttttttttttctgaggcagagtctctctctgttgtccaggctggaatgcagtagtgtcatctcagctcactgcaacctctgcctcctgggttaaagtgattctcgtgcctctgccacccaaatagttgagactacgggtgcttgccaccacgccgggccaatttttgtattttcagtagagacggagtttcgtcatgttggccaggtgggtctwgaattcctagcctaaagtgatccgcccacctcagcctcccaaagttctgggattataggtatgaaccaccacaactgggctggattagctttttggattacaatttgtttatatccatgagatggaattagctaactaaatttgaaataagatatatttttataattaatttatttttgtaacattaaatattacaatgcaaacagttctctgtaactaactgaactattctttcagcttttgatgagaccacaaatcatttgcttcctcttcctctacctgaacagaaaga

SEQ ID NO: 99951 - DNA, 554 bp, Homo sapiens
aaaaccacatttgtgtggaatgttcctacatttccttgcagtgagttatctgcttttgcaatttggtcaccagctctcccactgccacgatggcctctgcacaaacaagcctcaccctatgaaaaagtgatcaaaaataaacscacagggaagttgttggaagtagaaccatattataccaaaaatggaaaaatgattttccttgaaaaccacataggaaaagcttcataaatcataaaggactagcaatacacctcctggatttaaatatcagtgcaattacattttgttatatgcaactttgctactcagttattattttacacactccaacagaataatttcccgtggagaaaactgagtcattgaaatgttctgctttcccagagtgccaaggaacacatccgtgcatgttttcagacatattccacaggagccagttgggggagcttcatgttggacccagcagcagggcaagcaatgtgtggcatgtgtcttggtgcacgcagtgggtggggatgggcccaggaggccggcaaggacgagttcttgag

SEQ ID NO: 99952 - DNA, 613 bp, Homo sapiens
gaagaaaataactaacattaataactttggaaattactatttttcctttattatataaagctaaagataaaaaactttacaaaaataccattgttagtaaatctttttttcccccacagggtataggttagaaattctgtaactactttatgtgcatattaggtttgaacaaataagtatatatattgtagatggtgagaaccaggcttatcacagtgaggggaaatagatacaataaagaaatggggaagactaaaataaaatgtgtggtttttgattatgaacttatgattttaaatatttatacaggtagataaaatgtagatatatatatattacatctacrtatatgtgtacatatataatatgtatacatatatttcatagctctgtctgctaagaggagaagaaattacaactcaatagcactgagcacacagagtctagatcttgctttctaaacaccatttccaataaaaagtaccatggcttcttggaaaagtgattgatttcagaagtgaagcagagacatcatgtgagcctggaacaccttacagaacaagaaaataaggaagagcttgaaaaatggtggaaacaaaaggggcacagaact

SEQ ID NO: 99953 - DNA, 601 bp, Homo sapiens
gagtgggccttaaaggatgagtggagctgaatcaagggggaacaggggtgtgttaatttcctaggactgctgtaacaaagtaccacagactaaccggcctaacataacagaagtttatcctctcgccttcaggaggctcaaatctagtatcctggtgtcagcagggcggtgctgcctctgaaacttgcaggggtgaatccttccttgcatcaccccagtctctgcctctgtcctcatatgaccatcttcttgtgtatctctgggtcatcacgtggacttccctcttacaaggacaccagtcatattggattggggccaccttccctgggataacttcaccttaacttacctaattgcagctttagtgactctatctccacataagctcacattctggggtactggggattaggacttcaacctatgttttggtggaaacaattcaatccataacaagtagcaaggattttccacatggctctgtttccagtctgcctcaccctctgccctcaccctgggtaaattcagtgcccaaggacctcacgtctccttcagcaacccattcacrcagcctcactacagaatgaatatcttatcccgc

SEQ ID NO: 99954 - DNA, 280 bp, Homo sapiens
tatattgataatttagtagtgatttaaaataaataaatgatttattcaggttttttaaaggataaaaattataagaagctaatgaacctcttatrtaccccaaggcttcagtgttcatgaactctagcagatttttagacaaagttaacaccaggacacattaaaaatatgaaaaattataaataaaaaggcatgcttgcttgaaaacatgtcatgtttatttaatgtcagtgctttgttacaaaatttcacaaaacgtattttctcagccaatgtaaat

SEQ ID NO: 99955 - DNA, 656 bp, Homo sapiens
tcctattcccaaaacccaaaatcttaaattgtccaatattctaaactttttaaaaagccaacatgataccacacttggaatatttcacacctgaccttatatgacttgtcacagtccaaacatggtcaaaacttggtttcatgcacgaaatttaagaaaatgtatgtatttacctcaggctatgtgtacacagtatacatgaaacataagtgaattttatattcagactgagtctcattccccagatatcttattataaatatgcaaataatccacaaataaaaacaaaaacaaaatccaaaacacttctggtttccagcatctaggataaaaaatactcaacctgtattttcattctttcaataagttctgtgaaaagcaataagaaaatttctatttaaaaaaaaatattgtgtgagtctaaaactcttccaaaaattactctttaatgtgtttgtcttttccagtttattgtaaggtgtctttgagccaagrgaaaacttctcctttgccccctgaagtttgtttctttgcaaatcagctaacaaaagtcaaattgtaactggatccaggttggtttgctcaccattcaaatgtcaaacacaagaggtgagggctggtgtgaagggaaaagttggttcaatcagagagctagc

SEQ ID NO: 99956 - DNA, 469 bp, Homo sapiens
gagggtcttgcttataagtcatccaggttcttgggattttgaacaaagaattggacagaatgcacaaacaaagcaatgaaagaatgaagcaacagaagcatacatagatttattgaaatgaaagtacactccacagaaygagagcaggcggaggcaaagggctcaggaaggctggttacagaattatctggggtttaaatatcctgtagatgtttccgattggttatttggttacaccctatgtaaatgaagtagtggcccacgatcagtttgattggttgaagaaggagaccaatcagaggctgaagtttcaaagttacacccctatgcaaatgaagactaggcctgcaaccagtctgattggttgtgagaggggaccaattggaggtactttccatttttcatctgtggggcagaaggtgggggtagtgattgcaaagggatctttttgttatttggacatggaaag

SEQ ID NO: 99957 - DNA, 566 bp, Homo sapiens
tttatctatggaagtcttcatttctcctatactcttgaaggataatttcactggatacaaaatcctaggtcttttaagcattttaaatattttattctattctcttcttgctttcatggctgacaagaagtctgattgatccttatacttgttcctgtatagttcatgcattttataccctctggctctttccaggattttttctttgtctttggttttctgcagtttgaatataatacacctaactgtagattttgttggtatttatcctgattagtattctgtgaacttcctggatttatgggtgctttttttgtcgttaattttagaaagttttaagccattattacttcaaacatttctctggatttattctttcttctctttctggtattctcatgatgcgtatcttaaaccttttaaatgaccccatcattcttcaatattctatcctatttttttytcctttctctttcgtttccttttcaggttgggaatttttgttgtgtctaacattttcttttgatattttcctaaaagtttcataacttctcttatattactca

SEQ ID NO: 99958 - DNA, 321 bp, Homo sapiens
ctatgctctgaatgaaattcttggggagtgtaataagccrcatagggtaagggatgaccccaataacagggtgatattaggaagagcaaagcagagaagaggcagggacctggttacaggaactggggtagaaggagacatggacaccatggggatgatcctgttgctaacctatgaagtaacctgcttgaggatcctatgagttttcccgaattggatctaagatctgagaaaaaaagatgtgtaaggagaagaaggtgagagtcactcttggaaagcaggagtggcaaaagaaacctaacccaagctgcagtgcttagt

SEQ ID NO: 99959 - DNA, 321 bp, Homo sapiens
ctatgctctgaatgaaattcttggggagtgtaataagccgcatagggtaagggatgaccccaataacagggtgatattaggaagagcaaagcagagaagaggcagggacctggttacaggaactggggtagaaggagacatggacaccatggggatgatcctgttgctaacctatgaagtaayctgcttgaggatcctatgagttttcccgaattggatctaagatctgagaaaaaaagatgtgtaaggagaagaaggtgagagtcactcttggaaagcaggagtggcaaaagaaacctaacccaagctgcagtgcttagt

SEQ ID NO: 99960 - DNA, 321 bp, Homo sapiens
ctatgctctgaatgaaattcttggggagtgtaataagccgcatagggtaagggatgaccccaataacagggtgatattaggaagagcaaagcagagaagaggcagggacctggttacaggaactggggtagaaggagacatggacaccatggggatgatcctgttgctaacctatgaagtaacctgcttgrggatcctatgagttttcccgaattggatctaagatctgagaaaaaaagatgtgtaaggagaagaaggtgagagtcactcttggaaagcaggagtggcaaaagaaacctaacccaagctgcagtgcttagt

SEQ ID NO: 99961 - DNA, 581 bp, Homo sapiens
ttatctttctagacacttaaatttttattaatttatgttattttattttttatgttattcagcctcttttgcctaatttgttgatctgaaagttgaagatattaatgtctcttagagtggtaatttttgttagaccctgaaacaaataaaacaatgctttgaatcttaaatactgtgtgcttattgcctcaaaagaagacatatttcatcttgcagtaaatccttttttgtcttcatttctgactttttcttccagagatycaagatatttctgtaaatccattagacactcatagtttataagcataatggcaatcacagtcaatggagtggagaaactcaactttgttgtgttctgaattcgaagaaaatatttatcatagtctctgttacagtccttaaccgtagtccgtaaatgaataaactacccctccagaaacggaaaacatggatattattatcttaatgattaacctctcctttaattttaaacacagccatgaaacaagtttattattgtcaatggtttgaaccccagtttaaagactgtttacattcttttatatgaggcagaaacaccc

SEQ ID NO: 99962 - DNA, 581 bp, Homo sapiens
ttatctttctagacacttaaatttttattaatttatgttattttattttttatgttattcagcctcttttgcctaatttgttgatctgaaagttgaagatattaatgtctcttagagtggtaatttttgttagaccctgaaacaaataaaacaatgctttgaatcttaaatactgtgtgcttattgcctcaaaagaagacatatttcatcttgcagtaaatccttttttgtcttcatttctgactttttcttccagagattcaagatatttctgtaaatccattagacrctcatagtttataagcataatggcaatcacagtcaatggagtggagaaactcaactttgttgtgttctgaattcgaagaaaatatttatcatagtctctgttacagtccttaaccgtagtccgtaaatgaataaactacccctccagaaacggaaaacatggatattattatcttaatgattaacctctcctttaattttaaacacagccatgaaacaagtttattattgtcaatggtttgaaccccagtttaaagactgtttacattcttttatatgaggcagaaacaccc

SEQ ID NO: 99963 - DNA, 627 bp, Homo sapiens
ttatgggcatgtaaagggagaggctggtttccatctgtgatggacagaatagtaacccatcaagatgtgcatgttcacatccccagaagctgagaatatattatcttacatggcatgtgaatatattatttacatgtaaagataatatattgtcttacataactttgaagtttgtagacatgattaaattaaggttcttgaaatggaaaagattactcaggattatctgagtaagcctgatgcaattacaaaaggctttttaggagggtcagggtcagagagacaaagacgacccactgctggctttgctcrgagaggaaaggaccacaagccaagggatgcaggaggcttctagaataagcaaaagaaaggaaatggattttcacttagagtgtctagaaggagtgtagtcctgccaacatctggattttaacccagtgagatttctgacccacagaactcacaggtgataaatttgcatggttctaagccagtccatttgtggtaacctgctgcagtagcaatagaaaaccattagatctcatgagaacttactcgctatcaaaagaacatggtgggggaaactgcccccacgattgaattatctttacctggtccctcccactt

SEQ ID NO: 99964 - DNA, 433 bp, Homo sapiens
aatagtatatataatatattttatatatagtgtgtgtatatatatttatctyaattcagagccatgggacattctgttttatgatttctgactctgtaagatttttttttttaaatagacaaacggaattggtatttaaaggtaatggaagatgtattaggttcccatcgcagctgtgacacaggaacataaatttggtagattaaaacaacacaaattcactacctaaggatctgcaggttaaaagttcaaaataggcttcactgcaataaaatcaacatatcactagggtttcattcctgtcttgaggttttagaggaaactatgtttccttgccttttctagtttctaaagactgaatgcatttctgagctcatgctcccatttcaccttcaagcccacaactgcctgtctttctcgctttacattgctc

SEQ ID NO: 99965 - DNA, 610 bp, Homo sapiens
tactgtctataaccaaggaatttatagagtctttgtcaatgaaagcactcagaaaagccaaatgaccctactaaacacacattatagtcacatcctcaagggaaaaaatagtcccatctaaacagcagtaaatgcaaaaataagaagtgatagtttcttcagataagaaactaatgcacaattcttggcatattaaaaaaactcaggtgttatgatacccccaaaggattgtactaactctctagcaatggatcctaaccaaaatgaaaatgtaaaaatgccagataaataatttaaaatattgattttaaagaagctcagtgagatccaagagaaatcataaaacctgtacaaagaaatcagaaaataaattcaggatatgaatgagaaatttwtcaaagagatatttttgagagaaaaatcaaataaaacttctgcaagtgaaaaattcattgaagttacaaaatatagctgaaagtttcaacaacagattagacaaagaagaggaaagaatctcagaacttgaaggtcttttgaattaatttagtctgacaaaaataaacaggattttaagaaaatgaacaaagacttcaaaaggcgtgggactaca

SEQ ID NO: 99966 - DNA, 610 bp, Homo sapiens
tactgtctataaccaaggaatttatagagtctttgtcaatgaaagcactcagaaaagccaaatgaccctactaaacacacattatagtcacatcctcaagggaaaaaatagtcccatctaaacagcagtaaatgcaaaaataagaagtgatagtttcttcagataagaaactaatgcacaattcttggcatattaaaaaaactcaggtgttatgatacccccaaaggattgtactaactctctagcaatggatcctaaccaaaatgaaaatgtaaaaatgccagataaataatttaaaatattgattttaaagaagctcagtgagatccaagagaaatcataaaacctgtacaaagaaatcagaaaataaattcaggatatgaatgagaaatttatcaaagagatatttttgagagaaaaatcaaataaaacttctgcaagtgaaaaattcattgaagttacaaaatatagctgaaagtttcaacaacagattagacaaagaagaggaaagaatctcagaacttgaargtcttttgaattaatttagtctgacaaaaataaacaggattttaagaaaatgaacaaagacttcaaaaggcgtgggactaca

SEQ ID NO: 99967 - DNA, 548 bp, Homo sapiens
atgataaaggggaggccagtttcagtagcatagtcacctgctcacagatgtcttctgcaagccatgcaaatatctgcagaatgagcctctcaggcaagggggcaggaaagaattaagtccttgggctggcagtgagttcaaaaacagcaagaatgctagggtaactgggcagaggtcagaaaggggtcaagggccagaacatagtgtgccttgtgggctgatgcaggattttatattttgttataaggacaatagcaagtcactggagagttttgagcaagtgaaaaacagtccaatctatcatgctggctgctgtataaagagtagactayaggagggccactgtggaagaggggaactgtcaggaggccactacaatcatcaaggtaagagctgtggtggcttgaatgaaggtggaggtggtgagaaatggttgagttttaaatctgttgtgcaggcatagccaaataaaatttcctgagggcttgaatattggtatgagaaaaaatgagtcattagggatggctgctaggtttttagcctgaata

SEQ ID NO: 99968 - DNA, 426 bp, Homo sapiens
gaattcactaatgattctaatttggaaagtatcttgagcagctcgggcaacagaaataaaatgcaaatgacctttgagacatgaggtatgyaggctgggaataataactttgtgagcatttgaaaaaggcaaggcagtgaatacacctggggaaagagaatccaaacacagagctgttctgggaagcagatgccagatctcagtgatgccaaagtaggcccaggaggcacagtggttggcaaattaaattcaggccagccatgcagtctggcaggatgaaagagaagtccaggttgaggctgcctgtgcagaagggcacggaataacagttcctctgtggacagttgtagctgagcagcacctggcaccacacgttgtgttcccaccacttcattactagggaagctcaggcaatttggaagtgca

SEQ ID NO: 99969 - DNA, 563 bp, Homo sapiens
caccatgtatttatgtgttgttttttgttgcttcttgttagtagataaaattaaaattatactctcagtattattctaccacttgagtttttttaagatgatacttctaaaacttttttattgacacattttataattacacatatttatggtgtacaatttgatattttgatacacatatgttgtataatgatcaaatcaaggtgtttagtgtatccatcacttcacagtggtggaacattcaaaagcttctcttctagatatttggtaatacacaataccatcctattaacaattgtcacctactgtgcaatagaacaccaggacttattcctcctgtctaattgtaactttgtacccgttgaccagcctctctctatcctcccttcttgctcctctccctaatctctggtaaccactgttttactctctgcttctattatatcaactctttattyatatacacacaaacacacacactttttttcttttcgataacagccattctaaatggagcaaggtgatgatatcgcattgtggttttgatttgcatttccctgatt

SEQ ID NO: 99970 - DNA, 580 bp, Homo sapiens
ctttttaattaatggaaatgaccattgctgatatcccaagtgatctgtgtgcaggcatcacctgttgaagatgaagatgaaggctgattggtgttttcttacatttccaccagtcagaagtgaataataattgttatatgaatattgtatgctgaaattcatgtggttgaagaacaaacctccgcagagccagaggattttctttcaccttcactrcccacaagtctctgtcattcttggctgcacgtgtttccttgcttgatttatctaattattttcttccttctttagtcgaccaagtatttagataccagatggtagggagatcagaagcaggaaccttttctgtctcacatggatgttgtagggattaatgaactaaacatattctaaaatgattttaaaaggtgaagtgctatataagtgtcaagcatgattaactagcagccaagttattaggcacctgaatattatgcatcttttctgaatttcagaaaaatggatgtacatattaattttcaacagcactgttatttgaatgatattcatacactcaaataaaagtttagcccaatcccaa

SEQ ID NO: 99971 - DNA, 613 bp, Homo sapiens
tggctcatgcatgtaatcccagcactttgggaagccgaggtgggcagaccatttgatcttaggagatgaagtccagcctaggcaacatggcaaagccctgtctttacaaaaaatacaaaaattaattgggcatggtggcacatggcctgtagttccagctactttggaagctgaggcaagaggatcacttcagcccaggagtttgaggctacagtgaggtgacatcacgccactgcactccagcctgggacaacagagtaagactctgtttcaagaaaaaaaaaaaagataaagctacaagtcaatagtatggtactayggcataaaatgtaaagaattgctatgattcatacaaatgtagcctcaattttcatgttaagatctgagactagagctcaggaataagatagagcaagggtacattgatatccaatgagggttaatcttagatggttttatttatatcctgcttcaccctacaatgaaagtaaagtggctgtcaaccaaagctgccatttatatagtgctgtgttcattggcatgtactcatgccacaaacattaaaggcacgtgctagatgctggggataaaatgtcccttgtcctgcagagga

SEQ ID NO: 99972 - DNA, 534 bp, Homo sapiens
tttccatacccactcaatatgttcttaatgcatgagtattgtaggcattgagggctgagtcatagcagactccagacgatgcaggtgttcatgtagcccctggaaggactttggttgttgcttttagggagatagggagatctgaaggttttaagcaggagagaagcagaatatcacttccactttaagaggaccgctctggctgccgctatgttgaaaccgaaatgtatatgttctagagaaggaagagaaagaccagttaggataaagtttttcacattctactgtgcacacaaatcacagagaatcttgttaaataaaggttctattttcataggcctaagatgaggactgattctgcatttctaataagctcccaggtaatgcccaggcccctgctatacataccaaaccttgtttggcaaggacttaagaaactattacagacatccaaataatasctgatgtggctcagagtgtcagtgatggaaaactagagggattgttaaaatggcaggatgctggattaatttt

SEQ ID NO: 99973 - DNA, 479 bp, Homo sapiens
aaaactgactgcagctaagggaattatgcccccatgcagataatgctgtggaccaaacagttccgataagcaaamaaaatctctcagacaattatgttcttgtttaaggccgtttgccttggaattcccaaaaggattctggaggattgcaaatttgctggggatgaagaaagaaagtactagctagagtttaatagattattggattaagacaggccagaaacagtcaaacaagaaaagtattatgcaaaaccttctaaggttctaatctcaccttatttctattttgattaatattttcctgggaaagaaaagatgggggtttttgttgttctctgactacaatccagagataacatctttgcctccagttttcatcaagataaagacctggaagacccgagccaaaaggaaggagctggaattttttttaaatctttctttctggtgtttaaggaagttatctgaaaacccactgg

SEQ ID NO: 99974 - DNA, 601 bp, Homo sapiens
ggcttactatagttattgcagacagaaggaaaatctaccaaagcccccatgacaataccaatgagcaatgaactgaaaaatgcaggttaatagtgcaaacattactcaccatttggaactagtttggggtaaaaagkttggaaacccagacaattgtgtggttgcttcccatcttcctgtctacaaccgaggtgaagttaatttccagcaagataaattttaggtaataaaatgactcagagagggtcttgttgcaggcaagcgagagcagaagggtcttcaaggttactcaccaaatggatgaacccggctgcagtcagccacgtgctgataaatatggagagcagattcaccagcttgatggaattactgtgcaagagacaacaagcaaaatccccacgttaccaagggaaggccctgctggggctgccttacagggtaacagcacccgcttagcaggagaggctgccacatctaactcccaaccatttctccattataagggaattctggaaggtggaggaagctgctgggatgaaggtcaggacagagcctagaggaacaaatttaactttggtaaaaattaacttttatttaaaaa

SEQ ID NO: 99975 - DNA, 553 bp, Homo sapiens
caaataaaaaatgtgatgcctatagggaggtacttagtaaactgataaactattaaatgaacataagttcttctcatatatatttatatttcatctgattsaattgacaaagttctttagaatggataaataacatttcagcaaaacaaaaccttgagtttattttataaagaataatttctagaaagtggtaagcccagctacattgctattatctcttatatttaaatctctctatacggagggcagtttaaatctttgaaaatctgtttggtttccttcttaaatttttcctcatttgccatcacagagaacacttttttttttcttttaagatagggtttcactctgtcacacaggctggagtgtaatggtgagatcatagctcactgcagcctcgaattcctgggttgaagtgatcctcctgccttggcctcccaaagtgctgggcttactgctgtgagccactacacctggccaagaacaatttctaatcctattttttttattttaaaacacactgaatagctaaatgccacttaatatggaaacc

SEQ ID NO: 99976 - DNA, 592 bp, Homo sapiens
cacatagtgtttattaatcaaattatacacgtaatttctgaaaaaatatatagctccttccagtttttctaagtagtgtcaaatatggttataaaattatatctacttttattatgaaatacactttttaaattgtatatgtatattatttaattatattgggtttaatttactctttctaatttcctaaggtgaaagcttatataatttattttatgcctattttattttattacataagcatttaaggacaatcacatctaatttcattcagtgccactttaaatgcatctcaaaatcttaattcatgttgagttgttattatctttccattaaaaatattttctgtttttctcatgctttcttctttgacccatggatcatttgatttggaggcaggtagcttaatttccaaattttggaasattttaaagattttttaaattgttgatttgattgtttaatttcattgtgtcttaaaaacatacttcatgtaatttctgtcaacttaaaaatgttgaggcatatttcatagcttagcctataaaatattatctcattaagtgtttggatgcacttgtgaagaatgtgc

SEQ ID NO: 99977 - DNA, 639 bp, Homo sapiens
gcaaactcttcctggttgagagtctgcagctggctgcagctttcttttctgtgttgggtgacccatgggaagaacaacyactatagattttctgtaaggagcaagcagaagcatgaatagccttccagcaacttctgggaaaggactagccagagctctctgacttgtcactagcagtcagattggaaccagttgatttattaggatgaggagagtcagaataagaagttgggggagagggattaggaagatttggaagagtcaagacctcattcaagaggtctcatagaaaagaattgattgtttgagctctaaaaccagctgagggtttaatgcagatgttaggaaggggattagcatccataagcatcttctaatggcaatatccacatgcggtaggtgtagccatcaccttcttctttttaattgatgaaggaacaaagattcagagatagtaagccttttttatattgtcaaacactattaagtagtggagccagctttagacccacctttgttccaaagcctgtatcctctccacttcactaggacatctctctgttacattagggcagctaaggaagctcatgaccagctcatatttaccatttactgtctttactcttcactgttttaaga

SEQ ID NO: 99978 - DNA, 543 bp, Homo sapiens
tgagcatccatgtattctggtatcctgataaggggcgtaatcctagaatcaatctcctctataccgagggacaactgtgtttgcttatttgttgattccatgctcctcctgttagaatgaagttccatgagaccaagtacctgtgtcatttattgccttatccttggaatttagatcaccacctggcacttagatcacttagtatcctaagtgggctcagtttgttgaacacattccacgtcatgaattttatgacaatgcatgaatattagaaaatttttctctcatacattttgcctaagaaatatgtttataaattatgtttaaaataaaaggccttggcgcttggtagcataagcttcagctatctcaaatakttaggtatgaagaaagcttcattgcccctgcaacaggagataaataaagtctctctatagttttctttctcatacacttaacacaaaagcttgtacaaattcaacttaaatacatcttgatgatgatagtagtaatcccaccatgattttaggaatttatgtcaaa

SEQ ID NO: 99979 - DNA, 543 bp, Homo sapiens
tgagcatccatgtattctggtatcctgataaggggcgtaatcctagaatcaatctcctctataccgagggacaactgtgtttgcttatttgttgattccatgctcctcctgttagaatgaagttccatgagaccaagtacctgtgtcatttattgccttatccttggaatttagatcaccacctggcacttagatcacttagtatcctaagtgggctcagtttgttgaacacattccacgtcatgaattttatgacaatgcatgaatattagaaaatttttctctcatacattttgcctaagaaatatgtttataaattatgtttaaaataaaaggccttggcgcttggtagcataagcttcagctatctcaaatatttaggtatgaagaaagctycattgcccctgcaacaggagataaataaagtctctctatagttttctttctcatacacttaacacaaaagcttgtacaaattcaacttaaatacatcttgatgatgatagtagtaatcccaccatgattttaggaatttatgtcaaa

SEQ ID NO: 99980 - DNA, 600 bp, Homo sapiens
tgtaatttatgtctactccagtcttattcaaaaggatttgaggtggaaaatatagaattcatttgactgggagtgcccacttgagctcaccaactacagaacatttaatcttcgatattcataaagaggcatattttaataaacatttttctatgaaatctcaccttgttaaaaaggttacagtcataatactagatcttattctactctttggaccctttcccaaaacacagtggcaccttttcaaaaggccagaaaggacatagaaagagcctcttgaagaatgtcaatgtgcaatgccaatgggttccamgcagaaaccacaagaggtaccactctctttgccagccttgtctggaggcagctttttgggcaccttattgatcagtcttgctctttgaaatgagcagactaatgtttgacaggacaaacccatagaaaaagccagaagctcttctccctgtcgataaatttaaataactccaaagctaaaatgattccagttgtttgatgcaaatacgcattttattttggagtcacttgaaaatatgtgccagctgaactagcttagctcttgtttaaagtccaccaggtctgttg

SEQ ID NO: 99981 - DNA, 630 bp, Homo sapiens
ccactcctctttccccacttcccctggagctcagaatgttaagactctacatgaagctgattcaggtcccccagatttgcactgatattgctggtagactcctctccaatgaycaggtttcaagaactttgattgggagtttcttacaaaaagtagttgtcagttatgctcccatttcaaatggcggcagttgacagagtgggccagaaagaggaaggatctggacaatatctagtttgaaaaaagtataagggatcacttcttcacaagcctactatgagcaggcactttgcatatattatctgtgtttgaaaattgcaccaggcctgtaaggaaggtgttattattcatacttgatagaagattctacagtgcattaagcataattctctagacccaagagaaagagtggataagagtcagaggcaggagttaaacctacctgcccccaaaggccaggggtctttccatagtgccattcctactacccttgcaatgacacttgtcaagagacctgactcagagaccacatataattgtacagctattaaaggaacacaacaattaattaaatcaaccagcatggtgttcacttgaaagaacagtatacattacacccatgtcccttta

SEQ ID NO: 99982 - DNA, 595 bp, Homo sapiens
aaccactggggaattgcaaatcaaaaccacaaggagagacccctcacaaccatgagctctgggcaggtaggaagacgcctggtggggagttgccggctccatgctgtccccagaattcctgcaggggctaagcccgaccccgacacctcaccaggagcacagaaacgagtggaaaaggccaaaggccaccccaaagggccagaggggtccagcaaggagtctgggacatggaaccatrctgtgcatccagacacacggggacaacagggggatgaaaggtggcccctaaaatttacatccaccccagagcctatgaacatggcctatttggaaaaagggtctttgcagacgttatgaagttaaggatcttgagatgggaccattttgggttacccagtgggccctaaatccgagaaagactgtccgtatgagagacagacagggggagatttagggcacagaaggaggccccgtgacaacggaggcagaggtcgagtggtgtggccacgagccaaggaacgccaagggtttcgggagccgccagaagctgccagaggcgagaagcaggctccccctcggagcctccggaaagaac

SEQ ID NO: 99983 - DNA, 595 bp, Homo sapiens
aaccactggggaattgcaaatcaaaaccacaaggagagacccctcacaaccatgagctctgggcaggtaggaagacgcctggtggggagttgccggctccatgctgtccccagaattcctgcaggggctaagcccgaccccgacacctcaccaggagcacagaaacgagtggaaaaggccaaaggccaccccaaagggccagaggggtccagcaaggagtctgggacatggaaccatgctgtgcatccagacacacggggacaacagggggatgaaaggyggcccctaaaatttacatccaccccagagcctatgaacatggcctatttggaaaaagggtctttgcagacgttatgaagttaaggatcttgagatgggaccattttgggttacccagtgggccctaaatccgagaaagactgtccgtatgagagacagacagggggagatttagggcacagaaggaggccccgtgacaacggaggcagaggtcgagtggtgtggccacgagccaaggaacgccaagggtttcgggagccgccagaagctgccagaggcgagaagcaggctccccctcggagcctccggaaagaac

SEQ ID NO: 99984 - DNA, 408 bp, Homo sapiens
aggctgggaaagcaggatgtctcaggaaggtgagcagcttcaatggagcaragcaagcccagcatggaaccggacatttctacaatcctgagcaggaataatatagcctgttaaagtgaaatttttggagaaaggttgcatggaagattccggttttcaagggctggccacattttttttttctccaattgacctttcctaatgagtccctaagatgaaagagggagataagaagactttctttgtgaccattttctaaaggtgttgaaaataaggcactgattagaagaaataatagcctggttaaaaatttactagtctcttcttagataaattgggacctctagtcgagtagctatatagttctgcctaaagacctctctgcctttctaatggaagatgctactt

SEQ ID NO: 99985 - DNA, 408 bp, Homo sapiens
aggctgggaaagcaggatgtctcaggaaggtgagcagcttcaatggagcaaagcaagcccagcatggaaccggacatttctacaatcctgagcaggaataatatagcctgttaaagtgaaatttttggagaaaggttgcatggaagattcyggttttcaagggctggccacattttttttttctccaattgacctttcctaatgagtccctaagatgaaagagggagataagaagactttctttgtgaccattttctaaaggtgttgaaaataaggcactgattagaagaaataatagcctggttaaaaatttactagtctcttcttagataaattgggacctctagtcgagtagctatatagttctgcctaaagacctctctgcctttctaatggaagatgctactt

SEQ ID NO: 99986 - DNA, 408 bp, Homo sapiens
aggctgggaaagcaggatgtctcaggaaggtgagcagcttcaatggagcaaagcaagcccagcatggaaccggacatttctacaatcctgagcaggaataatatagcctgttaaagtgaaatttttggagaaaggttgcatggaagattccggttttcaagggctggccacattttttttttctccaattgacctttcctaatgagtccctaagatgaaagagggagataagaagactttctttgtgaccattttctaaaggtgttgaaaataaggcactgattagaagaaataatrgcctggttaaaaatttactagtctcttcttagataaattgggacctctagtcgagtagctatatagttctgcctaaagacctctctgcctttctaatggaagatgctactt

SEQ ID NO: 99987 - DNA, 512 bp, Homo sapiens
taaacaaaaacagatactttagacgacctgctttgaaaatataaagaggaatactttaaaagtattgtatcagttgtttacgtgcaaatcatgtgtcatgatactagtttaatctcagttctaaaatattttcacataaattcagttaaaaattctgctctgtgtagtgtatatgaagaaatactttccgcaaaatttcctaactaagatgtctataaaattctttggtttctaaggaacgctaaaactatttaactaacaaagcacaagatccaaagaacttccaacaattctccacctgaaaaggaactcaaaaatgttttacttttcaagagtcaccatgaaatctacatttcagaagaataaaatgacacgaagtgcatgcttcttatcattacagacattctatccactgttctcttrttctttctcttctgtgatatttacagggagagagaggaggagaaagagaggtccctccgaaaagcagaagctaccattattgggctact

SEQ ID NO: 99988 - DNA, 566 bp, Homo sapiens
tgccattttcggaggagaaattcaagccagctgcagaaatttgcataagtgacaatgagccgaatgttaatccccaagacaatggggaaaatgtctccaggacatgtcagaggtcttcacagctgccactcccatcataagcctggaggcctaggaggaaaaagtggtttcgtgagccaggtccatggttcctatgctgtgtgcagcctagggactcggcgccctgcattccagctgccccagccatggctgaaaggggccaacgtagaacttgggacatggcttcagaaggtgcaaacctcaagccttggcagcttccacatggtgttgagcctgccagtgcaccgaagtcaagaattgaggtttgggaacctccatctagatttcggagaatgtatggaaacgcctggatgtctaggcagaagtttgctgtaggggcraggctctcatggagaacgtctgctagggcagcaaggaagagaaatgtggggttggagcctgcatagggagtctctactgcggcactgcctagtggagctgtgagaagagggccaccatcctccaga

SEQ ID NO: 99989 - DNA, 537 bp, Homo sapiens
tatagaattccagaacacttaacctactttccctccaccatgtttttgataattacctctagtccttttttgcaggtttcatctttactattttttaaatgtcagaggacgattaggctcacgactttgactgctcatctttcttatctttgctttcttactgatttttgtgtcattaatttcctgatatttcacattacacttaaayactggacactacacccagcactccctgacttatccacatggatgtcagttaggaatctcaaaattaatatgtctatatggagccactgaaactccccaaatttgctcttccccattctgtttaatggcaactcccattttatagtttctcagctcaatattcttggtgtccccttttaattctgtctctgtagctctgtcactctctttctgtatctgattctctccctctctctcctctctctcttgctcactgtcactcttgctctctctccctgcttcacacacacacaaacacacacagacagacacacgcacacacacacacac

SEQ ID NO: 99990 - DNA, 363 bp, Homo sapiens
atcaggcctcaggtgagtaaccagtccccaggtggacattagcccgcaggtcaaccacagtccccaggttgatacctggtccccaggtggctacccaatctgcagggtaacattaggcccctgtaggatcmcaggctgcaagtggattcctaggtctctggtgaacatcaggtgcaggtgtccaagcaggccctgggtggacataactgtgtacaggtaaggagttgacctgtggggagggtgagcagtcagcagcccactggggtcctgagaaggttttctggaaggaggaggccgaggggatggaaacttaaagaagcgacctcacttccttggcaacagaccctaacagaacttagaatt

SEQ ID NO: 99991 - DNA, 604 bp, Homo sapiens
atttcccagtcacataatagaacaagttgttaaggtggcatagctttacaggggaggtcagtgcttgggtatcttctatttttcttttatccagtcactatggcatggcctttgtggcccaaaagagctcatcaccacatctgcatgttagctagggaaaaggggaaaatactcccttcactgacacacagcagtcaccaaagctggtcacgtggctattgagaaggtgcaagggcagctgggaaaactgcartgcattctgggtattggtgagaaggcagccactctcatctactctgatattgagaattacatgtgattgcttttaattttcatgttaaacttattatgtgagttggaacattaaagaaaaaatacacaaacaaataaactagagaatattttccactccattcatgtgaccgccagtctttgatggagttggagcctgacagagatgagaggcagagctcacaggatagaaagatttgaatttgactttacttttaaatgctttcttaataactgagtccaaaagttaagttaaaaaaaaaaacttgtttaattcttccctctgtctctaggtagccctgcattgacatta

SEQ ID NO: 99992 - DNA, 592 bp, Homo sapiens
agccaagtatcctatctttcatgtggcaccaagtgacattttgtagaaggcacaatgctaactattcattctgcaagcctcaaaaagataggcatgaactacatgccagaatggaaaaagcataagctttgaaatctgacgctggcttcaaacaccatctctaccaccactatctctctgtgaccttgagcgaatgacttatctcccctcagagctctgtcatctgaaaaatgggcrtaacagacttacctcaaaggggatgtgaaagttaaagagaattttattgtaaagaacatagcatataacctggaacattaatagacactaaagaactgtaagtttttttctgcctctccataaaatgcgattagtaattcactttgaatttgttgtctattcacaaaacataatgtaaacgatatcagctgtggtgttctttgtgatcacaataaattaaaaattgtttatccatagaataacattaaagcacattcatatactgaaatttatgcagtcattctaaatatttttcaaataatattttatgacaaggaaatttttaccctataatttaagtgaagaaagcagaaaa

SEQ ID NO: 99993 - DNA, 593 bp, Homo sapiens
agaagcatgtgatagagtacatttggggcagagtggagagggttttcttacctgtcagacctgctccatctacacacacattagtcctatatatgttacctgttcactggtttgagttttagaaatctaacacatacattctacatgttcttagaaaggctcacttccctctcagatcaggccccaccatcagagcccatctagctgaccacacacaagcagttggcctagaaagctgctaccaccagccctgtgcctctgtcaccaagcacaggatcttgggcccttaagtaatctcgcagagtaaacactgcctattttctgcaatacagattcttccttatgttcttatgaccgaaaacaagcaattacgattcaccaagattgaatcccagctctamctcttactagttttgggatttgggcaagtaccttgatctaggccgtgtttcctcatcagtaaaatagggataataatagtaactacggcatagcgtggtaagaaggatgaaatgagttcatgtttgtaaagtgattacaacagtgcctggcacacagcaagtgctataaaagtgctataaaagaatataaat

SEQ ID NO: 99994 - DNA, 593 bp, Homo sapiens
agaagcatgtgatagagtacatttggggcagagtggagagggttttcttacctgtcagacctgctccatctacacacacattagtcctatatatgttacctgttcactggtttgagttttagaaatctaacacatacattctacatgttcttagaaaggctcacttccctctcagatcaggccccaccatcagagcccatctagctgaccacacacaagcagttggcctagaaagctgctaccaccagccctgtgcctctgtcaccaagcacaggatcttgggcccttaagtaatctcgcagagtaaacactgcctattttctgcaatacagattcttccttatgttcttatgaccgaaaacaagcaattacgattcaccaagattgaatcccagctctaactcttactagttttgggatttgggcaagtacyttgatctaggccgtgtttcctcatcagtaaaatagggataataatagtaactacggcatagcgtggtaagaaggatgaaatgagttcatgtttgtaaagtgattacaacagtgcctggcacacagcaagtgctataaaagtgctataaaagaatataaat

SEQ ID NO: 99995 - DNA, 551 bp, Homo sapiens
ttgatactgtctctcaggttcctgagtatgtgtcttttagtcaatcttcctttctctctctctctccctcatctttttcttcttcttttttttttttttttttttttgggaagggttaatctgtcacccaggctggagtgcagtggcatgatcatggctcactgcagcttccacctgccaggctcaagcaatcctcccacttcagccttctgagtagctgggagtacaggcatgcaccaccacacccagctaatttttgtttgtttgttttctgtaggaagagtctcaccatgttgccatggctggtctcgaactcctgagctcaagcaggcctcccacctcagtctcccaaagtgctgggatgtgagccaccatgcccagcctgcctattctttagatcagatagtttcttttttttttttgagacggagtctcgctctgtcacccaggctggagtgcagtggcgcgatctcggctcactgcaagctgcrcctcctgggttagatcagatactttctattaatctaaaaattctctctttcctcagtcaa

SEQ ID NO: 99996 - DNA, 589 bp, Homo sapiens
catgagccagttcctcataataaatttctctccctttctctctctctctctgagagatatatagatatatgacagactgcatatagtttctttggagatccttgactaatatactcaggcaaattattyaacctcttggatccacagtttcccctggtagtattatccttagtgaaagggtaataaaaatatctgcttcacagattgataggaagaacaactgaaataaaatttgagaaaattggcacataataatagatattgttgagggagcagagacaggtactgataggtggaccagaaacaaaagaacctaatatggtaaggggttgaatggggaaaccaaaggcccagaagacaaaatttatttatttaagtttgcccactatgatgtatttgtgctgttgtgactacaaaatctaaaatcattggtagagaagatatatccattaatcaattaattgctgccaatcttgcaccccaagggcacagcatctatggtttggtcacagtatattttttaaattcatctagtggcatcataagaaaatttcggggatagctatcaaaatgaaacaacaatcactct

SEQ ID NO: 99997 - DNA, 589 bp, Homo sapiens
catgagccagttcctcataataaatttctctccctttctctctctctctctgagagatatatagatatatgacagactgcatatagtttctttggagatccttgactaatatactcaggcaaattatttaacctcttggatccacagtttcccctggtagtattatccttagtgaaagggtaataaaaatatctgcttcacagattgataggaagaacaactgaaataaaatttgagaaaattggcacataataatagatattgttgagggagcagagacaggtactgataggtggaccagaaacaaaagaacctaatatggtaaggggttgaatggggaaaccaaaggcccagaagacaaaatttatttatttaagkttgcccactatgatgtatttgtgctgttgtgactacaaaatctaaaatcattggtagagaagatatatccattaatcaattaattgctgccaatcttgcaccccaagggcacagcatctatggtttggtcacagtatattttttaaattcatctagtggcatcataagaaaatttcggggatagctatcaaaatgaaacaacaatcactct

SEQ ID NO: 99998 - DNA, 589 bp, Homo sapiens
catgagccagttcctcataataaatttctctccctttctctctctctctctgagagatatatagatatatgacagactgcatatagtttctttggagatccttgactaatatactcaggcaaattatttaacctcttggatccacagtttcccctggtagtattatccttagtgaaagggtaataaaaatatctgcttcacagattgataggaagaacaactgaaataaaatttgagaaaattggcacataataatagatattgttgagggagcagagacaggtactgataggtggaccagaaacaaaagaacctaatatggtaaggggttgaatggggaaaccaaaggcccagaagacaaaatttatttatttaagtttgcccactatgatgtatttgtgctgttgtgactacaaaatctaaaatcattggtagagaagatatatccattaatcaattaattgctgccaatcttgcaccccaagggcacagcatctatggtttggtcacagtatattttttaaattcatctagtggcatcataagaaaatttcrgggatagctatcaaaatgaaacaacaatcactct

SEQ ID NO: 99999 - DNA, 626 bp, Homo sapiens
aaatgcttaagtgtaattaaaattactcaattaaaataaaatcaggccgggcgcagtggctcactcctgtaatcccagcactttgggaggccaaggyggatagatcacttgaggtcaggagctcgagaccagcctggccaacatggtgaaaccccatctcaactgaaaatatgaaaattagccagacatggttgcaggtgcttataatcccagctacctctgaggctgaggcaggagaaacgtttgaaccctaggaggcggaggttgcagtgagctgagatcgcaccactgcactccagcccggatgacagagtgagactgtctaaaaataagtaagtaaataaataaaatttaaaaaatttaaaaacttatgtctgtttaagataaaattaaaactttccaaagaaatttggtcccttaaaaagtaagttctgtcagcagaaagtcagtcttgttaactgtcagaaactgtgcctgacaagtctcccaggagccacgagattcgtgactaagttcactcgtgtgagaatgagaaagatggagtctgcggatctgctcattttgtcaggggctgttttcctgccctggcgtaattgggcacaagaatagattcattttcggccagg

SEQ ID NO: 100000 - DNA, 626 bp, Homo sapiens
aaatgcttaagtgtaattaaaattactcaattaaaataaaatcaggccgggcgcagtggctcactcctgtaatcccagcactttgggaggccaaggtggatagatcacttgaggtcaggagctcgagaccagcctggccaacatggtgaaaccccatctcaactgaaaatatgaaaattagccagacatggttgcaggtgcttataatcccagctacctctgaggctgaggcaggagaaacgtttgaaccctaggaggcggaggttgcagtgagctgagatcgcaccactgcactccagcccggatgacagagtgagactgtctaaaaataagtaagtaaataaataaaatttaaaaaatttaaaaacttatgtctgtttaagataaaattaaaactttccaaagaaatttggtcccttaaaaagtaagttctgtcagcagaaagtcagtcttgttaactgtcagaaactgtgcctgacaagtctcccaggagmcacgagattcgtgactaagttcactcgtgtgagaatgagaaagatggagtctgcggatctgctcattttgtcaggggctgttttcctgccctggcgtaattgggcacaagaatagattcattttcggccagg

SEQ ID NO: 100001 - DNA, 651 bp, Homo sapiens
attagctcaagttgagtcttaggagtatatcacattataccattatctgtgtggatatgaaggaatgtatgtatttaacattttacatgtactgtttactatggtctgcatgaagatttatgcakgtgggttcatagaaagataatgggggcagaggaaatgggggtaaatatgcattacagaatgggtttgttaatttccctgttattacaggatgttttcgcagcttttcaatttggtttccaccagccattcacatgacccagagtaggtctgagatggcccaggaaagaggatgatttaatgccttaaatgattcttgatctgcccattggagaaattattgaaaccacaatagggcttgtcatatggtcttcattctgggcagaaaattttcagtttcagccagtttggtaaaatttagactgaaataggacagttggttttctaagacacagaaaaattaacaaaatcagtaattgatcaaaattgcctgttctgtggggaaaaacttggggacttttaaaattttcactgtttatgtttagaaaaacaatactggtctcttactgacaatgttttatgtgtggtagatgcctagtaaatggtggttggatggatgactggaggagtgagtatattcatgagtta

SEQ ID NO: 100002 - DNA, 618 bp, Homo sapiens
tttcgttgtataggtataattgcatcatattaggcaaaagcatgattttgttgctgccctttattttggaagttaaatatgattgaaaaagctctatgctaatgtcatactgaagagttagactatgctgagtgccaacttgatttagttggaaggaatgttcctcagcatccccttctttatactgttctttgttagaattggccaaaagaagaatttttgtgatatttggtaggtgcaagtgaagcaatggccattattgtttgaagatcatcatggttacatgaggtaaaggagaggcacagggttaccyggaaagttccagcttgtcttcactctcttctgctctgcgtggaggtcttcatcttcactgctggccctgctggccaacagtcactgcaggcccatcaccagacatttggctgcaggagctcagagagaacagctgtctgtagacttctccagtctaccctttctggttccctttcagcaactaaatgtgctgggctactcatattaacaggttggtgatgcctctgatctcccaactccctagttcaactttcagttcccctccatccagcttcccccaacactgtgtaaagtctaattcctata

SEQ ID NO: 100003 - DNA, 618 bp, Homo sapiens
tttcgttgtataggtataattgcatcatattaggcaaaagcatgattttgttgctgccctttattttggaagttaaatatgattgaaaaagctctatgctaatgtcatactgaagagttagactatgctgagtgccaacttgatttagttggaaggaatgttcctcagcatccccttctttatactgttctttgttagaattggccaaaagaagaatttttgtgatatttggtaggtgcaagtgaagcaatggccattattgtttgaagatcatcatggttacatgaggtaaaggagaggcacagggttacctggaaagttccagcttgtcttcactctcttctgctctgcgtggaggtcttcatcttcactgctggccctgctggccaacagtcactgcaggcccatcaccagacatttggctgcaggagctcagagagaacagctgtctgtagacttctccagtcwaccctttctggttccctttcagcaactaaatgtgctgggctactcatattaacaggttggtgatgcctctgatctcccaactccctagttcaactttcagttcccctccatccagcttcccccaacactgtgtaaagtctaattcctata

SEQ ID NO: 100004 - DNA, 546 bp, Homo sapiens
catcccttgcagattgaaaatatggaatattgcttgtcaggcttagatcctacctaacaagtgactgcttcccagaacagcattcaagatggtcttcaactgtcttggaatcatctagaatattttctccccagcccccacaggtttttttatattatcctgaatttccaaccaatgggagggtcctttggtaaacaagtttytttttaaaaatgcaaacagtcccttaaaacttgggcagggtattagtcattaaaacttttggacaaatcgatttaaagcctctttaaaaatgctgtccctgagcattgccaagaggaaggaaaggtagcaaaaacccggaatttggagggtgggctttgaaaactgggggctggccccccaaaaaaaaaaaaaaaaaaaaaacttgggcaggtgcctcagtggtggtcaatgaagccagattgaggatactaccgagtcctggaaagagggggactggggcatgagagcaggatctggaaaacattgtgtatagtggtggaggtgaaggtgactgaagacttt

SEQ ID NO: 100005 - DNA, 557 bp, Homo sapiens
gaacacttgcagaaattaatgcaaaccgagctgatgcagaggaggaagcagctacccgaatacctgcttagttcctgaaaaggggagtgtaactagtggatttgggaaaggttcttaagtagatcctgagactatttgcatgcttctgtctaaatgataattaaaaggaaatttcatggattaaaccatgggtttaatgcagcaaggaaacttacaatgtccctttatatataacatgcatcttgttttggatttgtgtcattttttaatatagctgattgacttcacagaaagcagcttttttgaattctaatacataggtgtatatttggtattagttattttgagttcttttcaacttataacactgtatacagttatttytaaagcacagatgaaataagttctgcatatttttaaataatcacagttccctgttatacagataatgttctcactacccataatatgtaggaacattgtttctccttagccgtagtatgcatacacctatccatgttcattctgacatcctttgttgtctttataattcatgt

SEQ ID NO: 100006 - DNA, 612 bp, Homo sapiens
tcattgaattcgcagtagttagcttcagaataaactgacttttcctcctatcatagcattcttcttttaagcctatgcagtggaatttttaaacttcagagaatgtatttttcagttctagaatccccatttgatacctttttataatttctatttttctattaagaattattaccttttaatttattatatgggaaaattttcctttatatactcaaaaataggtgtaattgtttctttaaaatctgcatctgctaattccaacatgtggattatctcagggtcagtctcttgtcttttttcatgagaaaggtctattggttaagttttcttatttctttgtatggcaagtactttttcattatatttcgagcactgtgaataatatgttatacagactctggattctgttatgttcctttgargagtattaattttgttgttagagcagtcagttaaattggctgaactcagactgaaaactctatattttctatggtgaatggtagctcaaattcctttaccagttcaattcctttaccatagctgagctgctaggagtctgtcccacatgcatgatttgagaccacccagaaatttgaaaagagttta

SEQ ID NO: 100007 - DNA, 456 bp, Homo sapiens
ctacagaagcattgtaagtattttgtcaattaccaaagacagaacaaatcatcttattgatagttatttaagatagtggattcctctttatcaaaaacatggttatatttaacttaatttccttttcattaattgattcatcccttctttgcttaacarattcactgtgttgagtgttgtcatgaaaccaaaaaatgagaaaccctgcccttgaaaaatttaaaatttagttggaaagaggaaacataaactcatgaaactaaataacatgcattattgcttgcatgtgatctagcatcaagtgagtgttaccagtaagagtgttcttgttactcaaagtgtgctccctggatgagcagcatggtaacccctgggagcttttgaaaactcaaaatcttgggtcccactccagacttactgaatcagaatctgcatttttataagagccccagatga

SEQ ID NO: 100008 - DNA, 633 bp, Homo sapiens
aaaagaaacatccaagagtcactgatatttgtagtgttttgtttttttttaagtaaactgagttcatcactggcttggaaataaaaagactggctctaagtctgactcctctaccaagtgctggggatttacagaatggcacttaatttctctggatcagagtttcttgaaaaacttggatgagatgataactcttatcataagacttaggacaaagaaaaggagtccctactttatgtcattcactgataagatgatttatatatatcttcaacagaaaagaaaaaggctaactcattgagatagyctcaactgaaatacttttggtttttcccaagactatgtctaaacttcctaatttctttaaactctattgcatattcaaggctcatttcatacttactaccttcatgaagccttctccaatcctaccaactcagggcatcatcttcttcctttgaagtcccatgacacattgctttcatttccctcatatcatcatgttctgcttagtgtcataatttattatttttctctcttgactctcctacattcaccacaacagagcgataagctcctcattgaactgcttatattttatgtgtaattattgctccttgaaagcaggacaat

SEQ ID NO: 100009 - DNA, 633 bp, Homo sapiens
aaaagaaacatccaagagtcactgatatttgtagtgttttgtttttttttaagtaaactgagttcatcactggcttggaaataaaaagactggctctaagtctgactcctctaccaagtgctggggatttacagaatggcacttaatttctctggatcagagtttcttgaaaaacttggatgagatgataactcttatcataagacttaggacaaagaaaaggagtccctactttatgtcattcactgataagatgatttatatatatcttcaacagaaaagaaaaaggctaactcattgagatagcctcaactgaaatacttttggtttttcccaagactatgtctaaacttcctaatttctttaaactctattkcatattcaaggctcatttcatacttactaccttcatgaagccttctccaatcctaccaactcagggcatcatcttcttcctttgaagtcccatgacacattgctttcatttccctcatatcatcatgttctgcttagtgtcataatttattatttttctctcttgactctcctacattcaccacaacagagcgataagctcctcattgaactgcttatattttatgtgtaattattgctccttgaaagcaggacaat

SEQ ID NO: 100010 - DNA, 649 bp, Homo sapiens
ctggctcatagagcaacagttctttgtaactcttcctggtgattgttttgcattttgcttctcttcaaggacttcccccaaatattagcatggtatcattgggataccaccttaatctttctatattgtgctcttcgtgccttcagtcattccttctactacatccttagctcaccgaaagcagggagcttgttctacctaagtagaatccccggtacattgccttcaaaaatagtaggggatgggtgtttggayggacgaacagactgacagataggcaaacagatgatagacttgcacttttgggatgttgattgcaatcgtagtactatatcattcctgataaacagtgactcgatttgctgatgagtctttccttctgtgtttcgaatttctggcttgaacatttgaccctcatgtctctggaattgcctaaaaacctcctcccatgcttctgaagttcaaactgaaagttgaagcagccaaagcggcgtattgactatccagagaaatggacatagtaccagtactcaaaatatcttgctgacccaagtgctgtttcaaatcatgttcactcaatatgcaaatgatataatgaagttacttttagctaacaaatgaggaggtctaaatgattgataaagccatt

SEQ ID NO: 100011 - DNA, 649 bp, Homo sapiens
ctggctcatagagcaacagttctttgtaactcttcctggtgattgttttgcattttgcttctcttcaaggacttcccccaaatattagcatggtatcattgggataccaccttaatctttctatattgtgctcttcgtgccttcagtcattccttctactacatccttagctcaccgaaagcagggagcttgttctacctaagtagaatccccggtacattgccttcaaaaatagtaggggatgggtgtttggatggacgaacagactgacagataggcaaacagatgatagacttgcacttttgggatgttgattgcaatcrtagtactatatcattcctgataaacagtgactcgatttgctgatgagtctttccttctgtgtttcgaatttctggcttgaacatttgaccctcatgtctctggaattgcctaaaaacctcctcccatgcttctgaagttcaaactgaaagttgaagcagccaaagcggcgtattgactatccagagaaatggacatagtaccagtactcaaaatatcttgctgacccaagtgctgtttcaaatcatgttcactcaatatgcaaatgatataatgaagttacttttagctaacaaatgaggaggtctaaatgattgataaagccatt

SEQ ID NO: 100012 - DNA, 600 bp, Homo sapiens
ttactttcttttcatcagagaaacaagttgtagtttgaaagyttgaaaaaggcattgaaattttgggtgggatttttagaattagtgtgttgtataagccaacaggcaatgtcatctcctttgtaagttcagcggagtactagggggcctgggaccatatggtctcactgttgacactgttcgtttttaatattaataggccagggattcaaggccctggggcagatgtcatctaagtgaggacagaagcaaatatcacgactgctcactgagtttttcctctgtagagtacaaccagcataacaggcgttcaaaatatataagcttagcttggcagaggggcaagagcagagaaggtgattcaaattctggcttagcgagggcttactctgtgacattgaggggaattcattgaaactcactgagacctactcttctcatctggaaaataaaaaatatctgccttaaaaagggttagagcttatagtgaggtgcctcacatatggtagatagtcaatgaaaattatatttgattagaacattgtagggtttataagaatcaaactgactcacttcaaaaactgaagtcaagaaggctta

SEQ ID NO: 100013 - DNA, 600 bp, Homo sapiens
ttactttcttttcatcagagaaacaagttgtagtttgaaagtttgaaaaaggcattgaaattttgggtgggatttttagaattagtgtsttgtataagccaacaggcaatgtcatctcctttgtaagttcagcggagtactagggggcctgggaccatatggtctcactgttgacactgttcgtttttaatattaataggccagggattcaaggccctggggcagatgtcatctaagtgaggacagaagcaaatatcacgactgctcactgagtttttcctctgtagagtacaaccagcataacaggcgttcaaaatatataagcttagcttggcagaggggcaagagcagagaaggtgattcaaattctggcttagcgagggcttactctgtgacattgaggggaattcattgaaactcactgagacctactcttctcatctggaaaataaaaaatatctgccttaaaaagggttagagcttatagtgaggtgcctcacatatggtagatagtcaatgaaaattatatttgattagaacattgtagggtttataagaatcaaactgactcacttcaaaaactgaagtcaagaaggctta

SEQ ID NO: 100014 - DNA, 600 bp, Homo sapiens
ttactttcttttcatcagagaaacaagttgtagtttgaaagtttgaaaaaggcattgaaattttgggtgggatttttagaattagtgtgttgtataagccaacaggcaatgtcatctcctttgtaagttcagcggagtactagggggcctgggaccatatggtctcactgttgacactgttcgtttttaatattaataggccagggattcaaggccctggggcagatgtcatctaagtgaggacagaagcaaatatcacgactgctcactgagtttttcctctgtagagtacaaccagcataacaggcgttcaaaatatataagcttagcttggcagaggggcaagagcagagaaggtgattcaaattctggcttagcgagggcttactctgtgacattgaggggaattcattgaaactcactgagacctactcttctcatctggaaaataaaaaatatctgccttaaaaagggttagagcttatagtgaggtgcctcacatatggtaratagtcaatgaaaattatatttgattagaacattgtagggtttataagaatcaaactgactcacttcaaaaactgaagtcaagaaggctta

SEQ ID NO: 100015 - DNA, 600 bp, Homo sapiens
ttactttcttttcatcagagaaacaagttgtagtttgaaagtttgaaaaaggcattgaaattttgggtgggatttttagaattagtgtgttgtataagccaacaggcaatgtcatctcctttgtaagttcagcggagtactagggggcctgggaccatatggtctcactgttgacactgttcgtttttaatattaataggccagggattcaaggccctggggcagatgtcatctaagtgaggacagaagcaaatatcacgactgctcactgagtttttcctctgtagagtacaaccagcataacaggcgttcaaaatatataagcttagcttggcagaggggcaagagcagagaaggtgattcaaattctggcttagcgagggcttactctgtgacattgaggggaattcattgaaactcactgagacctactcttctcatctggaaaataaaaaatatctgccttaaaaagggttagagcttatagtgaggtgcctcacatatggtagatagtcaatgaaaaktatatttgattagaacattgtagggtttataagaatcaaactgactcacttcaaaaactgaagtcaagaaggctta

SEQ ID NO: 100016 - DNA, 417 bp, Homo sapiens
atctctggtcacagtttttgttttccaacagtgagccaggtttgaaggttatgcaaaaacatcttcatttcctcctttgtattttcaaggtattatcacaaatatttgtactttgatcagagctttctgcaccccctgctaagtcaggaattatttagtttctttgtcgttggacagagatgagtaggtcctataacattttggcctctgtcactagaatgaggacgaggcacacagagggtgtagatttcttagataagcagcttctccagctggaatctttctcagtgtctatagtagggggttgcaaactaaggtccaaaaactaaatgctaccccaaacctgcttttctaaataaagttttattggaacasaatcatgtttatttgtttacatattatctgtggctggtttta

SEQ ID NO: 100017 - DNA, 431 bp, Homo sapiens
aattttcttgttcaagaaatgcttgttctctggatgccccctttgtccctagtccttggctgcaaggagggcctcccagggacagagacattctgaatggggaacattttagatataaatgggatttttttttttcaaggaaaaggtgtaaggtagctctgtagagacttgaagataaataaacaggaagtgggtcctggcagacagagaccaggccagratctggtctccagaaggtagtcttcaaggcttatcaaagtcaggactgtccagagggtggctgcattcagcagaggctgaatcacgggacaggcctgaattaggaggagcttctttttgaaatcgcgatatcatgtactggctgacttatctttctttgtcttccctttcatggttcttttttctcattctgccggtccccctctctcttt

SEQ ID NO: 100018 - DNA, 570 bp, Homo sapiens
aaattacatttttatatcagacagataccataaacctcacaaatctagaatatgatgtaattataattttacacatctgttgtaagtggctctgtatatttcaaaacttgttcattctcaacttcttaaatgtgggctgagcattataggatgcatacaattttattatttgatctctcgtcttaaattgtcatgacccaagagggctacagcagtatttctagaaggcatttctataccctgaaaagccacagaagtgatggtaccccactaatmgcaaaatgaatgtgtcctcaacccaccttctctttggctgaatctcagaagtacctggagtctttccagagccactggacatgagaggaaatgtggatgagtcaaagttagaatagaaggagagtcagtcatcttacttcactcaaaatttcttattttggaaaaatttaaaacacgtatgtcatctattgtcatggtccttctcagtgccagagactcccaccagtgaggaaatctaaagaatagttgctgttagttccatggtaaatgtgcctgtctctttgatgattgata

SEQ ID NO: 100019 - DNA, 536 bp, Homo sapiens
agccaagaagaaagtgactaacaaattgattagaactggtgggagcgctggtgtgcttggaaaacaaatactgaatttcaacatccatgaagaagcatggacctcatgttcttacagaagcgtatggaagtattggtgaatcagagagatcaaacctagcaaagactgccacctccctggcatcagctcagtcgctgattggacttgtgagatctacccctaattttgatgactgccagacaataggataaattatttcaggagaattattacaccgttcagagcttctacagtgtcctacattcaataaaaatatrtccaaacaaacaaaacaaataagcagacaacaacaaactaggactgttaggaaatacagatgatagaaagagaaaggtgagacagatattggaattatcaaatatgtgtgatatatgtttaagagaggacaagatatagaattcaaaagatatttagaatcagtaaaagaatgcagtaactaagatcgagaactcaagtagtgcgtttaacacagattg

SEQ ID NO: 100020 - DNA, 340 bp, Homo sapiens
gaatatattaaatatttccttttctactgtggatttctgtctttctcaattagactataaggtcaatgtaagaagggttcctaaataaatgattaaaraaattaaagtgtgaatagcagagctacattttgaattagagatttttaaaaatattgtcaaggtaagggacctgcggatgatatttctcatggaaatctatacttgtttagatattttttttccagtccaatgaggtaatgtctgatcgcctagatgcttctgtcacaaccttagcaaggatcatgatttctcaattgtattgctcaagagcctttggctgctcttactgaccagcctatta

SEQ ID NO: 100021 - DNA, 571 bp, Homo sapiens
attgcatttgtctgtttttgcttgtgttgcctatacttttggggtcatattcaaataatcatagcccagcccaccaatgtcaagaagcttttttcctgtgttttattctagtagttttacaatttcagctctcatgtgtaaatctttaatccattttgagataaatgcctaattttattcttctccatgtggacatctagttttcccaacaccatttattgaagagactgtcatttgcctattgtgtgtttttggacctttgttgaagatcattgaccataaatgygtggatttgtttctgggctctattctgttccacgaacctatatgcctgtttttgtgccaatactatactcttttgattacaatagctttgtagtatattttgaaatgaggtaatgtgatgcctctagatttgttctttttgctgaagactgttttggctatttgtggtcttttgtggttccatatgaaatttaggattttttttctatttctgtgataaacatcattggaattttaatagagattacattgaatctatagatcactttgggtagtatggacattt

SEQ ID NO: 100022 - DNA, 571 bp, Homo sapiens
attgcatttgtctgtttttgcttgtgttgcctatacttttggggtcatattcaaataatcatagcccagcccaccaatgtcaagaagcttttttcctgtgttttattctagtagttttacaatttcagctctcatgtgtaaatctttaatccattttgagataaatgcctaattttattcttctccatgtggacatctagttttcccaacaccatttattgaagagactgtcatttgcctattgtgtgtttttggacctttgttgaagatcattgaccataaatgcgtggatttgtttctgggctctattctgttccacgaacctatatgcctgtttttgtgcmaatactatactcttttgattacaatagctttgtagtatattttgaaatgaggtaatgtgatgcctctagatttgttctttttgctgaagactgttttggctatttgtggtcttttgtggttccatatgaaatttaggattttttttctatttctgtgataaacatcattggaattttaatagagattacattgaatctatagatcactttgggtagtatggacattt

SEQ ID NO: 100023 - DNA, 537 bp, Homo sapiens
ttaatatctttgcagccacattccatcaaagctatttgttacctttaagctctccaggagtacaacctctgtgcatggagtaaccaggaattagaagtcatttgaaaatacaagaaactcccatgctgagttctctctctgtatgcattttctgccagattcaacccagattgatttccctgctgctcctctggcctcttccctatatgatcagacattaactttctgattccctcttctgtttttttttttttctttttccaggtttgttttgttttgtttttgttttgaaacggagtctcagtcaccaggctggagtacagtggcgcgatctcagctcactgcaacctccrcctcccaggttcaagcgactgtcctgcttcagcctcccaagtagctgggactacaggcacacgccaccacacccagctaatttttgtatttttagtagagacagagtttcatcataatggccaggatggtctcaatctcttgaccttgtgatctgcctgcctcagcctcccaaagtgctgggat

SEQ ID NO: 100024 - DNA, 550 bp, Homo sapiens
ggcaaatatttttagagctaaggagagagagagaccacaatacaataatagctggagacttcaacaccccactttcaggattggacagatcttccaggcagaaaatcaacaaagaraaattggacataatctgcactatagaccaaatagacctaatagatatttatagagtattttatccaatgcctacagaatacacattcttctcctaagcacatgagtcattctcgaggatagaccatttttttaggcctcaaaacaagtctaaattgaaattatatcaagtaacttctctgaccacaatggaataaaactaaaaatcaataacaaggcaaattttggaaactgtacaaacacatggaatttaaacaatgtgctcctgaatgaccagtgggtcaatgaagaaactaaggaggaaattttaaaatttcttgaaataaatgatgatggaaacacagcataccaaactctatgggataaaaccagtgtatcattctttagtctttctactcaagctatgagtagtttatacttcacaggtatgatgtta

SEQ ID NO: 100025 - DNA, 494 bp, Homo sapiens
tacaatagtctcctcttattcatggtttcactttctacagtttcagttacctatggtcagtggtgttctggaaatattaaatggaaaattccacaaataaacaattcacacattttaaattgcacaccactctggatagcatgacaaaatctcrcaccgcctggctctgccccaccaggaaggtgaatcctccttttgtccagggtatccatgtgtctgtaccctctcccacacctgttactcactcaggagttgtcttatttatcagaccaaccatcatagtatccagtattgtgatgtttgtgttcaagtcattcttagtttactttgtaatggccctagagcacaagagtagtgatgctagccattcagatctaccaaaaaagaaggcatcagtgcctcctttaagtgaaaaggtgaaagttcttgacttaatatggaaagaaaaaaaatcgtatgctgaagttactaagatccatgatgaaaactaattt

SEQ ID NO: 100026 - DNA, 638 bp, Homo sapiens
tttgctggtcatacagtcattgttgcaactactcagcatgaccattgtagtgtgaaagcacacatatatattataataatactctcatttgaaaacaaaattagtgactgtgctccaataaagctttatttacaacaacaggcagcaggctggatttagcccatgggctgtagtgtgccaacctctgttctatagactgttaaccaaatcctactgaagtcagagttcctggctgtctgctaatgccatcatattttcctcaggcactttgatctttgtggagacacactatagagtctatgatgctttcaccaaggttgcttgacaacatgctttcccaggggttaacactgcaaaaggaagaaggctgtgctagagtcaaagctgatgctttgtcaaagaaaatatttaggcatcaggacttgaaattacgtgtacaaccctggctatgttggaagcaaayttctggggaaattgtcagagcataaaattaggtctagttgagaaggaatgcaagccccaaggtatggctaagctgagacagcaggatggaggaaattaacactgggataacttatgagtctcaaaaggtcgctattttcatagaaaccatgcctctggagaaagatgattttgta

SEQ ID NO: 100027 - DNA, 563 bp, Homo sapiens
aaatattaatgtcaggtcaataaatactgtatgaaacactaccaattataataatagcataaaaaataattctaataataatacaactaccataagtcttggcattccttggcttgtagatgcatcatttcaatctcttccaccatcttcacatggtgttcctatgtggrcctctgtgtctctctctgtttttactggcctattaaaaagacatcagtcattggatttaggacccattctaaaccattataacctcacttaactacagtcatgtttcacttaatgacagggatacgttctgagaaatgtgtctcgggtgatttcttcattgggtgaacatcatagagtgaacttacacaaacctagatagtgtagcctattgcagatgtaggctatatggtagagtctattgctcctaggctacaaactggtacagcatgttactgtactgaatactgtaggcaattacaacaaaatgggaaatatttgtgaatctaaacataactaaacatagaaaaggtacagtaaaaatacagagtaaaagataaaaaatagtacacttg

SEQ ID NO: 100028 - DNA, 521 bp, Homo sapiens
agtgtaattgaaaaaggtcatcccaggtaagagtgaggaatggggagaaattttgggagtgtgaccagagaagaaggtgtgaaatactactygtcaaaaagagtaacagacctagagtaagggtgtatggtagggtcactcaaggttagtgatcaggaattatttaaaatgaatcaccagtaaacatgcttgtttctccctctggccatggtcagtcatgcacagtattttttctctagccacaaatacagatgtggagtaggcaaaaaaaaaaaaaaaaaaaaaaaaaaactggatttcatcaaggttaaactttgctgagcaagtagagtgcaatgaaaaagttctacttgctgagtgagtgattgaaaggttgatttattaaaatgagtgagtgattaaaatgatattcctgaacccagtaggatcaacctattgctgaactctcccattatttttccttttttttctgactcccctcatcttttcttattttttaaatttttactatttatgggtac

SEQ ID NO: 100029 - DNA, 638 bp, Homo sapiens
tatgctcctgttgaattgactcttttatcattatataatgaactttttgtctctttttatagttttgtcttaaattctattttatctgatatcagtctagctattcctgctctttttggtctccatttacatgaaatatctttttccatacctttattgtcagtctatgtgtctttatagttgaagtgtgtttcttgtaggcagcagataattgattcttgtttttcaatccattcagttactctatgttttttgatttcagcatttaattcatttataaccaatgttattattkataagtaaggacttaatcttgtcattctgttatgtgttttcaggtcttatgttctttcctttcttccttccttcctgtcttcctttttgagaaagtgattatctctgatggtatgtattaatttcttgccctttatgtttttcatatctgtggtagatttttgaatttgaggttactgtaaggcttgcaaataacattttataacccattattttaaactgatgacaacttaactctaattgcaaaacaaactagctaacaaatcagtaaggagaaaaactaatgaaaaccctaaacttcaacttcatcctccctgctttttacctcttagcttattgtattt

SEQ ID NO: 100030 - DNA, 638 bp, Homo sapiens
tatgctcctgttgaattgactcttttatcattatataatgaactttttgtctctttttatagttttgtcttaaattctattttatctgatatcagtctagctattcctgctctttttggtctccatttacatgaaatatctttttccatacctttattgtcagtctatgtgtctttatagttgaagtgtgtttcttgtaggcagcagataattgattcttgtttttcaatccattcagttactctatgttttttgatttcagcatttaattcatttataaccaatgttattattgataagtaaggacttaatcttgtcattctgttatgtgttttcaggtcttatgttctttcctttcttccttccttcctgtcttcctttttgagaaagtgattatctctgatggtatgtattaatttcttgccctttatgtttttcatatctgtggtagatttttgaatttgaggttactgtaaggcttgcaaataacattttataacccattattttaaactgatgacaacttaactctaattgcaaaacaaactagctaacaaatcagtaaggagaaaaactaatgaaaacyctaaacttcaacttcatcctccctgctttttacctcttagcttattgtattt

SEQ ID NO: 100031 - DNA, 556 bp, Homo sapiens
aaagcacattgttatcagtgcatcataaagtgacctgatttgtgstttccttctgcaaaaattcctgaaaaaatttattttggtttggctttatgagtatcagtttcgtggcaaattgcttaacctattttacagcaattaatacatatttatatattttggaattatacttttccagtaagtaaggattaagaattgcatgctttgaaatttatatataaatcactcatttttatcactaaagtagatgcacacttcacttcccagaaattccctgtaattagctttttcttggggatatgcgacctctcaacgaaaactactcaaaaaaattacaacttattatcaaaacaatttgtaagtttaaaactggtaattttgaaatttgtagggtatttttaaaatacagaaattatataaacaacttgaactattttcttatcaagcaaataataagctatttatgtgcattgctagcaacaagttttctgcaaaaataattccttttcagatctttattttggtgaaagttggaaaacagtggagatttttggat

SEQ ID NO: 100032 - DNA, 539 bp, Homo sapiens
taaaacagccacttctacagcaaygatccaaatggcttttactttttttttttttttttttaagtaaggagctgtgattgtgattgacttctcaagtacaatcaactgaatctagccaacaaccacatgcatgcacttttgaagcaaactttccccatcaaggctggtgctgaaaccatgtcactaaccttcattgtagcctgtgagaaaccttgaagttgaagacccagcaaagccattccccaataaacgaccccagaagcaaccgtgagataataaatgtgtgttgttttaagccaccacatcatgtgtcagaagaggtttagatattgcaaaatgtgtgtacacttggatgtaactttggggttcctacgaaagttttgctggactcttatttttactgtctgctatgagaggtatttgttaaggcaagtattaaaaaaccttcactatcttcattagattcttaggtataagagagaaggaaaaatataaattgcttcccaagatgaagtgggagtgagtaggtaggttgaaag

SEQ ID NO: 100033 - DNA, 572 bp, Homo sapiens
atggttggctttttgtttctaaggttaaatgaagatcctaaaaagagaaatgaaacaaccaaacagacatatccaagtatggtaagttatatcagagggaaaaattatgtaaatagataaaggcatggaagaacctgaattaaggcagggaattaaaactattctcagaaakaatagtgcacagtagggcaatgatgtactggaaccaactcacttggggccaaaagagctcattattaatgtttttagaaatttttcaagctagttgttgaacatagccattatccattaaatgatatgaatttagagttcaattaattatatttttaaaaggtattattttaactttatgacttcataattatttcatggcattttattgtaagctccactcttgaggttttttacatctcttgtatctatatggtgggaatactgtataaagatgtgctattgcacatctctccccaactctgaattcagtaatgtcatgatggtagcttggaattggccataatacgagctttaacgccaaaaaaaaaaaaaaaaaggcaaaggctacaaatttgggc

SEQ ID NO: 100034 - DNA, 536 bp, Homo sapiens
tttgctattgccataattgactttaagaacattggtttgccatctccaaaaacaactcaaagaaacttttaccaaaactcagaagattagcatgagagatgccctacagagaactactccatctgctttaacaaggtcttgaaacaagtgtgctccaacatgggcatttcatacaaggcaacatgttttgagaactattttatcaaggatatygtcaagcacacagtaggacaagactctctctaggcccattgtaacagatactgcactatcgcctccagagagagctaatgatctgtgcacctgctcctacccagggaattgattaggcatgctatatctgaggacatcaaggccattattaactacaccaattctatccaaataagctgctgttgaggattcaaagaacataagacaaaggctctgttcacagccatcaacattttctgttaatagctacctcttaatgtattcatatttctgatggatagccctttgtattacctctttgtgaattgttcaggatcctatat

SEQ ID NO: 100035 - DNA, 451 bp, Homo sapiens
tttttgggcctcctatatttttggagaactttgtcaaatgcaaccaatagtaacaaaggcacactactaacagccaatatctcaaccacttcacccaaagcaagaagctcattagatatattatcagctttccaagttgctttgggcaaaagtttaatgtatttcaaaggttatgcttctagcctccaaaattttttttcctttgcctcctgataagtcctgaaaccaacactacacgcattttggacttttgtttgttcgtttgtttctcttgtggtagcatttgacttccagtactaattttttttaaaccagtcagaacagggtaggttatgctgcagtagcaaataatcccccaaatctcratagtttacaagaacctccttcattctacatatgcaatggacagctgttgctctgttccacatcatcttcacaatagcactggatt

SEQ ID NO: 100036 - DNA, 603 bp, Homo sapiens
acacatgaaatttaggtggaaaatgacattggagaaatttgagattatgatgaatggaaatttttcaaagaggaatttcaggctctgttcttgaggggatagatggacttccaacagcaataacacaggattaatgaggacttgggatgttacataaattagagatgttagatggataaagagataaaagtactctctctaagaacatgggaccagagataggctcacttctaaccatcagatataactagcagactaaacggtctaaaaataaaaatcatgccccactcctgcttaagacattttaattactctcagtaactcttcagtttttctactgtgttatctttaactacagggttggtctgggtgtgcaacacaagaaagcctggcatatacatggattcaagtgtatgccatgtrcaggtattctttcatgtactatttcatgtattctttttcacatctgttttttccttcattgaagtcaatggctgatattagattctactattcatgtgtactagttatatataattgttacaaaacaaattagcaaaaacttagtggcttaaagcaacacacatttattattacctaagg

SEQ ID NO: 100037 - DNA, 567 bp, Homo sapiens
aagcaatcctcctgcctcaccctggcagagtggctgggactacaggtatgtgccaccatgtccagctaaagtcttctctccagaaagaagaaatgcattggaatttagaggatacacaaacatctagctgtatagctaatacagtagccactatcatgagtaggaatttaaatttaacttaataaaaattaaaatgaaaaaattcagtttttctgtyccagttgccacattttgattgcttaatagttgcatgtgactagtggctacataacagcctcaatatacaacattctgttatcacagaaagttaccttggaccaagtgctgggagaagcaatgcaggcttcctcacaaaagctgtaaaagagagaactcagggagtgtgaaactctttcctattctagttaacttcaagaataattgttaccaggccagcacggtggctcacgcctgtaatcctagcactttgggaagccgaggcgggcagatcacctgaggtcaggagtttgagaccagcctgaccaacatggcaaaacctcatctctactaaaaatacaaaaagttagc

SEQ ID NO: 100038 - DNA, 461 bp, Homo sapiens
tttctgtagtcagtgacctttgaaatacatggctgttcatttacatggcagtggggtcatgagtgaatataaaattcaggaagttgggcttaaaacttgccggagatgaccggctgcttacagagcaaacaggcaccttacatgggtgagcccatggtrgaaggtcttattgaatttagcctgtcctttcctttagtgttttcacctcagaagttcatttcaagggctcagagccttaaataaataagaaaaagagaacgtcttaagaaattatttcctctacgaaaaaggaagacacatgtcccagataagctttctgttactgcttgttgtaaaggaaataaggaatatggaaattggcttcatcatgtgcatgggacaacccttaaatcttctgatggttacagtgctttgctgaacatacaaagcaaacaaaagccaaagcttctttagaagaattc

SEQ ID NO: 100039 - DNA, 568 bp, Homo sapiens
ctttgaggaacaggtcttcagctgcatctcaaaggaggaagaaaatgaaaatctgctgggtatagagaatgcaacctactgtctattttctaagaaactttaaaaattcatttaaaactgattcaaaataattgtgatttaaattctacctctataatatcatttcaagaaaataagacacattaaatagaatggttttctaacagaataatttgtaactgacagtaacraagtcttaattttctccttgcaagcctagatttttcagtcttgtgatagaatctggtttttctttgctttatttatgttggtccctggtgtctgtgtgttctgaattgcaggttgttgctctgaagcagagctagaaaagcctagaggcttttttcccacaccacggtatctactggattatagaggaagactggaatgttcttgggtgctcagagtttcagcaagcagtatggcaaaatttaccattgagtatctgtcactcctggggtctcctgtgtgtcaagactcagttctaattatttatgaagaaagacacagtaagagaaagacggcaggt

SEQ ID NO: 100040 - DNA, 568 bp, Homo sapiens
ctttgaggaacaggtcttcagctgcatctcaaaggaggaagaaaatgaaaatctgctgggtatagagaatgcaacctactgtctattttctaagaaactttaaaaattcatttaaaactgattcaaaataattgtgatttaaattctacctctataatatcatttcaagaaaataagacacattaaatagaatggttttctaacagaataatttgtaactgacagtaacaaagtcttaattttctccttgcaagcctagatttttcagtcttgtgatagaatctggtttttctttgctttatttatgttggtccctggtgtctgtgtgttctgaattgcaggttgttgctctgaagcagagctagaaaagcctagaggcttttttcccacaccacggtatctactggattatagaggaagactggaatgttcttgggtgctcagagtttcascaagcagtatggcaaaatttaccattgagtatctgtcactcctggggtctcctgtgtgtcaagactcagttctaattatttatgaagaaagacacagtaagagaaagacggcaggt

SEQ ID NO: 100041 - DNA, 549 bp, Homo sapiens
ataaatagttttattaaagacacctggaaaacaggataaaaataattcatctaatttcaagtgtcagaatgatccatggaaaaacatttttaaatgggtgctatgccttttttagagttattctgtgaggacaaaaatctagtttagtagcaaagactgagaaagatgttcaaccaacgaaaatattgaatatggacattagagataaaggaaagcatacagatattcttataacagctgataattaaaaacagagagctcaaaaataatgtggtgctactttggaaagaaaggcctattgcttgggcacctaggtcttggctctgcctatcatctctctgcctgacatgcagccagacatgaaatacacatcactctggcatcttagtctatctttatttttcatkttagcatcccagtccattctcatgcctgacaattgcaatattggcccaattggtctggcagcccccagcctcaatttgcaattgaccctaggcatgtcgatagaatcacctaatcagaacaacatttttcctaactgttctc

SEQ ID NO: 100042 - DNA, 584 bp, Homo sapiens
atattttctttagaaccaattgaggttcaacaaagtaactggcacaaggatamctttaacaaggggggtagctttgttcttaagtagaaatgtttgtatgtagctagtttatggaaatattctgctggtatttgagtttctttctacttgtcagaaatgttcaaagatacatattgagtacaggatcttgtttctgtcctgctgggtttattcggtacatacgaactactttcaacactccaatgtgggtggtggtttggaatgcctctttcacaatctttcagaaatagaaagaaaaggtattctaagctgtagtgtcaaagagcatatgttttataatgatactttagagaaaagagaacaagatatacatatgctggaaaaaggaaagaacattactttgtttcttgagtatgaaacaaaaatcgtattttctaggtaaaatctatcacaaagataatctcatccaaccactaacctgatgcttgaatttcctaaagtattctgggctattactacacctgtggtctaaattaacctttaggtcttaagcttagagctactcacaaagagttaaaacatat

SEQ ID NO: 100043 - DNA, 575 bp, Homo sapiens
tagcaggaggagggtggatggacacttgggaggtaacaagaccagtttttcccaggaggatgtagccttatggttacccacttccttattcgtaattcttgtgctaaaggcaaccactatggttttgagaaatcaagctttcatatttcttcatttactcacccatcaaatccagagtactttgagtgttaagtagtaaaagaatgaattagtgttaacttgctaacrtgatacatcaccttttaaagaatctgaaacaatgtaatttctcatataatttctttctactcacactgggaaagatatattacatttttagaaaatccatttcccattgattattagtttgataaaaatatgagtaatacaagtttacaaagtagaaattgtattcagcttgcaaaattctaagaaatctatactttcagttcagttttacttttctctctgttccttttttaattttttgaaaaagttttgaggcacaatctgcaaactcaagcatataataaaaagagcctcttttattttcttaaactcagtttctgctgattggcagagacttacatattgtc

SEQ ID NO: 100044 - DNA, 575 bp, Homo sapiens
tagcaggaggagggtggatggacacttgggaggtaacaagaccagtttttcccaggaggatgtagccttatggttacccacttccttattcgtaattcttgtgctaaaggcaaccactatggttttgagaaatcaagctttcatatttcttcatttactcacccatcaaatccagagtactttgagtgttaagtagtaaaagaatgaattagtgttaacttgctaacgtgatacatcaccttttaaagaatctgaaacaatgtaatttctcatataatttctttctactcacactgggaaagatatattacatttttagaaaatccatttcccrttgattattagtttgataaaaatatgagtaatacaagtttacaaagtagaaattgtattcagcttgcaaaattctaagaaatctatactttcagttcagttttacttttctctctgttccttttttaattttttgaaaaagttttgaggcacaatctgcaaactcaagcatataataaaaagagcctcttttattttcttaaactcagtttctgctgattggcagagacttacatattgtc

SEQ ID NO: 100045 - DNA, 674 bp, Homo sapiens
tattagtatttaattaatttttctattcaaagtatgaatctcccagggaaaactcaattattttagctattttttctggtaatgaatgtatttctttatttaaaaacaatagaagtgataatgctacttccacttagacaatattcttttatattactttcaccactcatttttctcagcaatctcgcagacctattttatcaccaaaacgcatatatcaacaagcttaatgttattttgacaacaaagaaaycacatatacttcccccttcattgatcaattgttaggagtggaaatgctggtaagatgcacatcataaaaataataaataatacattttaatgtctgagccaaagacatttggatggacaagtgaaaaatatatatatattaaaataaggaggtgatagcatgcctatgagaaatagaaaattaaggaacaaagaataagaggcaattgcaaagcaaggggaatatttaaaaataataataacataacacgggttttacttgtttaggaaagatgctagagaactactgtagtatctattagtaacaagagatgaagcaacttgatgaatgttgctctgggccctagttcatccacagaggtcatggaggcgtattgctgatatgggagggataaaaacatcggggaaaataagtacagcac

SEQ ID NO: 100046 - DNA, 555 bp, Homo sapiens
catttatggaaagaaatgtttamtaacatgcagaaagcagagtcccaagggtccgtgcagacctttgcctcaaatgtaaacgagggaatgaagggaaatgccaccttttagtatgtaggcaagaatgacaggaatgaatgttcagaggagttaagaatttaatgatagatccacacttaacaaaaagtgctctaaagatcaactctgaggtgcacaagacataaattttaatgatgcctatgtcactaaaaaaaaacaagtccacaaggcacaaagggagagtcctaatgagtgctcaatctgcagaaataactggaaagaaaatgttgacaaaggtatatttcccatccagttctagagtttaaataatgtctatgtatgaaaactcttaaattttaagaaggataaaaattagtgtattttatggtgctcatggtatatagcactagcaaaactgattatttcaacagtaaattacagagtattaggtaggtgctcagcggtataatgattaataagacccagtgcctagctttaagaagcttagaatacagc

SEQ ID NO: 100047 - DNA, 615 bp, Homo sapiens
atctgtgtgaggcttggtgataggtattagaaatatagcatgattatgatacagtttctaccatcgagaattagcacagatatcctcccttttactatagtgattggcacatttttcttatttatcttaatatgctaaaagcttctttaggacaagtatatgtcttacttatctttgtattctccctcaggccaaaacacaatgcatgyatattccaggtgctgtaagttattcatactgaattgcaaatctgttctcttgtgaaatattaacctaatccaatgtctaaaaatgaagctttcatgatctgttttatacttgaaaacactgcagccattatttaatataatattcttacctgggctaaaacaaatcttctaattcagttatcaaaaatgaaaggccaaagtgaatggagaaggaaataattcagataggaaaaggggaagtcaaattgtctctgttcacagatgacatgattgtatatttagaaaacctcaccgtctcagcccaaatctccttaagcttatcaaagcaacttcagcaaagtctcaggatacgaaatcaatgcacaaaaatcacaagcattcctatacaccaataacagacaaacag

SEQ ID NO: 100048 - DNA, 615 bp, Homo sapiens
atctgtgtgaggcttggtgataggtattagaaatatagcatgattatgatacagtttctaccatcgagaattagcacagatatcctcccttttactatagtgattggcacatttttcttatttatcttaatatgctaaaagcttctttaggacaagtatatgtcttacttatctttgtattctccctcaggccaaaacacaatgcatgcatattccaggtgctgtaagytattcatactgaattgcaaatctgttctcttgtgaaatattaacctaatccaatgtctaaaaatgaagctttcatgatctgttttatacttgaaaacactgcagccattatttaatataatattcttacctgggctaaaacaaatcttctaattcagttatcaaaaatgaaaggccaaagtgaatggagaaggaaataattcagataggaaaaggggaagtcaaattgtctctgttcacagatgacatgattgtatatttagaaaacctcaccgtctcagcccaaatctccttaagcttatcaaagcaacttcagcaaagtctcaggatacgaaatcaatgcacaaaaatcacaagcattcctatacaccaataacagacaaacag

SEQ ID NO: 100049 - DNA, 567 bp, Homo sapiens
ctgccttctctttggaacttcctgatcaattcttacacaacttataattaggtgatctgatattctagaaactccacaattgaaaaactaatcttgtgccctaatggaagggatcttatactgttactcattgcaaccattgctgtcaaattccaagatgttcaaccttcagtttgctttgcaactaaagaaatacaagagctagtcaaattgtagaagtattcaaactggagaattcaaactgaggttttttccagagacctcagaattagaygacagccacaagcagacagctaccccaagaacctcagaacaactggatgatgtcacaaggtgacatccagagcaaaacaccatgaaacaagatccaatggaatacccctctctccttatttcctgtttcgttttgttttttgttttgttttgtttttgttttgagacggagtctcacgtctcacactgttgcctgggctggagtgcagtggtgagatctcagctcactgcagcctccacctcctgggatcaagtgattgtcctgcctcagcctccagagtaactgggattact

SEQ ID NO: 100050 - DNA, 578 bp, Homo sapiens
tggcatgtggtacagtgtaaaatttttttatggaatggatgggtggatgggaagagaagcaatagttacggtgaggtgaccaagaataataaaagattgaagaaatttttaaaaatgtttaattaccattcaaatgtacttctaagttcattgttrgtataaaaagattctatttcttcatttttaaaatgagtgagaatctgggtatttatgtagatataatattgtctccccaaaacattctgttctcaggatggatgacttttgggagattagagtatgtttttaatgtgtattaaggagacattttaaatgttctgttttgaaggagaatagcttatttcactgatacccttggttgttttccttttctttctttttttcttttctttcctgtcttttattttttctcttccttccttcttttcttctttccttctctctctctctctcttcctcattctgtctgtctgtctcttttcctccttttttaaaaaagtatctataaaaccacttttctttgtgaggtgcttgtgatagagggacattgctgttactcatattaaacttgctttaaa

SEQ ID NO: 100051 - DNA, 598 bp, Homo sapiens
cagccaaagcccccttttccacttaagggtcagtgaactttagattaagattccctgtgatatgataattatctctttatttatctgtctcttcttttggaataggagctgttcaagatcagaaatgataaatcatattcatctttgtttctctagcatacacagagattctataatgtgtgtgtttgtgtgtgaatgtatgtataaatttaggcaggtatgtaaagatttcctgaattcatgaaagtgaatataaaatattatttatatctctaacatccagaagyctcccttttacatatttacttctagataggacttaaaagataaatgtctttctgagttttggagataaacttttcaatttgaaccagaacttctaattttacataattttttttcagttgctatattgacctactttagattaaaaaaacaacatgcagggcagaaaattctggtttggctgcatctaagaatggaaactgcagaaagtgcagaaactgttgcaaatactcgtttttaaaaatgtgtcactgaaaagcagaaatgaaataaatactatgcttcacatccccaatacagtcataaacacatt

SEQ ID NO: 100052 - DNA, 649 bp, Homo sapiens
ttagtacaccttgacaccacgtcgtcatcaaatttacaccactgcaaggaaaacaacacacaccagcagcgatcaagcactgtgacaagtacccaacactagaaggcagcgttgttctaaaatgtgtgaacttctaggtatgcccctagttgaaaaaatatccatgtgtgttcttatacaggcacacaatctgacggtgtgctaggcaggcagcgcctcaggcatccgctcatacaattcaccaggaccttcgcagtccccattcaacattctgtgggcactgctaccattcgcccaatggcaatttttataatctactgaaatagcccattttccacttacattcaatctactgacactaccaactctttacagaattaaaaaggccatactgagcacaycaaacgagagttcaaattttatcctttagttatcaaactaaatgagctgttttatcctatcccatggcattttatggaagcaagttaagggccagactgaagtcaacgtagcatgttcctaacagttatcttcccatctgcgttgtggatgcagccacattaaacagtgatgaacgctgctgttacacgcactcttcactgttctctcgtgctgtcgggtccctccaccaaatccccttggcaggagc

SEQ ID NO: 100053 - DNA, 544 bp, Homo sapiens
tcagggttgtgagggcagtggctctgaggctcagtcagggtgtgggcctccttagctccaggtgggcgtgtagctcaggtcctggcttccctgcgaacttaccccttggggagccacagggatgcatgcctcactggccaccaccccgctgaggggttccagggctgctctgtggcctcacttgcttttcttcatccccaccaggtaatatgtctcatcctcggccttggctagggctcgaccacttcaacaaagccccaaagaggagtcgctacacttaccttgaaaaggccattaaaatccataactgatttccaagctggtgtgttcaaggcgaggacggtgtgtgggtggccccttaacagcctagaactttggtgcacgtgccctctakccgaagtcttcagcaagaggattcgctgctggtgttaattttattttattgaggctgttcagtttggcttctctgtatctattgactgccctttttgagcaaaatgaagatgtttttataaagcttggatgccaatgagagttattttat

SEQ ID NO: 100054 - DNA, 527 bp, Homo sapiens
ctgtcttcatggcttgctataagggcctcttgggccaagagagcttcagattagatagccgagtcactacctcctagtggtgtaggtaggtcccctggggaggaggggagtcaagataacaaccagaccttgccaaccccattggactacatccctaagacttttgtgtgagggagtaatgggtagtgtttccggccagccttgctaccaccctgtcctcacccagtcgtgttcatcagaactttgtcgcggtggagcttctggccacctgtggctataaagcacttgaaatgtggcttaagtggcagagggggttgaattttaattttattctaatttgcacatgtggctgatgtcttccttactgggtatgcagttctaacaaaacattccccacctcgggagttacagtgactaactcgagggctgttgagtgctgcgtgaagcacaggcrttggagtgggcgttctttatggcctactccctaaagccttcgggacattggttttctgcgtgagaacagttaa

SEQ ID NO: 100055 - DNA, 636 bp, Homo sapiens
tcctgcctctcaaattttattacatatgcttatcatccagggatcttgttaacatgtagattgcrttactatacatctgaggtatgagctgagattccacatttttagcaggttcctggctgatgcacatgctgctggtcctggacacattttgagcagcaagtgtgcatgggcagagtgcacattggctcagacttgcctttgaatcttagcttcattgtttccattattctcggggaaccttaggaaaattagcttccagggcagtggctccaatcctgggctgcacctgggatacttttaaagatctgataccctagttgcaccccagattaattaaatcagaatatctagaagtaggatcaaattattagtagttttaatcgctatctaggagatttcaatgtgtatccaagattctgagaacctttgtctcagcacagctgttctcaaactttagcatccattagaattgcctaaaagacttgttaaagcacaaattgctaggtcacagcaccagagtttgtgattcaataggtctggtgttgggcctgaaaattaaagtttttaacaagtttgcaagtgttaatgttgctggtccagggacctcactttgagaaccattgttcacaggac

SEQ ID NO: 100056 - DNA, 636 bp, Homo sapiens
tcctgcctctcaaattttattacatatgcttatcatccagggatcttgttaacatgtagattgcgttactatacatctgaggtatgagctgagattccacatttttagcrggttcctggctgatgcacatgctgctggtcctggacacattttgagcagcaagtgtgcatgggcagagtgcacattggctcagacttgcctttgaatcttagcttcattgtttccattattctcggggaaccttaggaaaattagcttccagggcagtggctccaatcctgggctgcacctgggatacttttaaagatctgataccctagttgcaccccagattaattaaatcagaatatctagaagtaggatcaaattattagtagttttaatcgctatctaggagatttcaatgtgtatccaagattctgagaacctttgtctcagcacagctgttctcaaactttagcatccattagaattgcctaaaagacttgttaaagcacaaattgctaggtcacagcaccagagtttgtgattcaataggtctggtgttgggcctgaaaattaaagtttttaacaagtttgcaagtgttaatgttgctggtccagggacctcactttgagaaccattgttcacaggac

SEQ ID NO: 100057 - DNA, 636 bp, Homo sapiens
tcctgcctctcaaattttattacatatgcttatcatccagggatcttgttaacatgtagattgcgttactatacatctgaggtatgagctgagattccacatttttagcaggttcctggctgatgcacatgctgctggtcctggacacattttgagcrgcaagtgtgcatgggcagagtgcacattggctcagacttgcctttgaatcttagcttcattgtttccattattctcggggaaccttaggaaaattagcttccagggcagtggctccaatcctgggctgcacctgggatacttttaaagatctgataccctagttgcaccccagattaattaaatcagaatatctagaagtaggatcaaattattagtagttttaatcgctatctaggagatttcaatgtgtatccaagattctgagaacctttgtctcagcacagctgttctcaaactttagcatccattagaattgcctaaaagacttgttaaagcacaaattgctaggtcacagcaccagagtttgtgattcaataggtctggtgttgggcctgaaaattaaagtttttaacaagtttgcaagtgttaatgttgctggtccagggacctcactttgagaaccattgttcacaggac

SEQ ID NO: 100058 - DNA, 636 bp, Homo sapiens
tcctgcctctcaaattttattacatatgcttatcatccagggatcttgttaacatgtagattgcgttactatacatctgaggtatgagctgagattccacatttttagcaggttcctggctgatgcacatgctgctggtcctggacacattttgagcagcaagtgtgcatgggcagagtgcacattggctcagacttgcctttgaatcttagcttcattgtttccrttattctcggggaaccttaggaaaattagcttccagggcagtggctccaatcctgggctgcacctgggatacttttaaagatctgataccctagttgcaccccagattaattaaatcagaatatctagaagtaggatcaaattattagtagttttaatcgctatctaggagatttcaatgtgtatccaagattctgagaacctttgtctcagcacagctgttctcaaactttagcatccattagaattgcctaaaagacttgttaaagcacaaattgctaggtcacagcaccagagtttgtgattcaataggtctggtgttgggcctgaaaattaaagtttttaacaagtttgcaagtgttaatgttgctggtccagggacctcactttgagaaccattgttcacaggac

SEQ ID NO: 100059 - DNA, 638 bp, Homo sapiens
tactgattgtatgttatttttatggagcctcagaataagaataggaagtaggtggtactattctattttttaaataaagcaatggagtcttattgatgtaaaaacattctcttcctgtgtaagggtgttaagtcatgatgtagaatatgatctcagtataatcaaataawgtcaacagaaacatctgatattataattatataatgtgtatatatatatacacacacacactatataattctatgtatgctacaattttatatgtatatgtagtatgtatatagtgtatacactatatatctgtactttcaattacatcatgctgccttcgagaaaatacatttaatgaagatttgcagtttcttacaataaagagaaaccaggtgaaaacactgctaaagtaaacttcaaatgctattaggagagaaagtctagctctcttgcatattcttataccctttgcatctaagttggtgcttggcatatagtatatactgtgcaaatagccattgtgtgattgaatagattagttcatttactcaaatagaatgaattacatttcttttttttttttattgagacagggtctcactctgtcaccaaggctggagtgcagtagcatgatcacagctcactct

SEQ ID NO: 100060 - DNA, 250 bp, Homo sapiens
aggtgggctgtttgcaagtggctctgttgaatgtggtagggctcataatatcagatgttaggacttctgctactgttacagtgattaccttgaactcacaaaaccacagctatccattctcaatctccaactctaagccagaygttcccattgaatatacataaaacagcaagaaagatttttgtgtccctttttaaataaggaaactgagcctcagacaggtaaggtaactttcccatggtagagtaag

SEQ ID NO: 100061 - DNA, 612 bp, Homo sapiens
tttgttaatgtcccactgtggcaaaagcgtggctgaccctccatgcaccatgaacttgactccacttacctcttgtgtatatgcgaaaggaaatagttagtgggttgtgagaggggcagtgtgatacattgggaagacaccatttgcagttaaaccatggtgagtttcacgactttgagcaaattcatgaaacctccatttgaacctccatttctacttccataaaatggggaggctactagtatatacttctctgaagaacatgcttcctttcttcactttccttttgatgtttatttttggcagtatcagtaggggttcattagcctaacttcctawccacgaaggcaaggttcagtttagaatgtctgaatctgcatcatagcctgaggtctgtgttcagcttacagaagaaccagtggaaacaggaagccatctctgggtacacatgctgtttgcccatagtgggaattggtgaacttcttagagagatgtatctctgttctgatgcttgtatttccttggtggatcctcctccacgtctctcaccaccttgtacaattcctgacctctcatttgcctcctcacatcatgtgttgacacattgacaga

SEQ ID NO: 100062 - DNA, 627 bp, Homo sapiens
ggaaacatgttatgggaaagaggcagtttttgccaagctatggccacgagcaaggaatcaggaatgagttgctcaatccaggatctggaccaaatawatccacagtgatcaagtatccagggtttgtgatatgatcagtggcctcaaaagcatcacatggggtcagagagaggaacaggagtggtggtggcatcatagatgacatttccaagatgggatggaatgagctggatcccagggatgaagcagggctgtatcagatggtgtctccacaccctgatgatgatgatgatggtgacagcaatagcagcagacctttcatgagcactaattaggctccacttacggtgctgactgtttacttgtcaatgcccatttgatactcttaccccattttacggatgaagacactgaggcacagagaggacaagtaatttgcctgtggtcatccagctagaaggagacaatgctaagattcaaccccagctctgtttgcttccaaacgtggtgttctctaactctgatatatttcccccttgtttccaggttaacctctatatggccctcacatcattcatcaattcattgtttgttcatcgattatttactcatgtgacaatatttatt

SEQ ID NO: 100063 - DNA, 627 bp, Homo sapiens
ggaaacatgttatgggaaagaggcagtttttgccaagctatggccacgagcaaggaatcaggaatgagttgctcaatccaggatctggaccaaatatatccacagtgatcaagtatccagggtttgtgatatgatcagtggcctcaaaagcatcacatggggtcagagagaggaacaggagtggtggtggcatcatagatgacatttccaagatgggatggaatgagytggatcccagggatgaagcagggctgtatcagatggtgtctccacaccctgatgatgatgatgatggtgacagcaatagcagcagacctttcatgagcactaattaggctccacttacggtgctgactgtttacttgtcaatgcccatttgatactcttaccccattttacggatgaagacactgaggcacagagaggacaagtaatttgcctgtggtcatccagctagaaggagacaatgctaagattcaaccccagctctgtttgcttccaaacgtggtgttctctaactctgatatatttcccccttgtttccaggttaacctctatatggccctcacatcattcatcaattcattgtttgttcatcgattatttactcatgtgacaatatttatt

SEQ ID NO: 100064 - DNA, 475 bp, Homo sapiens
gcacaatgtgcacatgtaccctaaaacttaaagtataattaaaaaaaaaaaaaaagtgccttgaggaaaaacattggttgaaaagaatgaatatcaattggatggtcagggagccctctcgagaaaagttgacttttgacctgagaaattagactatgaagccatataaaaggagtgatgggaaagaaaacgaaaaaaaaaaaaaaaaaacagtgagcattatcctccaaagttggaaaggtctcaatataactcagaatcaaaaagaaggtaaaagcataattagtaaaggaaagaaagacgtgataattttagagaaattgggagacatggaaggaaggatttgaatcatgagtgatcctaattcatagagctcttttgattttaggctagaattaacwtgatccattttacaagataattatggttgtcaggtgatgaatgaatgagaagatgtgagaatgccagcaggaac

SEQ ID NO: 100065 - DNA, 574 bp, Homo sapiens
ataaacaattttattttgtctttagaaaatcttctcaatatttttttcttaaaaattacataagaaaaggaaaaagccctagaagttcagatctagcatgtaaggcataagacccagaaaggcaaattttaaggtatcccaagaaacatgtcattcttagagaatttctagaattatttaaggaaagcacacaaacaaaaacaagaatcccagtgctgtataatatacaaaaattaggcagagtaaatactttataatgaatgggtttcaaactttaattaatgagttatagggggcataaaacggaggttttctgccaggcatraaggctcacgcctgtaatcccagcactttgggaggccaagacaggcagatcgcttgaggtcacgagtttgagaccatcctggccaacgtggtaaaaccctacctctactaaaaatacaaaagttagctgggcatggtggccagtgcctgtaattccagctacttgggaggctgaggcagaagaatcgcttgaacccaggagacggaggttgcagtgagccaagattgtggcactgcactccagcctggg

SEQ ID NO: 100066 - DNA, 574 bp, Homo sapiens
ataaacaattttattttgtctttagaaaatcttctcaatatttttttcttaaaaattacataagaaaaggaaaaagccctagaagttcagatctagcatgtaaggcataagacccagaaaggcaaattttaaggtatcccaagaaacatgtcattcttagagaatttctagaattatttaaggaaagcacacaaacaaaaacaagaatcccagtgctgtataatatacaaaaattaggcagagtaaatactttataatgaatgggtttcaaactttaattaatgagttatagggggcataaaacggaggttttctgccaggcataawggctcacgcctgtaatcccagcactttgggaggccaagacaggcagatcgcttgaggtcacgagtttgagaccatcctggccaacgtggtaaaaccctacctctactaaaaatacaaaagttagctgggcatggtggccagtgcctgtaattccagctacttgggaggctgaggcagaagaatcgcttgaacccaggagacggaggttgcagtgagccaagattgtggcactgcactccagcctggg

SEQ ID NO: 100067 - DNA, 613 bp, Homo sapiens
ttctatttatcttttgtattttttaaatcctactttgttttatttttttctgatatttattatttctttcctttaattaattttgggtttggtttgtttttgcttttctaattccttgaagtgcattgctgagttgtttacttgaaacatttctattttttgaatgtaggcaattattactataaacttccctgtttgctgtgtgccacagattttgatatgttgtatttctattttcatttgtttcaagacatttttaaactttcttcttaatttcttcactgacccattggttgttcctaagcatgttatttaatttccatgtatttgtacagtttccaaagttcctcttgttgttgatatctagttttatttcattgtagatagaaaatatacttgatatgattttgatttttaaaaacttgttgagacttgtattgtggcctaacatatggtctatcctggagaatgtttcaagggaaaatatgtcctactgttattaggttgtactctatctccccctttagatctatttrtatttgctttatgtatctgagtactctggcgttacgtgtatatatatttataattgttatatcttcttactgaattg

SEQ ID NO: 100068 - DNA, 613 bp, Homo sapiens
ttctatttatcttttgtattttttaaatcctactttgttttatttttttctgatatttattatttctttcctttaattaattttgggtttggtttgtttttgcttttctaattccttgaagtgcattgctgagttgtttacttgaaacatttctattttttgaatgtaggcaattattactataaacttccctgtttgctgtgtgccacagattttgatatgttgtatttctattttcatttgtttcaagacatttttaaactttcttcttaatttcttcactgacccattggttgttcctaagcatgttatttaatttccatgtatttgtacagtttccaaagttcctcttgttgttgatatctagttttatttcattgtagatagaaaatatacttgatatgattttgatttttaaaaacttgttgagacttgtattgtggcctaacatatggtctatcctggagaatgtttcaagggaaaatatgtcctactgttattaggttgtactctatctccccctttagatctatttgtatttgctttatgtatctgagtactctggcgttaygtgtatatatatttataattgttatatcttcttactgaattg

SEQ ID NO: 100069 - DNA, 277 bp, Homo sapiens
ctgtccagtagactttctgcagtgatgaaaatattctatagccgccctgtccaaygtggttttcattagccaagcctatatagctgtgtgcttgaaatgtggctcatgtaactgagggacagaatttctagttttctttaatttataatgaattaaaatttaaatagccatatttgggtgttggctactgtattagatggtacagtttaaggatgttctattcttttgttttttgagatagagtttcactcttcttgctcaggctgaagtacaatgg

SEQ ID NO: 100070 - DNA, 408 bp, Homo sapiens
tgtggcccaagtattcctctcattttgtccatggtcacacaatcttagtagggttaataaggtcacacagttaatagctgggttgcatttaggaccctagtcctctctggtccctggttggtgtttttttcccagtagtactggacttttgcctacaamttttaaagctaactattgtaaattaatcaccgtgtttccattttgcttacataaagccaaaacattccacttagaaattaaattcttttccgtctgcagtatcatcatattttcttactaccctatattcattttgctaggagtgctagttgcattccttttttttctttttctcccccacctttgagatagggtctctgtcacccaggttggaatgcggtggcgcaatctcagctcactgcaacttcc

SEQ ID NO: 100071 - DNA, 611 bp, Homo sapiens
agctagtttcaatttctgccattctgagaatgactattagagacctcatgtccagactggaaactgagttgtttatttcccttacagggatgagaaagatagtcaaggagaaaacatgtttctgcgctgtgtgagtgagcttgtgattgaaagccgagaggtgagtgggtttccttttctctcctccccatggttttcagtgtgcatgtcccatgctcattccgtattgcgtgtttacttcaatatggttgtggtggataaggcctagggagtttttggagtttctttggtttctaacaatgaaaatatttatttcagtcacactgatttttagtttgcctaagacttatcccattcatcccatttgattcccctcttttttctctgaagacttatggaatatgtttatatctttgtccaataatttgagtaaacttttttccttccacagttcgatatgattcttgggaaactagagaatgacggaagtagaaaggtgagttaartgcatccttagagaaatgttcgttagccattggggatttataaatatcaaaaaatacacttagattttaagattcaaggtactaaagatgcaaatctgaacagag

SEQ ID NO: 100072 - DNA, 540 bp, Homo sapiens
caaatacaaatgaagcttgacttgttcacttgccactcatctcctgctgtgcggcccagttcccaacaggccagggactggtattggtctgtggcccagggacaggggacccctcctctaagccaattcattccccactagtgttcctgtaagtggcactagatcacagtggctaagagcagaggctctctctggagtcaagtggcttggattcaaatgctcactatcactggctagctatttgttccaggcaacttagcctctgtgtgcctcagtttcttttatctcttttcttttttttttgagacagggtctccctgtgttgtccaagctggrgtaacagtggggtgaatatggctcactgcagcctcagcctgctgggctgaagtgatccttcagcctcagcctcctgtatagatgggaccatgagtgcataccaccacacctggggtctcactatgttgcccaggctggtctcaaactcctggcctcaagtgatcctcccacctcagcctcccaaagtgctgggattacaggcga

SEQ ID NO: 100073 - DNA, 420 bp, Homo sapiens
aggtttctgggcaggttagtgagaattgaagcagaaaaatcacattcattccaatttctgagaaagtgtccattttttggaactggttgtttaattagggccaagaggactttccgtgcaccctttcatccactcaagaaatatttattaggctccaaccaggttccaggctctgtactgggtactgaggagatattagtggacagaacatcgttstcatagtcctcatcctcagtgggagacagagaacaaacaagtagagaaagaaattcataattacagattgtgaaaacgcactgcaggaaactaaccgggtgtggtgctggaggatgatgggatgatgaggtgagatctagtttagattggcggtcatgaaaggcctttctgagaagggacatgaatcaaagaccaaagagaatt

SEQ ID NO: 100074 - DNA, 589 bp, Homo sapiens
acaaaattgcccttgtttgatgagaggaatgagcagagcattgatgtggtgaacaaggatctagtgagactttcccagcatgtttctaccaaagctttatctaagcttctcagaacactctcctaataagcagatgtttggcctttcagaaagtcaacaagcaaaatgccttgagtgtcccaaaacactgatgccatgatgtgggctcctgactggcctccttttcctttgactggaccrctgccacctcttggtagccatcgctttcatgatgctttgccttggagatcatattggtgaagccatgttccaactgccgcttacaatttgtcagagggatgcgtcaggatcgtgatccctcctgtttaaaatttccactgatagctctcgtcgtaactgcagctgatctgggcacagtggttttcacagccactgcaggattcatcttccacatcttctcacctcttcttgaaacaagctatacattcgtaaagagttcatttcttcggggtagtgtccttacaagcttttcttaaaacgtcaatgatttcttccatcttccacccaagcttcaccatgaatttgatgt

SEQ ID NO: 100075 - DNA, 589 bp, Homo sapiens
acaaaattgcccttgtttgatgagaggaatgagcagagcattgatgtggtgaacaaggatctagtgagactttcccagcatgtttctaccaaagctttatctaagcttctcagaacactctcctaataagcagatgtttggcctttcagaaagtcaacaagcaaaatgccttgagtgtcccaaaacactgatgccatgatgtgggctcctgactggcctccttttcctttgactggaccgctgccacctcttggtagccatcgctttcatgatgctttgccttggmgatcatattggtgaagccatgttccaactgccgcttacaatttgtcagagggatgcgtcaggatcgtgatccctcctgtttaaaatttccactgatagctctcgtcgtaactgcagctgatctgggcacagtggttttcacagccactgcaggattcatcttccacatcttctcacctcttcttgaaacaagctatacattcgtaaagagttcatttcttcggggtagtgtccttacaagcttttcttaaaacgtcaatgatttcttccatcttccacccaagcttcaccatgaatttgatgt

SEQ ID NO: 100076 - DNA, 549 bp, Homo sapiens
atgactagtgaatgggtgcagcacaccaacatggcacgtgcttacatacgtaataaacctgcacgttgtgcacatgtaccctagtaattaaagtataattttaaaaaaaatggaaaacgaaagtgtgatcctaatgtcatggtgcggactgaatgaagcagcacatggcaagccttaaaacgatcgcacatagtaggtgttcaattaatgttaactatatttcttttctataatagtttataaagggaattcatgaacactatgtgattaatccttggaacaacccaacaggtaggtaaataaagcctaattttatacctaaagaaaccrtgcggcttaacttgcccaaaataataatgattgtaatgagcactggctgttggtttcttatgtacttggtactttgcacgtattaacccagtcagtcctcctaatagttgtgagagagatagcattcttatccccattttacagatgaggaacctgaagcccaggtgataagtagtttatccaaggtatcatagctagaagtcgggtgcaggcagtctg

SEQ ID NO: 100077 - DNA, 605 bp, Homo sapiens
tgtttgatgagaggaatgagcagagcattgatgtggtgaacaaggatctagtgagactttcccagcatgtttctaccaaagctttatctaagcttctcagaacactctcctaataagcagatgtttggcctttcagaaagtcaacaagcaaaatgccttgagtgtcccaaaacactgatgccatgatgtgggctcctgactggcctccttttcctttgactggaccgctgccacctcttggtagccatcgctttcatgatgctttgccttggagatcatattggtgaagccatgttccaactgccgcttacaatttgtcagagggatgcgtcaggatcgtgatccctcctgtttaaaatttccactgatagctctcgtcgtaactgcagctgatctgggcacagtggttttcacagccactgcaggattcatcttccacatcttctcacctcttcttgaaacaagctatacattcgtaaagagttcatttcttyggggtagtgtccttacaagcttttcttaaaacgtcaatgatttcttccatcttccacccaagcttcaccatgaatttgatgtttcctcttgctgcaattttcgtggaattc

SEQ ID NO: 100078 - DNA, 474 bp, Homo sapiens
gatgtaattccatcatatatactctctgtgcctaccgcatttggaaccatgcgagtgatacctatttataaaataaaataaaccaagcamaagtacgaacttagcaacactatattgagttaatagaacggtatcttgtatttcttctgtccaggtatacttataaatgcctgcagggatttcaccacctcagggtggagggactgaatgcttgtgagggaattaggatggtggaatattggtgttaccagggaagggggcgggatgtttgaaaatgctatgtttactcgttcttgggttccaataaaggagaaacagggcacaggagtcggaaggactagtggcaatagtgatgaaaggacctccttatcatgctggcaatgttaattacccaggtgtaggaagccatacactgaggcggaagatcgcaagtcagagtggccggcaggcacaacctcctggcacaccagaggc

SEQ ID NO: 100079 - DNA, 474 bp, Homo sapiens
gatgtaattccatcatatatactctctgtgcctaccgcatttggaaccatgcgagtgatacctatttataaaataaaataaaccaagcaaaagtacgaacttagcaacactatattgagttaatagaacggtatcttgtatttcttctgtccaggtatacttataaatgcctgcagggatttcaccacctcagggtggagggactsaatgcttgtgagggaattaggatggtggaatattggtgttaccagggaagggggcgggatgtttgaaaatgctatgtttactcgttcttgggttccaataaaggagaaacagggcacaggagtcggaaggactagtggcaatagtgatgaaaggacctccttatcatgctggcaatgttaattacccaggtgtaggaagccatacactgaggcggaagatcgcaagtcagagtggccggcaggcacaacctcctggcacaccagaggc

SEQ ID NO: 100080 - DNA, 587 bp, Homo sapiens
gttcctcccaggatacgcccgagcggaagaagcgggctctgagccacgccctttcaccctcctctaccccgccctgggctggtgaaggtgcgcgccaggatgtggactaccgagccctgaagaaataagtccttccactttgaccccatggaggattgcctgtgaggaacttaaacgagtctaccagtgtctagacacgggggcaggtctgtccggcacagcagctccctcaaggaggagaagagtgaggagaaaggaaactcaagtctcaccattctgtcctgggagagaagaggaggatctcatctctcatctgtccaaacaagkcaaggagactttctctcatctttccaagcaaggcaaggagactttttatcattaggaaacaaaaagaatttagaaggaatgaaagcagcccgtaaggtgaattcctaaggactgcccattgaaactgacaaaattgcccttgtttgatgagaggaatgagcagagcattgatgtggtgaacaaggatctagtgagactttcccagcatgtttctaccaaagctttatctaagcttctcagaacactctcctaataagcag

SEQ ID NO: 100081 - DNA, 545 bp, Homo sapiens
aataataataataatggcaaacttaacacccsactgtcaacattagacacaccaacgagacagaaagttaaaaaaggatatccgggaattgaactcagctctgcaccaagcggacctaggagacatgtacagaacgctccaccccaaatcaacagaatatacattcttctcagcaccacatcacacttatttccacattgaccacatagttggaagtaaagcactcctcagtaaaagtaaaataacagaaattattacaaacggtctctcagaccacattgcaatcacactagacctcaggattgagaaactcactcaaaaccgctcaaccgcatggaaaccggacaagctgctcctgaatgagtactgggtacataacgaaatgaaggcagaaataaagatattctctgaaagcaatgagaacaaagacacaacataccagaatctctgggacacatttaaagcagtgtgtagagggaaatttatagcactaaatgcccacaagggaaagcaggaaagatcaaaaatgcataccctaacatcac

SEQ ID NO: 100082 - DNA, 468 bp, Homo sapiens
  misc_feature (1)...(468): n = A,T,C or G
tgcagggacagttacttaactcaggaaaagcaacctagctccaagtttagcaaccgggagttccagttgattccattagcgcaccccctgaggcattcccaagctggagtctggtggaagatgaggctcagtgtgattggactgaagcaccaacctatcaaggagaagtcccacccagtctgccctgtgcctatataaaggcgacaagtggcggccgcagcactcattgaagccgccagttgggagaggagcagagccaggycggtgctcccgaaggcagcaagatgttgcgagccacagctccctgctggttcccccctggatacccagaagctaagaaggtggccgaggaggcggccctggaggcaagccgccatttgggaggggagcagagccaggccggtgctcccgaaggcagcaagatgttgcgagccacagctccctgctggttccgccctnggggggatg

SEQ ID NO: 100083 - DNA, 545 bp, Homo sapiens
aataataataataatggcaaacttaacaccccactgtcaacattagacacaccaacgagacagaaagttaaaaaaggatatccgggaattgarctcagctctgcaccaagcggacctaggagacatgtacagaacgctccaccccaaatcaacagaatatacattcttctcagcaccacatcacacttatttccacattgaccacatagttggaagtaaagcactcctcagtaaaagtaaaataacagaaattattacaaacggtctctcagaccacattgcaatcacactagacctcaggattgagaaactcactcaaaaccgctcaaccgcatggaaaccggacaagctgctcctgaatgagtactgggtacataacgaaatgaaggcagaaataaagatattctctgaaagcaatgagaacaaagacacaacataccagaatctctgggacacatttaaagcagtgtgtagagggaaatttatagcactaaatgcccacaagggaaagcaggaaagatcaaaaatgcataccctaacatcac

SEQ ID NO: 100084 - DNA, 545 bp, Homo sapiens
aataataataataatggcaaacttaacaccccactgtcaacattagacacaccaacgagacagaaagttaaaaaaggatatccgggaattgaactcagctctgcaccaagcggacctaggagacatgtacagaacgctccaccccaaatcaacagaatatacattcttctcagcaccacatcacacttatttccacattgaccacatagttggaagtaaagcactcctcagtaaaagtaaaataacagaaattattacaaacggtctctcagaccacattgcaatcacactagacctcaggattgagaaastcactcaaaaccgctcaaccgcatggaaaccggacaagctgctcctgaatgagtactgggtacataacgaaatgaaggcagaaataaagatattctctgaaagcaatgagaacaaagacacaacataccagaatctctgggacacatttaaagcagtgtgtagagggaaatttatagcactaaatgcccacaagggaaagcaggaaagatcaaaaatgcataccctaacatcac

SEQ ID NO: 100085 - DNA, 545 bp, Homo sapiens
aataataataataatggcaaacttaacaccccactgtcaacattagacacaccaacgagacagaaagttaaaaaaggatatccgggaattgaactcagctctgcaccaagcggacctaggagacatgtacagaacgctccaccccaaatcaacagaatatacattcttctcagcaccacatcacacttatttccacattgaccacatagttggaagtaaagcactcctcagtaaaagtaaaataacagaaattattacaaacggtctctcagaccacattgcaatcacactagacctcaggattgagaaactcactcaaaaccgctcaaccgcatggaaaccggacaagctgctcctgaatgagtactgggtacataacgaaatgaaggcagaaataaaratattctctgaaagcaatgagaacaaagacacaacataccagaatctctgggacacatttaaagcagtgtgtagagggaaatttatagcactaaatgcccacaagggaaagcaggaaagatcaaaaatgcataccctaacatcac

SEQ ID NO: 100086 - DNA, 486 bp, Homo sapiens
acaaacacattacaaggaaaaaaaggaagaatataaaagaaccattaaatctcagtcccctaagataaaaaaaagttagcatttttctactgtcctccagtcactttttatgaatatgtgttacagacatatttgtgattacacttaatattcttcttaaatataattttaactaatcatccaaccccatttggtgtttagttatttgactatgctctttaactgaytttcactctaacgtttcagtcaagagacacgtaaacgtgttccctatgggactctcactgatttttcagtggcatccaaggccaaataactgtccaagaaacagcattaatttacacactaaaggaattttctacctccctcaaaaaataatccaaagaacgccagatgttgtagcaaaactctgcatcatgtaatttattttgatcagcctctcctcctttctgctttttgctttccctcttctgtctctctctcctt

SEQ ID NO: 100087 - DNA, 592 bp, Homo sapiens
tcaagaatgtgtctgtcaaagatgttcgttgtggcaatgttgttggtgacagcaaaaatgacccaccaatggaagcagctggcttcactgctcaggtgattatcctgaaccatccaggccaaatccctgttggcagtgcccctgtactggattgtcacacagctcaccttacttgcaagtttgctgaactgaaggaaaagaytgattgccattccggtaagaagctggaaaatggccctaaattcttgaaatctggtgatgctgccatttgttgatgaggttcctggcaagccacgcatgttgaggactcctctgactatcctcctctgcgtcctttggctgttcgtaatgcgagatagacagctgccgtggtgtcatccaagtagcggacaagaaggctgctaggagctggcaagttcaccaagtctccccagaaacctcagaaggctaaatgaatattatccctaatacctgccaacccagtcttaacagttgtggaagaagagcctcaaaactctttgtttcaactggccatttaaaagactggctaatgataataatgcatcataaaacctttaaaaggaaaggagaa

SEQ ID NO: 100088 - DNA, 592 bp, Homo sapiens
tcaagaatgtgtctgtcaaagatgttcgttgtggcaatgttgttggtgacagcaaaaatgacccaccaatggaagcagctggcttcactgctcaggtgattatcctgaaccatccaggccaaatccctgttggcagtgcccctgtactggattgtcacacagctcaccttacttgcaagtttgctgaactgaaggaaaagactgattgccattcyggtaagaagctggaaaatggccctaaattcttgaaatctggtgatgctgccatttgttgatgaggttcctggcaagccacgcatgttgaggactcctctgactatcctcctctgcgtcctttggctgttcgtaatgcgagatagacagctgccgtggtgtcatccaagtagcggacaagaaggctgctaggagctggcaagttcaccaagtctccccagaaacctcagaaggctaaatgaatattatccctaatacctgccaacccagtcttaacagttgtggaagaagagcctcaaaactctttgtttcaactggccatttaaaagactggctaatgataataatgcatcataaaacctttaaaaggaaaggagaa

SEQ ID NO: 100089 - DNA, 592 bp, Homo sapiens
tcaagaatgtgtctgtcaaagatgttcgttgtggcaatgttgttggtgacagcaaaaatgacccaccaatggaagcagctggcttcactgctcaggtgattatcctgaaccatccaggccaaatccctgttggcagtgcccctgtactggattgtcacacagctcaccttacttgcaagtttgctgaactgaaggaaaagactgattgccattccggtaagaagctggaaaatggccctaaattcttgaaatctggtgatgctgccatttgttgatgaggttcctggcaagccacgcatgttgaggactcctctgactatcctcctctgcgtcctttggctgttcgtaatgcgagatagacagctgccgtggtgtcatccaagtagcggacaagaaggctgctaggagctggcaagttcaccaagtctccccagaaasctcagaaggctaaatgaatattatccctaatacctgccaacccagtcttaacagttgtggaagaagagcctcaaaactctttgtttcaactggccatttaaaagactggctaatgataataatgcatcataaaacctttaaaaggaaaggagaa

SEQ ID NO: 100090 - DNA, 621 bp, Homo sapiens
aaacaggtattaacccccattatatagttgaagaacctaaattcagaaagcccaggctgcctgtccaagttcatatcactagtaaatttcagaactgggactatagtgagtctctgcaatattttcatctgctcagaatttattatgtattctgaaaataatactcttattttgggggggagctaccatccctctctcttccatcctattttctttactcaacagtcatgtaattttattttagcaaattaaaatagaagattaatgaaaaagaagcaatatgtttatagctaaaaaatttacctccgtaacaaaactacacttgtactccctcaatccatcatgtggttttaatatgacaaataccattcacaggtctcagggcatgtgttagaactccaactagatttattaggggaaacaaacatctattttttaaatatatctaaaaatatgtctaaccaaggaggtgaaacgtatctacaaggagaactacaaaatactgctgaaaggaatcatagatgrcacaaatgataaaacattctgtggtcatgaattggaagaatcaatatcaatacaatggccacacttcccaaagcaatctgtagattcaatgctatt

SEQ ID NO: 100091 - DNA, 541 bp, Homo sapiens
ttaacttctaaaacattactatgaaagtgagaaaggggacaatgtgtgtttcttcgaactactccatttttctctcctgtccagctgcttcccattctaccactctacttcccaacataaaaccatagagaaggaagaaggaaaaactggagtaattatttttaatcaaagacggagaccatgtctgccttgttgtcactgtgtcctaggcgttcagcacagttgctggctcagaataggtattggatcaatttttgatctgtgaacaagacagggagaaatataatcccacactaaacattttttattcctacttgtgctaagcakggtgccaagcaggactcatttaaaaaataaaaacgttctagttcttatggaggttactatatacatttatgtaaaagtgtatttttttgtaaatgcacaaaaaactaacccacagggtagaatgaaaaataagtgccaaatgaataatgaataaacaaagataggctaggaaatcacaagaggaggaaaactgtactttatgagagtagagaag

SEQ ID NO: 100092 - DNA, 502 bp, Homo sapiens
taaccacagccttgtctctaaacccaggaggtgacaataaattgctttcatgaggcacagagccagatattaaaactattcaatccctctaggcccagggactatcgtagacttatagatgagtcagttttgtaaccttactttttggtttttrgtttttggctcctacaatgctcaaaaggtttttatggattaatgaatgcctgtgcacctccattcccatctatcttggaaaatttaaatggttatatgtcttttggctctaagtcccttggccataggagtcccactgaggtacaggatggacccagggcaggtagtcataccacccttttgaagtctaaacacaactgaccagatttaatgttaaaacagagatcataagacaaacagaacagacttgtggcaataagatctcaaggttttcagtctattttacaaggacttttgaaatttaactcacaattctgacaatagggcttgtaatatatcttatactctg

SEQ ID NO: 100093 - DNA, 480 bp, Homo sapiens
cagggtctaactgttgcttgggctggagtgcagtggtgtagtcactgctccctgcagcctcaacctctcggcctcaactagcctcccacctcagcctcctgggtagctgagactacagatgcatgccaccccacctagttaattttctgtattctttatagagatggggtttatgccttgttgcccaggctatgatttgtttaatgtaaccactgatcttattccttttaaagtgagctttataaaattactgaatacaaaattttgaagtcatctctggaattgtaactaaatatcttaaatttcttagtgtccctttgtttttgtaacttagtcctgtttgtaatctctaagtatctgaaactaaatrtgattagggctattttaggctaagattcctcaaacagttgttgatcaaaataatgggaaagtccactcctttagaagactcttaagaactcttacacgaggcaagttctt

SEQ ID NO: 100094 - DNA, 688 bp, Homo sapiens
ctttctcttgtatttcagaatctttggaagtcaagtctttcctttagctccctcatcttattcctgactttttatattgcaaactctaggaaaaatctaaaattatttgactatgaatactggtattaagtaaaacttaaaatggcaaaacattttaaattggacaggttgggaaccaaacatacccaccctgagtatgttatattaaaaagtcaaaaagcaacagatgctggcaagactatggaggaaagagaacacacatacactgttggtgggaatgtaaattagctcagccactgtggaaagcagtttgaagatttctcaaataactcaaaacacaactaccaatcaacccagcaatcctattactgaatatatatccaaaagacaataagtcattctaccaaaaatacacctgcactcataygctgatcacagcatattcacagtagcaaagacatggaatcaatctaggtgcccattaacagtggactggggtatatacaccatggaatactacacagccataaaaaaagagaatgaaatcaagtcctttgcagcaatatggatgcagctggaggccattatcctaagcaaattaacacaggaacagaaaaccaaatgctgcatattctcatttagaagtgggagctaaacactgggtactcacagtcataaagatagcagc

SEQ ID NO: 100095 - DNA, 688 bp, Homo sapiens
ctttctcttgtatttcagaatctttggaagtcaagtctttcctttagctccctcatcttattcctgactttttatattgcaaactctaggaaaaatctaaaattatttgactatgaatactggtattaagtaaaacttaaaatggcaaaacattttaaattggacaggttgggaaccaaacatacccaccctgagtatgttatattaaaaagtcaaaaagcaacagatgctggcaagactatggaggaaagagaacacacatacactgttggtgggaatgtaaattagctcagccactgtggaaagcagtttgaagatttctcaaataactcaaaacacaactaccaatcaacccagcaatcctattactgaatatatatccaaaagacaataagtcattctaccaaaaatacacctgcactcatatgctgatcacagcatattcacagtagcaaagacatggaatcaatctaggtgcccattaacagtggactggggtatatacaccatggaatactacacagccataaaaaaagagaatgaaatcaagtcctttgcagcaayatggatgcagctggaggccattatcctaagcaaattaacacaggaacagaaaaccaaatgctgcatattctcatttagaagtgggagctaaacactgggtactcacagtcataaagatagcagc

SEQ ID NO: 100096 - DNA, 593 bp, Homo sapiens
gaaaataaatatataaaagccatcatagcagatgtagaacacttgcagaactattcctttgcatgctatttagaagtcagtttgtctgggatgcagtcttccctcaattcaatattttaaatttaaaaaattagaagcatatcaggagaagaaaaataagcaaattcttttcaatacttttgaatatctgaatttttatacttaacaactaaaatattcaactacagatggctcttgccacagtatcctcaaattcagcaaacttactgcttattaaattagaagagaaaaaaaaycaagagagtgaactctattttaaaaactcaaactgttgataaaacttcacttggtcccactgccatgaactggcaagcttataggacacaatggtaaccatggtccaattataatgggtgtaaagggtaaattaagtaatggtagtagacagatgaggattgtctaattagataccttggaagaaaaatgtggcttcctcgcaaaggcagtgttttctgatgttctatcctaatataaatatgcttttgtatcttgtatcagttttaccttccaaatgaatcccaaagaaagaatct

SEQ ID NO: 100097 - DNA, 593 bp, Homo sapiens
gaaaataaatatataaaagccatcatagcagatgtagaacacttgcagaactattcctttgcatgctatttagaagtcagtttgtctgggatgcagtcttccctcaattcaatattttaaatttaaaaaattagaagcatatcaggagaagaaaaataagcaaattcttttcaatacttttgaatatctgaatttttatacttaacaactaaaatattcaactacagatggctcttgccacagtatcctcaaattcagcaaacttactgcttattaaattagaagagaaaaaaaatcaagagagtgaactctattttaaaaactcaaactgttgataaaacttcacttggtcccactgccatgaactggcaagcttataggacacaatggtaaccatggtccaattataatgggtgtaaagggtaaattaagtaatggtagtagacagaygaggattgtctaattagataccttggaagaaaaatgtggcttcctcgcaaaggcagtgttttctgatgttctatcctaatataaatatgcttttgtatcttgtatcagttttaccttccaaatgaatcccaaagaaagaatct

SEQ ID NO: 100098 - DNA, 589 bp, Homo sapiens
agatgatttcttattgctcattaatgtccttttctttcagattgaagaattccctttagcatttattgtaggacaagtcaggtaatgaaatcctttcgcttttgtttgtctgggaaaatctttattcttccttcatatttgagggatatttccactggataaactatgttagagtaaaagtttttatccttcagcacattgaatatgtaatgccactctctcctggtctataaggcttctaccgagaagtctgctgccaatcatattggagctcctttctatgttatttgtttcctttctcttcctgcttttatgatcctttctttattcttgacctttaggagttcgattattaaatgccttgctgtagtcttatttgagttaagtctacttggtgttctataaccttcttgtacttaaatattgrcatctttctctaagtttgggaagttctctgttactatccttttgaataaactttatacatctgtctctcttttttacctccccttaaaggccaataactcttagatttgcccttttgaggtaattttcttaatttgtaaacatatttcattcttttttattt

SEQ ID NO: 100099 - DNA, 577 bp, Homo sapiens
ctttatgactgattcccttggaaatgaggtctgtagtttattatgaagctggaaaacctcactttgtaaaattaaattcaaagccacaatcatatgccttttctaacaagattcaagagaaggctagaatcaccaacagttttaaatgaagagttattttaacaaaaaatatcagaattcatctatttgccctaaaattattggaaggaaattgacttagagtaagctatttctagtagtgtcacattttgatttttattatatttgtccatagtgttacgtataatataggtacctagtaaataaaaataaataagcaagttattaaatgarcaattaattgattaaaatctgaataaatgtaactcaggcatttttctgactgattcctctttaaatagtaattcccaatactcatcttttggcttgatcaggcttagaggagttatgacagaattatatgtgcaaatcttaaatgttaacatacacaataatggcatttttaccagaagcattattttcccaaatggataagaagtaataatgaaatttaaatcttcttttctaacaaaggaat

SEQ ID NO: 100100 - DNA, 571 bp, Homo sapiens
aaagttaatgcccctttcatgtgcacattcagagtccctgtgtggtgccttgcacactttgtttctccagagttttgcaaaagaactggcaagggtcagattcaactascacctcctggctaatcaagcatcagaccccctgctaggtgtttcccatgagatgccatcacactcaccaaaaatggaaagaggaggttgagcagcagcaaactcttgagccctgtatccaagggagtcgaaacggcaatccataggaagtatcacctggctgtgcaaatacaaggtctgtttctcatttctcctcctggcttgcaaaagtactttcaaacctctgcatccttagtgcagaaaagatcaaagatactcagattcagaagatccctgataatctgaaaagtgaaaacagacttaagagaaataatgaagttagtaatcaagaacttaaaactatccacatttgatataaggttcctaaagtagaaccacatcacgtgcaacaggaacagtgtgaaacagtgcaaggattcacaacagctaaaaagtagatcctcagccatactgccaaaggatg

SEQ ID NO: 100101 - DNA, 541 bp, Homo sapiens
atgtttttctttctaaaattctgaactgataaacactatagaagaggtcatcttaaaaccttgtaaagaaaataaaaatcgtgtttccaggtcatcttcaaaactgcaatcctcattaattcctaaaactaaattccaaaaaattgtttgaaaagacagacctaaaatagtctcaatggtaagacaaggaagacactagtatttttgtttgttttctgacaaaccaccgtatttcatgtgcatcaaagccttctgtgtttttcttgctatatctgccccatgaagggacagtcattagtagtaaaaaaaccacagcttggggaaggatatgcatagcagtcaaatattccagtaaagtatttccttttgattccactctaacccaatctaccatcatgactcagatttgtttgccttcagagtcaatgacaattagccataggtagtacagaaagaaaagaatataaaaataaaatataaaataaataagtatatwtttcaatatacagagtatgttatgtataatttgcatgactatata

SEQ ID NO: 100102 - DNA, 605 bp, Homo sapiens
tatggaagtgtctagtccggaatctgagatctgaggagagtgaaaattcattaatagtttttttgttttgttttgttttgttttggagacggagtctccttctgttgtccaggctggagtgcaatggcgcattctcggctcactgcaacctctgcctccctggttccagtgattctcctgcctcagcctccccagtagctgatattacagtcgcctgccaccacatccacctaaattttttttgtatttttagtagagatggggtttcaccatgttggccaggctggtctcaaactcctgacctcaggtgatccacccgcctcagcctcccaaagtgctgggattataggtgtgagccattgtgcccagcccaatagttcttgtagctctgattgcttagcctaatgttagctactgccaaaatcaggtctttcctgtayatttctgcctcctaatgaaaagagttgattcagagacccagcaaggcagtaagaatactatttgtgaataatccttacaatgagtaattggtatgcaggcagacagaggttaattaagaggcaacgtggtcaggcaacgtgcacagaccaagtgcacaatcttgg

SEQ ID NO: 100103 - DNA, 551 bp, Homo sapiens
ttccttggtattttctatacattttagggtctgtggtatttttagattatttagtattttctatgcatatacacaagtcatctgtaaatagacatagttttatttgtttccaatctgatttttttatttattgcagtggctagattccttggtatgtycaatgcattttaggttcctttgtatttttacagtccttgttattttctatgcatatgagcaaatcatctgtaaatagaaacagttctatttttgttgtttctaatctgtatatttttctttattggagtggctagaacttccagctacatatagaataagagtggtgagagcagacgtccttgctttgcaccctatcttagggacaaagcatctaatctttcaccattggatatgatgtcatctgtagatattttgcaaatggcttttactaaactcaggtaattctcatctattcctaacttgctgagagtgttttattatgcatagctactggattttctcaaatgcttttctgcatcaaatgatatatgtttttcttccttagcttgttg

SEQ ID NO: 100104 - DNA, 551 bp, Homo sapiens
ttccttggtattttctatacattttagggtctgtggtatttttagattatttagtattttctatgcatatacacaagtcatctgtaaatagacatagttttatttgtttccaatctgatttttttatttattgcagtggctagattccttggtatgtccaatgcattttaggttcctttgtatttttacagtccttgttattttctatgcatatgagcaaatcatctgtaaatagaaacagttctatttttgttgtttctaatctgtatatttttctttattggagtggctagaacttccagctacatatagaataagagtggtgagagcagacgtccttgctttgcaccctatcttagggacaaagcatctaatctttcaccattggatatgatgtcatctgtagatattttgcaaatggcttttactaaactcaggtaattctcatctattcctaacttgctgagagtgttttattatgcatagctaytggattttctcaaatgcttttctgcatcaaatgatatatgtttttcttccttagcttgttg

SEQ ID NO: 100105 - DNA, 404 bp, Homo sapiens
atatgttgttgaacctaagcataaaaatggacaatttcccctgaatctctgggtcttcaatctgaaggctcccatgtatgcacattaaataaatttgtataccttttctcctattaatctgcttcatgtcagtgattttcagtgacacttcagagggccaagccctcagttcctacatcaagcattccttgttttgtatgaccttgactggtctgggtagtactgatcaggtgttttacataatgctactctagaagtatctgtttgatatttttcttatgattagactagagttacatgttttggggagaccacaaaagtaaagtgcyatttccatcacgtcatatcaaggatagataatatcaatgtgatttattattgttgatattgaccttgattaccta

SEQ ID NO: 100106 - DNA, 522 bp, Homo sapiens
tttttaaaaagaggaatggagattatttgttgctagaagatctgctttaccaagaaggttttaaaaaagagtcgttcaggctgaaaggacacttgaaaccacatgaatttaataaagagcaccagtaaagtatactacataagtaaatataaaacacagtataaaaatatttatcayggtattagtttgttctcacattgctataattacctgccactgggtactttataaagaaaagcagtttaattggctcacagttccacaggctgtacatggcaggggaggccttaggaaacttacaatcatggcagaaggtgaagaggaagcaggcacatcatacatggctggagcaggaggaagagagagtgaaggggaggtgctctacacttttaaataaccagatctcatgagaactctatcaagaggcagcactaggaggatggtgctaaaccattagaaaccactcccatgatacaatcacctaccaccaggccccacctccaacagtgggaattagaattc

SEQ ID NO: 100107 - DNA, 593 bp, Homo sapiens
ttgtaatggaatgaatgaatagtaaactataataataaactctgtttcagcataaaagatcctatggtttcctcttagtctaattcatcaatgtcacttaaagtatttatagggaaaaatagacagaaagcatgtcactaagagtgtcaattacagtaaggatttgacctcaggagaaagtttatttgctgtttggtatttttagaaaagtatttcatgcaagaaagttmtgattgatttggtgtattgcatgttgataaaatgctgagtggtgaagttttcctacccatggcgctttcttttcaaaaataaatagacccaaatttccatttccatcatccttgtgatgggagggagtcctctgacaatttgattgagttcaggaccgtaaaggacaaaggaaagaaaccctgaaaactgaaagccttttagcttctgagaatcattttctatttaagttgagtattgcgtctagaaattgtgataagccaccggtgatccattcagaatgggcgggcattggccttagtatgcatagatgatttccagttcaatttcatttcgtatgcatagatgatttccagttcaatttc

SEQ ID NO: 100108 - DNA, 368 bp, Homo sapiens
agaatcaccactcctatgactgaatatttgtgtcctctccaccaaattcatatgttaaaatcctaatcytcaaggtgggggtaggaacattgcgaggtgattaggtagtccaccctcatgattgggattaatgaacttataaaagaggctggagaaaaattcctcatccccttgacatgtgaaggcaaagctaacatgcatagtctatgaaccagaaagtgggccctcaccagacaccaaatatgctggcaccttcattgtgaaactaccagcctctagaactatgagacataaatgtctgttgttagtaaacaccaagtccctggtattttgttatagcaactcgcatggactaagacacatgctca

SEQ ID NO: 100109 - DNA, 368 bp, Homo sapiens
agaatcaccactcctatgactgaatatttgtgtcctctccaccaaattcatatgttaaaatcctaatcttcaaggtgggggtaggaacattgcgaggtgattaggtagtccaccctcatgattgggattaatgaacttataaaagaggctggagaaaaattcctcatccccttgacatgtgaaggcaaagctaacatgcatagtctatgaaccagaaagtgggccctcaccagacaccaaatatgctgscaccttcattgtgaaactaccagcctctagaactatgagacataaatgtctgttgttagtaaacaccaagtccctggtattttgttatagcaactcgcatggactaagacacatgctca

SEQ ID NO: 100110 - DNA, 614 bp, Homo sapiens
attgagcccctaaaatttgatgagtatttttgccagtggaagaagtctccacagccccagtggaaacagccttcccattcccagtagtagcaggctttctaccctcatctaagaagattaattctgcattgcctggggaaacttaatggcctcaccagaagtagtttctatgcaagacaaggctgattctcttcagaacccacacstaacacccctctttgcttctagacctgcaactagactcaaacccagcagaccccaaaggtgaggtacaaaatatggcccattaggaggtgcactacactccaaaagaactacttgaattttctaatttacatagacataaacctggagaatatgtgtgggatggatgctaagggtataaaacaatggtggaaggagcataaagttggatgagttcaatgttgatatgggctcactaaggaaagattctgcatttaatgttgcagctcagggagttagaaggggctgtaattttcttggttgattggctgaaacatggaccaaaagatggcccaccatcagcaaattagaaatgcctgacctgccttgatttgatgtagagatgcaaaggcttaggaggattgttatgt

SEQ ID NO: 100111 - DNA, 614 bp, Homo sapiens
attgagcccctaaaatttgatgagtatttttgccagtggaagaagtctccacagccccagtggaaacagccttcccattcccagtagtagcaggctttctaccctcatctaagaagattaattctgcattgcctggggaaacttaatggcctcaccagaagtagtttctatgcaagacaaggctgattctcttcagaacccacacctaacacccctctttgcttctagacctgyaactagactcaaacccagcagaccccaaaggtgaggtacaaaatatggcccattaggaggtgcactacactccaaaagaactacttgaattttctaatttacatagacataaacctggagaatatgtgtgggatggatgctaagggtataaaacaatggtggaaggagcataaagttggatgagttcaatgttgatatgggctcactaaggaaagattctgcatttaatgttgcagctcagggagttagaaggggctgtaattttcttggttgattggctgaaacatggaccaaaagatggcccaccatcagcaaattagaaatgcctgacctgccttgatttgatgtagagatgcaaaggcttaggaggattgttatgt

SEQ ID NO: 100112 - DNA, 562 bp, Homo sapiens
agtaaacaaaaagcaataccacattcctgaatggattacagaaattaatgccaccaaaattcacttgaaagatgyaggggtgatgatcctcaccacatctccattcaactctgctatttggcctgtgcaaaagccagatggatcttggagaatgaaaatataggctaaaacaggtagtgactataattgcagctgttctgtcagatatggtttctttgcttaaattaacacatatctggtatgcagctatggacctggcaaatgtatttttcttgatacctctttgtaaagatcaccagaagcattttgatttcagttggcaaggacagcaatacacttccactgtcctacctctgaggtatactgactttccagccctaagtcataattcagtttgcagggatcttgatctccttttccttcaagaagatatcatactagttcattatattgatggcattatgctgattggacttactgagcaacacgtaacaactattctagtcttactggtaagggatttgcttatcagagagtgggaaatatatgtaacaaaaattca

SEQ ID NO: 100113 - DNA, 562 bp, Homo sapiens
agtaaacaaaaagcaataccacattcctgaatggattacagaaattaatgccaccaaaattcacttgaaagatgcaggggtgatgatcctcaccacatctccattcaactctgctatttggcctgtgcaaaagccagatggatcttggagaatgaaaatataggctaaaacaggtagygactataattgcagctgttctgtcagatatggtttctttgcttaaattaacacatatctggtatgcagctatggacctggcaaatgtatttttcttgatacctctttgtaaagatcaccagaagcattttgatttcagttggcaaggacagcaatacacttccactgtcctacctctgaggtatactgactttccagccctaagtcataattcagtttgcagggatcttgatctccttttccttcaagaagatatcatactagttcattatattgatggcattatgctgattggacttactgagcaacacgtaacaactattctagtcttactggtaagggatttgcttatcagagagtgggaaatatatgtaacaaaaattca

SEQ ID NO: 100114 - DNA, 562 bp, Homo sapiens
agtaaacaaaaagcaataccacattcctgaatggattacagaaattaatgccaccaaaattcacttgaaagatgcaggggtgatgatcctcaccacatctccattcaactctgctatttggcctgtgcaaaagccagatggatcttggagaatgaaaatataggctaaaacaggtagtgactataattgcagctgttctgtcagatatggtttctttgcttaaattaacacatatctggtatgcagctatggacctggcraatgtatttttcttgatacctctttgtaaagatcaccagaagcattttgatttcagttggcaaggacagcaatacacttccactgtcctacctctgaggtatactgactttccagccctaagtcataattcagtttgcagggatcttgatctccttttccttcaagaagatatcatactagttcattatattgatggcattatgctgattggacttactgagcaacacgtaacaactattctagtcttactggtaagggatttgcttatcagagagtgggaaatatatgtaacaaaaattca

SEQ ID NO: 100115 - DNA, 529 bp, Homo sapiens
tgccacattccatcctcaaacaaaagtgatagatatgtgatcargcctaagcaggccctgaaggcaaaagttacatatagaaatgaccatcttagtgcatttgtgttgctgtaaaggaatacctaaagttgggtaaattatgaagaaaagaggttcatatagctcacagttctgcagattattcaagaaacatggcgccagggtctgcatctagtgagggcttcaggctgcttccactcatggtggaaagagaaggagagccaagcatgtgcagagataacatgaaaagagaggaagcaggagagtgaaattgaggaagccagagtctttttaacaacctgatctcttaggaactaagagtgaaaacttactcatcaacatgagaacagcactaagccattcatgagggatatgctcctatgacctaaatacctcccattaggccccacctccaatattagggatcaaatttcaccatgagattttgggggacaatcatccaacttacagcaatgacctaaatgcccat

SEQ ID NO: 100116 - DNA, 529 bp, Homo sapiens
tgccacattccatcctcaaacaaaagtgatagatatgtgatcaggcctaagcaggccctgaaggcaaaagttacatatagaaatgaccatcttagtgcatttgtgttgctgtaaaggaatacctaaagttgggtaaattatgaagaaaagaggttcatatagctcacagttctgcagattattcaagaaacatggcgccagggtctgcatctagtgagggcttcaggctgcttccaytcatggtggaaagagaaggagagccaagcatgtgcagagataacatgaaaagagaggaagcaggagagtgaaattgaggaagccagagtctttttaacaacctgatctcttaggaactaagagtgaaaacttactcatcaacatgagaacagcactaagccattcatgagggatatgctcctatgacctaaatacctcccattaggccccacctccaatattagggatcaaatttcaccatgagattttgggggacaatcatccaacttacagcaatgacctaaatgcccat

SEQ ID NO: 100117 - DNA, 529 bp, Homo sapiens
tgccacattccatcctcaaacaaaagtgatagatatgtgatcaggcctaagcaggccctgaaggcaaaagttacatatagaaatgaccatcttagtgcatttgtgttgctgtaaaggaatacctaaagttgggtaaattatgaagaaaagaggttcatatagctcacagttctgcagattattcaagaaacatggcgccagggtctgcatctagtgagggcttcaggctgcttccactcatggtggaaagagaaggagagccaagcatgtgcagagataacatgaaaagagaggaagcaggagagtgaaattgaggaagccagagtctttttaacaacctgatctcttaggaactaagagtgaaaacttactcatcaacatgagaacagcactaagccattcatgagggatatgctcctatgacctaaatacctcccattaggccccacctccaatattagggatcaaatttcaccaygagattttgggggacaatcatccaacttacagcaatgacctaaatgcccat

SEQ ID NO: 100118 - DNA, 618 bp, Homo sapiens
cctaatcagtaattactttaaagaatcctttcatgtattgctgtagcagtttaaatttggctaattcaatttatcagtaaaatttataatgtccttttactgactaatgtttttttttcaatcttccaagacatctgaatgattaatgtttttaagtcttgtctttcaagattgtaaacttcttgagggcaagaatcaaaatttaccctttttttgagtttgtgttttgcagcatccttaacacctgcacgtaataagtacttaataaattgtgtttatttaaattgtggtaatgttaatgaggtagcttatcaattttgtgggacaatgaggaatcattgtttgaaagaaaaacataatttattaaaagttgaatttccagtgggtttttgtgtaattgtgaaaaaatgtctgaggaaagcaaacccactaaatcaatagaaamgtattcagtaaatactgagtttctaatatgtacatatcatagcctttcagataagctttttgtaacacaaattagaaattatgtgtttcttgatgtgtatattttcattcatagtttagattttctgttaaagggttaatttgcttcccaaataaaggaaggcaataagtaaa

SEQ ID NO: 100119 - DNA, 647 bp, Homo sapiens
aggcattaaagcaagaatgtgcttggtattgtggggaaagtgcctaggtagttatctctgcctgaagcaagtgtatgttttaggcattaatgggaaataaaatttatacatctttgggtagagttggcttacggagagccctagcttctcagaaaaagaagctcggacttgacactcyaggcaatgtagattcttaagcaggatgagtagtgacatgatgaaaatcatgtctttctttattattagaaagattaatctggtaggcacatataaaatagattggagtaggatgacctatactggagtagtaacagtgagaaggaaagaaaaagagtgaaagtagagagaatggttaaaacagaaagacttaggaatagtatgagtataggggatgaagtggaggacagagtcaaaggtgcgtcttagtttttctagcctacatgcctagaagaattgataaagttgataatgttatgcaagacactttgctaattggttgaagctaatgagaaccatatttctctaccctttatctacctcctaggtatcatctttgcttccctagtatatataatacatataacattttttatatattaggattttttccttagccatttattttattttttcttatttatatcggt

SEQ ID NO: 100120 - DNA, 551 bp, Homo sapiens
gtgttggaaagaagaaataatagatgagtatattccaaaatttttttttcccccaaagaatgagtttaggaaataactggaataatcacttgtgtgatgtttatagcaatgggtgagtgtcatgatggacccatrtagttcatggtttgcacaacacccatcgcatgatcaggcaagtcggagagctagtgagttcataataatcctaaggacatggtgaggttgttttagtggacatttcctaagatttctactttctcaccactcttctaacttcaggtcaccatctccctctgactgctccaacccaacagcactgccccaattctccctgctccttcacttctgaactacacagggcactaggacaacagttccctttcagatattctctcacgcctgactgggcttttcctgtccccactctgtggggagcaatccccaagccttactcctaatgcttccccctagttatattaccttcagcaaaccctagaccaggacttccagggacttggattgcgcaagtagctcctccctcatcacatcat

SEQ ID NO: 100121 - DNA, 551 bp, Homo sapiens
gtgttggaaagaagaaataatagatgagtatattccaaaatttttttttcccccaaagaatgagtttaggaaataactggaataatcacttgtgtgatgtttatagcaatgggtgagtgtcatgatggacccatgtagttcatggtttgcacaacacccatcgcatgatcaggcaagtcggagagctagtgagttcataataatcctaaggacatggtgaggttgttttagtggacatttcctaagatttctactttctcaccactcttctaactkcaggtcaccatctccctctgactgctccaacccaacagcactgccccaattctccctgctccttcacttctgaactacacagggcactaggacaacagttccctttcagatattctctcacgcctgactgggcttttcctgtccccactctgtggggagcaatccccaagccttactcctaatgcttccccctagttatattaccttcagcaaaccctagaccaggacttccagggacttggattgcgcaagtagctcctccctcatcacatcat

SEQ ID NO: 100122 - DNA, 559 bp, Homo sapiens
tactcatgcgtattaggaaaacaaacccaaagccaaaaaaataatcaggttacatgaaggtagaatcacatttgggtggaaagtgggaggcacaaggatgactgggctggtcataaagatgtcaggtaataggcaactttggagaaattcctctagttccatgaagcttctgaaatgacccaaggtctgggagatgacagaattcctactgtaattattcacagtccttgaagtctgaaccacttacttggaaggtgccactgatgttggctgttcctgttggatgcctcttatagagtggggctcttcttataccactgagaaagcgagttccttgaagatgcccaagacccaggcctgagcctgatctttctgcgtcctctcccttgaccrccgttgtgttctaggaaccaatatatggtaaaggctccacagaaagtagaagaaacccttttttctaaggggctgaatccaagctttacgccatttggtgaaaggaaataaccaagccctttaaagaaactacctggttaccccacaactgagaaaaacagatcaa

SEQ ID NO: 100123 - DNA, 568 bp, Homo sapiens
tttctcttcaatctaaagcttggcaacaatgagcagccctgggtacacacactcactgagtctatgctcacctcccagtcatcatatcactggcatatcattctacaaactcatgtcawccgaaccctcaggtgttccaagccatcatctcatgatgaactcttaactgaataaaaccagctaaaaggaaactaaaccttttcacccaaactcttgacacatttcgtacatttttaatcaaaataattacagagacaactaattaaaagccaaatatcccacctggagagaatgttcacattatgcccttttgttgcttttgaatttcaaaacacttgcattacaaaatcccatcaatacgttttttaaaaatacacttcatgaaactggtgtattgcttacactaaaaacaaataaacgaacaagaaatcttcctcctcagccacaaggataaaaggcaactgggggaaaaaaacaaaataaaagcaaagcagaacacactgacaattcttacttctgtttgtggtaatgggttcagattcctgatccagagacagaagggaagcaa

SEQ ID NO: 100124 - DNA, 568 bp, Homo sapiens
tttctcttcaatctaaagcttggcaacaatgagcagccctgggtacacacactcactgagtctatgctcacctcccagtcatcatatcactggcatatcattctacaaactcatgtcatccgaaccctcaggtgttccaagccatcatctcatgatgaactcttaactgaataaaaccagctaaaaggaaactaaaccttttcacccaaactcttgacacatttcgtacatttttaatcaaaataattacagagacaactaattaaaagccaaatatcccacctggagagaatgttcacattatgcccttttgttgcttttgaatttcaaaacacttrcattacaaaatcccatcaatacgttttttaaaaatacacttcatgaaactggtgtattgcttacactaaaaacaaataaacgaacaagaaatcttcctcctcagccacaaggataaaaggcaactgggggaaaaaaacaaaataaaagcaaagcagaacacactgacaattcttacttctgtttgtggtaatgggttcagattcctgatccagagacagaagggaagcaa

SEQ ID NO: 100125 - DNA, 607 bp, Homo sapiens
catcagggcaggatttcagggagggaaggaagggcatgtgtgtacttggagggcataacaggcaagttkctaagacaaaggacagcttcttggagtttaaacgttctaactagtcccttaactcaatcccagatctgatgctttacttaccccttggattagttttcttttgctacatagcagactaccactaatttagaagcatgagatgacattgatttattatgtcataaaactgaaaccaaagtgttggccagggcatgttctcatctggagctcagagtccttttttttttttttatacaggttgttggcaccatttggttccttattgctttaggactaagggtccccattttcttgctggctgttggccagaggtcactcagctcccagaagccaccctcaggtcccagatacatgaccccctctataggaagctcatagactggctgtttgctttcctctagacaaggagaaaaggtacctccagaaaagacctatctcttctcatttgaggaccacctgattaggtcaggcccacccagaaaaaatctcttaattgagtcagtcaattgattagggacattaattacatcagcagagt

SEQ ID NO: 100126 - DNA, 614 bp, Homo sapiens
ctgtcttagtccatttgtgttgctacaaaggaatacttgaagctggtattcctttataaaggaaagaggttatttggcttacagttctgcaggctgtacaagaaacatggcccatcctctgcttctggtgaggacctctggcagaaggtgacggagagctggcatgggcagaccacacagcaagagagaaatcaagagagagggggaacaggcactaggctcttttatgaacaactacctctcacaagaattaatagagtaagggtcaggcaccgtggctcatgcctgtaatctcagcactttgggaggccaaggcaggtggactggtttacstcaggagttcgagactagcctggacaacatggcaaaaccctgtctttaccaaaaatgcaaaaatttttgcttttttttgcttaagcccaggagatcaaggttgcagtgatctgagatcatgccactgcactccagcctgggtgacaaagtaagaccctgcctcaaaaaaaaaaaaaaaaaaagaaagaaacaaagaactaatagagtaagaactcactcattgcctagaggagggcaccatgacattcatgaggcatctgcctccatgactcgaacgcctc

SEQ ID NO: 100127 - DNA, 545 bp, Homo sapiens
tgtatagcagatggccatgttctcaaaattrgtagtgccttgtagttggaaaggaaattatataattccaaaggttacttacacctagtcttgctggtttgaggaataggtgtcaaggatgactctttccctcctgcttctttcttggcaagaccattttcaagtggagtctttctttctattcctctgtttgtaccatctttttaatttctggattctggtagagaattttcattgtgtaccagctttaaacagagttaggaaatgctactgtagcttttgtgacctatggaataaatatgagtgaaatggttaaaaattctacacagcagaacaactgaccttagcattccaggtgaaagttttgcttttatgtctcagaaaaaaaacaacaaaaaaaacccctgtttttattgtaatgttttaatcaagtaacataacagctttaatcaggaaattataagtcaatttagtataccaaaatgaaggattattctagttggataaactctgtgaataaaattcagaatatgtgattttggatt

SEQ ID NO: 100128 - DNA, 429 bp, Homo sapiens
aacatacaaaaatcagtgatatttctatatactaacaacgagccatctgaaaacaaaattaagaaaacaatcccatttacaacagcaacaaaacgaatgaaatatttagaagttaaagacatgtatactgaaaactaaaacattgatgcacgaaactgaagatgacacagataaatgaaaaaacatcmtgtgttcatagattagaagaattaatctgggagtgatggcttgtgcctgtaatcccagctattcaggaggctaaagcagcaagatgcttgaggccaggagttctgggtaagcttgggcaacatagcaagatcccatctcaataacactaaattaaaaaattagctggtcattgtggcgtttgcctttatttccagctgctaggaaggctgaggtagaaacatcatgtgagcccaggaattc

SEQ ID NO: 100129 - DNA, 561 bp, Homo sapiens
acacaatcctaaatatgaaaagcatcccagttcatggtgataaaaatgtacaatagtgaaccaaaattcctcaatcactttcaaatctgtaacagaaagcagctgcattgctcttaaagccagtagctgtaccccacacagcaactagattgtactgaactcaaatatcccatacccatgtatttatctgtgctattaattgtggcctttgatgatatatctttttcttcatttcagtgttgtgtagtcattcaaaaagataccttacagtgaattcattccatgttattcgaacttcataatttggcaaaataaatgccaatcataaacatatttagctagtaattttaactaaaatgtaattttagtcacatcactacactgtgagccattaggatcatcaaagataacttacttttgagctacaaaataattataagacaaacctttgtagaaccaacacctttccccaatatctaataaygtgtaagattattagttttgtctcctgctgttccttactttctgtaagaaaagcacatgggccaggtgtggtggctc

SEQ ID NO: 100130 - DNA, 505 bp, Homo sapiens
ggaaaaaaaaactttgaacctccacagagcatggaattggagcttcaagttaatcatacttgtaactcaaagggcaagaagttctcagttaacacctcggttgcattttatgtgaagatttaatgagataatgaatattactacctgggtgttgagacaaatagacaatgatgacccctttttctctttggcttctgacattgattagtggaaccctggcccctgctaataagattggagttagagtctgatgccagcaggaacactcagatatgctttcctaagaatttgcaatcggaacyaagagtttatatttatacacatatacaccatagcttgatacatggataagaaggaggaaaaggcaggcaacagagctgagatgaagcataccacaaaaaggtgccaattttatttccatcaaaacattgttgtatttcataacggaagcattcttttcttggtaattagttacattaagatatgagcatctaaatttctggga

SEQ ID NO: 100131 - DNA, 600 bp, Homo sapiens
gtatctaatttgaaactaaataagctgtctcttttagcagtatttaggttcagatattctcctcctacttcacctgctatgaagttaagcttttcagacagagaaaagggaatgttcacatgtctttgtggtggctgttagttttgtattattttaatttcgtgagaggtacaatggggaggactcctccgacctttggttctttgctggatatgcacttgctgatatttttaatgtcactcttgtccactttgtagttgggcctcgtacatgcttcctaaactaaagtttgaggttttaaacttagggctgtaatcaagtccttccagaagcatagccctctcccacctggttagctcagcttacccaagytttagctggcaaagatatacagttctcttccgttcatctctctggccttgacaagagtgtgacttatgccacttcgggaggctgctcacagatctggtgacctcctccatggtctccctgccatcaaagaatgacaggagctagagggtgcccactgtgctcctcttttcccacgccactccaccttgtctactaaactggctgcctcatgttagtgcagggcgcagt

SEQ ID NO: 100132 - DNA, 610 bp, Homo sapiens
ctccctctctctctttttaaatacttctattttcagagaaaagaggaaaacctgggaggagctttcagttactaattatttccagcatcaatgtttggtcttaaagccatagttygtttgtagagaggacaatgtaatggttccagaaatataggtcctagtcctacttggggagctgggtgaacagttcagttttttcagccatttttatgtgccaaggaggacagtaggacatgcagttatatgaacactgaagtggaaatcaggagacctgaaatttattaaacaattctacaaacaatggtaatgtgatgaaataactattttcaatcaagtgtactagtttcctggtgccatgtggtggaggctccatgaacagttgttgaatgaatgactaggtaaacaatcatgaatacataaatgcctagtatatacaatagtcaatcaacagtgagcagaatttcgaggaggcattgtgatcactgtacttacaggctgcagggagtactgatggaagtgtgtaacttgttgtgggaacaaagggatgactccaggggaaatgtaagggctatgagttaactcaggtctgttgctgctactaaattatgct

SEQ ID NO: 100133 - DNA, 605 bp, Homo sapiens
ggctggaatactaggctgttttgtaaatgtacaacctgagatcacagagcattggaagctgcttgtacagaagaaaaagatcagtacttgaactcagaagatccatgtttacatcttagctccrttgtttttatgagtttgggcaaaactcttcttttttacaggcctcaatctaacaatttgtataaaaggagatcagtgaatatgttagtcaggactctgtctgaactaaatgtagaaatacacatcaaaatacattaagaaaatattaaatgtatatgttcataaaactgaaaattctaggcttataactcactctacgtggggctggatcaagaggcttgatttatgtaatcaggcatttttcttctccagcctcagttctgctcttttcatagttatgttcatttgattttttattggctctagggttttttatttcatcttctaaatgaagagttttcttccctgataattataataaaagctctgaaatggagcctcattgatctgacttgagtcatatactctaccttaatcattatacattagtttattaatttatttgctagttactatttgagctttactatgtgataggcact

SEQ ID NO: 100134 - DNA, 614 bp, Homo sapiens
caaaactcttcttttttacaggcctcaatctaacaatttgtataaaaggagatcagtgaatatgttagtcaggactctgtctgaactaaatgtagaaatacacatcaaaatacattaagaaaatattaaatgtatatgttcataaaactgaaaattctaggcttataactcactctacgtggggctggatcaagaggcttgatttatgtaatcaggcatttttcttctccagcctcagttctgctcttttcatagttaygttcatttgattttttattggctctagggttttttatttcatcttctaaatgaagagttttcttccctgataattataataaaagctctgaaatggagcctcattgatctgacttgagtcatatactctaccttaatcattatacattagtttattaatttatttgctagttactatttgagctttactatgtgataggcactgttctaaacatttgtgatacaatgacgagcataatatacataaacatataaaatagctgcttttataaagcattcattctcatgaaacagtcaggcaatacagtaatgcatgaataaaaatataatattctgtcattcttgtcatgttacaa

SEQ ID NO: 100135 - DNA, 605 bp, Homo sapiens
ggctggaatactaggctgttttgtaaatgtacaacctgagatcacagagcattggaagctgcttgtacagaagaaaaagatcagtacttgaactcagaagatccatgtttacatcttagctccgttgtttttatgagtttgggcaaaactcttcttttttacaggcctcaatctaacaatttgtataaaaggagatcagtgaatatgttagtcaggactctgtctgaactaaatgtagaaatacacatcaaaatacattaagaaaatattaaatgtatatgttcataaaactgaaaattctaggcttataactcactctacgtggggctggatcaagaggcttgatttatgtaatcaggcatttttcttctccagcctcagttctgctcttttcatagttatgttcatttgattttttwttggctctagggttttttatttcatcttctaaatgaagagttttcttccctgataattataataaaagctctgaaatggagcctcattgatctgacttgagtcatatactctaccttaatcattatacattagtttattaatttatttgctagttactatttgagctttactatgtgataggcact

SEQ ID NO: 100136 - DNA, 529 bp, Homo sapiens
aaagggcactaaactttgcaatcaggcaggtctgtgagaaggccacagctccctggctatgaatgaacctgtgtaccctctctgagccctggtttcctctgctatgaagtgacaataataatactttctgtttaagtttgctagggcttccataacaaagtactgcaaaccaagtgacttaaacaacaggaatttattgtcccacggttttggaggctgaaagtccacaatcaaggtgttggcagggttggttcttccttagggctgtgagggaagaacctgttgcrggtcattctccttggcttgaagatggctatcttctctctgtgtcaatttacagtatcctccctctatgtatgtctttctcactatccacatttcccttttatatgagaacactggtcatcttggattgaatccaccctactctggtctgacctcatcttaactaactacatcaacaactccatgtccaaacaagctcacattctgggctactgcgggttaggacttcaatatatgaattttg

SEQ ID NO: 100137 - DNA, 593 bp, Homo sapiens
tttttattatctgtactccagttatttccagacagatcatgtgctcttaatcctcaaaatctcttcaacttctccatttaactgcaacattcttctctgctctactcttgccaaaccctagttcaacactcaaagctccattcaaacgttacctcttcagagagtctttctcaattcctccaggcacagttggcctctattacagtactatcatttttattgtaattacttgttttgaaaatctatcaccccatgacactatatgattctcaaggatggtaactctgtattattcatttttgtattccagcaactattacagcaccgagcacatgtataatcgatgctgggtccatattcgttgaatggatgagcttaaacacatgcacacacatgaacacccacatacacattctgctcatattaatgtactgtgctatctcaagtagtttatttcaccatctgcaaaatggctttatctctcctgattaacattttaaaaacctatagaaatattttttaaaagcagggggaaaagtactttcaaagaaaaacttgaatctttaaaagtawacataatgatgccaacagta

SEQ ID NO: 100138 - DNA, 568 bp, Homo sapiens
aaacctctgttactgcttcttaactgctttaatgactcaacttatatcccattatattcacagctattgccrtactcaaaagggagagcattattcaaggtttgtacgccagggatataagtattataattctgaataccatccttgctaaatgattttgtgtaaatatttatggtcttagtttccaaaaatgaaaagtataaataaaataaatagccctaaaattgttttataatgtatataattctaagcctcaaaatgagctaagtttgaaaatgtgtaagtgaattcctctctattttagatattttcttcttccaaagggcttaatatataatttgccatcagtcacaaaggacatttgttgatcaaatttagtctgcacaaatgaatagacctctgttaagtgagtagcacatacaatatatagtttcaggctaaaatcattacttctttattgatagaaacaaagaaaaaaacatttggtatttcaaacttcaatgcacaatgataaaaattagttaataaatataggattgtattcgactatcaaatgatcatatataaa

SEQ ID NO: 100139 - DNA, 568 bp, Homo sapiens
aaacctctgttactgcttcttaactgctttaatgactcaacttatatcccattatattcacagctattgccatactcaaaagggagagcattattcaaggtttgtacgccagggatataagtattataattctgaataccatccttgctaaatgattttgtgtaaatatttatggtcttagtttccaaaaatgaaaagtataaataaaataaatagccctaaaattgttttataatgtatataattctaagcctyaaaatgagctaagtttgaaaatgtgtaagtgaattcctctctattttagatattttcttcttccaaagggcttaatatataatttgccatcagtcacaaaggacatttgttgatcaaatttagtctgcacaaatgaatagacctctgttaagtgagtagcacatacaatatatagtttcaggctaaaatcattacttctttattgatagaaacaaagaaaaaaacatttggtatttcaaacttcaatgcacaatgataaaaattagttaataaatataggattgtattcgactatcaaatgatcatatataaa

SEQ ID NO: 100140 - DNA, 602 bp, Homo sapiens
aagtgtcgtataaagaacttggattctccaggcagactgccaggatttgtatcctggctcttccacttactgcctatgtgatcatcatgctaatcttcaagctggatatgagcaatgcaccccttgagagcacatggagaccttagaatcaataaaagacatagttattccaagaaaatggatttttatagcccaaatctacataaacgtgtatacctatatatatacacacacatatatatgtatgtgtgtgtgtatatatatgtgtatatatataygcttttccaaaatttatccatgaagctaccttgtttgactgagattttgttcctctttcctatctatcttttcacaatcacctttccgccattttaccaaacaaatgcatgcctcccactcatccaaaatctactaatagtagtataatctactgttcccaagagtaaaatcctttgggccactaataaatgaccagttaaaaatgttgtccatgagtgattctaacaactgggtagcaaatagttttgcaaaacaagggctagacactttgtatatgtaatttttaaaaattgctttcaacgtaattgaaagatgacttgatc

SEQ ID NO: 100141 - DNA, 602 bp, Homo sapiens
aagtgtcgtataaagaacttggattctccaggcagactgccaggatttgtatcctggctcttccacttactgcctatgtgatcatcatgctaatcttcaagctggatatgagcaatgcaccccttgagagcacatggagaccttagaatcaataaaagacatagttattccaagaaaatggatttttatagcccaaatctacataaacgtgtatacctatatatatacacacacatatatatgtatgtgtgtgtgtatatatatgtgtatatatatacgcttttccaaaatttatccatgaagctaccttgtttgactgagattttgttcctctttcctatctatcttttcacaatcacctttccgccattttaccaaacaaatgcatgcctcccactcatccaaaatctactaatagtagtataatctactgttcccaagagtaaaatcctttgggccactaataaatgaccagttaaaaatgttgtccatgagtgattctaacaactgggtagcaaatagttttgcaaaacaagkgctagacactttgtatatgtaatttttaaaaattgctttcaacgtaattgaaagatgacttgatc

SEQ ID NO: 100142 - DNA, 560 bp, Homo sapiens
ctttcctaaactccaaagtattttgtatcacttttaatatctatatcagtgtcttttgccttctaaactaaattaggaacatatgaattacttcttatttatccttttctctgataaagtacaagatacgatgctaagcatattgttgattctcaattaaattggtttagttgcactcgattagacaacatggtctttataaaatgcttctgaaaaattcttatagttaggacagaaacagcatgaatgttttggttccttttggctcarggattaatctgtgtgtcagatctgatgagtcaaagtattttattcccttggccactgtgatatgttgagggaagatcaggagaaccaatttaagcttagaagacacaaagagatcttttctggggttgcttgaaaaacgattctgtttttttttcccctgccttttgaagattgagtaattttaggggctggagataatgagacaatgatacttcatgttaccaaaaaaaaaccaaggctaaagccagcacaaggtaaagaaaagctgataaatcaacatatgtgaagtt

SEQ ID NO: 100143 - DNA, 572 bp, Homo sapiens
taaaagtttaataaagacatagaaatcataaaatgaaccaaacagaaatcattgggctgaataataaaatgacagaactgaaaatttcagtagagagtttcaacagccgacttgctcatgcagaagaagtgatttgttaactcaaaggcagatcatttgcaatcagctgattagcagaacaaaaagaagaaagattaaaaatgagtgaagaaagcataagggattcatgagatactatgaaacatatacatatacaaatcatgggaatactagaaaaagaagagagatacaraaaagcagaaaactaatttaaagaaatactgcctgaacactttccaaatcttgggaggtatatgaacataaaagttcagaaagctcaaaggacttcaagcggataaattcaaaaattaatactttgagacacattataatcaaattgtcaaaattcaaagacaaagagaaaatcttgaaaggagcaagagaaaagaaactcatcatttattaaaaaaaaaaaaaaccctcccataaggctatgagcagacttctcaacagaaaccttgcatgccagcaag

SEQ ID NO: 100144 - DNA, 572 bp, Homo sapiens
taaaagtttaataaagacatagaaatcataaaatgaaccaaacagaaatcattgggctgaataataaaatgacagaactgaaaatttcagtagagagtttcaacagccgacttgctcatgcagaagaagtgatttgttaactcaaaggcagatcatttgcaatcagctgattagcagaacaaaaagaagaaagattaaaaatgagtgaagaaagcataagggattcatgagatactatgaaacatatacatatacaaatcatgggaatactagaaaaagaagagagatacagaaaagcagaaaactaatttaaagaaatactgcctgaacactttccaaatcttgggaggtatatgaacataaaagttcagaaagctcaaaggacttcaagcggataaattcaaaaattaatactttgagacayattataatcaaattgtcaaaattcaaagacaaagagaaaatcttgaaaggagcaagagaaaagaaactcatcatttattaaaaaaaaaaaaaaccctcccataaggctatgagcagacttctcaacagaaaccttgcatgccagcaag

SEQ ID NO: 100145 - DNA, 598 bp, Homo sapiens
agaagtgaaataccctatttgctaatgatatgattatatatatatatatatatatatatatayacatatataaaaacctctaaagaagccaccaaaaactattcaaattagtaatgtattcagtaaagtttcagggtacaaaatcaacatgcaaaattcagtagtatttttaccacactaataacaaactatctgaaaaagtaaagaagtaaatccattaacatagcataaatataaacataaataaaattattaggagcaaaatttaacaaaggaggtgaaagatccatatactgaaaactgtaaaacattgatgaaataaattgtagttgacacaaaaaatggaagatatcttacgttcatggatgagaagaattaatattgttaaaaagtctgtactattcaaagtgatctatggattcagtgtaatttctatcaaaatttcaatgtcatttttcatggaaatagaaaatactattcaaaatttctataaaaaatcacaaaagacctcaaatagccaaagcaatcttgagcaataataacaaagccagagccatcatattatcttattttaaaataaactacaaagcaataataa

SEQ ID NO: 100146 - DNA, 625 bp, Homo sapiens
gtattcagtagtacaatagggtgactttagttaacaagaatttattgtatgctttaaataactaattgagtgggattggaatatttctaaacacaaagaaatgataaatgcttgaagtgatggataccccaagttccctgatttgatcattatgcattttatgtctgtatcaaaatattgcatcctcataaatatatacaattattatatatctaaaataatttaaaataaaaattagtaaatawtaaaagtgccaattctgaatctcaaagctctgaaagtaaaaatgttaaagatggaaatatgtaaacttgttccctgtggaatattggtctaaagctctattttgttaacccaattctttactattttacaaaattttattgaatttctaaagtatgtcatatctagagagcctcacaattttattggtattaaatatggtataaagaatctactttgcattagataattccacagaaatatacattagtagaattttattaaatcaaactgagctaatttttaaaataaaaaacaatgtacaccaaaataacaaaatcttgtattaaataatctttattttttaaagtcaagacaaagtcaatgtcagatgttctatttc

SEQ ID NO: 100147 - DNA, 625 bp, Homo sapiens
gtattcagtagtacaatagggtgactttagttaacaagaatttattgtatgctttaaataactaattgagtgggattggaatatttctaaacacaaagaaatgataaatgcttgaagtgatggataccccaagttccctgatttgatcattatgcattttatgtctgtatcaaaatattgcatcctcataaatatatacaattattatatatctaaaataatttaaaataaaaattagtaaatattaaaagtgccaattctgaatctcaaagctctgaaagtaaaaatgttaaagatggaaatatgtaaacttgttccctgtggaatattggtctaaagctctattttgttaacccaattctttactattttacaaaattttattgaatttctaaagtatgtcatatctagagagcctcacaattttattggtattaaatatggtataaagaatctrctttgcattagataattccacagaaatatacattagtagaattttattaaatcaaactgagctaatttttaaaataaaaaacaatgtacaccaaaataacaaaatcttgtattaaataatctttattttttaaagtcaagacaaagtcaatgtcagatgttctatttc

SEQ ID NO: 100148 - DNA, 405 bp, Homo sapiens
attcaattaatggttttcttttttaaaataaaagcagaaatatttgtaagatacaaaaaatggaaaatagaacataatgtagatttacttaggcattacacatttttgaatacccatgaagtattgaaggggttaaaactgtaattgatttaaactttctgttrtatttctgtagctgtaatagttttcaatatttcaaaaataaaatcatactaattttgttatgtgttattctattgtacaccagtttctgagagaaaacatgattgtatagccaaaggcctttaaaattaattcatccaggtaaattttctttgtatatcatattaaatatgtaatttgcagcaaaggacaggtccttttgggtttaatctgaactttgaattttgaatctcagaataaaat

SEQ ID NO: 100149 - DNA, 584 bp, Homo sapiens
taaagatgttttaaatctacagatagtgctattgcctaccacgtctggttttgcattcattgatttactaaacatttattagacaactataatattttgggaaatctgaatgccaagctgaatacagcatgccttatgctacgaaattaatgctttcataaggcattttttctgtatcagtggttctcttacttaatatgcatcagaatcacctaaaaggtttgttaaaaaacagatggctgaaccctacctcaggagtttttgactcattatgtctgtactcaggtttgaggatttgcatgtctaatgttttactagggaatgctgttgctgctagtctggggaccatgctttgagaatcactatgccagacaacattctcatcatagtctgcttctcayttgattcagtattggatgaagatcaaccaaattgaccactttcaatctaacaaccaaacaaccttcagtttgtctgcacactgaaggttgcctggggactaagaataatctctgggttttttccatgaatgaacctgaactgaccctaagggattcacactcctactgaatcagacaggaatg

SEQ ID NO: 100150 - DNA, 635 bp, Homo sapiens
atcacagtgtattatccaacataagaaagggagctaaatgagatcaatctttaataaagccatttccagcaaaatatcatgcaggagagggcagaacattcccgctgcttcctgaacaacacaggagaccaccatcatcataagcttctatctgtcaattgccaaagggagacctgtccgacaagagctaatgccatcctttaagaagaaagtatttcttgaacactcatgcctaatagagatattccactgcatctggaaaccacagtgaaagatattcacctatgatactccctagccctgatgcttacatttcagagctgaaatttaattctgttgtccctcagggtgacatagtctatcacccactgagccttcagactaattagattcccagtttaagacttatgttcaactaatagccttgagtatgtcaaccacaaaccacaatgaaaatatgcaaattcgtatagccatcagctaactgacccacctgccaaatataatataaacccctcttgctctactctctatcatgagtgccactgttacaytggtatccacccatgaggttacaactacataacactactgcttaagtattaataaaaagtaggatagcacagtaagacaga

SEQ ID NO: 100151 - DNA, 655 bp, Homo sapiens
ttcatagcaaggccctaactcttttcaattctatcaaggctgagggaggtgaggaagctgaagaagttgcaagctaacacagattggctcataaggtataaggaaagaagacatttctataatatagaagtgcaaggtgaacccacaagtcctcatgtagaagctgcagcaaattatccagaagaactggctaatataattgatgaaaatggctacactaaataacaacttttcagtgcagatgaaacaactttctaatgaaagaagatgctagctaggactttcaaagttagagagcagatgtygatgcctgctccaaagcttcgaaggacagactgactctcttgttaagcactaatgcatctggtaactgaaagttgatgccagtgctcatttacctttctgaaaatcctagggcccttaagaattatgctaaatttactctgcttgtggtctataaataaaacaacgaagcctggatgatagcatatctgtttacagcatgacttactgaatattataagcccactgttgagacctacttctcagagaaaaagattctttttaaaatgttactactcatagtcaatgtgcttggtgattcaaaagctccagtggacatgtataagagtagtaacattgttttcatgcctgc

SEQ ID NO: 100152 - DNA, 655 bp, Homo sapiens
ttcatagcaaggccctaactcttttcaattctatcaaggctgagggaggtgaggaagctgaagaagttgcaagctaacacagattggctcataaggtataaggaaagaagacatttctataatatagaagtgcaaggtgaacccacaagtcctcatgtagaagctgcagcaaattatccagaagaactggctaatataattgatgaaaatggctacactaaataacaacttttcagtgcagatgaaacaactttctaatgaaagaagatgctagctaggactttcaaagttagagagcagatgttgatgcctgctccaaagcttcraaggacagactgactctcttgttaagcactaatgcatctggtaactgaaagttgatgccagtgctcatttacctttctgaaaatcctagggcccttaagaattatgctaaatttactctgcttgtggtctataaataaaacaacgaagcctggatgatagcatatctgtttacagcatgacttactgaatattataagcccactgttgagacctacttctcagagaaaaagattctttttaaaatgttactactcatagtcaatgtgcttggtgattcaaaagctccagtggacatgtataagagtagtaacattgttttcatgcctgc

SEQ ID NO: 100153 - DNA, 655 bp, Homo sapiens
ttcatagcaaggccctaactcttttcaattctatcaaggctgagggaggtgaggaagctgaagaagttgcaagctaacacagattggctcataaggtataaggaaagaagacatttctataatatagaagtgcaaggtgaacccacaagtcctcatgtagaagctgcagcaaattatccagaagaactggctaatataattgatgaaaatggctacactaaataacaacttttcagtgcagatgaaacaactttctaatgaaagaagatgctagctaggactttcaaagttagagagcagatgttgatgcctgctccaaagcttcgaaggacagactgactctcttgttaagcactaatgcatctggtaactgaaagttgatgccartgctcatttacctttctgaaaatcctagggcccttaagaattatgctaaatttactctgcttgtggtctataaataaaacaacgaagcctggatgatagcatatctgtttacagcatgacttactgaatattataagcccactgttgagacctacttctcagagaaaaagattctttttaaaatgttactactcatagtcaatgtgcttggtgattcaaaagctccagtggacatgtataagagtagtaacattgttttcatgcctgc

SEQ ID NO: 100154 - DNA, 334 bp, Homo sapiens
aaattgaattgaattctgggacacccggttaatatctgaagagttggataatttgttgaagtaaaaaaagaaacccacacactcgctgtcagagtactgtgagtaaaaagagttaaattacttaattataaaatgttctgtaaaaggcagtaattttcagggtcaactatgacaccaaactgcttagggtcaaatttttatgagatgatctaagataagtcatacaaccttactgtgcttcaattaaaatgaggacaataatgataatgcccacaacataaggctgttttgagggttatacgygttaatataaataatttacctccccatgcct

SEQ ID NO: 100155 - DNA, 504 bp, Homo sapiens
ccactgtgtgaggacacactagaacttggcagtctgcaaccaaaagcaggcccttactagaacccaaatattctagcaccctgagctcagacttctagtttctagaactgtgagaaataaattgttgttgtttatatgccattcagtctatggtgctttgccacactggtccaaacttgtgaagactccatgcatagagaaagctgtccaaagtcaaatagagagaaagagaaaaaggagcagagagaaaagacaactaccctcacttttccttaagttaatttagtgtgcctctgttcttagccatcaaaagtacactgagtagaaaaggggatctcyattcatcaaaaaatagagatgaataaagctgattttttttgaactcttactttgtatcaagtactatgatcagtatgtctatgccttatagctgatatttaaccatataagtaggaagacagcatccatagagtcattaatcagcaaagcaatagacaagtgcag

SEQ ID NO: 100156 - DNA, 579 bp, Homo sapiens
ggccaagtgattccgggtccggggacaaggaattcctgggcaagtacaygaagcctggacttctctcggggtgctcatttgggagcagcgaagtataaaaattcaaaaaaaaaatattcacagtagatgccagggcctcggggtcaggagctgggataagtagttgggagaagtgggttgaaaggtggcacctgaaaggcagcaaaagtggtggagcctataggtttctgcctggtgaaacttccggtcagggcttgttttagcttttagaaataaacaagtataagcaaacaaaagtaagccagagaaaatacatctaaaatcaaatgagcaagcagtcaagattttgttttattttattatggctagaaagacactgttatagccaaaatcggcaatgacactaaagaaatcctctgtgcttttcaatatgcaaatatatttcttccaagagttgccctggtgtgacttcaagagttcatgttaacttcttttctggaaacttccttttcttagttgttgtattcttgaagagcctgggccatgaagagcttgcctaagttttgggcagtgaactcc

SEQ ID NO: 100157 - DNA, 567 bp, Homo sapiens
tatagtaaaaacactgcatggtaatcttatgggaccaccatcctatatgttgtctgttgttgaccaaaacattatgtagcacatgaccacatggcagcaacttggctaacatcctttaattcaacattgttttcttataagtttgatgagaaaattaaaaaaaaaaaaacaatccctagcaagggccactctctgcatggaattttcacattttccccatgtttttgtgggttttctctgggtactccagtttcctctcacatcccaaaggttttccccttacrtgaattgagttgtctacgtgaccccagagtgagtgagtgcaggtgtgtatgagtatgccctgtgatggtatggtggcctgtccagggctgattcctaccttgagccctgagctgccaggatgggctccagccacccacaaccctaaagtggaataagcagattggaaaataaatgaatgagtaaatagaaatcattataaaataaaaattcataaagtctatgataatcatacagatgcacagcaataaacaattcagtatgacagggctcagcaagctgccc

SEQ ID NO: 100158 - DNA, 631 bp, Homo sapiens
aatctttaaattacccaatgatgtgtataagggttcaaattttattcccattttctcagtgaagaaatagagattctgaaaactgatttgatatgcctgaaatcataaagttagttaatgtcatcgctaggactagaattttggtgcttacacaatgtgctgactcccaaatcgtaaatttctaccagatgtttaaagtaaaagaatgatgggaaatttcattaaactattaactatattcagtggtttcaaaatattaatacaacattgatatctttagtgcattatcaatgtattcttgragacaacatgtcaattaaattgtctcttattcaaatgttaacttcagtttttaaaatttaaagctagtctgctgattttcaataagagctgtctaatattgtgaactagtgaatttgaggagataaaagtggaaattataggtctgcagagtgtagcattgataaagagggggccatttcttccaagtcagtaaagaaaagtgatgaaacataaactggaatttttgtgattctactgttgcatgaccttataacacccctgttttaattaactacggacctgaaataataacgtatatttctaatccactcacaggaatggtaggtat

SEQ ID NO: 100159 - DNA, 607 bp, Homo sapiens
cagtttttacaatgaactctgtgttgtacaggagataacaattataacttctctttaccaattgctaatgacatgttatattttatatatagttctaattctctttaaaatactggaaaatgtaattaacaccattttacaaattcagaaactaagacaagttaaaacacttgtttttaagaccacattcttcaacacagccggaatgcttgggttagtaccaaagcctccgactcaagctgtgtgaccttgggttacttaatccttctttccctcagtttcttcacttgtaaaattggggtgtaaaataatacctatgttgtagaataaatattatggaattctatccaattatgaataataaaatataaaagtaattgttcttgtccttttaaggttctcagactagaggggggccaaaaaaatgtaaacctgagaatgcaactggatgaatacacagcccwgtccacacgacttgctccagcatctacatgtgcccccatgaagctgtgagcaccaagagaagagggacagtatctggccagttccctattacaaccttagtacctggcattaatgtgagtgagtgaatacataaataattcat

SEQ ID NO: 100160 - DNA, 544 bp, Homo sapiens
taaaattggtgagatgtcccttgggctggtgggtctgaggacctgaggtcgtaggtggatctttttcacagagcaaagaacaggaggacaggggattgatctcccaagggaggtcccccgatccgagtcacggcaccaaatttcatgtgcgtccatgtgaagagaccaccaaacaggctttgtgtgagcaacatggctgtttatttcacctgggtgcaagtgggctgagtccgaaaagagagtcagcgaagggagataggggtggggccgttttataggatttgggtaggtaaaggaaaattacagtcaaaggggggttgttctctggaggccagagtgggggtcacaaggtactcagtgggggagcttttgagccaggatgagccaggagaaggaatttcacaagacaatgtcatcagttaaggcaggaacaggccattttcacttctttcrtggtggaatgtcagcagttaaggcaggaaccggccatctggatgtgtacgtgcaggtcacaggggatatgatggcttagcttgggctcaga

SEQ ID NO: 100161 - DNA, 612 bp, Homo sapiens
ggctggccatcctgccaagcactgtgctgagttgggggaaaaagctggtgttcccaggtgtgggagatacatgtgaataaatgcagcaagtgctgccacaaaagctatataataggatctcagaggagacagaaaatctggattccccagaattctgcccagtgcatcttcgcaccctctagcaacacctagtgctcaaaatttaggtcgaaagaagactgactagcaccagaaaggaaaggaagtagaccaagctcagaaccagtgcaaaatctggacagagctgcccatacaaggcataagcaagatgaagttgaagaaaaaaataatatatcgagtattayacatacagctaaagaaaggattgtaacataaaaagacaaaataaccatgtagtttgggaaaaaatgatatatattccctataatatgataaaatgatattgcagagacagagaaacaatctggaaattaaaaaatgcagtaagtatttaataaacaagttagaaaaagccaggaacagaatagagctaaaatctaaatcaatggtatgatgaaaagccttgagagaatcataattaatgcataagtaaaaagatcaagaaactctaac

SEQ ID NO: 100162 - DNA, 616 bp, Homo sapiens
gatgtggtctgcctttaagcatcccaaatttgctatttgagatggtacatacagttgacactgccccttatttgcaagggcagacctaggactctatttgtactttgagcaggacrtatgagatgtaaagctccaacctatcctgtgcagttttcgcaggacagagaagacacaggggcagagaattacaattcaggagccaaatggttaaggctgtagggaagagaaaacaacgacatgggaactgggaggaggggtagactgcatgagcgaggtttagagaacagatggggtttgcacagggaatgtgacgggaagtaggtaggagatggtactccatggctagagaacagcgtgtctgaggcacttcccaaacacctccagctcttacaagaaaaaaaaccagaccacgttggtgatcgtaagaataacagtggtggtggtggtggtgaaataaaggatgagcatagggctgtgacaccgcaaaatcaaaccacacgaacaagaagtgtgagaaggccctcccagagggggtgacgtccagaggtgacttcacagactcctttcatcactcctcattcaaatacagttgccccttgaacaactcggagctcag

SEQ ID NO: 100163 - DNA, 642 bp, Homo sapiens
gattaatgaaaacagctggatttcatatctgcttctgcatataatccattgtgatgtgctgtctggattgaaatatatgaagaaaatcagacatcactcaggtatgtagctggaaaaggagaaatagtttaatagctttttcagataattgtggatattgttccttgatactacaccaaaacgagtggaattttcttttttcattttattttgtggttaagtgcatatatcgtaaaatataacatgttaaccatttttaagtgaacagttcagtgatattaaatacattcaggctaggcatggtggctcaagcctgtaatcccagcactttgggaggctgaggagggaagatcgcttgagtccaggagtttgagaccagcctgggcaacatagtgagacctcttctctacaaaaaaattaaacaaaattacccaggcatggtagtgtgtgcctgtagtcctagctatttgggaggctgagatcrgaggatcgcttgagcccaggaggtccaggctgcagtgagccctgatggcaccactgcactccagcttgggcaacagagcaagaccctgtgtccaaaagaatacaagtaaataaatacataaataagttcataatgttgtgcaacattgaccaccatct

SEQ ID NO: 100164 - DNA, 520 bp, Homo sapiens
acctcagaatgtgatcttatttgaaagaggattgttgcaggggtaatcaagttaaaatgaggtcgttagagtgggccctaacccaatgtgactattgtacagaaaagggaacatttagaaacagacatacagtggaagaaagccacgtaaaaatgaaggcaaggattggggtgattgtattagttctcacactgctaataaagatatatctaagactgggtaatttacaaaggaaagaggtttaatggactcccagttccacatggctggggaggcctcacaatcatggtggaaggcaaaaaaggagaaaggcacatccacatggcggcaggcaagagagtgtgttcaggggaactcccttttataaaaccatcagatcttatgagacttactaactrtcatgagaacagcatgggaaagacccacctcatgattcaattacctcccacaacatgtagggattatggtagctacaattcaagatgagatttgggtggggacacagtcaaaccatatcaat

SEQ ID NO: 100165 - DNA, 395 bp, Homo sapiens
gaattcccctgcaccgctgccatcccagtccctggctttgacgctggggtagggataaagaagagcgcagctgtgggaaccccggtgggctgggagaagcccgctcacagcgggtycccccactccccggcagggtggcgttctgcttctggctcctctccaacgtgctgctctccacgccggccccgctctacggaggcctggcactgctgaccaccggagccttcgcgctcttcggggtcttcgccttggcctccatctctagcgtgccgctctgcccgctccgcctaggctcctccgcgctcaccactcagtacggcgccgccttctgggtcacgctggcaaccggtgaggaccgagagaatgggccccgggggctaagggtggagacagga

SEQ ID NO: 100166 - DNA, 277 bp, Homo sapiens
ccaacgtgctgctctccacgccggccccgctctacggaggcctggcactgctgaccaccggagccttcgcgctcttcggggtcttcgccttggcctccatctctagcgtgccgctctgcccgctccgcmtaggctcctccgcgctcaccactcagtacggcgccgccttctgggtcacgctggcaaccggtgaggaccgagagaatgggccccgggggctaagggtggagacaggattcacaccgggtgtgcactttccagtttacagaatgaattc

SEQ ID NO: 100167 - DNA, 643 bp, Homo sapiens
tgtgtttcgtgattatatttcattatgaattttggttctatggaaggtggcctgcagtcacatttttcagtgtgattttcctgggaggagctgagaatgtttctggtaagctatgggataattacaacccaaatttcaacttgagttttttagatagtgtagattttagtcacatattttggtcatcttaaggattctcaggggagaaatatttttctatctgtagccacacatccaragggaagagatgttagtatacctcaaatgtagtagattttttttttctagttcatccttcaaggattctgtctttatgtaggtattccaatgattccccactgtgcttagatatactgacctgtgcatggatctctaagactcaccatcagggtgttaagaattggcctgtatctttaaggacaaatggggttctcgatttcattttctcgtatgaatttgcatttctattttagcattggagaaagtctcttactttctcataagctcagacatgctttaaaaagttttaaataagttataaagcaatttagttccctgaaccaggaggaatttttctatggttaactagtttgtcatattactagacatgaaattctccctctcaaaacagttagaatgagtc

SEQ ID NO: 100168 - DNA, 643 bp, Homo sapiens
tgtgtttcgtgattatatttcattatgaattttggttctatggaaggtggcctgcagtcacatttttcagtgtgattttcctgggaggagctgagaatgtttctggtaagctatgggataattacaacccaaatttcaacttgagttttttagatagtgtagattttagtcacatattttggtcatcttaaggattctcaggggagaaatatttttctatctgtagccacacatccaaagggaagagatgttagtatacctcaaatgtagtagattttttttttctagttcatccttcaaggattctgtctttatgtaggtattccaatgattccccactgtgcttagatatactgacctgtgcatggatctctaagactcaccatcagggtgttaagaattggcctgtatctttaaggacaaatggggttctcgatttcattttctcktatgaatttgcatttctattttagcattggagaaagtctcttactttctcataagctcagacatgctttaaaaagttttaaataagttataaagcaatttagttccctgaaccaggaggaatttttctatggttaactagtttgtcatattactagacatgaaattctccctctcaaaacagttagaatgagtc

SEQ ID NO: 100169 - DNA, 643 bp, Homo sapiens
tgtgtttcgtgattatatttcattatgaattttggttctatggaaggtggcctgcagtcacatttttcagtgtgattttcctgggaggagctgagaatgtttctggtaagctatgggataattacaacccaaatttcaacttgagttttttagatagtgtagattttagtcacatattttggtcatcttaaggattctcaggggagaaatatttttctatctgtagccacacatccaaagggaagagatgttagtatacctcaaatgtagtagattttttttttctagttcatccttcaaggattctgtctttatgtaggtattccaatgattccccactgtgcttagatatactgacctgtgcatggatctctaagactcaccatcagggtgttaagaattggcctgtatctttaaggacaaatggggttctcgatttcattttctcgtatgaatttgcatttctattttagcattggagaaagtctcttactttctcataagctcagacatgctttaaaaagttttaaataagttataaagcartttagttccctgaaccaggaggaatttttctatggttaactagtttgtcatattactagacatgaaattctccctctcaaaacagttagaatgagtc

SEQ ID NO: 100170 - DNA, 468 bp, Homo sapiens
aatctggtctcattccccaccggtgtctaattggaactggcatggcttttcaatgtctgctcattaatgttcatgttctctatcactcagatttcttatgaacaagactctagataacttgagctcagaaaaattctccctcacccaaaaatctggcatggaaacactacatagatgttcaatccactactttccattagtattttaacaaaggatagaataacacatattcataaatttgaagtgctccatgtttaggtatttgtgtgttcccaaaatataaatgacccaaacactcagccaatgagttgcccatatgtagwtaagccattgttttagatgcaagtcatgtgcatttggtgcaggatggagcatcatatgtcaaagcatatgcctgctgctgaagccaaatgcagataacatatgcttggaggtaaaatatttgtaagtgttattgcttatcaaaaa

SEQ ID NO: 100171 - DNA, 640 bp, Homo sapiens
tcagtaatgcttgtgaattaatgtaaattatttattgraattctcatgccatgccttcagccatcccttctcagagaagaatggatctgtctagaactctaccctgagctttctgttaggaacattttaaatgactcacataatgatgcttatacatctcatagtaggaacaactggagcctcaaaagccccacagtgaataaatgccacgtgttcatctcttcctccgataggcactccctctgattgattaatggaccgttacccaggaaagcagagagaaagccacttgggattgaaagtatatatttcttgctgtttaaatgtacaacaggctcagatcacctatatatgctaacaagtcttcctactacacctaatttctattttacctatgcctcctcaagcattgagcttattaattttcctttcactctcattctctctctcactcttgctattgccctcaaattagagttttatgtcagaggtgaacatcgtgactaactgattttctcaatgtatcactatcattgatgttttaagcaaactgagaagctcttcctaattattttattacttgttttcatcaacaactagacgatgctactatttgctacatcatggaggagtttatgca

SEQ ID NO: 100172 - DNA, 552 bp, Homo sapiens
gaaaagtctgaggatttgagaagggaggacttgtagcctgctttctgtctgggatgctggaaggcaacagcctcaggagagttccctgtagcactgtggtgcaagagaactcaggctgtggatggctggatgacgtgctaatggcaagatgccttgaggtggctctatcacttttcctgcagccttgagaatgggcaaatttccctgagtccccaagaaaagacacagtgtttgtttgagacaaggatgtgggccccgaaattggcatgcatttgtgacatggaagcaccatagtgaaaaatggtgtggaccctgcagccctggaccagatagggccatggagccttcagtgggtaccagaggagagacaaccatgctcagggttagataagacttgtacacctcagcaaacgctggcacagggaaaaggacaattgcagatatttccyacagggccatgaatccatagaacatggatgctaccccagaatgaataagcaggaataagaaaatcctgatagatattaaacctgacatggaaaaaaaaaaaaa

SEQ ID NO: 100173 - DNA, 596 bp, Homo sapiens
ttccaccattctataaatccagctactttaggataatggggacatggtaaaaccagtgaatttcataagcataagcccactgctgcacttctttagccataaagtgagtgccttggtcaaaggcaatgctgtatggaacaccatgatggtggataaagcatttcatgagtccatagatggtagtcttggcagaagcactgtatgcagmataggcaaacccatatctgaggtaagtgtctattccagggaggacaaacctctgccctttccattacggacaaggtccaaaacaatcaacttgccaccaggtagctgactgatcaccctgaggaatggtgccatatcaagggctcagtgttggtctctgctgctggcaaattgggcactcagcagtggccatagccaggtcagccttggtgagtggaagtaaatgttgctgagcccatgtgtaacctccatccctgccaccatgggcattttgttcgtgggcccattaggtgataacaggggtggctggggaaagagctggagtggtgtccacagaaggggtcatcctatctacttgattattaaaatcttcctctgctgaggtcact

SEQ ID NO: 100174 - DNA, 578 bp, Homo sapiens
ttacaataaagtaagctagggaaaataaaatattattgaggaaagttataagaaagagaaaatacagttactattcatttagtgaaagtggatcatcataaagatcttcatcctcattgcctccacattgagtaggctgaggagaaggcagaggacaaaggaggtgcaggggtagaagatgtggaggaggtgaaaggggaggcagtacaggcaggtacatggtgtcactttatgaaaacatataatttctctctaacatttttctaaaaatgtttctgcatggcaccaayccttttaccatttgctttagatttagtgccagtgtcatagaagggtctgtgctgtaaaagacgtcaaaggcagttttgaataatcagaacccttctgctagattgtctaatgtcaaattgttttatagtgctgcttctttttttacatcttctttcacatcatctgcactggtttggaagtattcatctctatcagggcatcatctgtttatttttctggtgtgatgtctgttcactcttgattttctccaagattcatatcttgaaactcttcaccctgtcccccaa

SEQ ID NO: 100175 - DNA, 579 bp, Homo sapiens
attaatttgtcgtaattatctacttttgatagaagaatctcagaggtacttaagttgatgtcttggaccttcagtccagtgctgacatcttgtaaaatgtcttaagttcctaccaggtaatttctgctttctgtcacaaagcaggagagaagttccaggaggaagtcatgtatttttctcatctttaggtatattatatgtataccccatatttccctatattatacttacacatatatttatgttacactttctatttctcttatttacgtacattattaacaaaaaatttttggaagattgtagaaataagacatgtaggcatttgaaattttrtgagaaagagcatgtcagatttgggagttagggatttttagacattgccataagaggtaagtaaatgctgacaccttgcctatagttaataaaaatatattatacatttgaagttttctaagagagtagatttaaaattttctcactatacacacacacaatatatatataactatgttaggtgattaacgttaattagcttgattatggtaatcatttcacaacatagacatatatcaaaac

SEQ ID NO: 100176 - DNA, 515 bp, Homo sapiens
tctcgttcaattgaattaaaaaacttaaatgaagttttactagtatcaatctttgctgtcatgcaggtaattgagaacatgatatatgttacaacaatgccacctatagttagtagcctttgtttaaagcaaggtaaaattttacatatgctgccgtagaaaacagcctaaaataaaaggttgttaatcaacartgtatcaagtaccaggtacccttccaagctctaggaagaaatagacaaaaaaaaaaaaaaataagagtaaatttctcaagttgtgactgtttcagggaacgtaggaatatacttaaaaaagaaatccttaagaagaggtagtttatgttctaaatatcttctaatagtttgtggtttcttttattttctttatggtatcctttgataaaaataatttcatatccagatagactttatcatttttttatggttggtaatttttgcactggcaaaataattttctttttgctgactgagaggtcataaagatattctgttata

SEQ ID NO: 100177 - DNA, 515 bp, Homo sapiens
tctcgttcaattgaattaaaaaacttaaatgaagttttactagtatcaatctttgctgtcatgcaggtaattgagaacatgatatatgttacaacaatgccacctatagttagtagcctttgtttaaagcaaggtaaaattttacatatgctgccgtagaaaacagcctaaaataaaaggttgttaatcaacagtgtatcaagtaccaggtacccttccaagctctaggaagaaatagacaaaaaaaaaaaaaaataagagtaaatttctcaagttgtgactrtttcagggaacgtaggaatatacttaaaaaagaaatccttaagaagaggtagtttatgttctaaatatcttctaatagtttgtggtttcttttattttctttatggtatcctttgataaaaataatttcatatccagatagactttatcatttttttatggttggtaatttttgcactggcaaaataattttctttttgctgactgagaggtcataaagatattctgttata

SEQ ID NO: 100178 - DNA, 623 bp, Homo sapiens
gttttattttgttttattttattttcaattttagattcagggggtgcatgtgtaggtttgctacaagagtatattctgcratgctgagatttgggcttctactgatcctgtcacccaaacagtgaacatagtaccggacagaaagtttttcaacccttgatcccctccctccctcccctcttttggagtccccagtgtctattgttctcatctttgtctgtttctatccaatgtttagctctcaattgtaagtaagaacatgtaatatttggttttctgtttctgtgttaattcacttaggatagtggcctccagctgcatccacgttgctgcaaaggacatgatttcattcttttttatggctgcatggtattccatattctataggtaccacatttccttatccagtcttcaacttatggacacctgggttgattccatgtctttgctattgtgaatagtgctgtggtatacatatgagggcaggtgtctttttggcagaataatttcttttcctttgagtatatatccagtaatgggattgctaggttgaatggtagttctgtttttagttatttgagaaacctccaaactgctttccacagaggctgaactaatttaca

SEQ ID NO: 100179 - DNA, 491 bp, Homo sapiens
gaattcgtgttgtatatatggtctacatcccctaaggcagatccctcagatatctatctacggacttctcttaaatttgatgcatccttttgcgtatgtctgcattttgcagaggtaatgttccttggtgctcaccagaacctctggagtgaataaagtcaccctggagagttttctacctcccactagagatagaaagtcactaggcattccttttattatgcataaattgaaaccaattttatttaagctttatttgacaaagtagcacttgtttttcgcagaaaacaaatttccgggaaggagaaraaatgcggacaaatagtgaaaattcagagtaccagtaaggatccagtgaaaactaccttgtccttattatccttaatgttgaaaaaattcttatacacagaagtgttatgttatattctgtggtcgatcatcaaacaaggatggaataaacaagattcttccctgtttcatcactggtatat

SEQ ID NO: 100180 - DNA, 616 bp, Homo sapiens
ttaagcaatctcttacctaaactatgttcccaagggaacgctcgaacagatctccctgccagagaacacaagcataatttaaccaaagttttctacatatagtttcttattagactagcccaaaggattgatgttgcatgggcttcgggtcaaaaagatttgagtttaaatcctagctctgccactgatgagttgagtggtctttaagtaaatcacctagcttcttcaggaaagaagggctaactaaaatcgtgttctcagagttgtcatgagaatggaacaaaatgtgcttamgatactcagcaccatgcccagtatgagctgaattattcaattaagtttactttccttccgttcccatttctttctttttagcatgaactttggaggctgggttgggaggtgttggagaggggcagaggtgggctacggaagtctcttcaaatcacattgttatggtttctctacattgagtttctcttgagaataggaaaaatgaataggaaaaatgaaggaatagaaagctcagtgggaagaaaaaaattaaagggcatttataacaggatgtaaaggaaggcaaagaggaacacaaagtctctttcttggagacctggaa

SEQ ID NO: 100181 - DNA, 616 bp, Homo sapiens
ttaagcaatctcttacctaaactatgttcccaagggaacgctcgaacagatctccctgccagagaacacaagcataatttaaccaaagttttctacatatagtttcttattagactagcccaaaggattgatgttgcatgggcttcgggtcaaaaagatttgagtttaaatcctagctctgccactgatgagttgagtggtctttaagtaaatcacctagcttcttcaggaaagaagggctaactaaaatcgtgttctcagagttgtcatgagaatggaacaaaatgtgcttacgatactcagcaccatgcccagtatgagctgaattattcaattaagtttactttccttccgtycccatttctttctttttagcatgaactttggaggctgggttgggaggtgttggagaggggcagaggtgggctacggaagtctcttcaaatcacattgttatggtttctctacattgagtttctcttgagaataggaaaaatgaataggaaaaatgaaggaatagaaagctcagtgggaagaaaaaaattaaagggcatttataacaggatgtaaaggaaggcaaagaggaacacaaagtctctttcttggagacctggaa

SEQ ID NO: 100182 - DNA, 386 bp, Homo sapiens
gtaaagagcacctaccatgggccaagtattttgatgtatggcttccttttgtccttgaagtttgttttaatttgattctgcttatacaaaagtaactgagtttccttgggtgggtgtaaaggaagggttccctcctaccaatactactataaattaacttttattgtatagtttttatgacataaatatataaagaggtctactttgtgcaaaacactggcaggaagaaggaaagactgtgggtataaagacagtccttcaaaacagtttgcagttctcatggggaatcaaaatgtgcrtcaataataaggagaaatcagacagaggagtgctggatatacaaatggtcagcctcgatattacaaaataggattctgatgatgcaa

SEQ ID NO: 100183 - DNA, 534 bp, Homo sapiens
ataaaaattcattttacacatggattttcaaaaatatacaatggcatagaatgaagttcacccatagctgagaattaagtgggagaaaaatctgtgagaaaattatattatatcccctttaaccttcctccaatccaggcagcaacaactctactgcattgttgagtgggtaagacaacaactctcactttgtcttctgccagtaagttgtcatagtgctccttgcacacatccaggtcttctctagatttccgaacagcttctgaagtctggctctataacagcatcaggaatagttgattgaaactggagactttccagcataaacaaaaatattggggatactaaaaagagcaaggaatttcctagtacaagagaaatatgtctgtgaagtatttattcatgaagwtaagatttatagaagaaaatacaccaattggggactttgaaagaacacccaatcacctgtttctaagtacagccaactctgtgtatgagtgtgtgagtgtctatggagcacactgcattcttggt

SEQ ID NO: 100184 - DNA, 558 bp, Homo sapiens
agctattaaccaaagaatcctacactggggcatcagggtttaatccagttctgccacggggtggctgtgggatgttacataagtcacatcatgtgtctgggtctcaggatcctcttccaccaagtgagtatgccggacaaggtcaacccaaggccaaccctaaccccactgggagtgcatctgagggkcagcacaagacaatgaagcagagacaccttcagaccccaagtcctggctttggcggcctttgagaattgcagaaggagcccactgggaatatatgtgttataggagtcctttgacaattaaatgaaatcatggacataaagtacctggcactttgagaagctgttcaaactgatatccactctctttattcccaacccatgccctttccctgttttgtcattttccattgaagaattctgaaatttttcggattctaaattctgacaatttaccgttcattctctgtcttcttaatgaggtgtaaatacatacagtaaggtctaataatcttcttttaataacagctttattgaagtattcacataccat

SEQ ID NO: 100185 - DNA, 558 bp, Homo sapiens
agctattaaccaaagaatcctacactggggcatcagggtttaatccagttctgccacggggtggctgtgggatgttacataagtcacatcatgtgtctgggtctcaggatcctcttccaccaagtgagtatgccggacaaggtcaacccaaggccaaccctaaccccactgggagtgcatctgagggtcagcacaagacaatgaagcagagacaccttcagaccccaagtcctggctttggcggcctttgagaattgcrgaaggagcccactgggaatatatgtgttataggagtcctttgacaattaaatgaaatcatggacataaagtacctggcactttgagaagctgttcaaactgatatccactctctttattcccaacccatgccctttccctgttttgtcattttccattgaagaattctgaaatttttcggattctaaattctgacaatttaccgttcattctctgtcttcttaatgaggtgtaaatacatacagtaaggtctaataatcttcttttaataacagctttattgaagtattcacataccat

SEQ ID NO: 100186 - DNA, 494 bp, Homo sapiens
tggcaacaggaggaaaatagtaggaagataagtataactttcagtgggggataaaaaataccaaactctcagctttgcagttatatgggcaggaggatcccttttggctttattataaaactattacatgtgagcacttgcacagagatccttccccaggggagaaaagttaggcccacccttggcactctgcactcactcacgagcccaccttaagagaagccccaccagcttctccacctgtgcctgctccagcaaaagcgttgctggcatatagcctctaactcctstgagaatttttatttgttcatgttaaaacaacttttattttttgctatttttaaaatcatttctttcttcataattgtatctatttctggggtacgatgtgatgttttcatctaagtgcacaatgcgggatgattaaaccaagctaattaccatatccacctcctcacttacctgtcatttttttgtggcaaggcatttgaaat

SEQ ID NO: 100187 - DNA, 609 bp, Homo sapiens
aaaactatatatgaacaatgcaggggaacagaaaaaccagcagagttctgtccaaacaatttgagatcttggagaatttgactagctttactctcaggatatttggtgaattctggccaagaatgcagcctacacttaaattagcaaaatccctgatggaattaaartgttcagaaaccatatcatctgactagcagaatgactttctttcattagggaggaagatattatcatttaagactctataatttttctacacaatgatatctagataataaaatcacccggtatgccaaaatacaatgcaacatgatttcttaaaatcgacagtatagacaaacactataaaaaattcttaagggatccagaccttgatggtaactaacaaagcttctaagggcactatggtaatgtgttcaaaatatatagaaaaaaataaagaaaacagaagaaataatgaagaaggtaaccagataatgagaatctacaaaattattaaacagaagttttagaaattaaaattacaataactaaaactaagatcccattaaagcaatttaagaacacagtatacataacagaaggtgtgctattaaactagaagacagg

SEQ ID NO: 100188 - DNA, 609 bp, Homo sapiens
aaaactatatatgaacaatgcaggggaacagaaaaaccagcagagttctgtccaaacaatttgagatcttggagaatttgactagctttactctcaggatatttggtgaattctggccaagaatgcagcctacacttaaattagcaaaatccctgatggaattaaagtgttcagaaaccatatcatctgactagcagaatgactttctttcattagggaggaagatattatcatttaagactctataatttttctacacaatgatatctagataataaaatcaccsggtatgccaaaatacaatgcaacatgatttcttaaaatcgacagtatagacaaacactataaaaaattcttaagggatccagaccttgatggtaactaacaaagcttctaagggcactatggtaatgtgttcaaaatatatagaaaaaaataaagaaaacagaagaaataatgaagaaggtaaccagataatgagaatctacaaaattattaaacagaagttttagaaattaaaattacaataactaaaactaagatcccattaaagcaatttaagaacacagtatacataacagaaggtgtgctattaaactagaagacagg

SEQ ID NO: 100189 - DNA, 578 bp, Homo sapiens
ccatcaactcttcagtagaaagcatcgaaagacagttgatgccctaagattctgaatccctcacctcaaaatccttaccttgtggtttccactagtctgtcatgatcctcaagtgtatatcgggatccttccycaattttaatcaagcctttccccgaccctactttgaaagacctactggaatccaactttcctattctttttttttttttttttttttgagatggagtcttgctctgccacccaagctggagtgcactggcgcgatcttggctcactgcaagctctgcctcccgggttcacaccattctccttcctcagcctcccaagtagctgggaatacgggcacccaccaccacgcctggctaattttttgtatttttagtagagatggggtttcaccgtattagccaggatggtttcgatctcctgacctcatgatctgcctgcctctgcctcccaaagtgctggaattacaggcgtgagccaccacacccggccccaactttcctattcttaataaaatcttacattacttttccctccaagacgctatgaaagctctgttgaagtgatat

SEQ ID NO: 100190 - DNA, 578 bp, Homo sapiens
ccatcaactcttcagtagaaagcatcgaaagacagttgatgccctaagattctgaatccctcacctcaaaatccttaccttgtggtttccactagtctgtcatgatcctcaagtgtatatcgggatccttccccaattttaatcaagcctttccccgaccctactttgaaagacctactggaatccaactttcctattctttttttttttttttttttttgagatggagtcttgctctgccacccaagctggagtgcactggcgcgatcttggctcactgcaagctctgcctcccgggytcacaccattctccttcctcagcctcccaagtagctgggaatacgggcacccaccaccacgcctggctaattttttgtatttttagtagagatggggtttcaccgtattagccaggatggtttcgatctcctgacctcatgatctgcctgcctctgcctcccaaagtgctggaattacaggcgtgagccaccacacccggccccaactttcctattcttaataaaatcttacattacttttccctccaagacgctatgaaagctctgttgaagtgatat

SEQ ID NO: 100191 - DNA, 616 bp, Homo sapiens
ggatggacattagagataaatcttattggtacatagcatcactaggggcttttctgactggctaggaaatccactccaatgtagacatagaacaaaagcttattcacttttaggcagaatctaatcagtaacactgcartcaccagctgcatctcagtgttgggtatttgcagcacattagtccttggggcaattaaaatgtagcaagaagcaacatctcatctttgtgtagaacaaagcctggcaaagagtatgtaatcaatacatgctcactgattttgattgcattgctctctggaatcataacatttctaatacgcttatatactcattcaaggaaatataatacagaaacattagagggaggatgtgggatgagtagtttccacttagaagtactacagagatgctgcaattttggagaataattgagttttagtgatggctgggaacacatagagcccattggggaaaaaagatcaggatgggataattttgtttaccaagagcctatattcctgaagatatataaggattaaaaacggaagtagattttacatatcagaccatatatcatacaccccacatgcagtaccttctgtggtcattgaagcaa

SEQ ID NO: 100192 - DNA, 574 bp, Homo sapiens
taaatcttattggtacatagcatcactaggggcttttctgactggctaggaaatccactccaatgtagacatagaacaaaagcttattcacttttaggcagaatctaatcagtaacactgcagtcaccagctgcatctcagtgttgggtatttgcagcacattagtccttggggcaattaaaatgtagcaagaagcaacatytcatctttgtgtagaacaaagcctggcaaagagtatgtaatcaatacatgctcactgattttgattgcattgctctctggaatcataacatttctaatacgcttatatactcattcaaggaaatataatacagaaacattagagggaggatgtgggatgagtagtttccacttagaagtactacagagatgctgcaattttggagaataattgagttttagtgatggctgggaacacatagagcccattggggaaaaaagatcaggatgggataattttgtttaccaagagcctatattcctgaagatatataaggattaaaaacggaagtagattttacatatcagaccatatatcatacaccccacatgc

SEQ ID NO: 100193 - DNA, 616 bp, Homo sapiens
ggatggacattagagataaatcttattggtacatagcatcactaggggcttttctgactggctaggaaatccactccaatgtagacatagaacaaaagcttattcacttttaggcagaatctaatcagtaacactgcagtcaccagctgcatctcagtgttgggtatttgcagcacattagtccttggggcaattaaaatgtagcaagaagcaacatctcatctttgtgtagaacaaagcctggcaaagagtatgtaatcaatacatgctcactgattttgattgcattgctctctggaatcataacatttctaatacgcttatatactcattcaaggaaatataatacagaaacattagagggaggatgtgggatgagtagtttccacttagragtactacagagatgctgcaattttggagaataattgagttttagtgatggctgggaacacatagagcccattggggaaaaaagatcaggatgggataattttgtttaccaagagcctatattcctgaagatatataaggattaaaaacggaagtagattttacatatcagaccatatatcatacaccccacatgcagtaccttctgtggtcattgaagcaa

SEQ ID NO: 100194 - DNA, 607 bp, Homo sapiens
agtcaatatttactctgtgcctggtaagtccagcagagagaatagcaggtgctttgaagggaaagtacattacacaaacatcgaggatatgtgtggacagagaagctagcaaagggaagcaaataggagataagaataagagatatcagggaaacaaaattggactttgactctaaataaggaragaagctattgggctaatataacagaaggaaaaattcatgtttcaggtgtatctctggctgcaatgtggaaaatagtgacaaaggagggatgaagaaaaaaaagaaatgtggaagcaagtttggctttaattgaacaagagaaataatggtggtgtggtccagagtaataccaacaggagcagtggaaaggagacagatttagggtatactttgaaggcagggctatcagaatttgctgatggattggattgtgaggaaaagagagtagtcaaggatacttcccaggcttttggtctcaggaactataaatgttgaattaccattttcaagatgatgaagacaagaaaaggaggtttaggagcaaaacaaggactttgttttcaaccacgttgattataagatgttcattatggagtcaaatg

SEQ ID NO: 100195 - DNA, 609 bp, Homo sapiens
ctaattgacctctataaaataccacatccattctattgggttgaatagtgtccccacccaaattaatgtccacctgaaacctcaggatatgtatttatttggaataaggatctttgcaaatatagttaagatgaagatctcaagatgtgatcatcctggattgaaggtgggctcaaatccaatgatatcatccttataaagactgaaagagggaagatataaagaaagtgacaaaaatatcaaggcatagcttggagtatgtttatgctttgtagggaagccagagatcatctctaactcctccttttagttcttagtgggctcttcagctggatctaaaaaccaaattgacttcaggaagatcaacaagagaaaagtatacagattttattagtttwacatctacaggggatttttgcaagagagtgaagacggaagaactggtcaaagcatgatgcttttatgcttttcagaaaaaaagaactataaagttgagaagaaatggcaggacaaataatacctggctaagggagtcaatttctagggaagtcaccaggagatatacagggggagtgtaaaacaggtggaagataagagttattttattaa

SEQ ID NO: 100196 - DNA, 550 bp, Homo sapiens
gtggaggaggaggaataggagagtagtaaataattatttagggcattcatcctcttcatgtgatrtaattgaaagtttaaactgtgcaaatatttggtttataactacacaacaggtaaaagattagtataatcttccccaaagttaaaggatactctgtaaccttgaaaaagaaaaagaagtatgcattgatggtttcatccttcctttttaatggtaaaactttatctttctggtttaagatatttggtgtaatgattttgaattcctaaaaatgctatatcatttaacttccctgaggctattgttacagtaacatcaatagcaacaccaccaccaccaccacacacataaccccacaaattgacgatggtttcagtaaccaaagtttaattctcgctcatataaataaacaaatgttattgtctttggcgggaagagtcaagtggagacctgtcccacatccaggctgaaggagcaaatgggctgggacactgtcatctccatgatagagaagagatggcagtaccactcgtggcttttgaacttt

SEQ ID NO: 100197 - DNA, 550 bp, Homo sapiens
gtggaggaggaggaataggagagtagtaaataattatttagggcattcatcctcttcatgtgatgtaattgaaagtttaaactgtgcaaatatttggtttataactacacaamaggtaaaagattagtataatcttccccaaagttaaaggatactctgtaaccttgaaaaagaaaaagaagtatgcattgatggtttcatccttcctttttaatggtaaaactttatctttctggtttaagatatttggtgtaatgattttgaattcctaaaaatgctatatcatttaacttccctgaggctattgttacagtaacatcaatagcaacaccaccaccaccaccacacacataaccccacaaattgacgatggtttcagtaaccaaagtttaattctcgctcatataaataaacaaatgttattgtctttggcgggaagagtcaagtggagacctgtcccacatccaggctgaaggagcaaatgggctgggacactgtcatctccatgatagagaagagatggcagtaccactcgtggcttttgaacttt

SEQ ID NO: 100198 - DNA, 560 bp, Homo sapiens
acatggatataaagtccactgaactcttgtatagtcacactctgtcatctaatatgcaacatgatgttaataatctcattttatttactaactgatagtatgttctctaaaacaaagtgtggaaaacatctcagttttttggattgtccatggatactcaatattgccacaggaacccaagacaatagagcccagaaaacatcccaakaaaagcagcatgatttttttccgagcaagtgtcctgaactccaaaatggttttctacccaatcagtttggagtaaaagcaagagtgagctggaaaggtctgggatggaatagactgaatgattggctggttgtttttctgagcccagctctgagtcccatttggcctaattgggatgtgtcatcaaagcagatttagtcagatacttgatttgctacattgtctttaagaaagtggaaaatgttacaaaaaactctccttatgaagcattccagtgtctggctctttccatcttcacccgttgaatcactacgtcatagggagtacaccaaatatagatgctcttatttaat

SEQ ID NO: 100199 - DNA, 504 bp, Homo sapiens
tatctattatatacacatctttatccaaaaccagatcctgaattcagatattcaggggagtaatttggtctagtgtatattgaaaaacaccttaagtaattctgatrggcactatcagacaaacagaactgcaatgaatggatgaacaacaatttattttatttcccattttttaaaaatgttactttaaaaaatttttgtgggtacatagtaagtgtatatacttatggggtacataagatattttgatacaggcatgcaatgtgaagttagcacatcatggagaatggggtatccatctcctcaaacatttatcttttgagttacaaacaatctaattacatttttaaaaatatacagttaagttattattgactatagtcaccctattgtgctatcatctagtaggtcttattcattcttttagtacccattaatatttcccattttaaatcactcccagatatattgctcaacatagttgatttaattagtctttgaaaa

SEQ ID NO: 100200 - DNA, 461 bp, Homo sapiens
ttctttattctgataaactatatctatttttaacaaaaaaagtttttcttaatgggaaaatgtttaaattgttcccattaacactgtttctgttcaatatttacctctgtttatttgtttgttttgttccgttcttgtttgtgttttctcaccattctttgattttcatcatttccatctcattataatctggtgatatccatgttttctagaagaaacagtatcttcacagtgttattaaccctcttcattaaatttgttgtttgtatttatattgttaagttagcwgataaaactagaagctagatctattgcttgagaaaattaactatctttgccattatcttattatttcaaaaactagtctccaacttttacctgaaatgtcattttttttttcctcaggctaagcatgaagccttctggaatctaaatactagtttgttaaatacactgttcgc

SEQ ID NO: 100201 - DNA, 605 bp, Homo sapiens
gaacataatgaagcatcatctaattagaaggttcataaaggtctttcaaaatcagggatatcatggaaacttctgccttaggacactgtcattgcaagtgtcctttctgcccmaaaccatcattagtttttgccctaaattgcagacatctgggtatgttagacatttctttccctccctcttaagcagaagcagcatttcttttcattgtcttttatctctgctggtgcagtatgaatggacattaatcctgtacaatctcgttatgtacattgaaccttgtattgtttatcttcctaggttttgtttaatttcttatacatcactcaccttttgagataccagtctcaactgaatcaatttttaatttttgtttttccacttcttattcttctatcaccccaatcactaaagccagcagcaccgaaacatatctgtgtgggcttgcaaatgatggggtacagggagtttatgatattttcacagagatagcaattcttgagtggccaagagaagtcatgaatacatactaagtatttttagacaaggcatatataactaatcatgttgtctaagatatggcccttagccttgaaaggaaagaa

SEQ ID NO: 100202 - DNA, 609 bp, Homo sapiens
aaactgatttgttaccacttttcttaaaggtttaatttggaaaattggaatgagaacaaatccaaccactaaatattaaagagaaaaaaagatttcaagaaatggagtagaaatgactttagttagaattcttgccttggccaataattagagcaagatgttttgccccaatgacggtgattaaaagtatatccttttttttgccctgaatattaaacatgttaggatatgcattttactttaatgtgaatttctccctccttgttttctaaggatatcatgtcagtggtatttttatttgctagtgtattgtactaatgtttggtcagaaatcrtaagggactgctgtgaagcatctttcctgttgtccttaacatttatggagccttaacatttatggagagtgtatcttatgtacatctctgaccccatcatccattttttttccactctcctttatgaaaattcactaccgctattaaagccttgtctccttggtgaggtgtgtgtcttgtgactgtgctggtgaattttgccttcttttgacccctcccaatcaacggataccgacagtgaaattcctactcaggcgttgagatgttcatctga

SEQ ID NO: 100203 - DNA, 609 bp, Homo sapiens
aaactgatttgttaccacttttcttaaaggtttaatttggaaaattggaatgagaacaaatccaaccactaaatattaaagagaaaaaaagatttcaagaaatggagtagaaatgactttagttagaattcttgccttggccaataattagagcaagatgttttgccccaatgacggtgattaaaagtatatccttttttttgccctgaatattaaacatgttaggatatgcattttactttaatgtgaatttctccctccttgttttctaaggatatcatgtcagtggtatttttatttgctagtgtattgtactaatgtttggtcagaaatcataagggactgctgtgaagcatctttcctgttgtccttaacatttatggagccttaacatttatggagagtgtatcttatgtacatctctgaccccatcatcyattttttttccactctcctttatgaaaattcactaccgctattaaagccttgtctccttggtgaggtgtgtgtcttgtgactgtgctggtgaattttgccttcttttgacccctcccaatcaacggataccgacagtgaaattcctactcaggcgttgagatgttcatctga

SEQ ID NO: 100204 - DNA, 607 bp, Homo sapiens
caaatcatctttgagtcagatataatgaacagcatagagagaatgaagaaaaatgaaagtggcatagaaaaattagatacctcaagcagataccagctctcactaataaccttcaaaagagtatayttaatagaaatgcatcatcttactcatcatcattttagaagtagaataaaattgcttaattaaatagaagactgaaatgatcttaaagttctcttagtttagttttgttgttgttgtttgtattcaatgcctttattgcaaaataatgttgcacaatagtggatgctgacagagcaagccaacaaaatacttttcttctctaccaaattcatttgcaaatgagcatttatttagaatggcaaatgtgcagcacattgatctaaggagtaatctcagctaatggtacaaataaatatttgctcctctacttcattcaaatattgacattttaatattctttgtggttaaaattgtattaaaattaataattgtgaataccaacaatttattttattatgataatatttttaacactgggtcttttggcatttggccaaaatatatattctggatacaaataccctgcaaaataagaaacgtt

SEQ ID NO: 100205 - DNA, 607 bp, Homo sapiens
caaatcatctttgagtcagatataatgaacagcatagagagaatgaagaaaaatgaaagtggcatagaaaaattagatacctcaagcagataccagctctcactaataaccttcaaaagagtatatttaatagaaatgcatcatcttactcatcatcattttagaagtagaataaaattgcttaattaaatagaagactgaaatgatcttaaagttctcttagtttagttttgttgttgttgtttgtattcaatgcctttattgcaaaataatgttgcacaatagtggatgctgacagagcaagccaacaaaatacttttcttctctaccaaattcatttgcaaatgagcatttatttagaatggcaaatgtgcagcacattgayctaaggagtaatctcagctaatggtacaaataaatatttgctcctctacttcattcaaatattgacattttaatattctttgtggttaaaattgtattaaaattaataattgtgaataccaacaatttattttattatgataatatttttaacactgggtcttttggcatttggccaaaatatatattctggatacaaataccctgcaaaataagaaacgtt

SEQ ID NO: 100206 - DNA, 582 bp, Homo sapiens
gggtgggctcagtctttctaatatatatgtgtgtgtgtgtgtgtgtgtgtgtgtgtgtgtgtgtgtgtgtgtgtgtgtrtatatgtgtatatatatatgtgtgtgtatatatatatatatatatatatatatatgctaatggcactcaagtgtatatcacatagagcttacttttgagaaatgtgtaccttgcatctcacccgagtactttgaagcatctacacttcatatgtaccacacggaaattatcattttcctacattattgaagctctacctgatccagttttttcccatatcggtgacatattttacctacttaaggtccaagctgtaaaactgaaaatcattttggtagtttcctctctcaacttttacaccaaatccactgatactttctgtcttttctagttcctaaatctataggaagtctgaccatttctcaggatctctgcaaagtggctgcattgtcttttctattgaaatgctaatcatattggggttctttaattttcatgcacttgtcaagcactatgacaactatgaggatgctgtagggagaattaaatcaaatttattcact

SEQ ID NO: 100207 - DNA, 504 bp, Homo sapiens
gtggtgactaatttcaatggtcaaatataccttctaaaatcaatttttcaatgaaattgacgtcatttgttttaaaatatcaattttattgtactaataatataatactaattcaatacattatttaatcttgatatttattaaataaaacaatattcgtctgaacatatgtctcttggttttcagttaayagttcttggagaagtgttcctgactttatagtgtattagtcaggattctcctgagaaacagaggtaacaggaaatatatacatatgtttatttatttttaatttttgtgggtacatagtaggtgtatatatttatagggtatgtgagatattttgatacaggcatgtaatgtatacatttttatattttaagaggagatttattatgggaattgcattacattattatctagttcaagaaatccccttctatgctgtctgcaagctggaaaaccagggaaactgatgatataattagtctgaaggcgtaagaa

SEQ ID NO: 100208 - DNA, 604 bp, Homo sapiens
gctccttggcgtttcgtggagtcacagagcacgacggcattgacaagcatcagaacatcaagcagccttagatttcacgatcactccgaatagaacatagaaatacggaaacacagccagtttccactgggaagagttcttcgkgtacaaatgatatatatttatattttttaaaccagtcaccactaaggtgagtcctttctctgctaacaagcagccgaggatactaagtatcttcagctaattaatttgagcagtgttttaagaagagcaacacttgccaaattaaaactaccttccccatccaaaacaaaacaacaacaacaacaaaactttacccctttccaaactgaaaaaaaaaaggttgggggtgtgtaatatatcagatttcagtaggcagaaggattcagagggggctagggagaaagatttcagattatgtagtgaaatacaaagtttctttaaataaattgcagggaacatgaagttgggggataagaaacaatgacaaggcagtctctttcttgattactgcaactggaatgggggaggcgagtttatttttggaaatgggagtgcgcagagctaagcgaaatttatttct

SEQ ID NO: 100209 - DNA, 599 bp, Homo sapiens
gtgctatttactgagcatctgatgggtgccaggcagtgtgtgctaaacacccatctctattgcattgccttacctctgttagaagcactaggatattagtcacatttttcagaaaaggatatttagaatgtgaattcatttgtctgagatctcagagctattatgaagtggtgtcaagrttgaaaaccagatcagcctggatttggacttctttactctcttgacacattttttgttggccctcctgatatacccactaaccacatggcaccccaagtttgtcttgggcctgacccacaacagctttgcacacatgggagagtcactactcatgtttctttgtctgtcctacagctctgagattggtgttgtccagtctcttttttagtagacagttgtggagctgagtggaagtggtatgtctggttgccactgagctgggtgtgtggacttgaggaatgggaagagaatgattgcaagtccacccaggcacatgccgcccctctcccaccagcatcatcaatgttttgtctctaagcacccattgaaaagaagctttgagaaccaaagcactggcttctgaatatagaaaaaataaa

SEQ ID NO: 100210 - DNA, 597 bp, Homo sapiens
aagcttctgaggctaatctcaatgggcacagtgtttcccttgtctctgacccagttgtactttgtgctatttactgagcatctgatgggtgccaggcagtgtgtgctaaacacccatctctattgcattgccttacctctgttagaagcactaggatattagtcacatttttcagaaaaggatatttagaatgtgaattcatttgtctgagatctcagagctattatgaagtggtgtcaaggttgaaaaccagatcagcctggatttggacttctttactctcttgacacattytttgttggccctcctgatatacccactaaccacatggcaccccaagtttgtcttgggcctgacccacaacagctttgcacacatgggagagtcactactcatgtttctttgtctgtcctacagctctgagattggtgttgtccagtctcttttttagtagacagttgtggagctgagtggaagtggtatgtctggttgccactgagctgggtgtgtggacttgaggaatgggaagagaatgattgcaagtccacccaggcacatgccgcccctctcccaccagcatcatcaatgttttgtctc

SEQ ID NO: 100211 - DNA, 601 bp, Homo sapiens
gtccagtctgaggcaacaatgactattggaagaccaataagccattgtgctcaaactaagttgattgtaatgcataagtgagttctacactttatatttctctagtcatctacatttacagaaatagaaagtagtgatctggctcattactctgctttcctgttttccatcatccctggggcatgatgtaacatgatcatccaaaacagccaggaattccttctccttaaaaccatcaaagaaggtttcacagttccctttgcaacctatttcagcatgcatgatcttttctaatggtatttttttattctataatacaaatcaattcttagttcctatgttgaaattcactttgaaaaatataagcccattattaggtgtaaggaatgattaatattagtaacaatrgtaactttgcaactagggaagcaatgataagtagtgtaactgagcaaatacaaccaacctgcctccaccttaggagcattccttggtaatccggcaatggcaaaatcagattctaccatggctcgagtgacaagagagttgctgtttctgaagcaaagtgtacacactgcattttatatatagtagtccaatt

SEQ ID NO: 100212 - DNA, 591 bp, Homo sapiens
attcttcttctttagtctacattgaagctacaattaataactatagtctatatgatttaaagaaaaaggtgagacttgtctattcacctccttagcccacttttcgatgtgatttttttcttgctaatttgtttgtgctyattgtagattctggatattagtcctttgccagatatataaattgtgaagattttctcccgctctgtgggttgacaattctcaaaggagatatacaaattaccaacaaacacatgaaaaaatggtcaacgtcactaataatcagggaaatgcaaatcaaaatcacagtgcaatgccaccttactcctgcgcaaatggctataataataataaaaaaaaagaaatagatgttggtgtggatggggtagaaagggaatgctcctatactgccggtgggagtataaactagtacaaccactatggaaaatggtgtggagattccttaaagaactaaaagtagaaggactatttaatccaacaatcccactacggggtatctgcccacaggacacgatgtcattatacaaaaaacatacttgcacatgcatgtttaaggcaccactatttgctatc

SEQ ID NO: 100213 - DNA, 591 bp, Homo sapiens
attcttcttctttagtctacattgaagctacaattaataactatagtctatatgatttaaagaaaaaggtgagacttgtctattcacctccttagcccacttttcgatgtgatttttttcttgctaatttgtttgtgctcattgtagattctggatattagtcctttgccagatatataaattgtgaagattttctcccgctctgtgggttgacaattctcaaaggagatatacaaattaccaacaaacacatgaaaaaatggtcaacgtcactaataatcagggaaatgcaaatcaaaatcacagtgcaatgccaccttactcctgcgcaaatggctataataataataaaaaaaaagaaatagatgttggtgtggatggggtagaaagggaatgctcctatactgccggtgggagtataaactagtacaaccactatggaaaatggtgtggagattccttaaagaactaaaagtagaaggactatttaawccaacaatcccactacggggtatctgcccacaggacacgatgtcattatacaaaaaacatacttgcacatgcatgtttaaggcaccactatttgctatc

SEQ ID NO: 100214 - DNA, 591 bp, Homo sapiens
tggaaataggatctggcagatgtaattaagtgaagaatcttggctggatgcagtggctcacacctgtaactccaaaactttgggaggctgaggcaggaggatagcttgagcccaagagtttgagaccaacctgggcaacataataagaacttgtctctatttttttttaagtaagttaagaatcttgaaatgggaagattatccagaattgtcatagcggttctacttattatagtactgtcttggcacaatctgtgttgccataacaaagtacccaagactgggtaatttagaaagaaaagaggtttatttagctcattattcaaatggctgggaagttcatgattgaggggccagcacctgggcagcttyggcaagggccttgtactgtgtcataccatggtggaaaagcagaaggggaagtggatgtgtgcaagaggccacctggctttacaacaacctgttctcatgggagccaatccatccctgtgagaactaacacagtctctcaagaaaggcattaatctatcttaatgacctaatcacatcttaaagacactacctctaaacaccgccatactggggaccaag

SEQ ID NO: 100215 - DNA, 596 bp, Homo sapiens
ctttgttagtgaaggtagagtaagaatatgtacaaagaagtaaaaaaaggtacaaattgctatctagccagcatcacttctttgtacaaaaagcccagggaaaacttgaggctctttgccttacttttcttcctcctttccctctcccaaatcattgcagtaacactgttgggaaactagagaagccaaacaaaaagataatttggcatctcccsaattcctcccttgtcctcccctcccacccccatataactactgttaagtttattcagctacattcagatctttccaaaatacagtcgtagcaagtcagtttccttcagggattctcagatgttctcaggatcgagttcagaccccttagcatggctgagataagccatgagctggtctttgcgcatggctctatccatcatctcttgctttctaggtcaaagtcaccaaacatcgattcactagaaatgaatttgaccaaggaatcaattatccttaagataccccaaatactaattttccaaaaaaatgtgttaaaaaaactataaactttatggcaatttatattagatgggattttttaaacaacttctgatgatttc

SEQ ID NO: 100216 - DNA, 405 bp, Homo sapiens
ggctgcctgttcctggttgattccaggtggaatgctgaggtgttccccagggtttgttgtggtgcagaatccatggttgcrgggatggaggggccgggatcttctgtgaaacttcgtttggggctgatatttacgaaatgtgtgaggtgatatataagatgctgcccaatggcttcagtccacaactcactttccaaagccatcaggggagacactggtctcatcagcttcttggtaggtcttttatttttgttcagacttgttgaatctgttagaagctgactttatgtaagacatgaaaagtgactcacaaaacacaggctgcagaatgtgagaaaaaaatcaattcatttagaagcttggtgttttgaaaaaggagtatgcagagatggaggcagcactaga

SEQ ID NO: 100217 - DNA, 610 bp, Homo sapiens
gtctcaaaaaataaaataaaataaataaataaataaaataaaatctaagacataaaaataaaagccaacacttaattagcctctgccacayatcagacaacatgctaattagccaccctgtgtttccctccaccaaaaaaattgtacggcccataaggattccatattatagatgatgaaatttaaagcatataggggttaaatgtcttgcctatagtcattctaatagtaccagaattagggctgtaacacacagtcttcagattcttgttcttacctccgtatgcctcactgcctaccttagtgtcaactgcagatattactcataattattcattcctgatttttgtcaaacatccctagcaatactttattgtaattaattatatagctaattatataaatggattccctattaaaacaaacaacttgtaaactatagctagatcttctgtgtatttttttcctaaggttcttaaatggtcccatatttgatagtcattgacaaatattgtgaataattgaatatatgtggcacctccagtaatgaatatatgtggtacctctagcacatgtactctgtagattcatgccacacagtaatttgttc

SEQ ID NO: 100218 - DNA, 577 bp, Homo sapiens
ttgtataatacaacttaggtgaataaaaaattcatgtacacaaaaagtgtagaaattatacataacaagaaaaatatatacatcaacattttagaaacattgttcatgagaggatgagaaggatgtgtgtgaaaaaggaggagaaaaggaaatcagtaaagcaggagaggaagcctcgcacaggctactgacaagagcgtgctgagaactactgagcatggttaactcatcctattatatccatgtcccactctcaaaaatatttcctgaaaactggaaggacatatttatcayagattatgttagttggaatgctgcatctatgtgtttatacattgatatacacacattacaagagggaaataaaaaacctttagctcaattggcttccaaaaccaaatgaccattgccaataatcaatcatcaatataaatcttcttcatctactggattcgtaaagcaatcatctctgcagataatcagtacattctcatctgccaatcaaatcagtggtagccagagctaacaaaaagccaaaactgaacatggaagataaaatgataagactgcataaatt

SEQ ID NO: 100219 - DNA, 577 bp, Homo sapiens
ttgtataatacaacttaggtgaataaaaaattcatgtacacaaaaagtgtagaaattatacataacaagaaaaatatatacatcaacattttagaaacattgttcatgagaggatgagaaggatgtgtgtgaaaaaggaggagaaaaggaaatcagtaaagcaggagaggaagcctcgcacaggctactgacaagagcgtgctgagaactactgagcatggttaactcatcctattatatccatgtcccactctcaaaaatatttcctgaaaactggaaggacatatttatcacagattatgttagttggaatgctgcatctatgtgtttatacattgatatacwcacattacaagagggaaataaaaaacctttagctcaattggcttccaaaaccaaatgaccattgccaataatcaatcatcaatataaatcttcttcatctactggattcgtaaagcaatcatctctgcagataatcagtacattctcatctgccaatcaaatcagtggtagccagagctaacaaaaagccaaaactgaacatggaagataaaatgataagactgcataaatt

SEQ ID NO: 100220 - DNA, 580 bp, Homo sapiens
aacacacacatgcacagttgagcttcatgcctctccatgggacccatgttcaaagaatggccatattagtataatccaagggtggagttttcagccctctcatgtcaaaaggtgaagcagaggacaccaaaactctcaatatgcatcctatgcaaactggcaagaaccactcagtcttatcaggaagaaaagctggtcagtggttatgccaaagccacaaaagggaagggcagcaatcaggcggttggctgaaatcagcagtggagtgctttgaaagggatggtttctgtttaggctttaaaaagaaagcctaatggtggtgtaatgagggagagggtataaccaggcaagtccgacctctcaccccattatggctgagaactcagcttccagggtttctctcacagtccccttggccaagagatgatccattcagtcagttggggaggggggcatttagaattgyatttgtatttctcaaaagagactaagaagcttatctaaccaattaacagtcagagctacaaggtcatccttgaagtctttgctctacatcactggtacccagaatgggaatttc

SEQ ID NO: 100221 - DNA, 572 bp, Homo sapiens
gtactgaaatgagcaacatgtaatttgtgatgaaatgcttgtaaccttttatgcaaagcataacataggataatatgtgaaaccacttccttctttacaaagcatcacaatccatcatcattctaatgagggcagctatgcaccaagccctgctggcaacaggtttaccattcattatgtatctcttctttggtgtgctaccacttactgactccaaactcctccatatcctatctaggggtctaactctggtaagaagtagaagtttccttttcctttagcaagtatggccaagtctctggtactttgactaatttcaatatgattttattttcttcaatatattcattattctttgaaattgtatttctttgtctctttccattaacatgtcakctctgtgatgcagaaattttgtcataagtgctctttatcatatctcttccccacctcatctcctgtgcataaaaccttaccagactccaagctgacacttaacaaatgtttgaatcgaagaacaaagaagtgaatgaatgaatgaatgaacaaatgaactatgtatcagtggtgcc

SEQ ID NO: 100222 - DNA, 480 bp, Homo sapiens
tattaattaatatttctctgcaatgagctgccaggtcccctttacctggccacttcttctctggagtcagtgtcgttctggcctaccataactacaaagtgaaataaagaattgcactggaaaacaagtagctccctagcccagcattctcaagtctggatgtctggtatgtgttgcttttatcactcatacatgaaaaggtaatgtattttgtggtgttcacagtggagtggcatttagagacccaagacctgacactctgctttaaaaccccatcatgagataartatcgctcttctaaaccaaaagaaaaaaaaaaaaaaacaaaagaaaaggcaatacatttaataatgatccaaatgaacagaaatgaaaggaactacattggctgggttgataccaagtcccctctgccctgactgaagctgatccaccacttctatcttcagctgtttattcagtccaaggcctaacttcctg

SEQ ID NO: 100223 - DNA, 557 bp, Homo sapiens
cttgccagtggatagttgctagtggaatttatgttgtggagagtgaagctagagaacacctattctattctgtcatctgctgatgaatagatttttatcttttaaagcaattttaggttcacagtcaggtttagtggaaagtacagagagttcccacatagctcctgcagacactcccctaccatcaacacgctgcactaatgtggtacatttgttaccaccgatgaaccaacactgacgtatttctatcaacctaagtccatagttaatattagagttcactctttctgttgtacattctgtgggttttgggaaatgtacaatggcacaaatctatcattatggtaacatacagagtattttcactgtcctaaaaatcctctgtgctccacctattcattcctgcctccacccaaacccctggaaaccactgatctttttattgtctccaytgttgaatgtcacatagttgaatgtcacatagttgaaaatgtacagtatgtagtcttttcagattgacttctttcagttggcaaaatgcacttaaagttcctcca

SEQ ID NO: 100224 - DNA, 586 bp, Homo sapiens
actagtgtcatgctaagaaggggctttggatgcagtggaagcccagagggagtggagattgagtctgactggagcagtgaggataggcttcccagaggagrtgacgttcaaggagggccttgacagacgggtagaagttctccagtcacacaaagagcagagggatttctaggcagaggaaatggcacatctattgacacctagacacaaacaagcagaggatgttcaagaaaaatgtagggggttcggtgtggctggagcttggaggacttaagaactgccttgagtggaagctggagaatcacaaagtgaccatggccagccccagatcccagaccaaagaacttgaatttgatttggaaggtgatggggaacccacaggagccctcaagcagaggattggccgagtcagccagtgttgtggtaacattatttgggtgatgggtatggaggagaaagtaaagggctctcctggccataaggcaggactttctggtgtgggctcgtcaaataggagaaagcaacctgagttttgcacttccagatgaaagctggaagacaaacacccatttggaaaaggcagaag

SEQ ID NO: 100225 - DNA, 586 bp, Homo sapiens
actagtgtcatgctaagaaggggctttggatgcagtggaagcccagagggagtggagattgagtctgactggagcagtgaggataggcttcccagaggagatgacgttcaaggagggccttgacagacgggtagaagttctccagtcacacaaagagcagagggatttctaggcagaggaaatggcacatctattgacacctagacacaaacaagcagaggatgttcaagaaaaatgtagggggttcggtgtggctggagcttggaggacttaagaactgccttgagtggaagctggagaatcacaaagtgaccatggccagccccagatcccagaccaaagaacttgaatttgatttggaaggtgatggggaacccacaggagccctcaagcagaggattggccgagycagccagtgttgtggtaacattatttgggtgatgggtatggaggagaaagtaaagggctctcctggccataaggcaggactttctggtgtgggctcgtcaaataggagaaagcaacctgagttttgcacttccagatgaaagctggaagacaaacacccatttggaaaaggcagaag

SEQ ID NO: 100226 - DNA, 564 bp, Homo sapiens
gttctcttgcctcagcctctcgagtagctggactattagcacccatcaccacatctggctaatttttgtatttttagcagagatagggtttcaccatgctggccaagctggtctcgaactcctgacctcaagtgatcagcccctctcggcctcccaaagcgctgggattacaggcatgagccactgtacctggccaaatttgtgatgttaaataaatgctctctctctctactgaagtcaagagaaaagcaagatatttgaggcttgcttcatctttctctaggattttctttttttccttatacctatattcttatattacatctgaatcagttttatcatgaacatcatacataacttcagaatttttcctcctattttgaggtagcaaaggtgacattccatttctaattcattctctcagtatataaaaaaaaactctaatattttcttgaaatcctcatgacctagatagaattcctagatagaattatayaactaaaaattaaaagcagttattaaagtttattttgttgaatattatgaatgcaggttctacaaata

SEQ ID NO: 100227 - DNA, 583 bp, Homo sapiens
gtgtctcatcaatttctaattggaacaaactaatttgtatgtaagtagactggttctgtgcaatccttatgaatacaatataggcccaaacactcatgttgttgagggttattttaaggacctttgaaatgtcagagaagggccatgtaatagtgccgcaacagggttgaactgcctctgtccaatagatcataactataataataatgatgatatggtatgtagctactgaatttctcratagtatcatctgtaaaatgggaagatcttattagaaaggcttgatagaataagtacttcagatttctttgagacaaaggggttatgcaaatagaaggggctaaacagaataaattattgtgtatcaacagtattttatctacaaagcatttaatttggcattatggatgttaccatactgctgctcataatgaagagagcattcattatatttctagatagagatacagattaggggatggttgtggaggaactcattctctgtttgaatagcatgtaagaaaaataaattttaaataagagaattttacaaatattttaaaatttaaaatgtttatttaga

SEQ ID NO: 100228 - DNA, 580 bp, Homo sapiens
aagggaatcaatttacattttaacatattagttgaaaggcagggagattcaaggcaaattttggttataatttactacgttaaaacctgaagaactgtgctcaggttctttcccttagaaggatcttaaaaacttcatattttatgaagtcaattgacttcattgacttctctgaggtcctgtgtatctgtaatgacaatagattctatggcacggttcccaaactctgcactatggtgctcagggctcctgcggtgaactctcaggagtggggccatgttttaaatgttggcaccatgtaaattaataggcacatatagcccattagcaatcaattgtggttattcaagaatagaattattatttaaaaatttcagtttatgaccaaatgtggtggctcatgcctgtaatctcagcctttgggaagctgaggcaggagktttgcttgagctcaggagttccagaccagtctgggcaacaagtaagactttgtctctatttaaaaaaagaatcagtttatgtgatttttttttcaaatggttaagatttttagaacataaaaacttaataatttgtttgg

SEQ ID NO: 100229 - DNA, 545 bp, Homo sapiens
gtttgggctctgtgatgtggagggataaatgggaggattctggctgagagaggaggaagaggaagccagaatgacaggcccaagaggagggccaccacccagggaatgctggagaagccaatggagagaagcaatgagagcctgaccatgggaggcagcttcttgccaccactgcccagcctgcacctgtggactgtctgtgttcagctgaaggagtcagagatgttgacaagcatatgtgggacccctgctccagtgcagtgctgggaaaagcatttccctaaaagccacagtggtgcaccaggtggcacctggctgtgatcactgaaagcactctcaccagctgggctttcagccaaggtcaggactttgcaccacccyttcacacatgccccaaggccatgtcccagcaatgccctcaggaccactgtaaaggaagcacagtgaatataaaaggaattgtgtgacatctagaaggatgtgtgggtgctatattgggcataagaaagtcaggtttgaatggtgccctctctaaaacctaaagc

SEQ ID NO: 100230 - DNA, 652 bp, Homo sapiens
accaggctctcccagggccactcccacagtgatcttcctatagactgaccataaaagtctctgagaactcaaagtgtgtgtcctgagaccttagcatcagcttcarcatcacctgggaattttcaattttgtctgcaatgccatttcatgagctgcaccccagatctgctgaatcagaatctctgggaaggttgggcttgggccatctttgttctaacacaacctcagaggatttgcatgcaccatgaagtttgagaagcttggctctgaggagtctgtgctctttgggatctgtgccacttgaggcagagaaagctcagatcactgggatctcatttcccacttcagcccagaataggtgaccacattagtgtgcatgtttgtgtgtgtgtgcgtgcagggcatggggggattctgttgagaggtggtgctgagatgcacctgctcccaggagagatgacgcgggttgctgacaccacaggagctctgatgctgcagagccctagtctactgcggactctccttcctgctggagtctgcagttgctcctacttctctgggacctcagtcccatcataactctgtctcttggggtttctcttggagtgggagatcccttggcttccctcctgcatcacctccagagacaaac

SEQ ID NO: 100231 - DNA, 652 bp, Homo sapiens
accaggctctcccagggccactcccacagtgatcttcctatagactgaccataaaagtctctgagaactcaaagtgtgtgtcctgagaccttagcatcagcttcaacatcacctgggaattttcaattttgtctgcaatgccatttcatgagctgcaccccagatctgctgaatcagaatctctgggaaggttgggcttgggccatctttgttctaacacaacctcagaggatttgcatgcaccatgaagtttgagaagcttggctctgaggagtctgtgctctttgggatctgtgccacttgaggcagagaaagctcagatcactgggatctcatttcccmcttcagcccagaataggtgaccacattagtgtgcatgtttgtgtgtgtgtgcgtgcagggcatggggggattctgttgagaggtggtgctgagatgcacctgctcccaggagagatgacgcgggttgctgacaccacaggagctctgatgctgcagagccctagtctactgcggactctccttcctgctggagtctgcagttgctcctacttctctgggacctcagtcccatcataactctgtctcttggggtttctcttggagtgggagatcccttggcttccctcctgcatcacctccagagacaaac

SEQ ID NO: 100232 - DNA, 652 bp, Homo sapiens
accaggctctcccagggccactcccacagtgatcttcctatagactgaccataaaagtctctgagaactcaaagtgtgtgtcctgagaccttagcatcagcttcaacatcacctgggaattttcaattttgtctgcaatgccatttcatgagctgcaccccagatctgctgaatcagaatctctgggaaggttgggcttgggccatctttgttctaacacaacctcagaggatttgcatgcaccatgaagtttgagaagcttggctctgaggagtctgtgctctttgggatctgtgccacttgaggcagagaaagctcagatcactgggatctcatttcccacttcagcccagaataggtgaccacattagtgtgcatgtttgtgtgtgtgtgcgtgcagggcatggggggattctgttgagaggtggtgctgagatgcacctgctcccaggagagatgacgcgggttgctgacaccacaggagctctgatgctgcagagccctagtctactgcggactctccttcctgctggagtctgcagttgctcctacttctctgggacctcagtcccatcayaactctgtctcttggggtttctcttggagtgggagatcccttggcttccctcctgcatcacctccagagacaaac

SEQ ID NO: 100233 - DNA, 604 bp, Homo sapiens
ctggaatgtaggtatgaacctcctacttttttttgtttgtttttgttatttgtttttttgagatggagtcttgctctgtcacccaggctggagtgcagtggcatgatcttggctcactgcaagctctgcctctcaggttcaagctattctccagcctcagcctcccaagtagctgggactacaggcgcatgccaccatgcccagctaatgtttttttgttttgttttgcatttttcatagagacggggtttcaccatgttggtcaggttggtcttgaactggtgacctcaagtgatcaacccgcctcggcctcccaacatgctgggattacaggcatgagtcactgtgtctagcccctacatttttaaaatgcaagttcagatccaggggttctggagtggggtctgactgaaggtctgcctttctaaccagctcccaagtgatgctgatgttgctggtttgtggacaacastttgagtagcaaagctttaaaccaatcctaaggggaaaaaatgggaatgaggaaaggtccctctgtggtttagggaaatgtgtgtgtgtgtgtgtgtgtgtgtgtgtgtggtgtgactttttatcctagtga

SEQ ID NO: 100234 - DNA, 575 bp, Homo sapiens
ctacaaaacactcctgacagatggaccgtgtaccccattttagacatggcagagcaacagaatgggcagaattagagagtggcaataccgtgagacaaacactctcaataagaattctaggtcctgacttcctatcttccattaggtgattctgaacatttggcattacgtgatcccacagcacaggggaagtggtgctctaggctttccaggaggttctcagatcagactagatacattgctcaagtccaaatgctctgtgaagtagaggaaagcctaccaaagcaacaaggtttggacttttatcatcatttgggccacagtcataggtggcatcagggtgttgtggggaaatccactgcccttgtaaccagaagataaagatgtttggagtccagccctggctttgccgttcygttcgttagctaagttgtggtgagcaagtcacttaatctctctgcatctcaattttccaattgtgaaacaaacagataatatgccatagttatgttacactcatttttcacgtggctgtaacagccagaggagcaacgtttatgaaataggaagcacta

SEQ ID NO: 100235 - DNA, 524 bp, Homo sapiens
aggtgtgcttgtctttgtggacaagtggtgcagcctagtggaaagatggtcgtgcctggccttgattgctagctcagccacccacagttctgtgaacttgaacaaattctgtactctgtctgagcctaacctgtaaaatggaggtttcctgtgtcttgcagagttacaatgaggatatgaaataatagccatccagcatatggcatttgataaatgacagttttcatgactgttattcttattgccaggacactacacagctacctactccaagagtaagagtgtcagagggtgaggtgagaggagacagaccacaggcattctggaataaccactatggtcaccacctcacctcccttaatgttgacagtttgcatggccctggagatgtttagagagcacttccacagtcaccaccccastcgctttccttttctccctctgcctagaaagtcagggacctctgtgacaaattgcagacacccctggaacaaatgcaatgaaagctcagaaccacagggaat

SEQ ID NO: 100236 - DNA, 600 bp, Homo sapiens
taggaaattaatataacatacatagacaatatattgatgcatgatatgcaagtgtaccatatatttacttgtttatattaataagaaaagatctggaaarctatatgctaagcttaactgtaagttatccctgagggaggggcactgtggatggtcgtagagagaagtacaacagtgtggtgagcagcgctgactttggagccaggctgttttttggactctgggcaagttgtttaacctctctgtgcctcagtttccttttctgtaaaatagggataggtaaaaacctacctcataaggttgctttgacaattaaatgagcttatatgtaaaaatcatttacaattttgccaggcatgctgtaagaggaatataattgttagatattcatgttcttttattttgcttattcttgcccctaattgtctatagtgattgtacattgattttacaagaaaaacgtataaaacatagaaaaaagttctttttaacatgtgaactattaatagctggtagacattttaattaacctttattttaaatgggaataaaataattaaaactgtccaagcaatacatcaaatagagaataatggtcat

SEQ ID NO: 100237 - DNA, 600 bp, Homo sapiens
taggaaattaatataacatacatagacaatatattgatgcatgatatgcaagtgtaccatatatttacttgtttatattaataagaaaagatctggaaaactatatgctaagcttaactgtaagttatccctgagggaggggcactgtggatggtcgtagagagaagtacaacagtgtggtgagcagcgctgactttggagccaggctgttttttggactctgggcaagttgtttaacctctctgtgcctcagtttccttttctgtaaaatagggataggtaaaaacctacctcataaggttgctttgacaattaaatgagcttatatgtaaaaatcatttacaattttgccaggcatgctgtaagaggaatataattgttagatattcatgttcttttattttgcttattcttgcccctaattgtctatagtgattgtacattgattttacaagaaaaacgtataaaacatagaaaaaagttctttttaacatgtgaactattaatagctggtagacattttaattaaccttyattttaaatgggaataaaataattaaaactgtccaagcaatacatcaaatagagaataatggtcat

SEQ ID NO: 100238 - DNA, 536 bp, Homo sapiens
tcctgttttacccactcacagcattgatctctgttttgtgattctttggtttaagtctttcttttccacaagacccgtatcagtagagacctcatttatttttgcttgccgctctgtycccaaattttgtacagtgtgcttggcacataaaatgaatgcaacaatgaatgaatgatcaaaatgcgctcgcattctttttttttgcctataataaaactaattttgcacattgtttgtccccgctggctgtgctatgtttagtgtttgtttgtggatgataagctttcctcattgacactgcactatatgacttaagctaagctgtgtgctagtaggtattcacaactgtttctctttggtttgtattcagaataaaagttagaagagcaataggttgctagttagcaaaaatccatttactattgctcatgtttgtgaacatgtccaattaatattatgcattaaaatttcacaataaggatgaccctggagatcagactagtaagaaaaagaacaaagtgaagatagaagaattc

SEQ ID NO: 100239 - DNA, 406 bp, Homo sapiens
acattttggactggataagtctttgtggtgggctgtcctatgcattttaagatgcttaagggcatccctggcttccatctgctagatgccaaaaatctccccagacattgcagaaggtcccctgagggtaaaaccacacccatcacttcctcactccaccacgccctggtgggaaccgctgctataggaacagaggttctctgtaactgttagagaatgcaagttcatgtctgaaaacaaagccttgaattagagataaatttgggtttcattttgttttgcaggatttawaaaatgtcactaggtactgctatacatcatgtgactcttaaaggttttatctaaattagcttaatgataacatcatcagcactttcacgtggcaattagtagtgttttcagggga

SEQ ID NO: 100240 - DNA, 593 bp, Homo sapiens
ctgggatggactgggttctgccaatgggragcctggcaaaagatcagaaggagagaggagaataaagtcagtgtgtttatttccggattcctcctgggaggttgcctggggctggctgcttcattcatggcctctgctgtgtgcaattttccctccttttgggttccaggaactgctccctctggtcagccctctgggcctggtgcttctggcccaggtccctgcgtgccaccccttggcttcccttataccctacccctgtgctttggaattaatccatcatcagtaagctctcctcgaattatccttatccgggagggccatctgctccctcctgggatcccgattgctgcagagaggtcacagcagggtgtggagggttctgcaggctgtggcaaggagttgtggttttatttaagagtaagtcaaagttggcaaagggttttaagaacagtaaccaggacttctgagcctctggagcttggaatccatgagcctggtgttgaggagcccagcagagaacctaaatcttctgggatgtcttggccctggggaacgccctgcctctgctccttaagggctgtgtgttccag

SEQ ID NO: 100241 - DNA, 593 bp, Homo sapiens
ctgggatggactgggttctgccaatgggaagcctggcaaaagatcagaaggagagaggagaataaagtcagtgtgtttatttccggattcctcctgggaggttgcctggggctggctgcttcattcatggcctctgctgtgtgcaattttccctccttttgggttccaggaactgctccctctggtcagccctctgggcctggtgcttctggcccaggtccctgcgtgccaccccttggcttcccttataccctacccctgtgctttggaattaatccatcatcagtwagctctcctcgaattatccttatccgggagggccatctgctccctcctgggatcccgattgctgcagagaggtcacagcagggtgtggagggttctgcaggctgtggcaaggagttgtggttttatttaagagtaagtcaaagttggcaaagggttttaagaacagtaaccaggacttctgagcctctggagcttggaatccatgagcctggtgttgaggagcccagcagagaacctaaatcttctgggatgtcttggccctggggaacgccctgcctctgctccttaagggctgtgtgttccag

SEQ ID NO: 100242 - DNA, 593 bp, Homo sapiens
ctgggatggactgggttctgccaatgggaagcctggcaaaagatcagaaggagagaggagaataaagtcagtgtgtttatttccggattcctcctgggaggttgcctggggctggctgcttcattcatggcctctgctgtgtgcaattttccctccttttgggttccaggaactgctccctctggtcagccctctgggcctggtgcttctggcccaggtccctgcgtgccaccccttggcttcccttataccctacccctgtgctttggaattaatccatcatcagtaagctctcctcgaattatccttatccgggagggccatctgctccctcctgggatcccgattgctgcagagaggtcacagcagggtgtggagggttctgcaggctgtggcaaggagttgtggttttatttaagagtaagtcaaagttggcaaagggttttaagaacagtaaccaggacttctgagcctctggagcttggaatccatgagcctggkgttgaggagcccagcagagaacctaaatcttctgggatgtcttggccctggggaacgccctgcctctgctccttaagggctgtgtgttccag

SEQ ID NO: 100243 - DNA, 533 bp, Homo sapiens
ttctgctatttatgagttacccagtctatggcattttgctatggcagcccaaatagactgagacatactccttaacctttgacccacttctgtttaggccaagccagccttcctgagcctgtgcatagtcttcctggctcaaggaactctctctaccgaggtgcgatctcctaactcctggcactcatttacctacccatggttggtagtcagcctccaagatgcctgcagtcatccctgcctcctgggattcatatcctcctccacattgtgccaggattgggctctgtggccaaaaagaaaacagcagatgagaggacgtgtctcttctcagaagggttagaaaagactgtggcttccattttagatgactttctctctctctctctctctctctctctctctctctctctctctctctctctctctctcycctcttttccttcttctcttccttggatctcttgctctgaggaaagcaaactactatgttgtgagcagcccaatggagaggcccacaagacaacgaactg

SEQ ID NO: 100244 - DNA, 555 bp, Homo sapiens
atagatacatgtatacataaacacatgcacacaaacgtgtatatacacaggcacataaagacacacatatagacacacactgtcacacacacatacacatatagaccttctctaatcttttccctgccttttgctcctggaagccactcctgtatcaacagcaattcacccagtcctcttgctcaaactcattgtcccaagtgcagaggtgccctctctcttacacctctgtcaaagttacacacgttgtcaggttcatgctaaatatttgacttctcattcaagttgcccctctcaggaaaaccttayccttgaaacagaggtcttcctcctgggccttaggaaaaagaatcaacctggaaggacatttccactggtggggagagatttcctcatcattcttcaaatccagtcttcaggaagcatttaattctcttgagacatgagtagggaacacaccaattcatggctttggccagccttgaccttgagctggataaaacatttttgtccagagttgtaaaaatgcaatgtagcttttttgatgaaaagctt

SEQ ID NO: 100245 - DNA, 590 bp, Homo sapiens
tggctgttgttaccgtgactgattcctgatgcttcggaattcaagggcaggaggcacttggggcactggctgaaccttggctccctgacccctcctcagtccccttcctgggctccacaacatataagatgaacgttctgattgtmtatttctcctcccttctcgttttactcttcatttggtggagtgtgtggtagggataaaatcttagagatgtttatctgagccatagagagaccttatttggggtgcatgggaaatagacaagtaatcccaagctcaccttgcctgggtgcctgcggagggcaattgtgcattagcggtagagtgtggtggggacctgggcctgggtgggcaggggagagcttctggacaggggctggtggattaaggtcatgcccataggtgggaagccacccacacagaatcacagcatctcagaagggcagtgccagaaaaatccccagggacctcattttccttggaacacaacccaattccttggcttggccaaccaggcctagcgcatctgggcccaacttcatctgccttcattcctccactgcatcagtagggtcatttgggtgtag

SEQ ID NO: 100246 - DNA, 590 bp, Homo sapiens
tggctgttgttaccgtgactgattcctgatgcttcggaattcaagggcaggaggcacttggggcactggctgaaccttggctccctgacccctcctcagtccccttcctgggctccacaacatataagatgaacgttctgattgtctatttctcctcccttctcgttttactcttcatttggtggagtgtgtggtagggataaaatcttagagatgtttatctgagccatagagagaccttattkggggtgcatgggaaatagacaagtaatcccaagctcaccttgcctgggtgcctgcggagggcaattgtgcattagcggtagagtgtggtggggacctgggcctgggtgggcaggggagagcttctggacaggggctggtggattaaggtcatgcccataggtgggaagccacccacacagaatcacagcatctcagaagggcagtgccagaaaaatccccagggacctcattttccttggaacacaacccaattccttggcttggccaaccaggcctagcgcatctgggcccaacttcatctgccttcattcctccactgcatcagtagggtcatttgggtgtag

SEQ ID NO: 100247 - DNA, 595 bp, Homo sapiens
tttactcaaaacacaacatgaagagattaccatttatttttctttatgtggtcactttcagatatgtctgtctttacaaaaattgaaaaacttaacttggtttatttggttaacttaaccgatatagaatcgtcaatattctacattaactacaaaattataattccacatagtccagcctatagaacccgactttgtaacttgaacatactgtttcataacatcagtagtctgaaaacttctacatttaagtcagtgggatctgattatttgtaacattgatttgttgactttaaaatgatatttcgttttttttaaagcaagatacagaaagatggaaaataaatatacaaagtaaaaaggggatactttcctctaaagtgaaagtaaactcacgtgataaattggagaaaacatccttttcctaagctccaagctgatgttcctacagatttgttttttaacagcctactttcagaacagtttccttttgtccattgtgcaagggttgggaggayggaatacaacagatagaaagtgtgtactgacctctcatctttggggactaaatttcaactgagtccatagattcatg

SEQ ID NO: 100248 - DNA, 456 bp, Homo sapiens
gaattctcacttcccactaagwagtgagaagccaacacacagtctgaatggttatcactgggctccatccatagacacccaccaacgacaactccaaacagaaagctctttcccacctttgaaaataggatgcttgggcaagtgtggctggagagataacgctggaagaactaatgctgtggccgcaaaacagcaaacagaatcaaaacactggcctagatattacagcagggatgccacacaagttcaagtgttgaaaggtatactctgacgtggttgcaaatggaaatattaacaaggtcaggacacagacatcttcagatggaagcagggcataaaagccttgatttttttccaaggtgtcagcattaagtgctacacacacaacttgaaatggaaataatccttgttgctacttggtaaccaccttcccaccatcaactgcttctttctaga

SEQ ID NO: 100249 - DNA, 572 bp, Homo sapiens
atagctgagtgtaaagggagttggaatgcatagtggaggagagtcagggtaagtctcagttatggccccaacatcaacaggagcaatgggagcagtagctcatcccagtcacctccctattctgagttttcccacaggaaggaaagaccacagaaaccacagaggagctactctacaaatctgcataaaagtaaatctgtgtggcctaagagtggcctgtggcagccatgagaaacacaccttgtagatctgcaactgtgtgggagtatacttgaccaaaggccccagctgctgccttttaaatccattgccacatttctctctgatgaacctatgctctcaacatgctgcttccggtcaatgatgagcgcattggttctgctaaggcaggacaattcctggaagacactggcatcctctgacagcaaatttgattttgaggactccccatggccttgcttagactgtacagcactcagacttccttccctctctcctctctggtcaracttgcactgcagtctgatggtgctcccagtctaacctagcttcgacctattttctcaaacaga

SEQ ID NO: 100250 - DNA, 591 bp, Homo sapiens
tcctcatgcctcttccacttaggagcctttgtgcaaagtcagaaacacacagtggatctttgaccctacactgatgtaccccagggtcccaaataaggcatttaatatgaccatatctgcttagtaaaattaaatctattcactttatctctttctgctaatgagttgatattgagttatataacactatcctaatagattgacttacagagatttttaaacaaagagaacttcaattctcaaaaacacacagaaatagattgtttggggaataacctattttctactcttacattctgcccacctttcctaaaatctgcacctaaaacagataagaaggagacagatactcttgcagacataggagaagagacatcagaagattcttctttgcaggaagaatggggctgatttttttcagatattcttccttaaggccagacactttgagggagtctctttctcctcctcagcccctctacacattccttgagaattagaaaatccctccttstctttgctggcaggggaaacaagtggagtataaaatgactgataacttggggtagaggctgggtcacaatagcaggc

SEQ ID NO: 100251 - DNA, 629 bp, Homo sapiens
gaggttcctgtgggtcctcctaacaggctgattcagcctgagctcctggggctaagctcatttggtagcagccaaagaggtatctttcattcttcttctttcttactcacctgaacctgagcaatttcccttcctgcagccacaccatcttgtgtgttttcccctgagatgttgatctgggagaaccctaaggaggtgccataactagtggtgatatgctccwtttatgctacaggcctgggtcagtcacctcatagcactagtcccattcttcattgttgagtctaaattggagctcacatgggaactgagaatgctgtctgaccaacaccaggaaaatgatgcaactcatattaacaaagaccaaaaggctttctttacaggtatttaatttaatggaagtactgcaaaccctgcttgaacttgtaaggcataaaagatggcaattacttagataagaaactaatttgttacaggacccctttaaatatttgctgcattcaaaatattaactctgtcataaaattcagatcacacattatctgttgtgtaaaacaaaataccttatgtggccacgtattgattctgagaaacaaaattcactttcccgatgggcataggtaaggtag

SEQ ID NO: 100252 - DNA, 533 bp, Homo sapiens
tctgagaaattaacatcttgccaaaagacccatagcttttgagaagagcaacagtgattcacacccaatttaaatacacacaaaaaagctgtttccctccaaatttactactctttctagtaaaaatgattattgctgtaacaagccagtctcatgtgtgtgcacatgcgcacacacacactcacacacatacagataaatattaatcattgattggacctggacatttgaaaataaattgtgaacctacttattttaacaaaagcaatttattaatatattggttttctatkaatgttacctcactctaattttgggaagttaattaccatgcacctttagaatgctgttattgctattcacttttccacgaatttcaaggaatctggtaaagcctgtggtttgttgaacgtcttgaagcacaaccctagtatttaggtttcttggaagttgctacataattgaaataatacaaaaaacacatataaagtagttggctgagaaaaattctatttataggagtgcggaaaaga

SEQ ID NO: 100253 - DNA, 567 bp, Homo sapiens
aaatattaatggaaattcttcaagatgaaaacaagtgactcctgagagtaatctgaatccacatgaaataaagtgacagtaaaggtgacaaagtaggtaatttttaaaagacagtataaatgcctatttcttttcctttcttctcttcattgattataaatacaattgtataaataaaaggtacataatagttttatttggcctactacatatagwaatgtaatatttttgaaaataacagcaaaaaggacgtgagtggggacaaaattatattgaagtaagtaaacgataccagatagtaactcaaatccacaggaagagctgaagagaaccagaaatgaagaagagtggaaaactaagaaaaatcaatgaaaccaacaacattaatgatcaacaaaattaacaaaactttagttagactgaccaagaaagaaaaaacagagaagtctcaaactactaaaatcaggaataaaaaagaggacctcactactggtaatgctgcagaaaggaaaaggaccataaggaaatactacgaaaaattatgtgccaagaaactagataacttag

SEQ ID NO: 100254 - DNA, 567 bp, Homo sapiens
aaatattaatggaaattcttcaagatgaaaacaagtgactcctgagagtaatctgaatccacatgaaataaagtgacagtaaaggtgacaaagtaggtaatttttaaaagacagtataaatgcctatttcttttcctttcttctcttcattgattataaatacaattgtataaataaaaggtacataatagttttatttggcctactacatatagaaatgtaatatttttgaaaataacagcaaaaaggacgtgagtggggacaaaattatattgaagtaagtaaacgataccagatagtaactcaaatccacaggaagagctgaagagaaccagaaatgaagaagagtggaaaactaagaaaaatcaatgaaaccaacaacattaatgatcaacaaaattaacaaaactttagttagactgaccaagaaagaaaaaacagagaagtctcaaactactaaaatcaggaataaaaaagaggacctcactactggtaatgctgcagaaaggaaaakgaccataaggaaatactacgaaaaattatgtgccaagaaactagataacttag

SEQ ID NO: 100255 - DNA, 603 bp, Homo sapiens
aattataaaaaacaatgatgacggtgggaagttacctgttcacagggatgtagccacttttaggagttttggtttttgagacagagtctttctctgtcacccaggctggagtgcagtggtgtgatctcagttcactgcaacctctgcctcccaggttcaagccattctcgtgactcagcctccctagtagctgggattacaggcacgcaccaccacgcctggcttatttttgtawtttttgcagagatggggtttcaccatgttggggaggctggtctcgaactcttgggctcaagtgatccacctgccttggcctcccaaagtgctgggattacaagcatgagccacagtacccagcctaggaattcaattttgtttgcttttctctatcaacatttttttttttcctgcaaagttttctgtatatgtatttacttttggctgtggctgaatttgtggctagcttctcgtatgttcagttgagaaaaaagttctccctcctagagggaaaaggaataggtaatgacaagggtctgtttgaatttgcaggcctatgtaccagtagagcacttttttaggacattctagaagatgaattgctca

SEQ ID NO: 100256 - DNA, 603 bp, Homo sapiens
aattataaaaaacaatgatgacggtgggaagttacctgttcacagggatgtagccacttttaggagttttggtttttgagacagagtctttctctgtcacccaggctggagtgcagtggtgtgatctcagttcactgcaacctctgcctcccaggttcaagccattctcgtgactcagcctccctagtagctgggattacaggcacgcaccaccacgcctggcttatttttgtaatttttgcagagatggggtttcaccatgttggggaggctggtctcgaactcttgggctcaagtgatccacctgccttggcctcccaaagtgctgggattacaagcrtgagccacagtacccagcctaggaattcaattttgtttgcttttctctatcaacatttttttttttcctgcaaagttttctgtatatgtatttacttttggctgtggctgaatttgtggctagcttctcgtatgttcagttgagaaaaaagttctccctcctagagggaaaaggaataggtaatgacaagggtctgtttgaatttgcaggcctatgtaccagtagagcacttttttaggacattctagaagatgaattgctca

SEQ ID NO: 100257 - DNA, 572 bp, Homo sapiens
agacaagtgaattgtgcaaagaaagagttacggagatctacagaggtggccccttgagtcatyggctgaatattaatctgtacattcatagggggaagatccacaaggctagataaagaacggaagaactataatcaaaaccattcccagacttgcacaaggctgagaggcatgcaaattctaacgagccagagcagatacaccttctggaacactcagagcaatatgtagagatttcagaaggatcaaaccttagtactagagctaacttagccctgaagaacagcctattctagaattgttctaaaaaggctttaaagcaagtctagtaaagattaatcagtaaacatataacttacatataacttacctgtctgccaaaacaaatttcagaattttttaaggaagacaactgtatctaaatactaaacaacagaaactcatgatgtcctgcatccaacaaaaaattattagacatgcaaaaaatcaccaaattatgacccatagcaaaaggaaaaatcagtcaaaagaaacagagataaataacagagatgctgggaacagcagaaaat

SEQ ID NO: 100258 - DNA, 572 bp, Homo sapiens
tgtatttatggtcatttaagtcaggcttaaaaaaatgttgccttgtagctttattttttaatccaaaagtttaataactaaataaaatgggtatatatagatatacatgtatatatagattgtatgtacttattaatataagtcaagagcaaattatatatagattatatatgcatatatataatatatacttaatataagccatattttaatgattatatttacttattaatataagtcatatagacacatataagtaatttgctgttgacttrtattaagcttggcgacattctgaatttttaaaaatggtcatcagttttcactgtttatgaattttgcatagtaaaagtaaacttaaacagcctagttcttttacaaagaaataaacaacagaaaatataactaaagtcatacctacatgaatgggtttagcgatctttgaaagcagattgaacagaattgctgactgctctaggtgcaaagttctagattagctatgcaaagatgtaagatacatatatttcctactttcaaatagtttacaatataaagaagtcaatgggacccca

SEQ ID NO: 100259 - DNA, 572 bp, Homo sapiens
tgtatttatggtcatttaagtcaggcttaaaaaaatgttgccttgtagctttattttttaatccaaaagtttaataactaaataaaatgggtatatatagatatacatgtatatatagattgtatgtacttattaatataagtcaagagcaaattatatatagattatatatgcatatatataatatatacttaatataagccatattttaatgattatatttacttattaatataagtcatatagacacatataagtaatttgctgttgacttatattaagcttggygacattctgaatttttaaaaatggtcatcagttttcactgtttatgaattttgcatagtaaaagtaaacttaaacagcctagttcttttacaaagaaataaacaacagaaaatataactaaagtcatacctacatgaatgggtttagcgatctttgaaagcagattgaacagaattgctgactgctctaggtgcaaagttctagattagctatgcaaagatgtaagatacatatatttcctactttcaaatagtttacaatataaagaagtcaatgggacccca

SEQ ID NO: 100260 - DNA, 581 bp, Homo sapiens
cccttgaatttctgctctttttaaatgtctatcttttcttttgaaatgtctatctttgtgagtgatattaggtaatctctcttgttctgtttctaatccaatgattctttcttctgtcctctccattctattgtcggttctcagccactggggttttctattacatttatcacctttttcaattcttacatttccattttttttttttttttagtatttttkgtttctttgctaaaaccttctattttaaaatgtatttcaagcatatttataattgcttatttgtgacttttataatgtggctttaaaattcttgccagataattccaatattagtgtattctcattattgacatttgttgattgtattttctcattcaagttgagatttttctgagtttttgttaagatgagcaatttttgaaaatcctagttgtttttggtattatattaggaaactgtaaatgttatttaaagaacaatcaaatgaaaaaaagttcaacatcactgatctttacagaaatgcaaataaaaactacgagatatcatctcacaccagtcagaatggctgttagtcaaaa

SEQ ID NO: 100261 - DNA, 498 bp, Homo sapiens
ggctaattttgtatttgtagtagagacggggtttctccatgttggtcaggctggtctcgaactcccaacctcaggtgatatgccygcctcagcctcccaaagtgctgggattacaggcatgagccaccgcacctgacctaaacgctgtttttgtataggcactgtgctggtgttggaaacttgatgatgaataaggtaaacatgaccttttccctaatggaaatcacagtcccaattcctgtgtgcagagcttggttcaaggcactatggaggctccaatgatgtcacagaaggcacttgcttttaaggactggaagtgcactaagaaaaatgacaggtatacctatgactgtagtatgtgttgggctgtggtagttactttattagagtcaaaaataaagtgctattggtgaccagaagaaggattatctccaagttcatgaatctgagataactttcagaaagaagggaacatttgagctaattatttaagagtac

SEQ ID NO: 100262 - DNA, 613 bp, Homo sapiens
ggtgaactttggtcaaacaatggaaataatggtccataaggaaaacaaaacactgttctatatgaggaaggagcttgatttggttagcaacctaaagaactgaaatatcatgagaagttccacagagtcacattttttaaagggtattttaaatttcccatggtaaagcctttttgcttgggtttgatttatgtttgcccttggagcttagctattaactgyaaggttccttaacacaggtctcaatttgtggggaaaaaaaaatttccaattgaagactggcagagtagaaagaaaagctaagagccaggaataaataatactaagataactcataagatcaaatcgattcaactaaaaatttttaaaaaattagtatgctttaaatatttgacattatgataaatacctcacatatattatgatatgtggtccttacagtataatcatttgtagctattttgattcttattttaaatattatgaatctcattagggctattttaaggttcagttcaataatttacataaggtttcacagctagtaagtggcagagatagattgaacacagcccatggtccaaattccatattcttgaccactgcactatat

SEQ ID NO: 100263 - DNA, 495 bp, Homo sapiens
ttatttctctcagtacagagggggaaagataattgaaaattaatgaggaatagaaaatatacctccatgtataatgtttataacgattgtttctctcaatggatattgagtaaactaacttcagctttcattttaacaatttaacagacgttgggcatatactagtacgtggcaggccccaaggatacaaagacaaatcagctgctcaccaccacaaaaacactctcattctgatgcaattgctctgtgtaaagaaggagttatgtgaaaaattattggggaagaaccaatagagtacaaggactctttcttactgtatttttttttttcttatttttatttgctgagacagagtctcactctgtcacccaggctggagcacagtggcatgatctcagctcacygcaacctccacctcccgggttcaagaaattctcactcctcagcctcctgagtatctgggattacaggcccatgccatcatgcccggctact

SEQ ID NO: 100264 - DNA, 609 bp, Homo sapiens
ttttgactctacctaatagtccattcatattaaaatatgaattccaaggagaaagaaagaacagaattttgaggtggcttcagagacttaaagaagattaaatttatatgacaactacagtaaatgcaattcactaatatttgcaaattaaaaattctaagtgagccaccacattattgttttggagatgatggagtgagatgcatggcattttctcataacctctataaaggggatagctaaaatttgcctttcatctggcaatgaaagtattctaagaattattccgatacttttccactgtataatcactmaattatattcatgtgaaagaagaaaacaaatggtataaataagtggcacttatgatggcaacttttaattaaacacatcttattttttctacaataaaaggaaagtggaagccttcagtattaactactggattataactgacatatttgagtatcctcaactgtgtctttgtgcttctgctatggggattatagagaaaggagaactgtggaaagagtaaaagtctaagaaccagatatattctgtacttgtttgttccaatagagaaggctagtatggttttgaaagccgaaa

SEQ ID NO: 100265 - DNA, 586 bp, Homo sapiens
gaatatatggtaaaatgaatggtataacattttcaatattacttttgctggcaattttaagtagtttattactaagaaatgaggttgctgctatcctcatatagtagacagaaaatgtctctaatccrtcatcttgcaccttttacagcttcaggaagtatttcatcagaagactcttcagtatgaagagatgactaactttatgtttttccttattttaacatcgtcattaattctaatcacatgtaaataatagtgtgatatgattcataaaatccgtgacctcttcacccagctctcaagctgcattttcattacagtcttttcatcatcagaattttggcttcaagttgttgatttagttgtgattgtcttgaaaagaaaggtctactaaatgagtcaacttttatcacgaactataaatgtatttatttatccaacttttaaatacaaacaatcctttcccactaggaaagtactaaatcaaccatgagttggaagagtatttccaatgcatttctactggttggtaatgcatatctgtgaacttaatactttaattattgcattaagatcattgaaagat

SEQ ID NO: 100266 - DNA, 586 bp, Homo sapiens
gaatatatggtaaaatgaatggtataacattttcaatattacttttgctggcaattttaagtagtttattactaagaaatgaggttgctgctatcctcatatagtagacagaaaatgtctctaatccatcatcttgcaccttttacagcttcaggaagtatttcatcagaagactcttcagtatgaagagatgactaactttatgtttttccttattttaacatcgtcattaattctaatcacatgtaaataatagtgtgatatgattcataaaatccgtgacctcttcacccagctctcaagctkcattttcattacagtcttttcatcatcagaattttggcttcaagttgttgatttagttgtgattgtcttgaaaagaaaggtctactaaatgagtcaacttttatcacgaactataaatgtatttatttatccaacttttaaatacaaacaatcctttcccactaggaaagtactaaatcaaccatgagttggaagagtatttccaatgcatttctactggttggtaatgcatatctgtgaacttaatactttaattattgcattaagatcattgaaagat

SEQ ID NO: 100267 - DNA, 514 bp, Homo sapiens
ctgcttttcaaggcatttacatcagagatgtcttttaacaaaagaggaggaagggtaacacaaggagacaggagaactgtgggctcccttaagtcaagctagtaaggccagccctgacgggtagaaagaactgagaagccttcttgaagtttcacgcctaagaacatgcaggggcagaaaaggagtggatgaatatgcccagggcttccaggaacccagtgtgaagcagcagaatcccaccaaacattcctaggtatcttatcactctgctctgaaccccagggctatgagtattccagwttgagagactggggattattcaaacattttatatgagtagcttgttcgtgctctgcaaatttaaaagacaaaaatccctctgaagcagtgattctcaaactttagcatgcggtgtaatcaactggaggtcttgtgaatccaccagcgccggaccctatcccagagttactgattcactgggtcttgggaagcgcctgggaatttgcatttttaa

SEQ ID NO: 100268 - DNA, 541 bp, Homo sapiens
gctacgtggttaaaaggattcacctggctggctggtcccagccctggcaatggccatcttacatcttagcgtgcttaggctggggctgcagaggagcaccctggtctggtgtgggtgagtgagaccaggcagtcacttcctggtatgagaccctgggccagtccccagtctgctcttcattctcttccactattagattgaagcctgggtaatctctcaagttcctgctggttctgggatggggtgggtctaagaacactaaccctgaaaaagcatacaatctctgcaacctcagccacagccttcaccatgaatgygccactcctctgacccatgaagctttaagattaaacttcccccaggactgggtcccgcctatgttcagtgaaagcagatttttctggagcttcagactcactgttcctccaagtgctgccctctttgcagcccctgggccctaagcccatgaatcagacctgccaggagcctccaggcaacactaagcagcacagagagaacagaacagacatggggcctgcca

SEQ ID NO: 100269 - DNA, 541 bp, Homo sapiens
gctacgtggttaaaaggattcacctggctggctggtcccagccctggcaatggccatcttacatcttagcgtgcttaggctggggctgcagaggagcaccctggtctggtgtgggtgagtgagaccaggcagtcacttcctggtatgagaccctgggccagtccccagtctgctcttcattctcttccactattagattgaagcctgggtaatctctcaagttcctgctggttctgggatggggtgggtctaagaacactaaccctgaaaaagcatacaatctctgcaacctcagccacagccttcaccatgaatgtgccactcctctgacccatgaagctttaagattaaacttcccccaggacygggtcccgcctatgttcagtgaaagcagatttttctggagcttcagactcactgttcctccaagtgctgccctctttgcagcccctgggccctaagcccatgaatcagacctgccaggagcctccaggcaacactaagcagcacagagagaacagaacagacatggggcctgcca

SEQ ID NO: 100270 - DNA, 541 bp, Homo sapiens
gctacgtggttaaaaggattcacctggctggctggtcccagccctggcaatggccatcttacatcttagcgtgcttaggctggggctgcagaggagcaccctggtctggtgtgggtgagtgagaccaggcagtcacttcctggtatgagaccctgggccagtccccagtctgctcttcattctcttccactattagattgaagcctgggtaatctctcaagttcctgctggttctgggatggggtgggtctaagaacactaaccctgaaaaagcatacaatctctgcaacctcagccacagccttcaccatgaatgtgccactcctctgacccatgaagctttaagattaaacttcccccaggactgggtcccgcctatgttcagtgaaagcagatttttctggagcttcagactcactgttcctccaagtgctgccctctttgcagcccctgggccctaagcccatgartcagacctgccaggagcctccaggcaacactaagcagcacagagagaacagaacagacatggggcctgcca

SEQ ID NO: 100271 - DNA, 577 bp, Homo sapiens
gagtttcacactcacataacaaactacatttctactacaatgataacaataaatgcttacaatgtgctggaaactattctaagatttttatatggattaactaatttgatcctcacaacaaccttaggaggtagatcttattattataattctatttagtagaggatgtgaatgagatacaaaaatgtcacgttgcttactcrgccaggaagaaatagcccaaacttagagccccaatcttacttatcatagggctctgaagtttagtgggttcaaaatataactgttgaactttattctttaaacttgatcccctcctgtcttctccatttctttaaaaagatcctagttgatcatccttgactcatctctttcttccacaatcaacattgaatctgttggtcaagactagttcattctcttttttgaaaaaattaacaacttgactcctttaaaccacctccacttcttctgccctattttaagccattagcatctctttcctggacaataattggcccccactcctaacttatccctctattcaagtgttgctcccctcccctttcattttctc

SEQ ID NO: 100272 - DNA, 603 bp, Homo sapiens
cataatgaggtgtgataaaggaatgaaattattctaacaacatttttttgaaaacattttcctgatgttattgcaaarggacactgatagacacattcttaaaaattcaaaattttaagaaatattttctttaaaatattttaatgtaaaatattaaatattttaaaacgcccttcaggaaacaatagctccatcttggtatcaaatcagaagaatttctctaatgtttagaacttctaactcagaatgagtgatgacaaactagtggataatatattttgagtttgttgtgaaagtccccaaaaaccttataggcacatgtgaccatgtaatgaaatcagatatacacatcaacacagaaatgtagcctcagttatatttcagagtagtgtccatagtcacatttacaaggcaatggtcaaacatttttgaaaaataaattataagacaatacagtaatgtaaatgaaagcaaatatactacaatagtttaaataatttatttgtttctattttggataacaaattgggaatgaagagaggaacaaacaacttttatttttaaagaacagagatttgtttgttttactgggttgatatatcc

SEQ ID NO: 100273 - DNA, 629 bp, Homo sapiens
aaggttctaatattaaactatttttgacatcatcttttgttatagaaaaataccttttacttagagagatgaattgtcttcaaatattccaactagttagaacaagaggtaacatttataagtcaagtctgccattcttcaatctactgcttataccaccatgccaaaatgcctaaaacttttaatcctgwgataattcaaaagttacaaccactatataacatattctaatttctcttgattattactcttttttggaagttattttaaatcttaaaaagatatatctatagaaaatatgtaagcatgttccttctgtctctcattcagctggatattttactaggttacaaataaataaaagtagtacatcttgaaaaatgttttaaatacaaaaatgaacaaagagtgaaatgtaattccatacacatatacttatccacttatatgatagtatttttagacaatcatgataatgaacacatatcaatcatttgctatgtgccaagcactattctttgcacttaatataaaatgtataactgaatctttatgacaattatgtgaaatatttactgttattactttattgatgccaaactgagtcaaagagaggtcatgatatataa

SEQ ID NO: 100274 - DNA, 473 bp, Homo sapiens
agacatcaatttaataaaattgttcattcatcctctgattgatttattctttcaataaacattaccaactatcttctgtttgccacatctgtggaaattcttccggaaatatgaatgcgttacaagaccygatttacgtccactgagctctcaacattgttgggaagtaaaattcctgcctatttagagataaatacaaagtgtaccccaaagtgttaaattgaacataataaattgccaaaatgcataaaattgcagtgaagcccagagcaaatcccagaggtcctgatttgcagcccagtctttggatttaccacaaacaaacaaacaaaatacagtatctaattgaaaataaaaggtctggttgtagaaatattttagaataggcatccatcattttgcatgtcacaactatgtcaagaagtcccaagagaaattatttctgtgaaaatattttcttttctttgttaaaa

SEQ ID NO: 100275 - DNA, 514 bp, Homo sapiens
agtcattacctttctgctcaccataaatggaaattactaacattggaggttattacacagcttatgtttttttttwaaatttaattttgtttttttgagatagagtttcgcttttgttgcccaggctggaggctggagtgcagtggcgcgatcatgggtcactgcagtctccacctcctggcaagcgattctcctgcctcagcctcctgagtagctgggatgacagatgccagtcaccacgcctggctaattttctgttgtatttttaataaagatggggtttcaccatgttggccgggctggtctcgaactcctgacctcaggtggtcatatcatcaggtgatatgcccatcccagtctcccaaagtgcatggattacaggcgtgagccactgcttccggcccttcctgcacatcttaattactatattgtcactctgtttttccttaatatccttcttatttattaaagatctgaaatatgactaattgatgttttctgagtggtcctccag

SEQ ID NO: 100276 - DNA, 608 bp, Homo sapiens
catgttagggaacacctgatgtaataagtaagtgtatcaaatcaagagttgatttaatatagcacgggttaaaaacggggtttctttttgtgagtggggataaataactttgtaagaaatcatcaagtgaaatatctttcgggaagcctttttgggctatatattagtcagcctagacattcacaatatgagaggagactcgtgaagctggatagttaatctcttctttgaattccttagaaayagatgagcaaatcttcaccagcactttgccctgcgagatactaattgaagggtagttgtttttcaaaacttctaactttcacctcaccactctcaaacacacctcatcctactcatctacttttccatttataaaaggtcattttttatccttggaaggactgtactctcaaatgccagaaggagaatatcaagcctcatggattattcagaaattctctttcttaacagcttaattgctgacttcagtaatctattaactctgctggtttgaatgcagctgagagacttagagcatcaacccagagctatgccatttacaccttgaattgagctttcgttctaggttcttttggtgactattg

SEQ ID NO: 100277 - DNA, 603 bp, Homo sapiens
aatggattattcccatttatttgttgcatttatttgtttactaaaggttacatttatcttttgtacgattgctgttttttcctctgtaatattattttacatattagtcttgaacttaygtctttttaatccttagaacttttattaggtatgtgacccaatgatttgatttataaacatgcacattgatatttctaacaattcatatttttatataaagtgtatactcacctgccagaaacagtgacaagagaaatatacatgaaatatttaaattcaggacaaccattagggaagttcttgtgatatattcctaatgtattgtgattattagcattccttaaaatttccctaaaaatttaacacccattcaccaaataattcttactaatgaaaggattatttactagcaaatcacatatagtttgacacatctatatgtttaaaggataagaaaaagcaaaatttgttttgcttttaatttagttaatttattagttttgatgctgcatttcatggagccttaggtgcttccgggtccccattagtaagtgaccaggagagaggaatgagtgtgactcttagttccctctgtcccccaga

SEQ ID NO: 100278 - DNA, 603 bp, Homo sapiens
aatggattattcccatttatttgttgcatttatttgtttactaaaggttacatttatcttttgtacgattgctgttttttcctctgtaatattattttacatattagtcttgaacttatgtctttttaatccttagaacttttattaggtatgtgacccaatgatttgatttataaacatgcacattgatatttctaacaattcatatttttatataaagtgtatactcacctgccagaaacagtgacaagagaaakatacatgaaatatttaaattcaggacaaccattagggaagttcttgtgatatattcctaatgtattgtgattattagcattccttaaaatttccctaaaaatttaacacccattcaccaaataattcttactaatgaaaggattatttactagcaaatcacatatagtttgacacatctatatgtttaaaggataagaaaaagcaaaatttgttttgcttttaatttagttaatttattagttttgatgctgcatttcatggagccttaggtgcttccgggtccccattagtaagtgaccaggagagaggaatgagtgtgactcttagttccctctgtcccccaga

SEQ ID NO: 100279 - DNA, 592 bp, Homo sapiens
ggatttcctgaatctgtacatctgtatctttattcggtgattggaatgttttagttattttgcytctgaaattttgctcccctttattctctcatctccttctggaactttaagaagacaaatatgggacctactcatactactctttgtgtgtcgatgtcttatgtattttccttttctttgtttctttactgctattttggtaatttcttcatatatattttccagtttgccagctctttgttcagctttgtctaacaactgttcaatccatccattagtaaattttgattatatttttattttctgaagtcttcgtattcaattttgatagtctcttgctccttcaatattctttcaaatctcttctttttttcctagacatgctttatatgctgcatatgataattgtaatatctatagactgctggtcaatgctgaccaccacacatggtggcttatttccttgtgtgtctaatgatttgtgatgagcaactcatgaggttcttgtttaaagaacatttctttagagaaaatttgtgtttgcaactgcaaggtgcctagatgaattattgacctaagtccaatttaa

SEQ ID NO: 100280 - DNA, 592 bp, Homo sapiens
ggatttcctgaatctgtacatctgtatctttattcggtgattggaatgttttagttattttgcctctgaaattttgctcccctttattctctcatctccttctggaactttaagaagacaaatatgggacctactcatactactctttgtgtgtcgatgtcttatgtattttccttttctttgtttctttactgctattttggtaatttcttcatatatattttccagtttgccagctctttgttcagctttgtctaacaactgttcaatccatccattagtaaattttgattatatttttattttctgaagtcttcgtattcaattttgatagtctcttgctccttcaatattctttcaaatctcttctttttttcctagacatgctttatatgctgcatatgrtaattgtaatatctatagactgctggtcaatgctgaccaccacacatggtggcttatttccttgtgtgtctaatgatttgtgatgagcaactcatgaggttcttgtttaaagaacatttctttagagaaaatttgtgtttgcaactgcaaggtgcctagatgaattattgacctaagtccaatttaa

SEQ ID NO: 100281 - DNA, 557 bp, Homo sapiens
ataattatttagaatttcatccagctgttctcgcatgtatcaatatgtgtgtatatatgtcatgtgtgtattttgttacttatcttttaaggcatcaagttttacttggtcttaatattttaaaattcttaattctttccatartcaatttggttggccttgaacgtatcttctcagttattaaatgggtggactcatcggcatgtatttcctttaaccaatttttctgggggtggggggtgcagatttatttagtgtagtctactaaaggacagagtgcttggtcctgggtcttttaataaggtgaagcttaaggttggcccatcagaagccatctatacttcttccttttccgggataaggtgtgacaaatggcaatccagctggtattgccccacagctcttccagcttcagctcctagcacttagtccttcacccagcagttccatgcatcactccccaatatcttcacctcagctacatcgtattgccggtgactgttgtcttagagagacaggaattaatggggcatgaaataaatcttgtcattcagaaa

SEQ ID NO: 100282 - DNA, 582 bp, Homo sapiens
aagccttggcaagtggagcagggcagacccatgaaggcagggctctcacacatgatttgctggataatgggaactatcgcaagaaatttttccaaaccacagtttactacatggacagcttacacaaggacagctagcaacacaaggacagctaaccacttatacaagaacacttgcctgacatgctgtctcacaaacccaacccaaaatgacaagggacccctgcaaactcccagaatggtttaagagcaaagtaaagaactaaaacattccctctcactggcctgaaacaaggcttctggacacccccaccttttcttcacaacctgcatataagaagcctggacttccacccctcctgacagtaacacagtgtccctctactcctctgctggagcgggggtcagagaagacctagtggagagtcagcctagcagtaacaaggctactcccattgtggtgacagtggaggccacatgaggagcagcactcatacccccacacatcaggaccacggagcagcccaccataggtgtcagtgatagctgayggaggaaccaaaacttctacttctatgagcag

SEQ ID NO: 100283 - DNA, 574 bp, Homo sapiens
ttaaaattaccaataatattgacaagcttctagaaagccaaccaagaaaaaaaaggaagaatacacaaattaaactatagaaatgaaaaggagatagtggttgccaggagttgaggagtgggaagtgcaaaggaagggggtttggctayaaagaacatcagaagggatccttctgggaagaaagtgttctgtatcttgacagttatcaatattattatcttggttgtgatattttactgtagttttataagatgttatcttacaagtgataaggggggaactgggtaaacgatacacatgttcactctcgttagttcttccaactgcatgtgaatttacaattatcaccaaaaaaatcattttttaaaaaaagaagcattcttctctcacttaaaaaaaccacaaaatattacctcattctagtaaatgagaatctaccacaggtgatcataaaaaaggtatataaaaatgttttagatatgattattttatagctttacaaaaatatatctttcctaaagtgaagtctacttaacgaatataatattctcttggaaagatattataacattta

SEQ ID NO: 100284 - DNA, 519 bp, Homo sapiens
gtttattatcagtgatatcagttaatactatactggaaaactgcagaagaattaacccatagagggttaattgagaggatatcagttaaacaacattttattacaaaatatgttagttgccatgttgaaggtataaagcaactgcaagaatcaaatcatatacatccctaccgtgaacactgaaatcactgcatgcctccaatatacaatataataacttacatgctccagatgattaaaagcaacttggtctcctcatcttggtgctagacttcttattgataaggagtgctccttatttatccttataaccctagtgcataacactgaacttcaaatgtmagttcttaattagtcttttgtccaaactaattaacaaaatcaaagaaacaaagtatgtgcatttgaaaatgatattgtcctatccaatggaaattgttgactaggtcacacaataatgcaaaatgtcctataaatttttgtcctcggtgatattattaagaaacaaatgttagcatg

SEQ ID NO: 100285 - DNA, 608 bp, Homo sapiens
ctctattcttgacttccagaggccctgcatgtttccatttactcatttacactcccatcattgccttgagaagtccattcctggatcaatccactgatgccaggagaaggatgagagatgtgtgaggcagaactgcccagctaagatgtcccagccaacccagcctacagcacagccccagctgacctgcagatatgcaagtgtgcaagcctagatcagccaacctctagctgaccaccataactaatgggaaacaaactatcctggtatgmcactaaagtgatgtgattgttatataacattactgtggtcccaattaatcaatacaattaacataatagatgctaatagttattgagcacttactatttgccaggccatgtattaattattccgtatatgttagccatttaattttcacagtgaccataagacactgggactgttatcctcattttacagatgaagaaactacaacacagattattgacatctgtgctgagctccaggaaccccagaagacttgatttgggggaatggcatattgaagggtcattgacagggctgagaaggggaaaacagaaagttggaaaatagttgactatgct

SEQ ID NO: 100286 - DNA, 587 bp, Homo sapiens
gcttaggagggggagaagacgcacagggtccttattggccgggtcagtgatgaagttacaaagtgagtggggttggtggaggtgagagacaggggtgagcaggagaggaagccttgctgaatccacaggaggaagagagacttggtagagtcggtgggtggggcagcctcccagcytcccacttggccttccccaaggtgccctgccatctcccgtggggactgctaaggttcaagtcggcccaccaccccagctctgcgtgcaaggacagctgctaggagggtttctgtgtgtctgtctcttaggcaaagtgagagctcctggtccctggcaaggtctggcagcttcttaacctggagatgaattcgaaacgtggggcccatttccaagattctttcgcaaatcgcagccattgcgctaacctgctgagagaggaaaggttgattaaaacccaaaggctgtttagtggcaattcttaggaaacctctgggtcagccatgtctcttctgaaggcaagcaaatggtctagaggcaattagcttgccagaggtaatgtttggatccgttgcgtaaattcaaataacagt

SEQ ID NO: 100287 - DNA, 531 bp, Homo sapiens
ccaaagctctaaaatgcttattactattcaaagctgccttggttggctctgagaacagactacactcactcacactcacatacaggcctggcagcaaattctctgctgttcactcaccattgatgcagaattgagccgggctcagttgtgcagttgattatagtctggtacggggtgaccagttactctaatcctgtactctttggaaaacaaagagccaaagtatccggatatctggagtatgcagaggaggcccgcggggctccagtttcatctgtatattgctgggcagactaagagtgtggctatatgttccttccactacccacacttgctccctttcggatttaagcattctgctcagggacatattaatatgcaaaraaaatcaaacatcaccagaaagatggaaagtacaaagagtcagtgattattaaagttgggagagcaagaaccagttattttttccaaccttctaatggactctgaggcccacccaaaagcagtcgatggctgccatagaaagaattc

SEQ ID NO: 100288 - DNA, 534 bp, Homo sapiens
aatgtggctacctgtggagtggtaggtctaggcaggcttcctataggggcgactctaagctgttatttgaagtagaagtcatccaggagcagtgagtgggaagaaggtacaaggtggagggaagagcatgagcaaaggcctggaggtaagggagrgcatgaggcaattgagcaactgaaggtagctttcaggggtgtgtctgggtgtgggtcagcaccacctcacacccagatcaagtgcagagggaaaaggcacacccttctccatagtcacaggctcaagaacaatgtctggaagggactgcaagacctgctgatagttgtcctttggatcaatgacaaaaaacatgaagaagcctcagttcactcaaagctggaacccagcccagaagtaaactgggagcatctgtctctggcaccccctgcctcctcttcatagcaaccacctcttcctcctcttccaacccaaggggaagaagagtaaggtgctcatgaccttgagttatggactcttgcagcccacatctcagctctc

SEQ ID NO: 100289 - DNA, 619 bp, Homo sapiens
attgcacagcgaagatccccagcgagctagtccagggccacccagggagccctcagcccacagataaagcccgaagtaggagaaaattcagcagaaatttacctgcctctccagcacaagagacaggaagcctgctgggctggtttctctctgccacacatgctacagcctctctgaggtggtttccacatctagtgatcatgcccagaatccttatgaagctcaaatgagtaatttgacaggagctatgaaaactttgaaagcgtagccacccccaccccacaattgaacttgyaggaggagtctgaccttgtagccaagaacaccactcactggagttggcctggatgctcataagcaggggactctgtgcatcggtgacggtttatcgtggtgcatcaccacagaaagcatcatttattcatttgcaccatggaaagacagccacgataaatcagaagagaacccggagcagagctcagaaacagcattgttgcgaaataactagaattttttaaggatctgaaaggacatgcacagaaccaggtgttactctggttagtgggattaggacagtgtttccactttttaaaaaaaattgcccctaaattgccccacc

SEQ ID NO: 100290 - DNA, 560 bp, Homo sapiens
gtagatacaagtgaggttgctcttaggaaatgaggaagggggtcccagaaccctacctgttctgccacatcctcctcccacctcatacatcattcttgaatctttggggtccaaacaacacagttcaaagaccactcatctagtcaaaaacctcattttacagatgagaaaacagaggctcagagagggtatgtcagttgtcgagggccacacagcaagttggcaatgaggttagaactggaaccctccctcctggctctctggtcaccaagcctaactgcataatacaatacctcgggtattgaaaagatgagctagttttcctcctctgggcaaccttggtggaaaggaatatccttcaagttgtgtcaacattatttgctcactctaggggctctgactacatagctgatttttttttaagatctttagctgaatcrgtctgaccttgttagaacccttactggaatcttttcccagtgtcctattcaccagtatttcttttcattgagctaacttagaataacctagaacaaaacagaaaatgaaaacatgcatgg

SEQ ID NO: 100291 - DNA, 557 bp, Homo sapiens
gaaaccattcctaggttcctccatagtcctccagtgcctggttgtgtgggaactgttgctcacttaacttaacaatcactcttcatttcttttttgaggcagagtctcgctctgtcacccaggctggartgcaatggcatgctctcggctcactgcaacctctgcctcccaggttcaagccactctccttcctcagcctcccaagtagctgagattacaaatgtgcaccaccatacccagctaattttttgtatttttagtagagacggggtttcaccatgttggccaggctgatctcaaactcctggtctcaagtgatctgcctgtctcagcctcccaaagtgctgggattccaggtgtgagccaccatgcccggcccactcttcatttcttaatgttgatgtttttctggatccatccatccttagagagggttgcagactggtccaagacactatgtgcatggcaatgccctggcaactgtattgatccagtgatggacatgtgacctaaattggcccaatcatctgattgaagatttgtattccattcctagg

SEQ ID NO: 100292 - DNA, 654 bp, Homo sapiens
gctcctttttgtaagaacagttttggtctttgagtaactgctgggaaacagacatacttgaaccccaagtatggcctaggctcaaacttaatctcctgacttaattaccagttagcatgataagagctatactagatgcacatacagggacatgggaaaggaacaaagaaactgcagacagcaggaaatcagagggaggaggacagatggtgtagaaagatgatggatgaaactctgcctgcttcgtgtttttgctttgtacttgctcccaccccccaatttttacttcataatctgattggaacttcctcttcctcattttgtaatttcctctttccaagtacatgataggtgctaattttgtttgttgactggctaacaaagagaattaagaccttagtggagtcccattgcctttcccctaatatttgcttttccatattgattgctctttggttgaactgggatatgaaatactggataatgagaacacaataaatcctcagttgttcaaatcaatcactactaatggacggcacacaatatcccaagcattgtgctagatggaaagccacacagattaataagkgtgcagctctaaagaagcaaacagtgtagcaatagtgatgaagcatgccaagcagctagactgta

SEQ ID NO: 100293 - DNA, 537 bp, Homo sapiens
aatgaataatgtcatgaaaacattattagaacaaattaacaaattacaattacaattatcaaattaacaattagaatatagtagcaccatcattctaaaaatttaaatttgatataaatatacatttccatatcagcctaaatttacaaagtcctataatatgtaggatataaggtcaataagttaagaattccagcyttaaggacaattttaaattataatttttattcctcagtcaccactgctaatccttcaatttatttcaaagtaacttctggtttttattacatttggaagataaagcaacttatcacatgtaggttacaacttaaaattcgtgtatgagccattgcttatattttctaaatctgacatgacccagggggtttctactgctcctaccaccacccaggacatgcgatgaagattgtgcacgctaccgtgagggcagaagcaggttagtagctgtaggagctgtcacatggatttactataatgcacttgaaattgtgtatgtgaccttatcaggcatttaag

SEQ ID NO: 100294 - DNA, 537 bp, Homo sapiens
aatgaataatgtcatgaaaacattattagaacaaattaacaaattacaattacaattatcaaattaacaattagaatatagtagcaccatcattctaaaaatttaaatttgatataaatatacatttccatatcagcctaaatttacaaagtcctataatatgtaggatataaggtcaataagttaagaattccagccttaaggacaattttaaattataatttttattcctcagtcaccactgctaatccttcaatttatttcaaagtaacttctggtttttattacatttggaagataaagcaacttatcacatgtaggttacaacttaaaattcgtgtatgagccattgcttatattttctaaatctgacatgacccagggggtttctactgctcctaccaccacccaggacatgcgatgaagattgtgcacgytaccgtgagggcagaagcaggttagtagctgtaggagctgtcacatggatttactataatgcacttgaaattgtgtatgtgaccttatcaggcatttaag

SEQ ID NO: 100295 - DNA, 567 bp, Homo sapiens
agtataccaattgttgtgacgaatcttactgcctgttgtagatatcagtgtttgaagtattccctatgaaataacttttctgtcccaataattgagagggctgtttcatttccaaaaaagggaagaattaatcaattaaaaatacatatagtgaaataacctgttttgtaacataaaacataagatgaagaaatatcggaacattgataygaagtttaacagtaatggattatatatccagaaatatgaacaaataaacctgcaatgaaaatttactaatgttactaattttcacttgtgtaacgtaaacattacaaagaacatagtgtacaaagggagaatgttggtgggtaggatgagtcaagatttcagaggaaaatcaatatttaagacttacagcactgtggaatatatttcattttcctaaagttgaagaaaatttcagtgaatctatgaattgtttaagacaaaggtcactccgttactgacttctgctacatctaattttccagggaagtaatatttagagataaaaagcttttactctgacctccggaaattacttaa

SEQ ID NO: 100296 - DNA, 651 bp, Homo sapiens
ttactgcctgttgtagatatcagtgtttgaagtattccctatgaaataacttttctgtcccaataattgagagggctgtttcatttccaaaaaagggaagaattaatcaattaaaaatacatatagtgaaataacctgttttgtaacataaaacataagatgaagaaatatcggaacattgatacgaagtttaacagtaatggattatatatccagaaatatgaacaaataaacctgcaatgaaaatttactaatgttactaattttcacttgtgtaacgtraacattacaaagaacatagtgtacaaagggagaatgttggtgggtaggatgagtcaagatttcagaggaaaatcaatatttaagacttacagcactgtggaatatatttcattttcctaaagttgaagaaaatttcagtgaatctatgaattgtttaagacaaaggtcactccgttactgacttctgctacatctaattttccagggaagtaatatttagagataaaaagcttttactctgacctccggaaattacttaatgatccagatactcccaaagtcaaagcaaatccttggagacaagtttggactttatgaatgtggacttaattctttaagatcactagagcaacaataaattacaggaat

SEQ ID NO: 100297 - DNA, 651 bp, Homo sapiens
ttactgcctgttgtagatatcagtgtttgaagtattccctatgaaataacttttctgtcccaataattgagagggctgtttcatttccaaaaaagggaagaattaatcaattaaaaatacatatagtgaaataacctgttttgtaacataaaacataagatgaagaaatatcggaacattgatacgaagtttaacagtaatggattatatatccagaaatatgaacaaataaacctgcaatgaaaatttactaatgttactaattttcacttgtgtaacgtaaacattacaaagaacatagtgtacaaagggagaatgttggtgggtaggatgagtcaagatttcagaggaaaatcaatatttaagacttacagcactgtggaatatatttmattttcctaaagttgaagaaaatttcagtgaatctatgaattgtttaagacaaaggtcactccgttactgacttctgctacatctaattttccagggaagtaatatttagagataaaaagcttttactctgacctccggaaattacttaatgatccagatactcccaaagtcaaagcaaatccttggagacaagtttggactttatgaatgtggacttaattctttaagatcactagagcaacaataaattacaggaat

SEQ ID NO: 100298 - DNA, 386 bp, Homo sapiens
tatacctaagctaacaaataatcctaaacattgaaaatacaaacatgagtatgaagaattcactttctaataagtttcagctttttacaaatggctgcttaaatataatgcataaatatracgtatttttaaaaatacatcttgtttatgcattacttgaaccataactaatccccatttccagtcaaaaagaacactgtctacatatgttaatctctaatacaacaaaagcaggcttagcttaatgggaaacttattagagtaaaatagttctttttattttttattttattttattattacaataagaagattataatttggtaactagcaggagaagaaagacttccaaagattattttatgggtccatgtatttgcttttcc

SEQ ID NO: 100299 - DNA, 386 bp, Homo sapiens
tatacctaagctaacaaataatcctaaacattgaaaatacaaacatgagtatgaagaattcactttctaataagtttcagctttttacaaatggctgcttaaatataatgcataaatatgaygtatttttaaaaatacatcttgtttatgcattacttgaaccataactaatccccatttccagtcaaaaagaacactgtctacatatgttaatctctaatacaacaaaagcaggcttagcttaatgggaaacttattagagtaaaatagttctttttattttttattttattttattattacaataagaagattataatttggtaactagcaggagaagaaagacttccaaagattattttatgggtccatgtatttgcttttcc

SEQ ID NO: 100300 - DNA, 386 bp, Homo sapiens
tatacctaagctaacaaataatcctaaacattgaaaatacaaacatgagtatgaagaattcactttctaataagtttcagctttttacaaatggctgcttaaatataatgcataaatatgacgtatttttaaaaatacatcttgtttatgcattacttgaaccataactaatccccatttccagtcaaaaagaacactgtctacatatgttaatctctaatacaacaaaagcaggcttagcttaatgggaaacttattagagtaaaatagttctttttattttttattttattttattwttacaataagaagattataatttggtaactagcaggagaagaaagacttccaaagattattttatgggtccatgtatttgcttttcc

SEQ ID NO: 100301 - DNA, 578 bp, Homo sapiens
caattgcaacaaaagcaaaaattcataaatgggaacttcattagtccattttcacactgctataaagaaccaccagagactgagtaatttataaagaaaaaggtttaattgacttgaagttcagcatggctgggaaggcctcaggaaacttacaattataggagaaggtgaaagggatgcaatgcacctttttcacaaggcggcaggaaggagaagtaccaggcaaagctgggaagagcccctcataaaaccattagatctcgtgagaactcattcactatcacaagaacagcatgggtgaaaccacccccagattcaattacctccacctggtctctccatgtggtgattatggagattataattcaagatgagatttgggtggggatacaaagcctaaacatatcaggatctcattaaacttattaagagcttctgcatagcaaaagaaactattaacaaaataaacagacaacctacagartgggagaaactatttgcaaactatgcgtctgacaaatgtctaaaatccagcacctataaggaatttaaacaaatttacaagagaaaaacaaccc

SEQ ID NO: 100302 - DNA, 564 bp, Homo sapiens
aaataattattaaattttacatggtaacactagcaatattaactcccattttctatcactttaattcaggccatcctttagaggtttaagtataatccattcttatgtcctacacaactgagtgtgtagtaccagtacgtaatcctaatgtaatggcacaccccagatgacctttttgtgtgttggcatggtttttcagtttaagcaaaagtttaattgattgaaacttgaagttcacatttttttttctacacaccaatattgaagagaagtcctacaaaatacttattctatggaaaaaaacaaagtccactttagatctaaaatggttgcataaaattttgagaataacttaaatgttatatgaatgtaagtaaaaattttactgtaaactttgtaawtgctaactataaacagaaaacaagtatatcttatataaagaaatgtgtagactctctgtattaatccattttcacattgctataaagaatacccgagacagggtaatttacaaaggaaagaggcttaattgactcacagttctgcacggctggggaggcctca

SEQ ID NO: 100303 - DNA, 672 bp, Homo sapiens
aatcaacctaagtatccatcaagagatgaatgaataaagaaaatatagtacatatacaaaatggaataccattcagccataaaaaacaatgagttcctgtcatctgctacaatgtggatagaactggaggtcattatgttaagtgaaacaagccaggcgcagaaagacaaacttcggatgctctcacttatttgtgggagctaaggcttaaaacaattgaactcatggagataaacagtataaaggttaacaggctgagaagggtagtgagggtttgggaggaaagcggggcasactaataggtacaaaaacatagttagaaagaatgaataagacctagcatttgctagcacaacagggtgactatagtcaaaaataatttaatcgtacatttagagataactagatgtgtataatcagatcggtgtaacacaaaggataactgtgtgaggtgatggatatctaatctaccctgatgtgattattatgcatgtatcaaaacatctcatgtactccataaattttcaaaagaagtatgtatagcataacgcttaaaataatatactgtaatagtctacaacttggcaagaaattaagctttcgtttatttttgtcacaacaggtatactacatgcagattaaaatatatattttatatatatatatatatat

SEQ ID NO: 100304 - DNA, 610 bp, Homo sapiens
gaattcataatttcctggcagctcatgattctgctacactacaccatgccatctcttgtgtgaaaggacagatttgatggaggactatgtcatccctcatgcgtttcttattgtctacatttattctaatgggaagaagtgagcaaaaacaccwcaataatttgggtagtttttagaaaaccttgttagtaaattagaatagtgccactttggcattatgagaaagaagcatggatacataactagggttttgtgtatgactacaacgaaatgcagaatggtgtctccaaaaggtttccagttgctgccacaagaactgcttggtattgcctacatgtgttgtcctatttttgctttgcccttctgcagttacttgctgtgggaccttggagaaattaacttagcctctctgtacttcagttttttgtatttgtaaaaatatatttgtaataatctcatagttaagaaggtagttaatgtgtgactcagtccttgtctaaaagtaaatatgcctagctacccccatcttccaaagccagaaggtgaaactttaacaagttttctaaaagcaaattgtgttttttaaaagtgcatgtgtcatccaatccca

SEQ ID NO: 100305 - DNA, 432 bp, Homo sapiens
gaattcagtcacttctcaccagctgctggtccaagccatcacaattcccccaaagttcttaacagtgctcacagcctctcctccccaccttacccttctgattgcagcttccaccactcatcccctgctcactcctgcagtcgtcaaagaccccaatgcacttctacctcagggcctttgcacttgcagctctctttgtctgaagagcttttcccctaggtatcagyagggttaacacccttcctcattcaggtcatggcttaactgtcttcccagcgaggactcctctggccaccctattttattttttgagatgaagtctctgtcacccaggctggagtgcaaggttggctcactgcaacctgtgcctcctggattcaagcgattctcctgcctcagcctcccgagtagctgggattacaggcgcctgcc

SEQ ID NO: 100306 - DNA, 622 bp, Homo sapiens
gctgtccaagaagtgccaagaccacagtgccacacagtatggctactcagctctcagggctcatgttgcacacagcttcttaatacctcactctcattcagggagtcactaaccaaaggcaacactagaacagagtgtgcacttttatcttcaggatattcccatcaccctgaccaagttcactaagttatagggcaaggcagatcttaattttctacatgagaagtgtttagagactagagtgggggcaggtaggggacttgtgttgatgccaaatctccacagcaagcaaataatttgtgctttcactgtctatttatctgggttgtcttggagacactgatgaaactagagagactgttgaggcctccccagccaagctgtggctgctgctttagagaaaagcagcctactccattcacaggccraaggcatttagatagagtgccattattcaaagtatcagctttttcctttgagttttgtttaccttatcaccatgcccccctacactcataaactcccaatttcataggctctcagattcagacgaggcccttaagaagaaaacacccacctgtggttttaatacactctctaacgtaaactccaggatgggaaa

SEQ ID NO: 100307 - DNA, 445 bp, Homo sapiens
ggtcattgattttgccagctttgcataagttcctcagcacagcaggaattccctgtagcttgcaccatggaactcactgtttccaggctcttccctcctgagtttggttctgatccacgctcatagacaaattcctgcctcccagcacccccagcccccaactgggctcttcttttcctagacttagactctttactctttggacctgacacgcagaagaattacttcttccattgacaattccagacctcttctcggctctgtaggtcaggatcccttggaggagtattcctmccggtttggatattgggactctcctgctttagaattgatccaccaggattatttactctttcctgctgcatttgggcagatgagtgaagggatatgcccttctctgcttttcacagcactttccttcacttggcatactatatatttcact

SEQ ID NO: 100308 - DNA, 619 bp, Homo sapiens
tgataattaatgcagattacaaaaatttagatccttgtcaaggtcgctgggtggggctaggagggctggttcaagatgtcttcccctctgacctttgtcccttgtccagtggaggaagtccaaccgcaggggcagattttgtggggcttgaagaaagcttacacattcttgggtggggtggggtggggaaggggaagggccctgtgaaaaaacacaaaactacagacacaaaattaggcatgagtgggtatatacagctaaccctcaaacagtgtcgacccctgtgtaatacaaaaaatccatgtataactttygactccccagaaaattaactactaatggcttattcttgactggaaccttaccgataacataaacagtcaattaacatgtattttgtatgtttatatgtattatatactgtattcttataataaagtaatttagagaaaagaaaacgttaagaaaatcataaggaggagaaaatgtatttactattcattaaataaaagtggattatgatcatcataaagggcttcatcatcactgtcttcttgttgagtaggctgaggaggagggagaggagaggttgatctgctgtctcaggagtagttgttca

SEQ ID NO: 100309 - DNA, 619 bp, Homo sapiens
tgataattaatgcagattacaaaaatttagatccttgtcaaggtcgctgggtggggctaggagggctggttcaagatgtcttcccctctgacctttgtcccttgtccagtggaggaagtccaaccgcaggggcagattttgtggggcttgaagaaagcttacacattcttgggtggggtggggtggggaaggggaagggccctgtgaaaaaacacaaaactacagacacaaaattaggcatgagtgggtatatacagctaaccctcaaacagtgtcgacccctgtgtaatacaaaaaatccatgtataacttttgactccccagaaaattaactactaatggcttattcttgactggaaccttaccgataacataaacagtcaattaacatgtattttgtatgtttatatgtattatatactgtattcttayaataaagtaatttagagaaaagaaaacgttaagaaaatcataaggaggagaaaatgtatttactattcattaaataaaagtggattatgatcatcataaagggcttcatcatcactgtcttcttgttgagtaggctgaggaggagggagaggagaggttgatctgctgtctcaggagtagttgttca

SEQ ID NO: 100310 - DNA, 409 bp, Homo sapiens
gaattctagacatcttccttaatttctactggtagtaatagctcattttctcctaagaatcaggattaattaccccagccagtatggtaattgtcttttttttttcatgttggtttattggtatgaggagaacaagatggtcaggtggcagtatcagtttccattttaacattggtatgtactttggtggaaacgttcttcctgtggaaactaagaccattatatctgcagagcacaaaggtacaaagaaggacaggaagcaaaattttcactagtggatcattaaagataatattgagagggagccacttccatttctaccacttaattcccaaattcatgratgctggctgtgtgagaaatagcacgatattcattcagagcatctactacaacatagaggatgtcg

SEQ ID NO: 100311 - DNA, 443 bp, Homo sapiens
gagtagagacaacaagggcatttgattcaagggaaggatagagatatagaaagatgccagtcagcacccaccccatgcccagtgctgctccagacacaggagacatggcgataaacccgagaggaaggggcctactctcaaggacctgactgccagtggctggaaggcctacgggcagggaagcaggagcagatttttttaaagtaaagcagacaatgtcaggtagcagtaaaacttacacaaaaaattaagatacattagcatgatcaagaatggctaaacgtaacattatattgaggaagccactgtgagaaagtcakgcttcagctcagatctgaataaccagaaaaaactggtgctacaaatatcaataatacaaagagcatttttggcggaagttaacagtgggtgccaaggcccaaagggaaatgtacttgaaggac

SEQ ID NO: 100312 - DNA, 404 bp, Homo sapiens
aactttcttggatgcaatctgactcaggcggcaagcaagccagggaaaggacattcttgcctcatccccacccccagtttattccatttttcttggagctggtaccagttgggtcaacccagtcagttctcccaaccyaggaaaaaggaaagaccagaatgggtgaatttaaattggagagatgtcactgaacctcttcccacctcaaacctttgccctggatggggagggaacctaacatttaattttgtactctactggctgttctgcatatattatatcattaaatcttcacaattaccctataggtagactatattataaccacttgattggtaagaaaattgagactcagagagtctcaattgtccacaagccaagaagatagcagaactgggatttca

SEQ ID NO: 100313 - DNA, 404 bp, Homo sapiens
aactttcttggatgcaatctgactcaggcggcaagcaagccagggaaaggacattcttgcctcatccccacccccagtttattccatttttcttggagctggtaccagttgggtcaacccagtcagttctcccaacctaggaaaaaggaaagaccagaatgggtgaatttaaattggagagatgtcactgaacctcttcccacctcaaacctttgccctggatggggagggaacctaacatttaattttgtactctactggctgttctgyatatattatatcattaaatcttcacaattaccctataggtagactatattataaccacttgattggtaagaaaattgagactcagagagtctcaattgtccacaagccaagaagatagcagaactgggatttca

SEQ ID NO: 100314 - DNA, 443 bp, Homo sapiens
gtcatgtgatgtatctgctattccctcagctttaaaattagttcagtgacctctagagccctttccaggtttaaaagttttytaagtttatgaggcctacttgacattttttttgcacccaatagggtttacaatatataaactattaaaaatgattaagcctacacaaataaaaagtaagctctgttaacacacataaactggttttctggattaaccaggattctccatttcttctataaaacatactccccaatgtccaggtaacactaaatgcctgcagctagcaggcttatctctactttgctggcatacttctattcccaacagttgggttctggtataccccagagtcaattgagtatgtcaatctaattaggtaatttaattgactgcaatacagactaataagatatgagtatgagataaaaaggagttgtttt

SEQ ID NO: 100315 - DNA, 533 bp, Homo sapiens
gaccagccaatgaacaaagtaaatacatacaataaaatattattcaaggataaaaaggaattaagttatgacacacgctaccctgtcaataaactttgaaaatattatgctaagtgaaataaggcagaaacaaaaggccaacattgtatggttccactaataggagctattttgtgtaggcaaatcgacagagacagaaattagaatagaggttaccaggggctggagggaatggggaatagggagttatygcttaatagttacagaatttctggttgagataatgaaacactctagatagttgtgatggttatacaagattatgaatgtatttcgtgccactgaattttacacttaaacatggttaaaatagtaaattttatattttaccacaaaaaaatttttttaataagcagtggaaaaaaatggaacatctctaaatattaacaatggtttctctgtgtgatatgcaccccccacctcatctcttactttctccacttatttgtattcttttttccttaatgaatatg

SEQ ID NO: 100316 - DNA, 533 bp, Homo sapiens
gaccagccaatgaacaaagtaaatacatacaataaaatattattcaaggataaaaaggaattaagttatgacacacgctaccctgtcaataaactttgaaaatattatgctaagtgaaataaggcagaaacaaaaggccaacattgtatggttccactaataggagctattttgtgtaggcaaatcgacagagacagaaattagaatagaggttaccaggggctggagggaatggggaatagggagttatcgcttaatagttacagaatttctggttgagataatgaaacactctagatagttgtgatggttatacaagattatgaatgtatttcgtgccactgaattttacacttaaacatggttaaaatagtaaattttatattttaccacaaaaaaatttttttaataagcagtggaaaaaaatggaacatctctaaatattaacaatggtttctctgtgtgatatgcrccccccacctcatctcttactttctccacttatttgtattcttttttccttaatgaatatg

SEQ ID NO: 100317 - DNA, 472 bp, Homo sapiens
gggttgaaaataaacacaaaactgacaatgactaaaaatgtaaaagcgaagtcaacattgaataaaaacagcgaaagaaccaaatcatcacaaaatttagacctgcaaaagtaggctcamaaaatgaactgagaaataatgtccatcaaaaaaaagtcagaagataaaaatcagtacaattgtatatagacagaaaactaattgaagaatcaaatctgtaaaatttaagtggaaaagaacttaggccaatgcaaataatttcagcaaaataaaaatgtaaattgaacaaaataggtatgctgtgactacatcatatggaagattgatggagagatttccattgggttgaagtgccctttcaggaatcgtgtcctcagtgaaagttcatcaatgttatggttcagattaaaatatgtatatgtataaaagtgtcctttgcatcaaaatagtaggacccaaatggagggggatc

SEQ ID NO: 100318 - DNA, 472 bp, Homo sapiens
gggttgaaaataaacacaaaactgacaatgactaaaaatgtaaaagcgaagtcaacattgaataaaaacagcgaaagaaccaaatcatcacaaaatttagacctgcaaaagtaggctcacaaaatgaactgagaaataatgtccatcaaaaaaaagtcagaarataaaaatcagtacaattgtatatagacagaaaactaattgaagaatcaaatctgtaaaatttaagtggaaaagaacttaggccaatgcaaataatttcagcaaaataaaaatgtaaattgaacaaaataggtatgctgtgactacatcatatggaagattgatggagagatttccattgggttgaagtgccctttcaggaatcgtgtcctcagtgaaagttcatcaatgttatggttcagattaaaatatgtatatgtataaaagtgtcctttgcatcaaaatagtaggacccaaatggagggggatc

SEQ ID NO: 100319 - DNA, 239 bp, Homo sapiens
ttatttcaacaaatgcagaaaaaaaaacttgacaaactcccgatttcattaatgatttaacactctcagccaactgggaatgraaaggatgtcctcagcatggttaagagcattaacaaaggacctgcagccaatatcatcatctaaagaattatttttctgctcctaagatagaaaacaagagaagggtgtcttatcactgctcttatcactggtcttatcactgctattcaccaaca

SEQ ID NO: 100320 - DNA, 600 bp, Homo sapiens
aatttaaatccataaatatataatagattaaaagggaagtaaatgattttagtaggacattcttattttctgagaacaatcttattaagagaaatcaattgcacttaccctataaaatgtctttttttaaatgtaaaataaaatatggtataaataaactaagtcttatacagtatggcatttaaarctatttttacatatttaaaactcatgtcataccaattgtgagataaacaaatgaacataatttactaaaaagatttttattttttatacaattcttcatgcacttttagtccccaggtatatagttttaatttctgacaggacaatattcagtacctagttatgttttaccatcatatttgaaatattattacattgcaataaaggaagtatcagttaccttgtatgacaggttagtagtgctaacttaatcactgtgtttactcctttgtctttattaaaaagttatgtaactgtcccattacatatagatttaatgaacctttacaaacataaacaaaatcaatgtaacatttaatttttttaatatatacaaattctttttatcaccctttatattttaaaatcaggtaa

SEQ ID NO: 100321 - DNA, 628 bp, Homo sapiens
tttagtaaaaatgactactattattattgttgttaaaattacggcatttatacactaacaaaagaggtacgcaggttttaacataaatgttcatgctttatatgtcctgacttcaaattaacatgtaactggcctctggaacattcactgccctacctacatttattgaatgcctgctctcataggtcgggggaaggggatggcaaagaggaagcaaacaggattggttggccttaaatggatatcgatgattgaagatttaaaagacattgaagacaaaatccctacacagccattcagtgtttataacgcaccttctgtgaagygatggaaggagttctgatgtttaattctagaacttttcagcatccacaaataatgctacttccagcagagaagaggaagatttgctgctctgagttaaagctagagaatccaagtgagcacaaaggcacttcaaggaaaatgcaattagaaaaacaggtgagtggggacttgggtttccagaaatgcgtgcttagaaatactgacaggcttgggcttttcacccgagacgttttacatctttaaatatgtttgtaatttcagtggtctgcacactccagattttgttttgaaagggaaactt

SEQ ID NO: 100322 - DNA, 628 bp, Homo sapiens
tttagtaaaaatgactactattattattgttgttaaaattacggcatttatacactaacaaaagaggtacgcaggttttaacataaatgttcatgctttatatgtcctgacttcaaattaacatgtaactggcctctggaacattcactgccctacctacatttattgaatgcctgctctcataggtcgggggaaggggatggcaaagaggaagcaaacaggattggttggccttaaatggatatcgatgattgaagatttaaaagacattgaagacaaaatccctacacagccattcagtgtttataacgcaccttctgtgaagcgatggaaggagttctgatgtttaattctagaacttttcagcatccacaaataatgctacttccagcagagaagaggaagatttgctgctctgagttaaagctagagaatccaagtgagcacaaaggcacttcaaggaaaatgcaattagaaaaacaggtgagtggggacttgggtttccagaaatgcgtgcttagaaatactgacaggcttgggcttttcacccgagacgttttacatctttaaatatgtttgtaatttsagtggtctgcacactccagattttgttttgaaagggaaactt

SEQ ID NO: 100323 - DNA, 618 bp, Homo sapiens
ttacactcaatgtcataaacttacttctctatacaggatatctgtacaaagattttaaaaatctagatgtatttatcttatgcatagcaaactacaccaattcaactcaaatcctggcagttgttaacacttttggaaagggaactgagctactgatatactactgtgtgcctactatactaataggcactttaatacattatctaatgtaatcccaacaatcctgcaagttacgtcttatcattcccaatttacagayatggacacagaatgcacacaggttaagtatccagtgctctgtcatacaactgaatgtgggggagtccaggctacatctagatgtgtacttccttcgataacatgctcctacctcccagggtattttccttttggcttccaaaacattttgtaagcaaccactggtaacctcaaataagtggtatgatttccattataaagaagaaaagactgagaaagagtaacagagaaatgtctttctctagctcagaaagctacaatttcacatagtcctaaaatgcctgtcttcatctttctgttatctccttttgaatacacttcaatccactcataacccttttcctaaaagagaattcaaaa

SEQ ID NO: 100324 - DNA, 587 bp, Homo sapiens
agtaatcagaatgcatgatgggttggtttaaaaatatgtcgaggatttttcccctagatagtgttgctgttatccaaaggaaagatgctattgcttctgctccactgacactgtttatcacttcgcccagacccttcaatagaaattgctgtttctcactgccgaccatctgttgtcatctacatgaaaaatctacataaatccctactagttgctgtatttcagaagtgccccccaccaaagaaaatcacagattaattgttgctgctttaaaactctaagaaagggaaatgaatctaaatataccttcctccccccaacacacatacacatacacacacacacacacacacacacrcacacacagcaactttcatctataatttagaaaatggatgcagttcagcaacagttaaagactaatttcttatgctttttgtgcatttacataattgattcactagataatgcactctgcttccttatttaataaacatgttaatgatttcagacaattactcaaagctgcctacaagtgtctgcctaagaaaagcaacaaaaaataattaaaatgaaaatacacacca

SEQ ID NO: 100325 - DNA, 587 bp, Homo sapiens
agtaatcagaatgcatgatgggttggtttaaaaatatgtcgaggatttttcccctagatagtgttgctgttatccaaaggaaagatgctattgcttctgctccactgacactgtttatcacttcgcccagacccttcaatagaaattgctgtttctcactgccgaccatctgttgtcatctacatgaaaaatctacataaatccctactagttgctgtatttcagaagtgccccccaccaaagaaaatcacagattaattgttgctgctttaaaactctaagaaagggaaatgaatctaaatataccttcctccccccaacacacatacacatacacacacacacacacacacacacgcrcacacagcaactttcatctataatttagaaaatggatgcagttcagcaacagttaaagactaatttcttatgctttttgtgcatttacataattgattcactagataatgcactctgcttccttatttaataaacatgttaatgatttcagacaattactcaaagctgcctacaagtgtctgcctaagaaaagcaacaaaaaataattaaaatgaaaatacacacca

SEQ ID NO: 100326 - DNA, 502 bp, Homo sapiens
cagcatcgtgccatacaatcaggaargaatcctcaacactcagtgtcttactgagaagggagaatttaggctatatatatagtgctctaactctaatgttctttatggtttgctagtttttgacctaactgggagaagaaggggccaggcatatagaaatctctctagatcacagaaaaagcactggttttatatgagtgtgcaagcacttttaggggcttcgatctgtgggatcagggcagaaaaggggctaaaaggcacagctcgcagtctctccccagaaggaatttgtcagcacactctaccagctgctgctgacagttggacttctaactaacctgtattagagagttaataaggcagacaaaaagtcctgaacaggagctcacgcacttcccaaggtttttccccagcccactccagtgataaatccaattcttgctgggaagagtgtccatgcactgaatgtcccaaattccacagctcccacattagagactgc

SEQ ID NO: 100327 - DNA, 550 bp, Homo sapiens
gcgcggcgggagacccagggcaagccgccgtcggcgcgctgggtgcgggaagggggctctggatttcggtccctcccctttttcctctgagtctcggaacgctccrgctctcagaccctcttcctcccaggtaaaggccgggagaggagggcgcatctcttttccaggcaccccaccatgggcaatgcctccaatgactcccagtctgaggactgcgagacgcgacagtggcttcccccaggcgaaagcccagccatcagctccgtcatgttctcggccggggtgctggggaacctcatagcactggcgctgctggcgcgccgctggcggggggacgtggggtgcagcgccggccgcaggagctccctctccttgttccacgtgctggtgaccgagctggtgttcaccgacctgctcgggacctgcctcatcagcccagtggtactggcttcgtacgcgcggaaccagaccctggtggcactggcgcccgagagccgcgcgtgcacctacttcgctttcgccatgaccttcttcagcctggccacgatgc

SEQ ID NO: 100328 - DNA, 547 bp, Homo sapiens
tctatctcagcattatccagtggcatctcttgtaagtctgtcccagaagtgagaagttggtcagtcatcagaacatagtcatgaggggtttcgtcagaaggaccaggcgagagagtgtaagttaattatttggagcatattatctcagtcaaaatgtataaaataatctaaaattgattcatttcggttctggtggcattgctggattttatcccaatccacaaccctttggaatattgaagaaatggtatttaacagagcagttgctcattcccacacatctttgtgtctgtgttctcgacttctgggggctggttattgtagctctattgggccttcaagggttaagtctgctacagggtctgaccactgtactttstccagctattccttagctttagcttccgagaccaacatgtgtgccagctgttagaggtctgaatggcctgggtcataggttctgataatgaattcaaattcttgggcaaactcaattggatcttatgggggcccagaaattctttatgccctgcaactcagcctttga

SEQ ID NO: 100329 - DNA, 597 bp, Homo sapiens
tcaggtagtgttcacagggtaaattaggaagccagataactgaaaggggaactgggaaatcccaggctattccttatgctctgaacatacacacctctgatttatctgaagaaagataatacttccatgatcaaaatacaatggaatagcacttacagagctagtgaagcctagaaagagtccaggccttgctgcagttttcttccagtggcactcagaggggtttgtgttttcagtttctgtattattttttggcctatgcagtatttcrttcttagcattttgcaataaattggtggtctctcaatatttctatgtatctggttttaccatgtcccagttgtgtgatcttggaaaatttacttctgtgttcctctgtttcctctgctgtgaatgtggggatggagggttgtcttcaggagtgaccattctaatatttgccaagatcctagaatggtgcttagcacgttctgagtgggcagcaaacattagatgttctgatttacggttctagctgtccctgtctcttctctcttctgcttgccactgtccccacctacctgagcttccctcttgtggctgtgctgcccacaagcg

SEQ ID NO: 100330 - DNA, 513 bp, Homo sapiens
gcctgggtaatatagcgagaccccatctttacaaaacaacagcaacaacaaaaaattagctggacgtggtggcatacaccagtggttccagctacctgggaggctgaggagggatgatcacttaagcccaggaggttgaggatacagtgagccatgatggtgccactacactccagcctgggtgacagagcgagactgtctcaaaaaacaaaacaaaacaaaaaaagcaaaactatttcccttaaataatttattaatttgttagcttatttaaatttgaaaaagctttactgtcctaagtgcctaaagtttagaatagatatgcattttcccagtgtttttggacataaaagttttctatrtgtcctagtctgctaggacatattcattaatatctttagagatttttttgtgattttcatacttcaaacccatgaccccactcaagaatggattatttggttcacatctggttattgtgaagccttgtcattcaagcctgcattgtaatat

SEQ ID NO: 100331 - DNA, 542 bp, Homo sapiens
actttctgctccattcactttttattctcctcatgatactcaattacacatatactacatcattttcattgttcaagagtacatagacattctgttctatttttcatccccccaacttcaccttttaatttcattttaggaagtttctgttaacttatattaatgctcactgatcctttactcaatgctctcttgcttccttgcctactgatgacttcaaaaggcatttttaatttgttatagtgttttttattcttaacatttacctttgatttttaattaaaaatcccatatctcyattaggcatctggtcttttatgttcttacttttttattagagctcttaacacattggaaatcttttttggtattttgtttggaggatttttggtatttttttaattgagataagacttaaataacatgaaattaatctttataaagtgaacaattcagtgtcatttagtttattcacaatgttgtacaactatcacctttatctagtttcaagatgtgttcaccgtcccaaaataaaccccagg

SEQ ID NO: 100332 - DNA, 625 bp, Homo sapiens
tgcacagtcatggcttattaatgtcattccaaggtatctgtttcttaatagcaccttgtttcattctaaaaagtgttctaccttggaagttaaattatataatcaccatacccgagagaataagaatttcagagacaatggataacctgagaagtttagatttttggttgtacaagtcatgacaggagtaatcctgaagagctcttagaaagtttgagagtaatgtgttctaatgccagcccttttcctggggttggtcccttaggcagctgtgaagtggtgatgggagatatgtgctccctgatcctggtctttgcttgttgacattaacataataaaagagagtagacaagcactttgtgtatttaatcaatgtttatccgctgcctcctttcttaaaagaaggtttaggaaatttaaaaatgtaaagtagataaaaataataaggtatcagtraggcaactgagatacattaattgctatcattgagtcttgaattttgcttattatttcttggctattcagccaaagtaacacagttttagagcaacatcattttcattgctcaataaaagaaaatatgaaagtccatctatagtgttaagctttatcttagcattgtatt

SEQ ID NO: 100333 - DNA, 617 bp, Homo sapiens
tgccagcgtcttcttagccgctctgtgcatcccaggctgccctgttatctggccaccgtccctggccattgggactgcttctgatggctctggcctctgctgccccagggagcatcttctgtaagcagctccttttctctctcctggtgagtaacaaccaaaggattagggaattcaagcatgttactacctgcttcctctctgcagtttgggcttgaaagagactaggagtgaggatgggaggcagagaagagagattggggaaaacaaaagcagatctgaggaagattcagggaagagttgagaggcttgggattcaggatggaaagtgttcagcttacttctcaagcacccactgccagagtgttaaaakttttcaagggaatccctcttccatcctgctgtggtgattttctaagagtagagaagtgaattcattctttaggcatttggcccagaagtttctgaggtttacttctgctaccagtgattacataaactcatgttatttaacatgctgagttctactaagctgcaaaaaaagagaaaggattctgggtgaacatgcaaattatccaggactttttgaattttacccacgaagcagtttaagcaaa

SEQ ID NO: 100334 - DNA, 617 bp, Homo sapiens
tgccagcgtcttcttagccgctctgtgcatcccaggctgccctgttatctggccaccgtccctggccattgggactgcttctgatggctctggcctctgctgccccagggagcatcttctgtaagcagctccttttctctctcctggtgagtaacaaccaaaggattagggaattcaagcatgttactacctgcttcctctctgcagtttgggcttgaaagagactaggagtgaggatgggaggcagagaagagagattggggaaaacaaaagcagatctgaggaagattcagggaagagttgagaggcttgggattcaggatggaaagtgttcagcttacttctcaagcacccactgccagagtgttaaaagttttcaagggaatccctcttccatcctgctgtggtgwttttctaagagtagagaagtgaattcattctttaggcatttggcccagaagtttctgaggtttacttctgctaccagtgattacataaactcatgttatttaacatgctgagttctactaagctgcaaaaaaagagaaaggattctgggtgaacatgcaaattatccaggactttttgaattttacccacgaagcagtttaagcaaa

SEQ ID NO: 100335 - DNA, 564 bp, Homo sapiens
tgattaaaaattaaacagtaaaaggtaaatcaaagacatcatttttctgctaatatgtttaggtgttttttaaaaaataataaaatgtgctcttttttgatacagaaggtgtatttgtgtggacaagatgaggagcataaacattgtgaagactacgtttgttcktataactatgaaggcaaaggttctctggccggctcagtaggttgctgcagcgatcggcaggaagaagagggactggagtttctagatcacctggaacccaaatttaggacattagcaaagacatgcatcaagaaataaatgtgccttttaatagtgtaatatccacagatgcataagtaggaatttattacttgcagaatgttagcagcatctgctaatgtttttgtttatggaggtaaactttgtcatgtataggtaagggtactataaatatgagattcccctacattctccttgtctggtataacttccatgttctctagaaatcaaggttttgtttgttaattctcttttatatgcatgtatatattgcccttttcacgactgtactgtacacct

SEQ ID NO: 100336 - DNA, 626 bp, Homo sapiens
taactacaggtcaccacagataccatatatggtacaggactgccatgggaattgcaacaggatccaaaaatgtgcatgagcttacatttatttattcagaacgtgcttccgtatctagctgtatctcaacaggaacatcaacaatctccttttaataaggtagctgatawtgcatcaatctaaatatacgtatactataattttgacttttttaagcttgcagttttaaaactagttttcatctacttcctttatttgccttaatcttcttgtcacaaatgtaaaagcctttagaaattactatactcccttttaatttaaaatgatgaatatatcaaatattaccaagagcaaaaacatcacaagtttttctggtaaggactcacattattcacattaaccctatcaaatataaaaatttggatgcctatttatcaacataggttgcaggcagagttcatatactccaaagaggaaaagtacagatttgaggggagttattgcaaacgtttcaactattttagttcctttagaagaggagcccttttaacaaaatgatggattagccgtgtccaagtatgtgccatttataatgtatactagataacataatcttaaagtggatt

SEQ ID NO: 100337 - DNA, 626 bp, Homo sapiens
taactacaggtcaccacagataccatatatggtacaggactgccatgggaattgcaacaggatccaaaaatgtgcatgagcttacatttatttattcagaacgtgcttccgtatctagctgtatctcaacaggaacatcaacaatctccttttaataaggtagctgataatgcatcaatctaaatatacgtatactataattttgacttttttaagcttgcagttttaaaactagttttcatctacttcctttatttgccttaatcttcttgtcacaaatgtaaaagcctttagaaattactatactcccttttaatttaaaatgatgaatatatcaaatattaccaagagcaaaaacatcacaagtttttctggtaaggactcacattattcacattaaccctawcaaatataaaaatttggatgcctatttatcaacataggttgcaggcagagttcatatactccaaagaggaaaagtacagatttgaggggagttattgcaaacgtttcaactattttagttcctttagaagaggagcccttttaacaaaatgatggattagccgtgtccaagtatgtgccatttataatgtatactagataacataatcttaaagtggatt

SEQ ID NO: 100338 - DNA, 450 bp, Homo sapiens
  misc_feature (1)...(450): n = A,T,C or G
nnnnnnnnatgtgtgcattcatctcacagagttaaacctttcttttgattgaggagttttgaaactctctttttgtaggatctgcagatggaaatttggagcgctttgaggcctgtggtggaaaaagaaatatcttcacataaaaactagatagaagcattccgtgaaacttctttgtgatgtgtgcattcatctcacagagttaaaactttctttcattgagcagttttgaaactgtatttttgtagaatatgcaagtggacatttggagccctttgaggcctacagtggaaaaggaaatatctttccatgaaaactcgacaaaagaattctgagaaacttcttttttatgtgtgtgttcatttcccagagttgaacctttcctttgattgagcagtgtagaaaarctctttttgtagaatctgcaagtggacatttggagcactttct

SEQ ID NO: 100339 - DNA, 608 bp, Homo sapiens
agtacttattttcagcaattcagttttatccacgtgaacatatattctttaaagaatatttgggtacttcttgccatacaaaataattttcctatttaggaaataggacaatttacctaattgttttattaattaattatacctatagtctgccttttcagactaaaggagatgaaaacaaatattctctagacagtactagcttctgctggtttctgccaktgttgtagccctgtgacttagaggaatcaggacaattcaattactgagtttgaatcaagtctttgaaagtacagtacagtggcttctgcttattgcaaccactttaggaaacggttatttgagcctaatagctgactgattcaattaaaggagacaggaaaaccatttgctaaggcaagcattgtgcttgttattcactgctatcatctaaagcgcatctctgaaatcacaactttgtaagccaatggctctacatctttccccttctctgtctatttggaggctgtggcacaaatagccatttttgacttacttcatcgggaattctcagccaggatgtggagtgggcatctgaatttggggtgaagttacatgagcaatttgaa

SEQ ID NO: 100340 - DNA, 648 bp, Homo sapiens
  misc_feature (1)...(648): n = A,T,C or G
cactgcctgtaatcccagcactttaggaggccaaggcaggtggatcatgaggtcaggggttcgagaccagcctgaccaacatggtgaaacccagtctctactaaaaatacaaaaattagctgggcgtggtggtgggtgcctgtaatcccatactcaggaggctgaggcaggagaattgcttgaatcccggaggcggaggttgcagtgagccgagatcraaccactgcactccagcctgggcaacagagtgagactccgtctcanaaaaaaaaaaaaaaaaaaaagaaaagaaaaaaagaaaagggagaaatgatccctaggaatggatggaatggacacagattaatttttaaaaagtaataccaaactaataatatttatttttcattaagtttactaaactaatagagcaaaggatggccacagacactggttatcttgatttaagcaaggcatctgataaaggtgatctgacatctcatgacattcttgaggacaaggtaaagtgacatgaagataggttaattcacagaagctaagataactgtgcaacaaaactgattctaaagcacagaatgtatcagagtatcctcagtaacattttcaagccatcatcaccacccaagagagatgctaatatgccccaca

SEQ ID NO: 100341 - DNA, 547 bp, Homo sapiens
cgagcctgtcctggcagatcagggtgtaaggcggggccaggcctggacaggataccacccttgcagggccactcagtcacacacaccccatactcactcacacagctttgggatgtgggaggtaaccagaagaaagcccacagagatgcgaggagaatgtgcaaactccacacagacagtggtcctggtcaggaaccagtttgttttttctcatcaatattgttatgaaacaaccttatcctaggacctgctgtaaactgataaggtctattcatcaagatcactggttttatgtttagccatgtgtgtacccatacactcacatatatgtatagacatatatttacatatatgtatgatcttgatacattctctcaaaatagccctatagtcacttttgtgtctttacctaatagcctcttgattccaatgcagcatgccctaaattacattcagaatttggcctcccaaactcacgtcgcctccagggttcctcatrtttgttaatggcaacgccattccactattcatggttatgatctgcaat

SEQ ID NO: 100342 - DNA, 538 bp, Homo sapiens
catagtgtcaggaaggagaagaatgagagccgagcaaaggggggagccacttaaaaaccatcagatctcatgagaacttactcactatcatgagaatagcatgggggaaactgccccsataattcaattaccttaccaggtccctcccaccgcacatagggattatgggaaatataattccagatgagatttgggtggtgacacagccaaaccatatcagtatctacatgttaacttccagtgtaactgggaaaattagttgttgataaggaagaaaaatgaaatttgatccataccttacaccataaacaaaaatctactccagagggattaagaacttaaatgttaaaagcaagactttaatcctccgtcccagtcccttgcctgttttctctcagatcagttccctcctctttccaagttctgctctgtagctcagagggttgaccttggaaactaatttcccaggctccctgatccctgacttccacgtaagatgagccaatagaaggcaccggcagacacttgaagggaaaaa

SEQ ID NO: 100343 - DNA, 624 bp, Homo sapiens
tggagcaggtagagaatgaagaaataaaatttataaaataaatcctactgtttcaattgtaatcctacagaagtgccttctggctataagtgatttaaaaacctgcttctgtctcaaaagagatgtctttgtgagtcccttagggatgtttatttccagtgttgatggaagaatgcatatctctgatcccttttattctttttctccctggactttgaagaatccctacagaggtggcctcactcctcaaaacaggtttgattgagcaagatttttttcaagacagtttgctggcttgctttcatgaagtctatagagaacccttttctctgctgyccatgatggtatagctggctatggggcacagcctcacatatttacactctcgaaggcatgaatcaagttccagtccctgtgtctcacaaagtcatggatacttgttttcttagattgagtttcttaaatcaaagcttgaagaagggatttcataacatttagcttattgaggctatctctcaggagaaagacagagaaacaggagagcgaaaaaggaacagattttaattggtgtctagtttcagctgatccaacgagggtgtctggaacatgaattgccccacagaa

SEQ ID NO: 100344 - DNA, 621 bp, Homo sapiens
tactaacttacaagatgcaaaacatattttaagaaaatgaaggaaaattacatattgcactgatacagaaattcatagtatgttttggagacactgtgccataattgagataattataagatagatacaaagatgaagctatgtcttcatttatcaaccatcattagtgcttacattttctcaaagataacttacttctgctttttagaaagacatcaaaacatacagaaatacaatgtattgaagtatcaaagtccatgaaaccactctccagaattaactcttgttaatatcgttatatttgatttatctgtcttaaaagaacgaaagcattggaaatagaaaggaaatccctctgtttctcatcctattcacattcctactcccttcctccatctacctagagtcatcaactaccatgaatttagtttatatgtctccatcctatttttatataaaaatacatatacatatgacacagtgttttttggatttaaaaaaaaawatatgtaattgtgctatagcatacatagcctataacttgctttgttcattcagtattatgtttttaacatctactaacataaacatttaaagagatctggatcaaaagtctagcac

SEQ ID NO: 100345 - DNA, 341 bp, Homo sapiens
gccccttgcctaggctacctgcatactattatacttaatgacataataataaggtgakaatttgttacacaaagccaaaaggcctaataatttatttaggggaaatctcttagttgagatttcacgtattgtctttgggttagctgtctgaaaatacttaagaatgaacaagtttgattgtgacctttgtatcactttctatgctgaggaataacttcatttttgggcagcatgatgaatacagcgcctttaatccttttgtttttaatttaacaaatgtgggaatgtgcaaagaggggaataatcatttgtcttcttgctacccagcactaaacatggtt

SEQ ID NO: 100346 - DNA, 416 bp, Homo sapiens
agccttcacaccttactacacataagaggatgcacactggagagaaaccctacaaatgtgaagaatgtggcaaagcttttagccaatcctcaacccttactacacataagataattcatactggagagaaaccctacaaatgtgaaraatgtggcaaagcttttaggaaatcttcaactcttactgaacataagataattcatactggagagaaaccctacaaatgtgaagaatgtggcaaagcatttagccaatcctcaaccctaactagacatacgaggatgcacactggagagaaaccatacaaatgtgaagaatgtggcaaagcttttaatcgatcctcaaagcttactacacataagataattcatactggagagaaaccttacaagtgtgaagaatgtggcaaagcattt

SEQ ID NO: 100347 - DNA, 502 bp, Homo sapiens
tctggctctgctgccaaggctggagtgcagtggcacaatctcggctcactgcaacctccacctcccaggttccagtgattctcccacctcggcctcccgagtagctgggattacaggcgcccgccccaacacccggctgatttttatatatttartagaggcgagctttcaccatgttgacaaagctggtctcgaactcctgacatcaggtgatccgcctcagcctccagaagtgctgggattacaggcatgagccaccatgcctggccgcgagtcccagtaaaacttttatgtgagatggtcttagaagatggtggcctaattcacacggaagaggatggctgtgcagccaagtgagacagatattttttctcaggagcagaaatcttaaggtagaagatggtcactcgctgagtagttgaggcatgccttgatggaactctctgggggtcagattgcatgctgtctccctgagttgcataaagcacaggacagcctgcct

SEQ ID NO: 100348 - DNA, 609 bp, Homo sapiens
caccagcctggataacagagcaagactccacctctcaaacaagtaaaataaataaatcaacatgtagtagtcagtgagcaccaaccatgcaattgtgctaggtacagaagatggaaaaaatattcttgaggtgggagaaacatgttaacagataaattacagcagacagacttgatagatgggggtaaaagttattaggaacagaaggcctaattttccctagaaaaggtagtatttgagatgggtctcaacagaagagtaaagagtaaatattctttgctgggggaasgggatggagacaaaacaaaaagaacaacccgtgcaacaacagaggcagtaaagaattatttagtgtggcagtgatgtggaagacagagacaagagccaagactagcaatttggtttggaagcagatgagggtctttgtaaaacaagtgaaggagtttggatttttctttttgtagacaacagggagggaagagatgttattaggcaggcaaacaatgagagcagctttcatttttgaggatgatgactctggcagcagggtggaagataaacagcagtagagagaaactggaggcagaaaattaactcaagaggtactta

SEQ ID NO: 100349 - DNA, 496 bp, Homo sapiens
ttgcatattcacttaaactaaaagtaattaagtttctaattctgcttgcattgtaaacattaactgttggatatttacatsttttgagtggcaaatgctatgattttgagtttccttattttatttacacacagggaaattctaaatcgtaacatttaccatttttcttatgaacaaattgtttaaaaataaaagtattttttattggtgatgctttatattcctgtatatgtccctaccattaacaaataagtacatatgccagttccttgcccacaagctgattttacacgtggggaacactgaatcattatcctggcagactctagacttaagaaacccagctgctttaatgaccatgaatatgttgccagacttctttgatttttctcagagcctctccttgtaaattgcagctacatttttcagcccacctggttgtcccagttctgcattagcctcctctctaaccaatgtacataaagcctccttcgct

SEQ ID NO: 100350 - DNA, 554 bp, Homo sapiens
agctggaggaagtttagaaggtggtttaaagtgagagaaaaaaaaggaaagatcagattcatgcaaaaaagtccatagggggaaaggatcatggcatttggggaaactgraattactgtgatatttttggaggaagggttatccagagactggagagagctgaaactttcaggaaaaaatctaggtcaggcatagagtattaagaaatggcatcaaactaaatttacgaaatcagcaataattaagtgggtcaaggcggcaagctaggaagcatagtctcagaagagcacatagtataaagaaaggcagaagttgtatatcattgcagagtaccccaggagctccacaaactttggttttacgaacacataaagtgtggggaaaggaataaagcaagatgaagctgtgttgtcatttaaagaccaggtttcagatatggaccaggtcaggaatactactaactgccatgaaatgcctcttgggaattatcctatgaataatggggaaaactgaaggattatcttatgagagatggagaataattgaaggatttt

SEQ ID NO: 100351 - DNA, 554 bp, Homo sapiens
agctggaggaagtttagaaggtggtttaaagtgagagaaaaaaaaggaaagatcagattcatgcaaaaaagtccatagggggaaaggatcatggcatttggggaaactgaaattactgtgatatttttggaggaagggttatccagagactggagagagctgaaactttmaggaaaaaatctaggtcaggcatagagtattaagaaatggcatcaaactaaatttacgaaatcagcaataattaagtgggtcaaggcggcaagctaggaagcatagtctcagaagagcacatagtataaagaaaggcagaagttgtatatcattgcagagtaccccaggagctccacaaactttggttttacgaacacataaagtgtggggaaaggaataaagcaagatgaagctgtgttgtcatttaaagaccaggtttcagatatggaccaggtcaggaatactactaactgccatgaaatgcctcttgggaattatcctatgaataatggggaaaactgaaggattatcttatgagagatggagaataattgaaggatttt

SEQ ID NO: 100352 - DNA, 554 bp, Homo sapiens
agctggaggaagtttagaaggtggtttaaagtgagagaaaaaaaaggaaagatcagattcatgcaaaaaagtccatagggggaaaggatcatggcatttggggaaactgaaattactgtgatatttttggaggaagggttatccagagactggagagagctgaaactttcaggaaaaaatctaggtcaggcatagagtattaagaaatggcatcaaactaaatttacgaaatcagcaataattaagtgggtcaaggcggcaagctaggaagcatagtctcagaagagcacatagtataaagaaaggcagaagttgtatatcattgcagagtaccccaggagctccacaaactttggttttacgaacacataaagtgtggggaaaggaataaagcaagakgaagctgtgttgtcatttaaagaccaggtttcagatatggaccaggtcaggaatactactaactgccatgaaatgcctcttgggaattatcctatgaataatggggaaaactgaaggattatcttatgagagatggagaataattgaaggatttt

SEQ ID NO: 100353 - DNA, 372 bp, Homo sapiens
cttgttgtaagaggtattgggaagcctagaaacttagtcacatgattaacgtaataaaaataggattttaggatgattcatccagaagtttccagtgtggacaagaccaaacagatggagaccgtttcagaactagtactccaactatgaaatcctgaggtttgcttttcagaagttagttgttaactaatgatagcattatatagtacttctctatttttaattctctayaaaagagtaaagtttcacctcaattaaatcctcatgaaaattagtcttgataagaattcatattcaactaattgagttccttctaactggcagtcactgtggtagacactttcacatacattatcacatttaattctcata

SEQ ID NO: 100354 - DNA, 538 bp, Homo sapiens
tgcaatgggatggcgtcctggacaggattggttcccaccttgtgccgtgagctgccgggagaagcttcagccatccatgaccctgacctagaataagcaagtaaataataatcttacttgtttgtattcatctttcttaaatgtatgtatagctcacatttatctcaatgcttaacattagaggtgttgtgggtttttatttagaagtttggtgatatttttatggccagaaatatgccatagaaacttaactcttatttttatcaattagtctttggtaaaattagtttccttayacatttcaccttgtacattttctcctacattccgcagtttccaagaacccatcgaccatgttaagtgaggacttactgtatactcctcagatagaactgctttggaaactatcactaacattactacaaccggatattaaccagttttcaaactggttcatcttttaactgaatatgaccagtggtctttttctaattggaagtgtataaatcaccatatatggttagctccttggtccagt

SEQ ID NO: 100355 - DNA, 546 bp, Homo sapiens
ctaatatattcaataaaagtgtagtaaaaatgcaaatagtttttttccttcagttggcatttgacttttctaacaacgtatactggaaatgcaaagggccaaaaataggaaagataatcttgaataaggaaagtgaagctggaggacttttcagacttatcaaaagccacagtaatcacagtgatgttctaatagactaatacaccaaagaaagaaaacatagattcagaagcagagtcacacttagaatgatttgaatcatgacaaagattacattgcagtgcaatgggggaaagggtggtcttttcaagaaatggacctgggtcaaaagaaaaatatatatattaacacccacyccacactatgctcaaaaataaattcatgatgaattatagatctaaaagtggaatataaaacctttagaagaaaacagaggaaaatatttcatagcctttgatgtaaacaagaatttcttaccaagacccaagagcaccaacaataaaagaaaaatattaataaattgcaatatatattaagaatttgtgt

SEQ ID NO: 100356 - DNA, 310 bp, Homo sapiens
ggaattctagatctttcttctaaggccccaagtcttctgtgcatgatccccaggcctactgggggatgcctggatttcaaggcctgtcttctaggaccctgaaggcctaccttacattaatcagactttgttttagaacctccactctctccccagaagctcccctcctgctttacaagccccagggctgggcctcacctctmcacttctttggcaccatctcaggatccttcagattcccacatctgccctgaactcctagtcctacttcagacccagaccagaactccctttctttgcggagcaccat

SEQ ID NO: 100357 - DNA, 625 bp, Homo sapiens
cggaggttgcagttagccaagattgcaccactgcactccagcctgggcaacaagagtgaractcatctcataaaaaaagaaaccaggccccacagcaggaggtgagtggcaggcaagtgagcgaagtttcatttgtatttacagcccctccccgttgctcacattaccacctgtgctccatctcctgtcagatcagcagcgacattagattctcataggagtgtgaatccttctgtgaactgcacatgtaagggatctaggctgcctcctccttatgagaatctaagcctgatatctgtcactgtcttccatcacccccaaatgggaccacctagttgcaggaaagcaagctcagggttcccactgattctacattatgatgagttgtataattatttcattatatattataatgtaataataatagaaataaagtgcagaataaatgcaatctgcttgtatcatccccaaaccattttcctgccctggtctgtggaaaaattgacttccatgaaactggtccaccgtgcaaagaaagttgggaactgctgatttagatgacttgaagctgtgcatattatggctggtttatttccaaaacatcttcatttctagggcagagtcc

SEQ ID NO: 100358 - DNA, 585 bp, Homo sapiens
acattaaagccagaggctcagttttccattgtaaaataccccacctccactgtcctaagcataacccacaccattccttatgcagaaaatatctaggagagaataatgagaagagttatgctccacattttggtttacttagggtagacagaaaaaaaaagaaccacagaaaataagattaaaaatgagattgaaagttcagtaagaaagggaagccagagcaaaagatggaaacaaaaattaagcgcctcaaaattcacaataatctttggaggaaattggatctaataataaatgtgatcaaagcttgaaacatttttatttgactattaattattattaacatagtggacttccaaggtataagtgcttaatactcatatatgttttagtttaaagggttagaaagggctctaaaaatatactttgttgactaggcatgggcctacattaagtgaactgagatgtcagaacagtcttggtatactgtagaggcaggtatccaaaggcttaggaataytggaatggcagagtggatttctcatgtgaaacctacatgcttactctgagaggatccagaggata

SEQ ID NO: 100359 - DNA, 334 bp, Homo sapiens
catataaattacctagtttcaggtattttgttatagtaacacaaaccttatgaaggccaggtgatcaatagagtttaagctcagggttatattatagtgggtccaagagtttcatgagtccatcctgygggtattttcccagttctgcaatgcctaattggaacagacatattgagaatccctgaatcaactggcagaattccaaattggttccctgacctgtgaagtgagggttattattgtaggaaaggccaagtggaagccactataaatgtcactacttacaaaaacagtaaagcaaaagcaataccatgtctctggagggattgtagag

SEQ ID NO: 100360 - DNA, 553 bp, Homo sapiens
tgcttacatcctctgacttcctaggggcgaccaccccatcatcgacatctcaaggccacccacataccagcccacaagcttcaaagcataattctttgatttatatagaatctagaaatgttaagaaaacagctttggagggtaacttycagcatgaaagcaacaaacagtacataaactctggttcctggcaataagtgggcaaatgacaatctccactgcagctgaggcttcagacctagagaaaagtggttgaaggtggaagggggttacatagtgataaatcttttttatgtatataaaaaaaaccccacattctcactaaagaaaaaataagaggcaagcaaaaagagagttaaacaaaaatgctcacaataccagatacaccctctgttggcacctcagtatatatttttccagacagaattttatgttcacatgtacatgttcttaccaaaatggaatcgtaatataatattttataacccattttaccttttgaaacttacaactttgtgaacaacattccatgtcaataaatattcacctataa

SEQ ID NO: 100361 - DNA, 629 bp, Homo sapiens
ccaaatgaaaatataatttaacttggtaaaaagagttacacattttgattaactgcctctattttgtgaagcaggaggcagggaaacgtggtgagaaggacacagggttcggagtccatcaaccttccttcaggcacccagcttcctggcatccctactcagggacatccaacccctgtcacccacctcaactcccaggactgtcccaagcacaaatgtgcacactcatcatctactgcagcattttctgcaaaccccggatgtgcctgaatgccggcacagcacactggtggttgctggatccctgttaaagaattccagaaagcataagtaaaaatgtgtcctttttgttgaaccttgacaactctcttttcttccaacaaaaggaatgcctgttattatccctaataaaagccatcagatctcatgagaactcactcactaatataggaacaaaattcacttagattgtgtaagttgcctcgccaaatctataagagattcctttgcagccacccgagttcccaytcatgaagtaccacctgggtccgtaaattcttcatgagaacagattgaaggctgtgggcttggaaggcatgagaaacctctcacgaggcatcattggctct

SEQ ID NO: 100362 - DNA, 508 bp, Homo sapiens
tgacaatataatcccaattatccctgtaccctttacagatgaacatggtgctatatgtgtgtatactgtacaattaataagtatttcaaagctaaatggaaactaaatcgtagaggattaaatcagacactggagccccctccacagctggctctactgcctttggaagagttggtgtggggccccggcaccccagtcctgcagtgagcccgtcygaaataggaataagcacctgctctgggtttgtgtgagccacactttcatacgattggatggtggggaggaagcccagctccactgggtgcacagcttctgtagtcagtcaggtcgcaccaaaacggcaactgtgaccacagaaggcagctttcgcctctcactagtgtgccagggcactccaggctgaaatgaagttcctactgctccatccaatatgttcatcaccaacatcttccctaaggtgggtcaccacgccctgcaggatgtggcgctgaggacaggactgtgcccc

SEQ ID NO: 100363 - DNA, 508 bp, Homo sapiens
tgacaatataatcccaattatccctgtaccctttacagatgaacatggtgctatatgtgtgtatactgtacaattaataagtatttcaaagctaaatggaaactaaatcgtagaggattaaatcagacactggagccccctccacagctggctctactgcctttggaagagttggtgtggggccccggcaccccagtcctgcagtgagcccgtccgaaataggaataagcacctgctctgggtttgtgtgagccacactttcatacgattggatggtggggaggaagcccagctccactgggtgcacagcttctgtagtcagtcaggtcgcaccaaaacggcaacygtgaccacagaaggcagctttcgcctctcactagtgtgccagggcactccaggctgaaatgaagttcctactgctccatccaatatgttcatcaccaacatcttccctaaggtgggtcaccacgccctgcaggatgtggcgctgaggacaggactgtgcccc

SEQ ID NO: 100364 - DNA, 508 bp, Homo sapiens
tgacaatataatcccaattatccctgtaccctttacagatgaacatggtgctatatgtgtgtatactgtacaattaataagtatttcaaagctaaatggaaactaaatcgtagaggattaaatcagacactggagccccctccacagctggctctactgcctttggaagagttggtgtggggccccggcaccccagtcctgcagtgagcccgtccgaaataggaataagcacctgctctgggtttgtgtgagccacactttcatacgattggatggtggggaggaagcccagctccactgggtgcacagcttctgtagtcagtcaggtcgcaccaaaacggcaactgtgaccacagaaggcagctttcgcctctcactagtgtgccagggcactccaggctgaaatgaagttcctactgctccatccaatatgttcatcaccaacatyttccctaaggtgggtcaccacgccctgcaggatgtggcgctgaggacaggactgtgcccc

SEQ ID NO: 100365 - DNA, 568 bp, Homo sapiens
ccaaaattagacggttagtagtttttcttaagtaatgaagagagatcaccaaaagaaaagagaactgagaatctctcaagccaggaataaggctgggcactcctgtggtgtgtaacccacagcatgctcccacacactgacacacatacactttatttccacatgggggaagcttacgtggtggtttaggtttctgattacaccccactaatgcagatcattccatcaataaaacaaacaaacaaaacatattaagcactgtactagggaccataaaagtgcataattttctaagtacctagtgtatctgcataattacaaagaactgtcatggccaatagcagcattttttacatacacaactctgtaacgtaactacttgaattataggaacatgtgacaaaattmtctggagtatttgtgttactataacaaatctggcacaatttgaaaccaatctagaataataatttttaaaagaaggtaggaaggggaacagaaatgtaagattatgcaactggccaaaatagaagcagcaacagctttcagtgtctgggcagcagaaagt

SEQ ID NO: 100366 - DNA, 618 bp, Homo sapiens
gcattagtgctaaatactggttttaatagattaaaaatatgtataaattttcactatctgcgttcttgcattgcagaaggccacagagaatctgacaatcatgagctcccagagtgagcttagtattcacgcttctgtgtggagacaagtgagctttgaacaagcaagtagagaacagcagagagctggagacacccgggcagaccttaatcatggcctgggtagggggtgcaggctgctcaccagggctcccggtggtcgggctcagggtctgggctctgactaaccagcagggtcacctgagtcaaggtccttgcccttcaaagctcagttttctcacctgcaaaatggaggtgaggatagcacctgcttcataagacgtttaaagatgaaatgaaatcactcgtctaataattgccatggtaccagatacataggaaaggctccataaatgttagtccatgttctcatttgaaatcaaataratgtcacgtagtaggggtaaacccttaatcaatgactattataatagtaacagtgtagttattatttattgaatgcttattgtatgccagacactgtactgggtgagtcccatatattgtctcatccaattct

SEQ ID NO: 100367 - DNA, 559 bp, Homo sapiens
caaaagggaaaagagaaaatagggaaggtgaagcaatagaggaaacaccattgccaataggaagggaatcagtgcctcttgacaactctagttagaacccccaaatttctctatggtattttttcttcttttatggcttaaaatggctcctatctaactttataatgttcttccaacatgggaaacgttaatttcaccaaaccttataatgcttagcttagggttgagctaggaggaagggagcctagaagtctcacatgccagcaaaagagtaaaagattttttttgctgttgktgttgttttttaccaattaggcttttggtgtctttctccctgtggaaaccagtaaaagaaacaataaggatcactctttatattctctgtaaagtttcaattaatgaaaaagaacttctgaggttggtcttaggctgtagccaatctgttgtgctttgtgtgtctttctgtatggttctgtcaaaagaaagggtaccttaggctagtatgcagaacctcataagcctgctattcaagccagcccaacaaaatggctggtaacaa

SEQ ID NO: 100368 - DNA, 656 bp, Homo sapiens
gatggcaatgtttatgatgatgctgacctttgtacctttagaatagcggaatatgaagaacttaatcttcataatctttcagaagggcccagatgcaagtagtcaagacgagtgggttggctacagagacaatcatcaaacctagacaaaatatttaaaaggcaggcaataactggaggattttttcaagacatccaaagatggcatgtaaaagatagtaacccatgcctgaaatatgggaaagcaatggaaaggtttatgagtttgcagctttttgctaaagggcattctcccatccacatgtggctctggaaagagcatcaagaaagttagggtaaaatcctgaaagagagggagccactgaagaggaagcactaaaacatgcacataaattctgcccaactcattggtggactgctaaatacacaggtgcagtgggagatgctccatggagcccaacaaaatgaagcagcaagaaagtgaagaactgaggkttaatttcagctgctgccaactgcagaagagccagagggtggagtctgagttcagaggagctcactgcctcctaaaacaagctcagcacacttcaaggggacaaaaacccagagtctccacaatgtgtcacatgtgttcaaattacaatccaaaatcactag

SEQ ID NO: 100369 - DNA, 551 bp, Homo sapiens
tcttaaatcaatgatatcaccttgagaaattagaacacaaaagaaaattaaacccaaagtaagtagaaaaaaggaaataatagaaatacagaaaactgaaaaaatatatatatatataaatcaacaaaaccaaaattcagttccttggaaagattaataatattatcaaacacataagggaagagagaaagtcacaaattaccaaaatcatgaatgggagaagggacattactcacaaaaggataataaaggaatattattgtactgtgttaaataaaattccaaaaaattgtgtgtatctggaacctgtgagtatgacattccttgtaaataggatatttgcagaygtaatcaagttaatatgaggttatgctggattggaatgaatcctaaatccaatgattggtgtccttataagacaggaagatttggacacggagagacacacagggaaaatgtcacatgaaggtggaagcagagactaaagtacctaagagccacagaaggctaaggatttccataaaccaccagaaaccaggagagaggtgtgg

SEQ ID NO: 100370 - DNA, 571 bp, Homo sapiens
gacttcttccccgcagcatggccaagggcaagggagagggaagggacgcaggccagggcatgacatacagtggcccaacgtaggaaaaacatttttttttgacctctcattcattttcttaaaagttcacatgcctttcaccttctttttagtgcctcctggcaagttttatcattaaaaacaatcttttttaatgacttgcatttccatttaaagcgatttgtgtgactggtttatttgcttagtcttaaggtgatgtcactgcaacaggcaccatggatttaaggatatataaatccttacgtatccttttttctttttttgagaagcaaaaaacatgatcwcattagatgttaaaatgttaaaattagatattaaatgttaaaatatggggaaaatgcagatcttagaacgagggaaattcttgttggtaattttcatcctcccaaaaaacttcagaataaaattggttctccctgaagatgtgtgacatttgtacttggcttcatgtccttatcctgcagtgttggggggcacagggtgaagtcacgcttgttgtgagctggccctg

SEQ ID NO: 100371 - DNA, 563 bp, Homo sapiens
tacaatctgccttctattggccattcctgctaccttgtccataaatactatccttatctagacaccttatgctccattcacactaaacagtagactgtatgctctatgaaggcagaagtcatgaacatcatactcaccctttggatgctcaacacttaacaccttgcatagcatctaatatttcttcttttatttattgtttttgaaacagtgtcccactctgtcatccaaactggaatgcaatggtgcaagtatagttcattgtaacctcaaactyccaggctcaagcgatcctccaccttggcctcccaaagcactgcgattacaggcatgagccactgcacccagccctacagacacatttattaaatgaatgattaattaatgaaactagctttataaacacactgtgctattttataactctctacctttccatttattgctctgtctgactagaatgcttttttttttttggctagccctcaacctggagaatacctataaaaccagactagttgcttcataaatacttctaccccacaccatatagttacttatga

SEQ ID NO: 100372 - DNA, 535 bp, Homo sapiens
tgccagtctaattctctcgtccttgtaatttcttgatcttttttcccttggagatctcggggattttttctttatctttgaaatctaataattttacttgcgtatggtttagagttgacaattctggattaattttcccacataattgatgagtccttttggtatatagatttatatattcttttatatcctgaaacatgcttggattatggtcccaaatattagttctgttcctttgttgtttgtgtatatcccttaaggactgcaataatttgtatgttgtttcttctttgcctgtcttccatttcaactayttctctctgaaatgtcttccatttcaaccacttcttttctctcaaagcttttagttttgtatcttcttttcatatcttggttatttccctgtcccttattaagattttatttaattctcttttcctctggaaactttgcaatttgttcttcacttctgcagtaatttgtctttttcttatatttctttcttggatctaacacactctcttttatttcttcc

SEQ ID NO: 100373 - DNA, 613 bp, Homo sapiens
tgaagaacagagagaaaaaaagtaaaagaataaaacaaagccagagcctcagtgacttaaggaacagtatcaggcagtctcacataggtgtaattagagtctcagaaggagagcaaagaggaaatttggcagggagaaggaggaagctatgaagaaataatggacacagtttatccaaatttgatgaaaaacaacaagcctcatatccaagggtcatttcatagtaatatgttgtttgattgatcaaaaagatataayacctctaaatgtatgtgcatctaatgattccagatccatgaagcagcaatatatagaactaaagaaagcgacaaatccaaatccacagcagtgtagatcttaatatcaggttcttagtaactgatagaacatatagattaaaaatcagtaagaacatagacgatttgaacaatactatcaaccaacttgagccaattgatatttaaaggacaacacacccaacaatttcaagagaacatggcatttacattaaaataggccagttgctggaccataaaattagtttcaaattttaaaacaccatcttaagagtatggtgtctgaacacagtagaattgaattaacaatagcaata

SEQ ID NO: 100374 - DNA, 580 bp, Homo sapiens
taattttgccctcatttttaaaagacagttttgccagatatagaagtcttggctggcagttcttttcccttcagcactttgaatatatcatactgtgccttctggcctccaaggtttctaatgagaaactggtgaataatcatatagaggatcccttgtatctgatgaattgcttcccttttgatgctttaatgtatttcagtgcaggtctcttgtagttcatccyacgtgtagttcatcgaacttttgaatttgtagattcatgtatttcatccaacttgggaaaattttggccattttttcttcaaatatctctgcccttttctctttctcttctccttctggaactcccataatgtgtatgttattctagttgatggtatccccaggtccttcaaactctgtttacctttccttaatagtttttctttctggtcatcaaactcaaaactttcagttgtcctattttcaagttctgctgattgtttttgctgctcaaatttgtttttgaactgctcttgtgaatttttcatgtccattttgtacttttctgctccagaatttctttttggttcctttt

SEQ ID NO: 100375 - DNA, 447 bp, Homo sapiens
aaccttttgaaatttatggtaatgttttttgtataatgagttgttttcagaacctaaaagacctgaagaatatgagtttaattatcaaacaagagttttccaagtaataactattaatataacttttctatgtcagctgataaataactttcaaattatgacttttttctcctgtcttcacttttataccttcatcatatcccaaatcttaatcatttcacrgaatgagagaaaactctggaatacagggaggagttcttttcttaaatatatcctgttatgcttgtgcttggaactgttgggacagatggagaagactccttctgccattacaaatggctttgtacaaacacagagcgcacagcaaggaaaacagtggtgcttactctgatgaaaagagggagaaaaattctaatgctgaacatgaagtttcattttattggtaat

SEQ ID NO: 100376 - DNA, 569 bp, Homo sapiens
aagactttggagactttgcacctcagcagttgctcaaataactgatgccttttaattagcctttcatgttttattaacatgttttattataatcactcagtgaatatttaaatgcaattttccccccaaatgaactaattacacctacagctaggcatgatgtctttgtgacctggaaaaacccagcaataaacatttgagagtgtttgaactgtgtgggcagagagttgaccaagttactcaacccttggcccaacatactgtgttcctggtggcaactgatcaaacaaatgaaaagtttgatgcaaagggagcttagatgacatgttgaatgaacacgtacmttatgctgcatttcatgccatctctctatgcagcttctctgttaagaatcataatataaagccccaaacctttactcccagcataactcacttggtggtttttatttccatgtatggatataagatgaaattagccagagtgtcttaacctaacagaatattttacagagttaagaagtaaaattataaacaggcacattttcatagccttctctaccttttact

SEQ ID NO: 100377 - DNA, 541 bp, Homo sapiens
aaacaggcccggctgcagccggactcacccggctcgcttgtgccgaggaagccaggtcggaggaagggttccttggcatttccagcagcagcgctctcttactcaattaggccctttctgtccaaagggcagctgtgacgtgtggaacaggtctgtggtgtcaatatgaacccagcattgtacagctggggacatacaatgccctcggtcgactgtttatttataaatccacccagtgctcactgcggcctttacactcagctctttcccaaaatgcaaattggcttcttcctgtaagtcaaaccgacttgctcgagctgataaaaatcatcccaaacgggctcttttatctccccaatacacaaagtcctctgcacccacacctcctagaaagaggaagactgtctgtctgcagagtgcytgcggcagggatggcccagagagaggccctgaagaggcacgcaagggcatgggagggtgtgcatagggtagtgggagccaggatctaaactcacaggcctgcattcaaatcctgcctaaa

SEQ ID NO: 100378 - DNA, 377 bp, Homo sapiens
agcagtttattgtaggacacggccctctcttcctgtttggctcagctgtgtctcagctctgggcataccttgtttgattctgactgaaatcgtgaacagaagtcttcttatctcagagcagggcttcaggacaccctcagcctcacactggtcttaatattgtgyttaccaaagagccagatgcatgtttccagtgaccttctagaaacaatagtcctctttattggactccacaaaagcaatcaaatacagtgaccaaaccagttcttgcctgccaagatccttggagaataccaccatgctaatgtggtataagaaagataaaaacaaagaggttctagaagagatgatgcttttcctccacctttagaattctc

SEQ ID NO: 100379 - DNA, 605 bp, Homo sapiens
caggggtaaggggcagtgtttaagttttcttccagctcagatatagtattattttgtttaatggcatattctttaaaaaaaaaaattttttttttcattatgagccctgaaaaagaaaaagacttgaaattggctacaaatttatgtgagggatgcaaaaaaacatttctaaagaaggcccatttgttctgttgagcaytttactgggttttgataggccacgatttcctcaagctgactttaggtacaggggacatagagaacgaaattattctgctactaaagagtaagagaaactgagattttgctccttagagaagaggacagaaactgagaagaataagaaaagtacaggaggctgacttcaagttgagtttttattttactgtgatatgaaatgaatccctgcatattaccagccttcagcaaaaatgtctacatatatatgctgtgaatgtgaatctttttttttttttagacagagtttctctcttgttgcccaggctggagtgcaatggcacgatctcggctcactgaaacctccgcctcccgggttcaagcaattctcctgactcagcctcctgagtagctgggattacaggcat

SEQ ID NO: 100380 - DNA, 574 bp, Homo sapiens
tttggcttaggattgtcttggcaatgcgggctcttttttggttccatatgaactttaaagtagttttttccaattctgtgaagaaagtcattagtagcttgatggggatggcattgaatctataaattgccttgggcagtatggccattttcacgatattgatttttcctaggactcatggatttttaaaaaaattcaaagtgtaataatctagtacttycattactctttttgatgcttagatttcctctggatcggccagtgaaggtccctaaagtttgcttttcacatataggcctttgatcttttggaacttaaaaacaaaaagatcacaaagcagggatgtagttttatgtttttttccgtatttaaccagttacatcagccccattaggtggacagtccatagttccctcattctgtttttttttttttaatgtttcttctgtatttctaggctttctattctgttctgtttatgtaatcatgtgccaataccacattatctatttttttttctttttgagaaggagggagaaacagggtgtcactgtgttgttcaggcttgttttga

SEQ ID NO: 100381 - DNA, 587 bp, Homo sapiens
tgctccagctagaacttagtactatgttgatagacgtggcaaaagtgggtaaacttgtcttgtacctggtcttggaggaaaagctttcagtttttcaccactgagtatggtgtttgctgtgggtttttcacacatagcttttattatgttgaggtaatttccttctatttctagtttgttgagtgtttttatcatgaaagggtgttggagtttgtcaaatgctttttctacatcagtcaagatgatcatgtgctttttccattcattctgttaawgtggtgtattccattgattgattttcatatatggaaccattgttgcattccagaaaaaaaaaaaccacatggccatggtgcatattccttttttatacgttactaaattcggtttgctggtattttgttgaggattttatatcaatgctgatatggttcggatgtgtgtcctccttcaagtctcatgctgaaatgtgatccccaatgttgcaggtggggccaagcactattcccttggtgatgagtgagttctcactcagttagtttacatgagagctggttgtttatttttttgtttatttaattttttta

SEQ ID NO: 100382 - DNA, 598 bp, Homo sapiens
aaaatgtcattttctaacaggcccaggagttccaagtttatcttgggaccttaagaggagaggatcacccaactcacaagtatttgaggatacaaacccatggctgggctctgctttaaaaggtcttatctgagattccttgtgggacagagttccctcaaagccaatctaaaaggcctatgtagacataattattctagctgcactttatgcaaataatcaggccaagtataagactaaaatgtattttgcaaacaactctatcccatcatgatttttttaaacaaaaatgagtattggagagagaggaattatgtttcaaaacctgttataagtttgtcattaaattctcaactcattagttgtttttaaaagtttttgcctacattttagactaaccctgattgttcctgtgaaccaaccagcaatctctggctgcagctcagaagaaacaagagggatgggtaatgtaaaaatctggatcaayattctagttctgagccattatcttgcaaatcccgccagatgacaggaataaatagagtgcccctaacccagaggtttcctttttgggaaagtaagaccaagagagaaaacc

SEQ ID NO: 100383 - DNA, 572 bp, Homo sapiens
aactggtaaaagcccctgggatttttgagctgtccttaccacacactcttatttcatatttatacgtgttttctaataactcagtttgtctcttcttcaggccatgaaactccagtcatgcaactggagccttgggcaatggccccttctcgtgggaacccttggataggcccctgagggcaatttgactgccgttttcccaaaacagcaccccctgtcaacaggaagcagttaagatctgtcytcatccttatccttatccttattctaatggcagttagatgtacttctttagaggagggaatgatagatgcaggaggctggtaaggtccctggagaatccccaaccagcctgtgcaatgggatgatggggtggggctgcaggaagtttgtgccgcttgcagggaggaggagcctggcctctcctgttcctaggtggtgacctgggattccaactgagagatggaaacctgttaacgggaacccctctcactttgctgtgttgtttttcttttttccttttcacccaatatattttgtaacctctcactcttcaaagtgcctgcatgcct

SEQ ID NO: 100384 - DNA, 437 bp, Homo sapiens
ggctggtaaggtccctggagaatccccaaccagcctgtgcaatgggatgatggggtggggctgcaggaagtttgtgccgcttgcagggaggaggagcctggcctctcctgttcctaggtggtgacctgggattccaactgagagatggaaacctgttaacgggaacccctctcactttgctgtgttgtttttcttttttccttttcacccaatatattttgtaacctctcactcttcaaagtgcctgcatgcctaatctttcctggtcatgtgagaagaactcatttttttcctacaacagaatcaggtgattggagaaaagatcacaggcctaggcacccaaggcttgaaggatgaaagaatgaaagatggacggaasaaaattaggaccttaattctttgttcagttcagtgtaaatctacttagcccttgagag

SEQ ID NO: 100385 - DNA, 540 bp, Homo sapiens
gtttcattctttagcacttacagtcaccatgatagtttctgaggacaaagattagatcgctatgttggccggtgctgcaagtccccaaaatgggaccatgggagggagtggaattgtagggagtggaagtaggagggtaggacatgagttcttgggcgatggcattagttaccaataaaaaaggcagtatgattctttctcctaatgagaggaactgagaccaggcagctgagagaaycttgtcagtctctagatacgagaggaatagtttctttgaaaggaaaagttcaaaattgaattctgagaaccatgatcaggatggaaggcagaagtcagaagggagggtgcagtttcagaccgtggatctgggaagagatttcctcactgcaccgtgatctccttaacttaaggacagaaagttccaaagagccctaatataccttcaaggcctcatctgcctggatcagtctccttcttgctttctgcattccaagcacactgccttcttactacatctggaatgctccctgtttacccagg

SEQ ID NO: 100386 - DNA, 549 bp, Homo sapiens
agtgctaaaggaaaaaaaactgtcaaccaagaattgtgtacccaacaaagctatccttgaaacacaaaggcaaacaaaagttgagaaaattcatcatcaccacattggtcttataagaatgctaaagggagttcttcaatctggaggcaaaaaaggataccaacatacaaccaaaaaaaatccacctgaagtataaaaatcattggaaaaagtaaatacccagagaaaattactaagagataggcaatataaaaagatgtaaattggaacaacaaaaagtcaaaattttggaaggaatagagctaaagtgtagagatttttagtttttttttttaaatttattgttttctttatgatcaaaataaagttgttatccgtttaaaataactttgttaaaaacataaatgttttatatacccatgcagcaaaaacctataatataaaaactaaaaatagaaagcaaaygcaagaaattgaaatatactaccagaaaaaataactacaaaaggaggcagtaagaaaagaagaatgagaggagctacaaaacaa

SEQ ID NO: 100387 - DNA, 611 bp, Homo sapiens
tgtacctcaaaacaataaaggtgatatatgaaaaatccataggtaatatcctatgaatagagaataattgaaagcctttcttctaagatctggaacaaggcaaagaggtccactttccccacttttactcaacatagtattgaaagttgtagtcagagcaattaggcaaaagaaagaaatacggaacatctaaattggataaaaatttataagattttttaaaaatataagataagacaaagatacctacttttaccattttattggtttacattgacttgggtattctagttagtgcaataaaaataaataaataaaagcatacaaatttagaggaaataaccatcattccttgaaaatgatttggttgtatacataaaacaaccaaaaaaactatacataaaaataactagaaatgatagaaaaacttagcaaaatgcttaaccatagaaaagtcaattgcatgtctttatacgagtaataaactttarataaaataatttaaaggaaaagacaccatttataatgacaaaaaaaactataaagtgtcttaaaatttgtcttagttcattcctgctgctatactgaaatagtggtaatttgtaaacaac

SEQ ID NO: 100388 - DNA, 587 bp, Homo sapiens
tttgtaaattttctcagtaatctgctacacaatttgtttcaagagacttgaactcacttgagtgtttagatacttgcatcctattacaggcctcaactgcttctttattgatatttggtctatccttttaaggaaaaaatagttccttactgagaaaaagaaaacaaaaaaattattttctttttctttttgtaatacatcaatatttcaccactkgcccaaagcacaaaacttatttattggaacataatttaaaatgctctttcacatgctcatagcaaatctactgcaaatcttaactctttgtagctgtgccttctctcatgattatagtatctggtcacaggtctccctggacttagtgaggatttgaggttatggcatttctgttcttcacataagtttcttacatgagctccttctttttagcctgtttttattgcggacttatttctaagagaaatttattgctttttgtttcattttggcaactctgagagaaggttatttataaaataaactcatttctcttcctagaccacacagctgtgaaagtcactatgaaggactgaaccttatgtatacat

SEQ ID NO: 100389 - DNA, 587 bp, Homo sapiens
tttgtaaattttctcagtaatctgctacacaatttgtttcaagagacttgaactcacttgagtgtttagatacttgcatcctattacaggcctcaactgcttctttattgatatttggtctatccttttaaggaaaaaatagttccttactgagaaaaagaaaacaaaaaaattattttctttttctttttgtaatacatcaatatttcaccactggcccaaagcacaaaacttatttattggaacataatttaaaatgctctttcacatgctcatagcaaatctactgcaaatcttaactctttgtagctgtgccttctctcatgattatagtatctggtcacaggtctcccyggacttagtgaggatttgaggttatggcatttctgttcttcacataagtttcttacatgagctccttctttttagcctgtttttattgcggacttatttctaagagaaatttattgctttttgtttcattttggcaactctgagagaaggttatttataaaataaactcatttctcttcctagaccacacagctgtgaaagtcactatgaaggactgaaccttatgtatacat

SEQ ID NO: 100390 - DNA, 562 bp, Homo sapiens
tttacaggggagaaggcaggtggtgtggctgcagaggctggtggttggtggatctggcagtgggaccatgagagcacaaggcgtgatgaattcccctaagctttctgcatgaggaggacagatttgctctccaaacttactctccaagggcttatttttaaaaaaatatagtggtctaattattttgaatatttaatccagtgcctaaacatagactttgaatttgattactctcaagtaatctctttggtgaaacctaagcaaggttatccttatgtttaatatctaacttggacagatggcatacagcatctggtgtctcagagggaatggactacttattgactgcctgcacctctcactgactgagacaaagggatggagaaaaatatgatgccagaagtagacatccccgctccttcattctaatgtgctatgaaaacaatagggatatttttttttctaaagtcgcctggctgagttatagaaatgattaaygttttattcaattgaagactcaaaaagaggatttactctgacctggtattttaaaatgtggagc

SEQ ID NO: 100391 - DNA, 594 bp, Homo sapiens
gctaatttgaagtaccgctgctgattagggataaaataagccaagcaggagagaaatgctctcttttcattaggcaccacaggtctgccagagtgagggtacccaatatctccttataataattatgaaaggactgtgattttgctctcagcttttaaattaaacctcttcatggcctaaattcacatcggctgtttgatcttcctctttctaggactcccggttatgacactctcaaattatgtggcttctctcctcagtgttctcaaaaacgatttgagacttcagtgttgggagtctttctcattasagggttagctaaacatataagatttacataacctttgacatttcaaatttagctcttggatacttgtgagctgtaatgtacaattcatttttttaaaaatagaattcattcaattctgcttcattcaaattcctaatgtagtctactagcactgtggaactcatcaatggcaataatactcaagagcaacacatttttttctaatatcttttttcatgctttctagacagggattgaaattacaaatataccttctcaaactctccaaattccattttattgac

SEQ ID NO: 100392 - DNA, 491 bp, Homo sapiens
agctcgtgttattctgggatgagagcttagttggtggtaggttaacctgggaggtatatatttgtacttctaggtaagtacktggcaaacattttctgtaaagagaaagacagtaaggattttaggcttttcaaactgtatgagtctctgttgcacattcttcattgcttgtttgtacaatctttagttccccttttacacaatcaggttgttgtctggatttggactacaggattgccaaaccctgttctagggaagtgcttagtttttaaagtgcatttgaagttgattttggttattgttgactgcatttgtcagggtgctaataagacaataacgagcttacaaaagaactggccaatttgtatgtaggaagaaagagagtctagtttggaggatttgcagtaaggaatcttacccttttaaaagatgaagctgagaaggtctttgagaattactcttgcagcaagtatgaattctaggtatgactg

SEQ ID NO: 100393 - DNA, 607 bp, Homo sapiens
ctgttggtaccaagaaatggaggtgttgccttaaaacaacctaaaatgtgtggctttggcttaatgattagtaggtggcaagggaagtttggaagtaagaaggaggttagctcgtgttattctgggatgagagcttagttggtggtaggttaacctgggaggtatatatttgtacttctaggtaagtacttggcaaacattttctgtaaagagaaagacagtaaggattttaggcttttcaaactgtatgagtctctgttgcacattcttcattgcttgtttgtacaatctttagttccccttttacacaatcaggttgttgtctggatttggactacaggattgccaaaccctgttctagggaagtgcttagtttttaaagtgcatttgaagttgattttggttattgttgactgcatttgtcagggtgctaataagacaataacgagcttacaaaagaacyggccaatttgtatgtaggaagaaagagagtctagtttggaggatttgcagtaaggaatcttacccttttaaaagatgaagctgagaaggtctttgagaattactcttgcagcaagtatgaattctaggtatgactgtcacacct

SEQ ID NO: 100394 - DNA, 578 bp, Homo sapiens
agaaatacacagatttttatcacccatctattttctggtgctactgtaatttcatgtaatcagattttacagtggtgagctaatttttggacaattaatgaacaaatgactacwcagagtatggacaattatttaataataaatgaattagggcagaatatccagctctgtgttctccataagtgtttactcacttcagatgaataagcagtcaattccatgagatatttaccaaacaaggacttagatggattatagggtgtttgggattcatatagtaattttcctctaaaatgccaaagaactatataaacatgaaactaaattttctaatatatcacttttataaaaaggtcaagttttggaaatatttttacttctcattttatattttgggacatttaattttctatgtcactgcagttgatccttctgcattctccatgtaatacaaatgtatttctctctgtctgtgttgctggtttcatttttgtcttaattgcctccttagcacatcctcctgaagtgccgttgaccactctgtgatatacagttgaaaactcagttgctgtttccac

SEQ ID NO: 100395 - DNA, 578 bp, Homo sapiens
agaaatacacagatttttatcacccatctattttctggtgctactgtaatttcatgtaatcagattttacagtggtgagctaatttttggacaattaatgaacaaatgactactcagagtatggacaattatttaataataaatgaattagggcagaatatccagctctgtgttctccataagtgtttactcacttcagatgaataagcagtcaattccatgagatatttaccaaacaakgacttagatggattatagggtgtttgggattcatatagtaattttcctctaaaatgccaaagaactatataaacatgaaactaaattttctaatatatcacttttataaaaaggtcaagttttggaaatatttttacttctcattttatattttgggacatttaattttctatgtcactgcagttgatccttctgcattctccatgtaatacaaatgtatttctctctgtctgtgttgctggtttcatttttgtcttaattgcctccttagcacatcctcctgaagtgccgttgaccactctgtgatatacagttgaaaactcagttgctgtttccac

SEQ ID NO: 100396 - DNA, 578 bp, Homo sapiens
agaaatacacagatttttatcacccatctattttctggtgctactgtaatttcatgtaatcagattttacagtggtgagctaatttttggacaattaatgaacaaatgactactcagagtatggacaattatttaataataaatgaattagggcagaatatccagctctgtgttctccataagtgtttactcacttcagatgaataagcagtcaattccatgagatatttaccaaacaaggacttagatggattatagggtgtttgggattcatatagtaattttcctctaaaatgccaaagwactatataaacatgaaactaaattttctaatatatcacttttataaaaaggtcaagttttggaaatatttttacttctcattttatattttgggacatttaattttctatgtcactgcagttgatccttctgcattctccatgtaatacaaatgtatttctctctgtctgtgttgctggtttcatttttgtcttaattgcctccttagcacatcctcctgaagtgccgttgaccactctgtgatatacagttgaaaactcagttgctgtttccac

SEQ ID NO: 100397 - DNA, 672 bp, Homo sapiens
tgttcagcaacattctgaagaagtcagttaggaccaaataagacaaaaaaaggggtgttataaaaaacaaaaaaccaaacaactgctatttggttacaatagacgattgagcattgaggttaaataaagaacattctctcaactgcctgtggagcacagtagatctcatttttgaaatgttaacttttcaratgagatccattgtgctctctcttatgggggctttgccatgtttccagatctttatgaagggacagaaatatatgttatcagttacaggcagaggatggtagcagagagctcttttcacatttaaagtttgacccatattcagccaaaaacttaggcatttcatgtttttagctgtttctgatgtattaactcttttcgcattatcacaacattttaatacttcatttacttaaagaaaagaaataaaagcaagagagtcaggtgttagctggtggtattgtgtggttgtattaaagcatcagaaattgtctgatcttactaaattgattgtcttacctttggggaccagattattttagatcactgtatctaattaaaaggtctgcaaaaatgaatttgaatgtaaggggctaaatagctttgcaatttagattataaattaaactgagttgttatatactgtattttcagttctactca

SEQ ID NO: 100398 - DNA, 601 bp, Homo sapiens
aatttccccaaactcactagagaggctaatattcaaattcaggaaatgcagagaacccctgtgagatactgtagcagatgaccagcctcaggatacatagtcatcagattcctcaaggtcaacatgaaagaaaaaatttcaaagataactagagagaagaggcagattacctacaaagaaaactccaacaggtgaacagtggaccttttggcagaaccctacaagccagaagagattgagagcctatattcagcattcttaaagagaagaaactgaaaccaagaatttcatatccagccaaactaagcttcctaagcaaaggagaaaaactatccctttccagataagcaaatagtaagagtattcattactttcttatgagaggtccttaaggtaatgctaactgtggaaatgaaagaccattacttgccaccacaaaacacacttaagtacatagaccactgatactataaagcacctatgcaatcaagtctgcattataaccagctaasatcataatgacaagatcaaatctgcacatatcaatattaatcttgaatgtaaacatgctaaatgccccacttaataggcacagagtggc

SEQ ID NO: 100399 - DNA, 576 bp, Homo sapiens
gaattacacttgattttctcaagtaatcattgataaaaataggttaagatttaaatattgaacatattttctgtctctggataatgacaattgttatcaacatttactgaatactataagccaagcactgttcaaatctccataataatttggtgatcaggtaggaatgtatagagaggtgaggaaatgacaaaaagcacttagtaagtataaagtttaaaaatcttttattttggtgctgccaacaattaggcccttatgargctatcaaaaaccgggaagaacttgaagggaaaacagactaacaccagccatatgccatctacattttttgtattttattgttgtttggcttccaaagattcccaaactagtttattactgctatggaaaagctgttctgtggtggaaattacccgaatcaggagaaaggaaagtttgctttgtgtcttcagaggaaggcgcagggtaacttctgtggcctcagatgcaatcagcagcagcagccttaaaatgctttttttgtgtgtgtatgagtaatctcatgaagcagaaaaagtaattgccctgtttgta

SEQ ID NO: 100400 - DNA, 472 bp, Homo sapiens
ctttctcctgtgctggatgcttcctgcccttgaacatcacactcctagttcttcagttttggaacttggactggctctcactgctcctcagyctgcagatggcctagtgatcgtgtaaggtaatacttaataagcatccatccatccatcccatccatccatccaaccatccaattagttctgtccctctagagaaccctaatacaaacaggtagtggaatattgaaagaaattttattggagcagcccaaaaaagcatatgtaacttagagtaatagtaattaaataagacagtgaaattaaataagaaaaacatatttagacagagtaacataccaagtttagtttcgggagagttaagcagctgctctaaagactgtgtgtatgtgctggcggaagacacagactccgtatcagttgtctccatgccttctccctcttcccgggttacagtgtgcatgtctagaagcgg

SEQ ID NO: 100401 - DNA, 472 bp, Homo sapiens
ctttctcctgtgctggatgcttcctgcccttgaacatcacactcctagttcttcagttttggaacttggactggctctcactgctcctcagcctgcagatggcctagtgatcgtgtaaggtaatacttaataagcatccatccatccatcccatccatccatccaaccatccaattagttctgtccctctagagaaccctaatacaaacaggtagtggaatattgaaagaaattttattggagcagcccaaaaaagcatatgtamcttagagtaatagtaattaaataagacagtgaaattaaataagaaaaacatatttagacagagtaacataccaagtttagtttcgggagagttaagcagctgctctaaagactgtgtgtatgtgctggcggaagacacagactccgtatcagttgtctccatgccttctccctcttcccgggttacagtgtgcatgtctagaagcgg

SEQ ID NO: 100402 - DNA, 591 bp, Homo sapiens
tcttccatggtggtccaagtcttagttattacatcctactaaaactagccaaaactacaaggcacacactaccacaagcattcaagagcaattttaagagaaaccttgtatttgttcctttttaaatatccccaatacctgcatatccttcatcatttaggattatgtctttaacagtggttcttaaagtatggccttgaactcctgagggtctccaagacctttytaagggatccgagagatcaaaactattttcatcatactaagatattcctaagaagtcactgtagcattgtggactgtgttgacacacagatagtgcaaaaacaacagtcggtacaactgctggccgcttagcactaaagagggccgtggtactgtccctgaattctttacctttatgtactcacaggaaaataatgtcaatttcactttttaagtgaaatggtacagtcatgctggaaaaaaactgtcagtttctcaaaaaactaaacatacgatttctgtacaacctgccaattgcacactcttggacatttatcccagaaaaggaaaagttacattcacataaaacttagacaggctgagcac

SEQ ID NO: 100403 - DNA, 608 bp, Homo sapiens
acacacacacacacacacacacacacacacaagttctatgggtgaagtatttaaatactaattaaataaaatcaaatacaaattagtaaatgcaaataaagtatatacaaattaagcaagaagaaaaaatttattttcttaatttgtttagattcccattaactaacatagtaaagttagacattttttcagcacgtacccttttagaggcataatttatttattaaaaataatttcatgtattttgtagctctactaaacacagggaatgtatgttaacagatttaatctgtcatctctgttttgcgctattctgaatattaaaaatacatagcaatattagaggctataatacatcagtttattttcttatgtaacttagtatttaactctatactaaaatmacttctcaagactaatttgcttgggaaaactgagacacaaaacagaatttttagtcttgataccttggcacaaaatatccttaattattactgtttcagaattaagcatacttacagaaatctgacaatgtacagatctggaaaattccaaaattatctatgtagagattgtttcagagaatagaaatcagtccttcccactaa

SEQ ID NO: 100404 - DNA, 593 bp, Homo sapiens
tttttgatctcaatataaaatgtagcaggcattcctcccagcacacacaggttaaagactgcatcatcggttcagtccatgatttttctgttgacacacatctggtgaatacaatgtgctgaagcaatacaaaactaaaacaaggcttttgatggaagaggtctaagaatcataacatactgagtgtgtcagaggaagtcactcgtgctttttcactaaaagaagctttacaggtgggtgggtggaaggggatggagaacagttcacactctccatctcatcctgacctgggacctccttcctgtttccttggctggtgccagcatttccatctttcttacccacttctgccatgttgaagctcagctgggcattgtatccctggaggaacagtggacagagcaggggctttcctcttttgaggcacctacgtagacagactcactctctctactcrgaaaataactgtccctggtgccaggttttggaagttgaaatgttttgagctaatgcctcctgtgattcccgatggcctactgtttaattgtgtaattatagacagttaaaaatgcatgatatgtgatggtgagaaa

SEQ ID NO: 100405 - DNA, 496 bp, Homo sapiens
aatgaggaagctggtaaaaattattccctgcctcataaatcatgttcacacaaaccctcatttcattatctgcttctgaagaacccaatataattgatgtccttgtaaaattataaagttgatacatatgcattttagaaagtaaatagaaactataaaaaagtaaaagaaaaaaatactctagatcctaccactcagaagtaattactgtaagcacatttgtgtgtatcttttttttccatgtgtatgtagtcttctaaattttcaatactcagataacagtttcttttggttatatttttctccaagtctaaagaatttttcttgacatcctcccaaacaatagttttcaactgtrtagtgccaagggacctatttgtggtggagaaagaaagagatggtgttgaaaaataaacgtgtaacccacccccttgtgcagccacatggagtgaggaacctttattatgggggtgtgtctggcatggaaatattatca

SEQ ID NO: 100406 - DNA, 591 bp, Homo sapiens
aaagagttctttcctagtggttttcccatgtgttcctttttaaaatccagatgagccattggaaaggctcatcaggcctctactcccatgagaagggtcaggcttctctgcccacccaggcactctctcagattctaggaagctaatgtttttcccatggaaaacaaaaagagcytgaatgtttttccgactatgtttcagttcttcctgtactgttagggtcatgacagatcaaacattttcaattctggaattttcatgccttggtttagctgcttagtttagtttataagtgaactaaaaagcactgtacattgtccctattttgtctgtagcagtgctgtttataagtgcttaagtcagctcatttattttaattgcttcacagcattttattgtacctactgtgcaaatacttacatatgccaacatgaataaatcttgcatatatgaattgaatgaaaaataaaaaataaaaagataaacacggagagatgccatttaggtaaaaacatacaaagccaccaagaactcaacactatgtgctatcatggatgcaaatagacatagctaaattgtacaataaaaaca

SEQ ID NO: 100407 - DNA, 628 bp, Homo sapiens
tttaattacaattttaatttcttcatagttatagaatatttcagcttttctttcctaagttggttttagtaaattatttcagccttgaamttatttaatgttattggcacacatttttcataatttcttgttaatatcttctatacctatacttatggtcccctttattttctaacttatttatagtttctctttaaaattcttaagccatctttccagagatatatcaagtttcttggtcattttagaaagccagcttttggctcttccttccctccctccctccctcccttttcctctatctcttctctccttccttccttcttccctccctccctccctccctccttccatcctgtctctctctctcacacacacacacacacacacacacacacacacacacacacacacggtcttgctctgttacctgggctaaagtgcagtggtaccatcacagtttactgcagcctctacctcccaggctcaagcaattctctgccctcagcttcttgagtagctgggtccacaggcataacttttggcttcttaagactcaatttgtattatctaggtttatatttcaattttttttgaaaatatattatttcactttaacaaaattttt

SEQ ID NO: 100408 - DNA, 628 bp, Homo sapiens
tttaattacaattttaatttcttcatagttatagaatatttcagcttttctttcctaagttggttttagtaaattatttcagccttgaaattatttaatgttattggcacacatttttcataatttcttgttaatatcttctatacctatacttatggtcccctttattttctaacttatttatagtttctctttaaaattcttaagccatctttccagagatatatcaagtttcttggtcattttagaaagccagcttttggctcttccttccctccctccmtccctcccttttcctctatctcttctctccttccttccttcttccctccctccctccctccctccttccatcctgtctctctctctcacacacacacacacacacacacacacacacacacacacacacacggtcttgctctgttacctgggctaaagtgcagtggtaccatcacagtttactgcagcctctacctcccaggctcaagcaattctctgccctcagcttcttgagtagctgggtccacaggcataacttttggcttcttaagactcaatttgtattatctaggtttatatttcaattttttttgaaaatatattatttcactttaacaaaattttt

SEQ ID NO: 100409 - DNA, 628 bp, Homo sapiens
tttaattacaattttaatttcttcatagttatagaatatttcagcttttctttcctaagttggttttagtaaattatttcagccttgaaattatttaatgttattggcacacatttttcataatttcttgttaatatcttctatacctatacttatggtcccctttattttctaacttatttatagtttctctttaaaattcttaagccatctttccagagatatatcaagtttcttggtcattttagaaagccagcttttggctcttccttccctccctccctccctcccttttcctctatctcttctctccttccttccttcttccctccctccctccctccctccttccatcctgtctctctctctcacacacayacacacacacacacacacacacacacacacacacacggtcttgctctgttacctgggctaaagtgcagtggtaccatcacagtttactgcagcctctacctcccaggctcaagcaattctctgccctcagcttcttgagtagctgggtccacaggcataacttttggcttcttaagactcaatttgtattatctaggtttatatttcaattttttttgaaaatatattatttcactttaacaaaattttt

SEQ ID NO: 100410 - DNA, 549 bp, Homo sapiens
gcttgttattgaccaataacaagagtttctttttcttcctcatttaatctagtaaggttgtatatttccagtaattttccatctcttctagatgttctaatttgtgtgcataaaggtgttcatagtagccttgaatgatcttttgtatttttgtggtattggttgtaatatcccccattttatttctaattcagcttatttggatcttctctcttctttkcttggttaagcttgctaatggtctatcaagtttgtttatcttttcaaataactagttttgtgtttcatttatcttttgtattttttgtttcaattttatttagttctgctctcatctctgttatttcttttcgtctgctgggcttgggtttagttttttcttgtttctctggttccttcaggtcttatacttcttttctatctctttgtccctctatggtaaattctgggtaatttcttcagatatcttccagctcactaattatgtataatttcttgagtaatctatccagtaatttaaaaattttgtgtatttatttacttctataa

SEQ ID NO: 100411 - DNA, 560 bp, Homo sapiens
tcgagatcattgtggccagcatggttaaaccctgtctctactaaaaatacaaaaattagccgggcgtgstggtgggtgcctgaaatcccagctactcgggcggctgaggcaggagaatcgcttgaacccgggagctggaggttgcagtgagccgcgatcgtgccactgcactccagcctggccacagagtgagactgcatctcaaaaaaaaaaaaaaaaaaattgacaattaacctacctaactctttcattacccttaaacaatacatccatttttcatagtaggggccatccaatttcatagtatttttataattataacttcattctgatctctcaaaaagcagagatagtgcaccttccagtgcatttccgttaactactataccagttaaccacaaataaaagattgaacagttgcactgtgaccttgtgcaaacagctggtgctccatctaccactggtaatagttcctcccctgtcagccaggcagaaggtgatctaacttcagaatccttcttagattctacatcctaggatactcctggtatcaaatatca

SEQ ID NO: 100412 - DNA, 560 bp, Homo sapiens
tcgagatcattgtggccagcatggttaaaccctgtctctactaaaaatacaaaaattagccgggcgtgctggtgggtgcctgaaatcccagctactcgggcggctgaggcaggagaatcgcttgaacccgggagctggaggttgcagtgagccgcgatcgtgccacygcactccagcctggccacagagtgagactgcatctcaaaaaaaaaaaaaaaaaaattgacaattaacctacctaactctttcattacccttaaacaatacatccatttttcatagtaggggccatccaatttcatagtatttttataattataacttcattctgatctctcaaaaagcagagatagtgcaccttccagtgcatttccgttaactactataccagttaaccacaaataaaagattgaacagttgcactgtgaccttgtgcaaacagctggtgctccatctaccactggtaatagttcctcccctgtcagccaggcagaaggtgatctaacttcagaatccttcttagattctacatcctaggatactcctggtatcaaatatca

SEQ ID NO: 100413 - DNA, 560 bp, Homo sapiens
tcgagatcattgtggccagcatggttaaaccctgtctctactaaaaatacaaaaattagccgggcgtgctggtgggtgcctgaaatcccagctactcgggcggctgaggcaggagaatcgcttgaacccgggagctggaggttgcagtgagccgcgatcgtgccactgcactccagcctggccacagagtgagactgcatctcaaaaaaaaaaaaaaaaaaattgacaattaacctacctaactctttcattacccttaaacaatacatccatttttcatagtaggggccatcyaatttcatagtatttttataattataacttcattctgatctctcaaaaagcagagatagtgcaccttccagtgcatttccgttaactactataccagttaaccacaaataaaagattgaacagttgcactgtgaccttgtgcaaacagctggtgctccatctaccactggtaatagttcctcccctgtcagccaggcagaaggtgatctaacttcagaatccttcttagattctacatcctaggatactcctggtatcaaatatca

SEQ ID NO: 100414 - DNA, 584 bp, Homo sapiens
caacatggcctatgtatacatatgtaacaaacctgcacattgtgcatatgtaccctagaacttaaagtaaatatacaaaaaagaaaaaaaaaaaaagaagcaaagcaaaaaaaatctatctaccaatttttataaaataatattacttcaatcctttggaaattaagtcatgctttattttccttgaaggagataacatattgaatcccctaaattattgtagatactaaatgagtaggaatgcccaaggagaaaagatacatcaaaaagatatgagaaattctcagatgcagttcatttctacctgacactatttcctagaaaaatatttctgtgatagattttcagtctctcagaattactgacatttatttaatgttctaaaagtctttttaacaaactaaatatcaacttamaaacagaactttcagctgaaaatcacaaagtcatcatggagaaaaaaggagttgatgatgagataaagtgtaattagaattatattataatgtaaaagaggagaattgtattccatacatatatacttacatatatgggtatgataagatgcaataactggagaatat

SEQ ID NO: 100415 - DNA, 584 bp, Homo sapiens
caacatggcctatgtatacatatgtaacaaacctgcacattgtgcatatgtaccctagaacttaaagtaaatatacaaaaaagaaaaaaaaaaaaagaagcaaagcaaaaaaaatctatctaccaatttttataaaataatattacttcaatcctttggaaattaagtcatgctttattttccttgaaggagataacatattgaatcccctaaattattgtagatactaaatgagtaggaatgcccaaggagaaaagatacatcaaaaagatatgagaaattctcagatgcagttcatttctacctgacactatttcctagaaaaatatttctgtgatagattttcagtctctcagaattactgacatttatttaatgttctaaaagtctttttaacaaactaaatatcaacttacaaacagaactttcagctgaaaatcacaaagtcatcatggagaaaaaaggagttgatgatgagataaagtgtaattagaattatattataatgtaaaagaggagaattgtattccatacatatatacttacatatatgggtrtgataagatgcaataactggagaatat

SEQ ID NO: 100416 - DNA, 589 bp, Homo sapiens
ctctgggttagccatagtctgaaaggtttggcctttaagaggtggtaagaaaattctgttatcagaagttttaactgggcaaaactttaaattccattccacttacattttagttgttctgaaaattttttaaaacgctagacaccagaatcaatcaaaattggccaatatccactgtagttccattaatttttttctatgagctctgttttcaatatttatagacaactagggaatctattctggtttattcctgttttaagttatatccacatttcatctttggtagtataagacctaaaatagtctgctaagctttaagtcaaataccatagatacytttaaacaaatattcctaaaaagaatttttgtgcagtcttattgaggtttactctgagtcaaaaactgtgtgtgtgtactttttaagtatataataaaagataaaataaaatgaaatatgacatatcacaatagactgccactgattaatctgttacttcaactctctaagctttcttatgtctagaattcagttgttggattatagaatttctacgttctttaaaagtttacattttagacattaaac

SEQ ID NO: 100417 - DNA, 607 bp, Homo sapiens
ttcagactgcagaagtggtagaaacagtaagagaactagagttagagatggagcctgatgatrtgactaacttgctgcaatctcgtgataaaacttgaataaatgagttgcttcttattgatgagcaaaaaataaatggtttatttgttgagatagaaacttttgtagggaagatgctgtgaacatcacattgttgaaataacaacaaaagattttaatttttttttttttttgagatggagcctcaccctgttgcccagactggagtgtggtggtgtgatcttggctcactgcaacctccgcctcccaggttcaagcaattctcctgcctcggcctccctagtatctgggattacaggtgtctgccactatgcatggctaatttttgtatttttactagagacggggtttcaccatattggccaggctggtttcgaactcctgacctcaagtgatccacccaccttggcttttcaaagtgctgggattacaggcatgagccaccactcccaaccaacaacaaaagattttaaagtgttgcataaacttagttgacacagaagcacaagggtttgagaggagtgacttcagtttggaaagaaattct

SEQ ID NO: 100418 - DNA, 607 bp, Homo sapiens
ttcagactgcagaagtggtagaaacagtaagagaactagagttagagatggagcctgatgatgtgactaacttgctgcaatctcgtgataaaacttgaataaatgagttgcttcttattgatgagcaaaaaataaayggtttatttgttgagatagaaacttttgtagggaagatgctgtgaacatcacattgttgaaataacaacaaaagattttaatttttttttttttttgagatggagcctcaccctgttgcccagactggagtgtggtggtgtgatcttggctcactgcaacctccgcctcccaggttcaagcaattctcctgcctcggcctccctagtatctgggattacaggtgtctgccactatgcatggctaatttttgtatttttactagagacggggtttcaccatattggccaggctggtttcgaactcctgacctcaagtgatccacccaccttggcttttcaaagtgctgggattacaggcatgagccaccactcccaaccaacaacaaaagattttaaagtgttgcataaacttagttgacacagaagcacaagggtttgagaggagtgacttcagtttggaaagaaattct

SEQ ID NO: 100419 - DNA, 534 bp, Homo sapiens
aatatgtaaacaaatgagtggctgtgttcaaacaaaactttattatcaaaaacaagccacagactcaatttgagccataggttgtagtttgcaaacctctgttttagagtggggcaaccacctctcattcatatctaatacctaatcagttatctaattcatatctaatatctaattcatatctagtatcatatctagtatctctcattcrtatctaatacctctcatttatatctaatacctaatcagttatctaattcatatctaatatctaattcatatctaatatctaatcagttatctaataccttaagttatctaatattatacctaatatctaatcagttatctaataccttaagggtacatgtaagattaaaaagaaggtcactgtgactttgttcggcagccaaacttggccaaccttaacttttaaaagactggagcatagttcacttaggtcagtatataaaatccatctcatgttaatcacaaccaagatgaaccagcatcctcagagaagatccataactt

SEQ ID NO: 100420 - DNA, 534 bp, Homo sapiens
aatatgtaaacaaatgagtggctgtgttcaaacaaaactttattatcaaaaacaagccacagactcaatttgagccataggttgtagtttgcaaacctctgttttagagtggggcaaccacctctcattcatatctaatacctaatcagttatctaattcatatctaatatctaattcatatctagtatcatatctagtatctctcattcgtatctaatacctctcatttatatctaatacctaatcagttatctaattcatatctaatatctaattcatatctaatatctaatcagttatctaataccttaagttatctmatattatacctaatatctaatcagttatctaataccttaagggtacatgtaagattaaaaagaaggtcactgtgactttgttcggcagccaaacttggccaaccttaacttttaaaagactggagcatagttcacttaggtcagtatataaaatccatctcatgttaatcacaaccaagatgaaccagcatcctcagagaagatccataactt

SEQ ID NO: 100421 - DNA, 592 bp, Homo sapiens
ctttctttgaaaaaaagagacaaaatactggagaaggcataaaggcctagactttccccctcatttgtgtacagtactctctcttagttggctgtgtaagccagaaatctaaaggactkttgatgacaaaaatggctgaaagccacatggttgtggagccaaatatgcccttaggagagatatttgacttctttcatttaagagaaatggagtacattgaaaagaaatatgctaaacaagaattttgaacattaagcactggcacaaattcaaaatatttaagaattggagacgaaggcctttcctttgaaatgttctctataactgtttctattttaacaacaatactgtgcaatattaaatgatgtttaactgctataaagaattttatttttgtaaagaaagttgttttatttctctcttctatttcaaaaccaaacatcttgaaagtgctgcatatacttagtgtcaccacccctgcacctcccacagctcaacttcctgccatggggattttgttaataccacttcactgagactgctattgccaaggtcaccagtgacctatttgttgccaaatgcaatcgacata

SEQ ID NO: 100422 - DNA, 551 bp, Homo sapiens
tagtttatttacatagaggtgtttatagtattctctgatggtagttcttatttctgtgggatcagtggtgatatcccctttaacatttttattgtgtctttttgattcttctctcttttcctcttttgcaggtttttaatcgcatcatcttcttgagttgtaaatttctaaggaaagttttcctgcacaatatagatattattgtgtgtttgctaatattttctgcaattctagttgtttgccttttcaaatttccttgcagtgtctttcaagagctgaagttttaattttgatgaagtccacattatcttttttctttagtagttcattcatttcttagcatttcttgctaaggaatgtttgcctaaccaatrtcacaaaattttttgtgtgtattttttttagggaattttattgttttaattcttatatggtggtctcattcgttttgagtttatttttatatatgataccaggtaagaagggaggtcgtaattttccatacaaatgtccaattattctagcaccatttattgaaagactattctttt

SEQ ID NO: 100423 - DNA, 646 bp, Homo sapiens
ttgaaacaaaaagtaagacaccatttgaaactcaaaacaattatatttaaaagtgagagaaactaaggggcctaaatggaagacaggtttatgtatttgaccagcagtaacaaggaagcagtgtcgttcatctggggtaatacctggagttcgttgcctcacgccaaggaaatcaaggacatggacacatgtggagtgaggttaagagcrgaggtttaatacacaaaagaaagagaaaagagaatagttgtctctcctgcagagagagaaaggtgccctacaggtctttggttttgtggtgaagtgcatggggttatacagactggcttgaggagatggtgtttgatttacatagggggcaaagattggttggaccaggtgtgacgtttatgtagcacatgaagaagctggccaccccaccctaatcttattatgcaaatgcatttcctacttggctggcgccatgttgtctgctccttactgtgagcaaggaaaagggccgatggagttgccatgttaaacatgtgtggcccccgggtagccttttcctattggcacaactgctgatattcacccatgcaagcttccagcttgcttatctgtgtctgcagctcaattttacagactgccctttgttagaaaagca

SEQ ID NO: 100424 - DNA, 497 bp, Homo sapiens
ggagatggctgaatgaaacaagctggattccatactctagcccttggaaacctttgrtgtgtttattacagtcttaatggggagctgttttgccttgttaagaacttctaaattatccaaaacataatagggctgcacatttgaaaaaattagacaagaggaattatttcatattttaagcccaagagacatcttcaatacctacgtttaatttttattttcactagagatgatgttttgctatgctgcctgggctgaccttgaactcctggcctccaaccatcctcctgcctcggcctcccaaagtgctgagattacaggagtgagccaccatgccctgccaagccctacattttgaattcctgaaaatatattttaacacttaccaaaataagaaaattttaaaaagtgctgaattcttgaggtgagatcacagacacctcccactgtcaagttagactacattcccagtggaattggctaaggatacaaaatta

SEQ ID NO: 100425 - DNA, 590 bp, Homo sapiens
gctatttgtcttctccaagtacatgtatggctcatcactttcaggttcttagtcagttactcaaagatgctttaactaatcgtgttattgaartgaaattgaaactaacctccccaagcccagaaatcacatgtataattatagcttaagtctacttcatagcacattttctctttgccattcattcattcattcgttcattcattcaattgttcctttctttattcatttatttatttattttctttgtcttctcactagactataagctacataacagcaagaggttttgtctgtatgcttcactgccatatactaagtacctagcattcaatatatagtagattatttaatatttatggaataaataaattagtggaacttattgggtataatattctaattatgaaagttaatttcttctgtatcatatcagagactactacatatattgctaactatatgatctttatttttattttgcatttttgcctaactgcaaactctctgagagcaagagctatcttattcatttttatgtctccactacaatactgggccacattccttgaacttaatatatatttata

SEQ ID NO: 100426 - DNA, 590 bp, Homo sapiens
gctatttgtcttctccaagtacatgtatggctcatcactttcaggttcttagtcagttactcaaagatgctttaactaatcgtgttattgaagtgaaattgaaactaacctccccaagcccagaaatcacatgtataattatagcttaagtctacttcatagcacattttctctttgccattcattcattcattcgttcattcattcaattgttcctttctttattcatttatttatttattttctttgtcttctcactagactataagctacataacagcaagrggttttgtctgtatgcttcactgccatatactaagtacctagcattcaatatatagtagattatttaatatttatggaataaataaattagtggaacttattgggtataatattctaattatgaaagttaatttcttctgtatcatatcagagactactacatatattgctaactatatgatctttatttttattttgcatttttgcctaactgcaaactctctgagagcaagagctatcttattcatttttatgtctccactacaatactgggccacattccttgaacttaatatatatttata

SEQ ID NO: 100427 - DNA, 590 bp, Homo sapiens
gctatttgtcttctccaagtacatgtatggctcatcactttcaggttcttagtcagttactcaaagatgctttaactaatcgtgttattgaagtgaaattgaaactaacctccccaagcccagaaatcacatgtataattatagcttaagtctacttcatagcacattttctctttgccattcattcattcattcgttcattcattcaattgttcctttctttattcatttatttatttattttctttgtcttctcactagactataagctacataacagcaagaggttttgtctgtatgcttcactgccatatactaagtacctagcattcaatatatagtagattatttaatatttatggaataaataaattagtggaacttattgggtataatattctaattatgaaagtwaatttcttctgtatcatatcagagactactacatatattgctaactatatgatctttatttttattttgcatttttgcctaactgcaaactctctgagagcaagagctatcttattcatttttatgtctccactacaatactgggccacattccttgaacttaatatatatttata

SEQ ID NO: 100428 - DNA, 451 bp, Homo sapiens
ggattccccatctctgtaggaggaatctgagtttagctggcttcactgtcgctgactaaagtggcctggaatctggaacaaatttgagcagcagtcaggccacaagaactgcagtcattgtacaagctctaatgtttttctggtctcaaagagagtggacttggggtatgtgtaacctagcatgacaccagctgaggtagccaagggagtgcttgcatcattcctcctccaactctagacaatgcagctcagtgagagactccttgtgcttgcggtaataagaggaaagagtacagggaacttagtattgcaacttgtgtactagctcagccamagtaaaataaggcatgaagcagattcctgaagcctccaatttcaggccttagcttctggatggcatttccagatgcaccccaggccagaagaaaatcaattgcctttaaagaaagaa

SEQ ID NO: 100429 - DNA, 578 bp, Homo sapiens
gacctggtgtcaattattattcagkgtagaatagtgagtgaaaatattgatatgctaagaattagaataatttctaaaaatagagctttaatttgtgtacacaaattaattgacttcaagtctacatagtagactacaaattgacttcaagtctacatagttgttagagagatacttggttttccagcttactttgcagataagagtagttgtatgagtcaattttaaccagtggtatatatgcagacgtcatctggggggcttgttggaaaagtcttgctttcttttaaagtatcaagcatgaaagaaagttgcttaacttgctccttgtatcccttctccctgactcaataatggacatgacatctacagcactaccttcttccaatgatcatgaggcatttagcacaaacacaaaccacctgcactatagggattatgacacagatcctgggttgaattcataactgagtcattacacaaaacctaaaattgcctataccttgttgtcttgttatgtaatttaaaatggctttatatttgcaataagttttagtttgttactttctcctgaatgc

SEQ ID NO: 100430 - DNA, 578 bp, Homo sapiens
gacctggtgtcaattattattcagggtagaatagtgagtgaaaatattgatatgctaagaattagaataatttctaaaaatagagctttaatttgtgtacacaaattaattgacttcaagtctacatagtagactacaaattgacttcaagtctacatagttgttagagagatacttggttttccagcttactttgcagataagagtagttgtatgagtcaattttaaccagtggtatatatgcagacgtcatctggggggcttgttggaaaagtcttgctttcttttaaagtatcaagcatgaaagaaagttgcttaacttgctccttgtatcccttctccctgactcaataatggacatgacatctacagcactaccttcttccaatgatcatgaggcatttagcacaaacacaaaccacctgcactatagggattatgacacagatcctgggttgaattcataactgagtcattacacaaaacctaaaattgcctataccttgttgtcttgttatgtaatttaaaatggcyttatatttgcaataagttttagtttgttactttctcctgaatgc

SEQ ID NO: 100431 - DNA, 533 bp, Homo sapiens
tcctcattattggtagattttctatttttwaaaaattttaaatctagggggtacatgtgcttgtttgttacatgggcactagatgaataatggtgggggtttggcttctagtgtgctcatcacccaaatattgaatattgtacctagtagttaatttttcgaccctcacccccttccaactcttctccctttggggtatccagagtctatttttttcatctttatgttcatatgtatcccttgctctcacttataagtgagagcatgtgatatttgattttcttcttctgtcttagttcacttaggataatggcctccaccttcaacaatgttgctgcaaaaaatatgattttattctttttgatggctgtgtagcatttcatggtgtaccatattttctttatccaataaactgttggttaacacttagattgtttccatggctttgctattgtatatagtgctacaataaacaaaccagttcaggggtcttcttaatagaatgattttttcctctctaggtggacacacag

SEQ ID NO: 100432 - DNA, 533 bp, Homo sapiens
tcctcattattggtagattttctattttttaaaaattttaaatctagggggtacatgtgcttgtttgttacatgggcactagatgaataatggtgggggtttggcttctagtgtgctcatcacccaaatattgaatattgtacctagtagttaatttttcgaccctcacccccttccaactcttctccctttggggtatccagagtctatttttttcatctttatgttcatatgtatcccttgctctcacttataagtgagagcatgtgatatttgattttcttcttctgtcttagttcacttaggataatgrcctccaccttcaacaatgttgctgcaaaaaatatgattttattctttttgatggctgtgtagcatttcatggtgtaccatattttctttatccaataaactgttggttaacacttagattgtttccatggctttgctattgtatatagtgctacaataaacaaaccagttcaggggtcttcttaatagaatgattttttcctctctaggtggacacacag

SEQ ID NO: 100433 - DNA, 591 bp, Homo sapiens
ctagttgaatgattttctccaattgcacacagcaatgcagatgtaggattattatagttttttaatttttttccatctttctgtttatctttctcttttccggggaggatctttgtgactgaagtaaggcatgaaaggggattaagatgctggcaagaaaatatttaaatgtaaataataggatgcagaaggtaagttagcttagctgatgcatagtctgagaaacactgcctgtcatgaaagcataattctatgaggtctagaatttatgagggagagtgagaaagagataaaaagttatgaggctgtgtccaaagactatagtattgaattttattatttatatggtgaagtaactttgtggattagaatatctaggtcagtgtttcccgaagtgtaagcaggagcactacctgaatcagaattgcttggggtttttatgattatgcacattctagagccctgttccagacccaattctctgagggtgatgtstggggatcattattgttaacatagaaccagatgattgtaacaacagttgaaaaatctctaataataattgcgatcactaaggacatggcagaagct

SEQ ID NO: 100434 - DNA, 560 bp, Homo sapiens
tgtagtctatcgctttctttagctctattaatgattgttttatataatgggtgctctggtgttgagtgcataagtacttattattgtcatattttgtggctgaattgaactctttaccattatgtagtgaccttctttgtctctgtatataatcttagatttgcagtctattttttccgatataagaaagctattgctgctccttattggtttctagctgcatggaatatctttttctataccttcagtttcagtctatgtgtgcctttatagatgaagtgggtttcttgaaggttgcatctagttggtccttgtttctttatccattcagccatgccttataactggagaacrgtgatcatttacattctgtgttattaatgataagtaagaacttactacagctaatttgttgtgttttttggttgttttgaggcttcttttttattttttttttcttactgtctaccttgtggttatgtaattttctctggtaatatgttttaattggttgctttatattttcagagactctattacaggtttttgtgttgtggtta

SEQ ID NO: 100435 - DNA, 560 bp, Homo sapiens
tgtagtctatcgctttctttagctctattaatgattgttttatataatgggtgctctggtgttgagtgcataagtacttattattgtcatattttgtggctgaattgaactctttaccattatgtagtgaccttctttgtctctgtatataatcttagatttgcagtctattttttccgatataagaaagctattgctgctccttattggtttctagctgcatggaatatctttttctataccttcagtttcagtctatgtgtgcctttatagatgaagtgggtttcttgaaggttgcatctagttggtccttgtttctttatccattcagccatgccttataactggagaacagtgatcatttacmttctgtgttattaatgataagtaagaacttactacagctaatttgttgtgttttttggttgttttgaggcttcttttttattttttttttcttactgtctaccttgtggttatgtaattttctctggtaatatgttttaattggttgctttatattttcagagactctattacaggtttttgtgttgtggtta

SEQ ID NO: 100436 - DNA, 569 bp, Homo sapiens
agatgaataaatgcatatgaacataacgtgtataaagttgttatttgaaatatactttacatatttctatttgttttttattctacattttcctctatcattgatgattttattatgtttttgtatatgtatatatgaaatatacatctatctatctatcatgtatctgaaatattaatctgtttctaaacatatgtactgtaaaacatggcaatcttggaaattttactcccgtcttattccttctattctagtctgtcttcatccttgcccatccattatcacacrcccatgtaagaaagcatctcatgaattttaaaatttattctttccctactccttttacagagatgagcagaaatgggtatatactttatttttcctgatatatagagttatgtgctctatatatcaggaattttgctatatatcaggaattttgctctatgtatcaggaaatatatgctgaattttgttcccccaaaattcatatgttgaagagctaattctcagttccacagaatatgaccatatttagaaatagggcctctaaagtggtaattaagctt

SEQ ID NO: 100437 - DNA, 593 bp, Homo sapiens
caggcctatcccattatgctgctttctctttctggagggtaactaccaaatttcaaatctttttcgtccttctgcatctcattctgctgaaacaatcttttttgagacagggtctcactctgccacccagactggaatgcagtgacgtgatcttggctcacggcaacctccgcctcctgggttcaagcaattctcctgcctcaggctcctgagtagctggaattccaggcgtgtgccgttactgcccagctaatttttgtgtgtgtgtttttagtagagatggggtttcatgttggccaggctggtctcgaactcctgacctcaaatgatccacccaactcggcctctcaaagtgctggaattacaggtgtgagccaccacgcccagcctgaagcaaccttttatctaggactaatgaactaaktatattaaagttttagtgagtaattatattagtagatatttagggaatgtaaaatgtttacattttaataggttttcataagtttcttctattcagtaaatgattctaatagaaatgtctggtactatggtagaataaaggagtacttaaatgtttttttaaattttct

SEQ ID NO: 100438 - DNA, 551 bp, Homo sapiens
ccaggcttccaattacaaaaaaaaaaaaaatctaatatcaatcagaaagcttttgacaggagataaaacagaaactcaaaaactaaagaaamatgtatacattaacaaatgtaagcatcagcaaaatcaggaaaagggaccagataccttgtcttttactgtaatgctttttcatttcattatttaacacaagtatgtgaaagaaaattaaattaattgttagttgataaaggtaatcactatctctgtcctcctttccatttttacataagaacgcaactaaatatgcactctttaaatatatattattcatctgtccccaaccttacctatatacaatttagaaacataaaatagtcttaggcaaaaataatgattatatgaagaagatcatttaaggattccttaaaacaacttgttggaataaaaaagaacatgggatttgggaagacatctgatttcctctcagggatttagaaaactagaaaaagcattacttccagtcataaaagaaacaaaacaaaacaaaactggacaaatgcaaagtcatg

SEQ ID NO: 100439 - DNA, 487 bp, Homo sapiens
acatgcagaaaaccaagaatcacagaacattttttcagcatccgataggaaagacagaggccaaacaaacagaaaaaaaaaatgaaattcagagaaaacagggagaggaagaaaacaaaactaaaaactgttgttagaattctcagagagctaagatattgcatccatgaaacaagaacaggatgctttttaaaaatagtagtaggagcaactatgaaaaagaaggcactttcaaaaattaagaacatgatagccaaaataaaaaaaatcaaatgaaagcattaggaaacacaggccaaggacaaaagccagcaaaatagaaaacactgctatatttcattgtatctcttttagtactatttgatttgttaactatgttcatgtattactttgataaatayaattttaattagtttaaaatatatacttaaaaattaaaatcccagctctgccactaattagctgtgtgtcatcagataaattattt

SEQ ID NO: 100440 - DNA, 526 bp, Homo sapiens
aagaggaggtcttcctcaagcaatggaataagtgcctggagataagctgggaattatggttcaaagaaatgtattcagggctcatcagcagatggctggtggccctgcctgaaggatcgtgaagagtgagagaggaagagggagggcatcatcagtgaaggctggggcagagggacagaggcctgaaaccaacggagattcaaggytgtacaggtggatgaaaaccctttgtctgtgagataaaggaagagagagtttcaggaaggagggagcgacaaagtatatctcatggcaagaggtattatgaaagaaggacaacgaaaaggtccgacagctttgagaaaagggggccacgggtgtcattcctgaggtggtttctccaatgattggaaccggaagccatgtgggaggacaggggttgggagaagggaaggaagtgaacccagacagctttccatgaagcttgactgggaaggaaagaaggaaatagaactgaagctggagagtgaagtggggattagggtag

SEQ ID NO: 100441 - DNA, 526 bp, Homo sapiens
aagaggaggtcttcctcaagcaatggaataagtgcctggagataagctgggaattatggttcaaagaaatgtattcagggctcatcagcagatggctggtggccctgcctgaaggatcgtgaagagtgagagaggaagagggagggcatcatcagtgaaggctggggcagagggacagaggcctgaaaccaacggagattcaaggttgtacaggtggatgaaaaccctttgtctgtgagataaaggaagagagagtttcaggaaggagggagcgacaaagtatatctcatggcaagaggtattatgaaagaaggacaacgaaaaggtccgacagctttgagaaaagggggccacgggtgtcattcctgaggtrgtttctccaatgattggaaccggaagccatgtgggaggacaggggttgggagaagggaaggaagtgaacccagacagctttccatgaagcttgactgggaaggaaagaaggaaatagaactgaagctggagagtgaagtggggattagggtag

SEQ ID NO: 100442 - DNA, 539 bp, Homo sapiens
actgcttggggaagtttcttctggttttcttctgttaataaaacaaaatttggcagggccttgatcttaaatagaaactaatgcctgtaggtattaaaagaataatttaatatggaagaagtctatatttaataaatgtttatagtgcatattttataactacttttttcgtagtctttttttagaactgttgttctaatatttttcaaagattttagaatcaaatgacattaagttgtgattccatccagctgctgctttggatgggctaagattttctgcctagcctatacctctgggaaaactttttctttgtatttctcagatatgttaattgattgcgtttgagtagtcctcctcctcttttgctgtatcttgtggtaagactttagagcctcttttcgcagtttttctgaactttttcttttttctgggtctttgctggaaggtttctgaagtctctagaaagattgtaacttcagcatgttcaatgataatkcattcaacgaactcctaatctcctgcaatcccataacttt

SEQ ID NO: 100443 - DNA, 658 bp, Homo sapiens
aatacaatatgtgtcatatactcatttagggctttataaaccttgagagatagtttgactatattacactattccatcctcagtatatctttgagtggtaggcaaatattatcctagtaaacgagatgtatttaacgcaaatttattcccccaaagacaatataattggcatttaatgtcctcctttaatttctgccacattctcttacaaattttaccagcttcctamagccaaactgaactcctcactgctccatggctgcacatctcactttcacgttgccatacctgtggcagagacattgttatgtgctcatcaaactcatttccttcttctaggaacccagctcaaactatatctcccagtgctttttgcagataaacaaggccatgtgaccatgttctggccaatagagtgcaggcagaaatgatatactcaacttttatgcctgtcctccaaaatctcccactcgatctgccacataagcgctctgcttccatatctttcttcccctgtctccaggccagatacagaagacacagtggaggatgccaagacctacactctctaggtttgagatcctgcctcatccgtgggaagaatgcctcctgaatattgaagtgaactgccatgtgggcaagaaatataacattcctc

SEQ ID NO: 100444 - DNA, 604 bp, Homo sapiens
ggctagtaggcccagaaccgcaatacacagtacccagaaggtgtcagaaagtttttcttgagatttgcaaataaggcagaaaggtaggtggcatgttgtttctgtcacataaasgcaaagccaaccaaaaggtatctagaataaggtatttagttcatcttactctttgatgttgattaaagggccaaggtttagcaaggctgtttagttaacttgcagatttttgtctggtgtgaaaaaaaataatttttatttggcagaataggcaccctcgtaaattcataatctcattagacatcaactagatttgcttctaacacagccattttattgaaacattgcctatgtatatctaactttctaaatgctctttcaaccagtcataacttcttactgattccctcattattaatgatttaaatagaaacattggcatatgctcaatttatatttgcacatgactaatacttttacctttggaaaattatatattaacaaggcattacaaattttggtacaattaatttcaacaccttcaacatataggataataaataatactcctaactctagaaaggaaggaggaatctaagagatataaaat

SEQ ID NO: 100445 - DNA, 571 bp, Homo sapiens
  misc_feature (1)...(571): n = A,T,C or G
aaaacttgctggttttgtggctcagttgggcatcatggtcctactgataygtgatgtcacccctggagtcccagctgtaaaattcctctctttgtactctttctcttcatttctcagatcagccaacacttagggaaaatggaaagaatatacgttgaaatattgcgggcgggttcccccgataagcaattcatttgggaatgccatcatccatttgaatttttgatttttaaaagtaaagatcaagtgctgagcatttcccaagagaccaccatagtctcactgcatatgcatgacagaattctccacctagttgggcttctcttgtaagttcatatctgcccctacatgaggcaaacaaagcaagtaacttggcaagacgaatttctgatctgaaacataaaataatgtactanacaacaacaaaaaattgccctaggttgtctttaaggaattcttaatggtctagatccttgctagagagctactgggtgcaagagagacacctgattcttaagtgaagtttttctcatttaactgaggtaagcacagttccatctatattgagatg

SEQ ID NO: 100446 - DNA, 536 bp, Homo sapiens
acattacccatttggtattggaaaaattatagagatgtttttcacaaacagaagataatctctttgttttttctggggcagaaagaataactgaggaaataaaaaataaagaattataacagaaagtccatttagatagtaggaagaatcaagtttgatctagatctcaagggagtctgtgtattctaaaatgcatgagtcattttcattttttaattttagcattaattttgtgttttcatcagttacttcattttcctttgaaggtgtgatattctgtcaagttctataacacggatgctggttttctactgcaatttgcttttaaaatgtccagtggaaaraaatgctaaagaacgttataatgagtgctttgtcttagtgatgtttaaaagaaccttgcctctcaaagaaactgcttaaaacaagcctgtggagcaaatggtcatgcaactttaaaatgctgccagtaaaatagctaagtaatctcaagaaacccatctgaatgctaaccacctagaccagaaaactcaatc

SEQ ID NO: 100447 - DNA, 505 bp, Homo sapiens
aagtacatgatttcaatgttgaggggtatatacctagaagtggaattgctggattatgtggtaattttatgtttaattttttgaggaaccaccataatgtttttcacaatggctgtaccattttacatgcccaccagcaatgcacgagggttccaatttctccacatccttagcattttttactcaccaaggtcaaccattttatatggaaatctttytaaaatgtttcactcactttccagacttcttagaagaaaactattgaataaaatttaatggcttttttcatttaatgacttatgcatattgatgtccacctcaggaactattgcaatatatctgtatttgagatcttgctatgtgctaggtactgttttccagttgtttccatagaatagatcaatcctttcaaaattctgtaaagtgttatccccatttaacagataagtaaatgaggtacatagaggatttaaaaaaaaaaaaaaaggctgggtgcgttggctac

SEQ ID NO: 100448 - DNA, 554 bp, Homo sapiens
agcaaaagagacaagctgtttaaaggaaggattaaggcaaataagaaaatacagtgaaggatatacaattgataaatcaaaaacattaatgcaaattatgagttaaatattactaaatattgcaaaaaattacagaaaagtgtatacgccacaactctgtcatgtaaacagtgaattttttcttcctatttttcaccaaaaaaagtcatgttaaatttatagatggaaatctgcaactttatttcctttaaacagaatattatggaaattcttcaagtgtaattcatacaagtccccaatttaaaagcagctgcctaaaatgatgtatctgtggctgaaatcaaactagtagacagtggtattcttgtgccaattatgtacaatccatgtccactctgattaatgcattctatttagtcagcaccagggctgcactgttgtttatttttgttattgcttactatttttactatcaacccagcgtgtatcttaacttattaatcatatggatactcaagtggtttytaatttgttgctctttaaccccacactga

SEQ ID NO: 100449 - DNA, 461 bp, Homo sapiens
ttcctggcttgtagacagccaccttctccatatgtcctcacatggcctttccttggtacatgcacaggagagagagagacagagagacagaaagacacacaaagagataaagagagacagggagaaaaacagggagagagagacagaaagacagaaagtgcacacaygcgctctctggtgtctcttataaggatactaatcctactggatcaaggccccactcttatgacctcgtttaaccttaattacttcctaggaggtcccatctccaaatacagttatatttagggttagggcttcaacatatgagtttaaggggacacagacattcattccatggcactgcctttgactgaacctactgtgatgcctttggctgagtccctgagatagtaaggggtcctgaaaagtgtcctgagatgcagaaaagggggagaggtagaataggttaacttgcacat

SEQ ID NO: 100450 - DNA, 672 bp, Homo sapiens
aagtagaagtatacttcagtagttaagagtgtagtctttacagttagaccgacatgggttcaagtccaagccttcctagattacttagtttctctctatatttccccagtgtaaaataaagatggctagttctactttttaagaaaatttatagaattaactcagccaaaataagttgtgcctgatatgtaggaagtacttactatacacttccttagttcaaagcttggtggactatgttgacwcctgaatcttaatgatttatttcacctggttccaaattccacaatggtattgaccaaaactaatgtctgcctctcaccctaaaatctccaacctggtttatttctacttttgcctaactcctacccctaaatctacaatcttctgctctcaatagtcccaagtaacagaatttagcaagtttgagaagtgagtcagactctaattcttttttaatatagaccatgctatgtaacgtaaactttatatatagagatggctgtttgtagtgataatgtttttattttttgaaagtaataaatataaataacatataaaggaataaagcaaaaaagaaaaaccttagaaacaaaaatcatcatctttccaccacctaatctttttaatcccactccttaacagtaatttcaaaacaatgttaaaagatag

SEQ ID NO: 100451 - DNA, 469 bp, Homo sapiens
taactatttactttttacatgtatagcattactgaaaacttacacagagatggtatctgtgcttcatatcattttctcatagacttaatatgtgatttcagatacatgtttttctatttgagtagcagggaaggaaataggagaacaagatttcataagtaaacattttaatatttatttctataaaatcatacatttatcagtttcctgtgtattgaatttatttcttcctaaatgcagtatatcaatgacaccaaatccaaatgcatttcacacattcactgaaaccaaataatttggttttyatatgtagttttcagtgatcctatagaacctgaatgttaaagcagtcacaatatttcatgtattcttgttttaatttttaataataaaatattgcaaacaaaggaataactgaaaactataggccccattgatgcccaggagatattaatatttttctatattt

SEQ ID NO: 100452 - DNA, 469 bp, Homo sapiens
taactatttactttttacatgtatagcattactgaaaacttacacagagatggtatctgtgcttcatatcattttctcatagacttaatatgtgatttcagatacatgtttttctatttgagtagcagggaaggaaataggagaacaagatttcataagtaaacattttaatatttatttctataaaatcatacatttatcagtttcctgtgtattgaatttatttcttcctaaatgcagtatatcaatgacaccaaatccaaatgcatttcacacattcactgaaaccaaataatttggttttcatatgtagttttcagtgatcctatagaacctgaatgttaaagcagtcacaatatttcatgtattcttgttttaatttttaataataaaatattgcaaacaaaggaataactgaaaactataggccccattgrtgcccaggagatattaatatttttctatattt

SEQ ID NO: 100453 - DNA, 538 bp, Homo sapiens
tttgcagctatgatttgattggatcttttgagctgaaaatactggatcaatcatggccaagaagtcaaggggctgacctccgtaggtcacttaaattcaacatattttttcccagtcactgcctttcttctagagtgtatgcaaattggataacagtgtccactttaaagtgtttccagaggccaagagttaagaaatgtattttcctactggtgaatttactttttaagaatcatcagattatgttttagtagcaactgatttcccctttaaacgcttgaaaaatataataagggctcagttgcagatatgggacagtttttttctcatcccaggcctctggtttgtgtaatgtgttagtttggaagccaactkgtacccgcttaaataataaaaagaatttgctagtgcacatgctgaaatgtccagagtgttggcagactataggcactaattaattgggtttctatttcatctttcagagatttttttggtgtttcctcttaagcttgttgaccatattccctcaagggctcaa

SEQ ID NO: 100454 - DNA, 587 bp, Homo sapiens
agtagtgagtgaaatagcataaaatcagattataatttttctcctaattttaggattatgatttggctttgagtagcaaagactcagaaaaaaaaaaggagcgcttaacccagttagatgtctgtgtctctttctcttaagtctggtggtggcagtccacagccggtgaggtgaaaacttaatttgttaagctcctgctcagccatttctgagayatggcccttcttctcaaggttcaagataacaatatctggagctccagattttacttccgtgttctccatagcagaaggaaagagcaaggagaatgaggcagaggatgtgtactgctgccacacatgttgattccatgtacacatcttagccacgactcagtcacacagcatactcagttgcaagactgttggagaaaatgcctgctttgtcttggtccacagctaaaagttgagagttctattgttattaaacaagaggagaatggatattggagggcaagcagcagtctgtaccctggctgcttctacagaagggatgtgttaagtaagcaggtctaggatgtatgcagtatgcaaggcccagcagcccga

SEQ ID NO: 100455 - DNA, 587 bp, Homo sapiens
aatgtatgtcagactgacagtatcttcccaggtgaggggaggtggttggaaagccattagcattggtagaagtccaggtaaggacacaaagrcctggtgaggagtgagtaacaggtgaataccctgctttgcaggcacagcatggtttcagaaaatcttaaaaggaacaactggccattgtccagagaaataggctaacagcaccaagcaaatctagtgagaatcaacagaccaaagtccgtgggtaaagaggaagggaacacagatatctgtccagtgcttggaagtgagataggacaccaaacagaacactcctggagaaatcactcaaagtagaaactcggtaacgagaactgggtggttaggcaaaaattgcttaacaaggaaaatgcaagagatggttatgaaaacaggttatgtacaaaaaagaactgattatttaaaaaataacattaatctacgggaatcaggtactaatgttatcaaaccactgaattccttgatagaatatttttaaaagtctccctagctatttgattccgaaatctgtggtagtgctgagcacgtacattaagcttacttagcat

SEQ ID NO: 100456 - DNA, 628 bp, Homo sapiens
acattgtaggcactctcccaaatcacgtgttatttcaaggctgtgtgatctcaggcaacccagttccctttgctgagcctgtttcttcatatgtagggtgtagataattacacyaatcattccaggatgttaagaggatacagctaatctggggagagaatagaccagtaaatgatggggttgttttcccaaggttgtgtgatcttggtaaagtcttggctaccctcgagtcctcagttttcccatttgtgaaatggtgatgatcatggtcaccattatggactctgtggggattggagaggatgtgcacagagttctggatggtgatggtgttagggttattactgagtgtcagtagcacagtggttaggagagcatgggttggagccccatcacctgtgccacatctcagctctgacatttcccagctctgtgatctgggacaaggcactccaccatcgtgggcctcggtatccttaccagtcaattgtaacttgacttgggaatatcttctccaactgtatgtgttgtttgtttactctgctgattatttattttgctgttcagaagctttttagtttaattaggtcccatttattcatttttgtttttgttgcatttgcttttg

SEQ ID NO: 100457 - DNA, 627 bp, Homo sapiens
tctgtatcttttaagtggagcacttaggccatttacattcaacattaatattgagaagtgaggtactgttctcttcatcatgttaaatgttacctagataatttttttttcattgtgttattgttttgtaggccctgtgagttttaggcttccaagagattctattttsgtgcatattgggtttttgtttcaaggtttagaacaccttttagcatttattgtagtgctggtatggtagtaacaaattccctgaacatttgtttgtctgaaaattactttatttcttctttatttattaaacttagttttgcagggtacaaaattcttggctgaaaattgttctgtttaaggagattaaagagaggaccccaatcccttctagcttgtaaggtgtctgctgagaagtctgctgttagtttgataggttttcctttgtaggtttcctgatacttttgtcttactgctcttagaattctttccttcatgttggctttagatagcctgatgactatatgccttggtgaagatgtttttgcaatgaatttcccagaagttctttgagcttcttggatttggatatctagatctctagccaggccagggatattttcctcaattattccctca

SEQ ID NO: 100458 - DNA, 627 bp, Homo sapiens
tctgtatcttttaagtggagcacttaggccatttacattcaacattaatattgagaagtgaggtactgttctcttcatcatgttaaatgttacctagataatttttttttcattgtgttattgttttgtaggccctgtgagttttaggcttccaagagattctattttcgtgcatattgggtttttgtttcaaggtttagaacaccytttagcatttattgtagtgctggtatggtagtaacaaattccctgaacatttgtttgtctgaaaattactttatttcttctttatttattaaacttagttttgcagggtacaaaattcttggctgaaaattgttctgtttaaggagattaaagagaggaccccaatcccttctagcttgtaaggtgtctgctgagaagtctgctgttagtttgataggttttcctttgtaggtttcctgatacttttgtcttactgctcttagaattctttccttcatgttggctttagatagcctgatgactatatgccttggtgaagatgtttttgcaatgaatttcccagaagttctttgagcttcttggatttggatatctagatctctagccaggccagggatattttcctcaattattccctca

SEQ ID NO: 100459 - DNA, 627 bp, Homo sapiens
tctgtatcttttaagtggagcacttaggccatttacattcaacattaatattgagaagtgaggtactgttctcttcatcatgttaaatgttacctagataatttttttttcattgtgttattgttttgtaggccctgtgagttttaggcttccaagagattctattttcgtgcatattgggtttttgtttcaaggtttagaacaccttttagcatttattgtagtgctggtatggtagtaacaaattccctgaacatttgtttgtctgaaaattactttatttcttctttatttattaaacttagttttgcagggtacaaaattcttggctgaaaattgttctgtttaaggagattraagagaggaccccaatcccttctagcttgtaaggtgtctgctgagaagtctgctgttagtttgataggttttcctttgtaggtttcctgatacttttgtcttactgctcttagaattctttccttcatgttggctttagatagcctgatgactatatgccttggtgaagatgtttttgcaatgaatttcccagaagttctttgagcttcttggatttggatatctagatctctagccaggccagggatattttcctcaattattccctca

SEQ ID NO: 100460 - DNA, 651 bp, Homo sapiens
aggggtgaaggggcacagcaggtttccatttagtgagcacttctcctgtgttaggtgctgtgcctacccattgacaggcattattttatgaataaacattcaatggagtgctcacagtgtagcctcctgttcagatgaagtcattgagtaatcttccaaaacaagtaggcctgatattaaaaaactctggccaaaaataaaaacaaaaataaaaaatgctgtccatcaaacttctcttgaaccattgttcctgcaatcttgtgtgcatgagaatcaccaccggaagtgtgtatgtttggggcaacccaaccacttactccaatgcagatttccaagtccccattccctgcaaaatggatcaaattgatctggaatatgatcatgctctccaggtgatcctaatgcagacagttcatgaaaactgagtgatgacacaatactacctttacagaggagggccagccagagagggagggagtgctgatgagtgagtaatgaagactagagatggatatgcagtggtctgctgaagccagctcataccacttgcaagagccaaatgttaaaattraaggaattttgtgcatcatttgttgaacagagccattatttaaaaaataatataaatgatataaacttgcaattgaattg

SEQ ID NO: 100461 - DNA, 597 bp, Homo sapiens
tgcttcctactgatagaggggtggtggtkgttgttttgtgggtcttcacctcttgctagctgtcagggtaggatggctccatgggttggtaaaaacagtatccagccaggctggagggagaaaggggtggaattaagcctctgtcatgtcttgttgatgggaagtctaggggtcctctgtagaagggtgactcttgaatactgacatgatggtgtctctcactgaggatcatctggagcttgatggcctgaaggcaagaggagacgaattagtttattagatttagaagaatgtcaaaatgaaataagggagtgaggacaactccaaaaaatcctgacgctgccaacacactcaggtaactggtggctattttcgtgcctgctaagacttgtgtggatggggttacaagccaattccaatgtgttcccagaattagaatattgatccagatttttacattacccattcctcttgtttcttctgagctgtggccagagatcactggttggttcacaggaataaacagggttagtctaaattgcagacaaaaactcaaaaacaactgctgagaatagaatctaataccaagttattaga

SEQ ID NO: 100462 - DNA, 598 bp, Homo sapiens
agctgctggaaacttttaagcagggaagttatacaatctgatttacattttgaaaatggctcgctgtttgagtaacaaattctaagtgggcagatgcagagrcaggaagaccagttaggaagtgactgaaatggtccatgtgagagaagttagttggtggcttagtttagggtagtggccaaggcagtggtgaggagtgggtgggttccatgtataacatgaagatagaattgatagagattgctgatgtgggatgtgggaaagggaaaggtcaagattgcaaatgaatttcatttaacaaatattgaggctatttctgagataagaaagactgggaggaaaacagggtgggttttttttttttttttttttggcagggggaggagagagggtcacaagtttggaaatcatatcatccaagaagatatgattatagattataataaaagattagtgtactgctgtgaacatctgtgtcattttcagagctaccaccgtggattcctgagcaacttaatgcatgctgtaaataaagaggctgacccacatcttgtggctaaagaacaaatcaaacatcctttgtgacatttgtctgaaa

SEQ ID NO: 100463 - DNA, 592 bp, Homo sapiens
gtctggaggatggtgctccactaggcagtgccccagtggggactttgtgtgggggcttcaaccctacatttccaggccccaaytgctgtgtatggaaatgcctggatgtccaggcagaagtttgctgcaggggcagggccctcatggagagcctctgctagggcagtgcagaagggagatgtggggaggtacaattcaagatgagttttgggtggggacgcagccaaaccatatcaagtcccagtgactacagtttggttttccaaatttgtttcctatttctttctttcctgtcctcttcctttccaatactttcatatagcctcttgttccttcaggttctgtgcactttatttatactctcccctctgccagaaatgtttttggtactttttaggattaggttaagttatgagtgagagaaaacccagtgtaaggggcccattgaggttgcaccagagcccctgtgacccgtttaatcatctcccacagcttctgcacatcgagagaagcaggggcagcctttagctgaactaggtaacagcctagttccattgtctgaaatctgggcaaactgtgaggtgtagtttac

SEQ ID NO: 100464 - DNA, 570 bp, Homo sapiens
aggcttttgagctggggagtgacaagatccactctaaaaccaaggtgcagagggtagactaaaatgaggacaataggaggtgggcaggctgtgtaaaggctgctcaactccaccaaggaggctgtgactgatgggggcaggggctccaggagccccatggggtctgggcatgggtgcttgtccccagccagggagctctaggcctgygatccacactggccccccacaggcaccgaccggcagtcaagcaggctgttacaagtggtgtaacagctacaggatgaagcccggaagcttccatccaccagggagctcctgccaggagagaaatgtggctgtccggaaggccaggctagaaggatcctggaaaaatctgctctgggagccagaattgggctcaagatcatagctgcagggctgccaagaagccaacctaacccatctccaggccacacatgtgtggggtggtggacgtaggtgtgtgagtataaaattcaacaaaactgctttacccagagcactgacgagagccagccaggtgagcttggtcaatttcctgtctcttctcct

SEQ ID NO: 100465 - DNA, 530 bp, Homo sapiens
gaggcaatattcataactagccttgtagaattgcagaacaaaattgctcatcaggattaagaagcttatttttatagaataaaataaaaactcaattgcgagggcaaatgtagtaatcttatacaccgaatggtggaaaagtacatcaggtacaattcttagaattcaaggagccattggcaaaaacaaactgcagtgtcagactttcatgtactgtagattagaacaaaacaaataggcaaaatataaattaggacatagaattatataaataatatgattaatacagtttaattaatagcccttgggcttggttttaaacaaataggtaacccattttttttctcaagcagccaaaaaacacttgccaaaaatgaattatctaccttacaagaacaaaaccatccattaaaaaaattcagaaattattttggctatactctctgaccwcatacacaaagacctagaaaataaaaatacagcctggccgggtgcagtggcttatgcctgtaatcccagcactttgggag

SEQ ID NO: 100466 - DNA, 470 bp, Homo sapiens
tgttcacaggtcagccatcacattataaaaatgtgtattacataagcagtaaaagacgacataaaagagacaaaaygccagcttcatagtgaagagtaggtgaaggtaagaaaagagatttaaaatataattcccccaaagcttggcaagctatcaatagcatcaagaagttaagaacttaaatattttccaaattgaatatttaggttaaatcaccttgtctatcttaacgggacaaaaggaagagaagattcacagtagaaactgaaaatgaaaaaactataatatcacaatatagaaaacagaggggcaacctcacagaggtttatgcaaatttataaacaattgttaatactccctatattaatctattaaaaccaaccatcaatttaaaaaaaacaaaattcaatcatcttttgtcaaggaaaaacactaagaaaatgaaaagacacagagtaaaatgatagcat

SEQ ID NO: 100467 - DNA, 398 bp, Homo sapiens
ctggtggtgctagggactgcgggcaggtgtttggggcctttagtcagcagcactgcctcccacacggggcagccagctgagcagcggtcagcctctgtgggccctgttgctcctgttacctccctctaaggttagtgggacctggattatgcccagggagggatggcacctgctgaagtcacacagcccattagggkggggctgggctatgtccacttctgtcccactgtgtgctgacatccttaatcgggtggggaggggcagtgcatttgtcccccacatccatgtccctctagcccttcacatttatgtcattccactcctccttaccacacagcacaggacgggcagggttagggggaggaagcccggagcccctctgctcccctgaacattca

SEQ ID NO: 100468 - DNA, 624 bp, Homo sapiens
catgtttatggggtacagtgtgatgtttcaatgcatatatacattgtatcatgatcaagtcagggtaattaccatatccatcactttaaacattcatctcctgtcttttctaaataagtaacacatgaacgttattgaaaaattagaaaatacaggtgaacaataaaggaaggggtaaaaaatcacccatagccccatcttgcagaggtccaggatgaacattttagcatttatccttctagacatttttctatgcatacgtgtatttttttctcctaacaatatttttaaggtcttacaacatttgttttatcttacaaaaatacaataatattatacacatacgatttctccttaagatatactgggcawcttttacatattttaatgaaacatttcatttcattctcatttatataaaatctatccccgtaacacatttttcttgattaaatgattcacacagaaagtttatgaatttcaactacattaataaagatgaatgacaccattttcataaagaaaaaataaatggcatatgaaataaggtaatatactgagtattacaagtagacccacagctagatgttttctatagcaaaaactacatggtttaggaaattg

SEQ ID NO: 100469 - DNA, 441 bp, Homo sapiens
atatttctattgctatatctattattctaatataattttttttctgaagtttaaaaacatgtcagtttatggagaaggctagcttggtttatatttggtttttgctttttctctcctttctctctctttcttaatttggtagacaagcaaaaaaatttagaaattggctgggtgtggtggctcatgcctgtaatcccagcactttgggaggccaaggtgggcggatcacgaggtcaggagttcaagaccagcctagccaacatggtggaaccccgtctctactaaaaatacaaaaattagccagacgtggtggcgtgcgcctgtaatcctagctactcaggaggctgaggcaggggaattgcttgaacccgggaggcagaggttgcagtgagctgaggttatgycactgcactccagcctgggcaacagagcaagactctg

SEQ ID NO: 100470 - DNA, 578 bp, Homo sapiens
attattctcatttaattaatttctgctctgatctttattattccattccttcttcttactttggctgtaattcacttttcattttcttgtttcttaaggtggaagcttagatgattgatttgaaacctcttttctaatataggcatttaaagctatacatttcctgctaagcagttttttagcttcacaccataaattgcgatgtgttatgattttgttttcatttagtttaaatatattctaatgtctttcatgattgtttctttgactcttgggttatttaaatgtgttcttaaattccaaatattgaagatttcccaatttcttcctgttgttgatttttaattctgttatgattggagatcatactttgagtggcttcagtccgtctgaatttattcagacttgttcttatgtggtctcacatatagtctgttctgccagttgttctctatggccttaaaaagtacrtgtattcacctgttactaggacaagtgtgctggaaatgtcagggcaatttggttgatagtttgttcaaatctgtcttttgactttctatctagttgttttccgtgac

SEQ ID NO: 100471 - DNA, 475 bp, Homo sapiens
acacattccaagagctgaaaataagtgttcttgcacctccaaagttattctcacaaaacgaggtgcaatkataagttaacatctaggtttcagttaccacttagctgcaggggagttttagaaattattacactgatgaaattagatttaataaaatatttcttttaaaaagaagccttaaagagagcctatatattgccatgtgtcatggcaacctgtgatcaattaagcaaataacttagagatcagtgaccttttgttccagtgaattggtaatcataaatgtatatacattttgcaatacagtctcctcttttaaaatatatgcattttttcataagcagaagactcaaatgttctttttttaatgcaatgctacagtgcaggattttaatctgttatgcattgatatccatgtgtctgaaatgctggatgcaactctatttgaagcaaggcgttgggcactcaagagacc

SEQ ID NO: 100472 - DNA, 632 bp, Homo sapiens
ctgtggttacatcgtccaaggacaaatattcgccagataatttagccaagaggatttaactaaacagttaagctcttaacggaagctttatttaggctaattctaacaaacacgatcagcagacaagttctttttaaagaaagttctctttcatctgactaaaaagaaggaacacatttaaaccaaaacaggaactactctggcaatatatgtgtgcaaaaataagcaccctatggggctctttttaaattagccagagtgcacagagaagtctttgaaaagaaaactctgggggaaaaacatttttcttgatttcataaacactcattgtttaatcatctgaagaaaaggcaaacttatgattaaattccccctcctcctaaactgatgaactcttagttcacctcctctccccagcctgatgtacttaaggaggcaggagaagtaacttgaaaaccagcctaccagagaagcaagaagtggcctaggaggtcctagcctcaaactggatgcacacacataaggctgcgccttgcaggtctggcacagaaaatagtgttgtcaagytgcagccatagtatattaatatgctatttacatttcataagcagtggataactggcttcagttta

SEQ ID NO: 100473 - DNA, 532 bp, Homo sapiens
agcccagcactgtccaataaaactctctacaatgctggaacagttctatatctgtactgcccaatatggtaaccacttagccacgtaagttattgagctcctgacttgtaggaagagcaaatgaagtgaatttttatttacttttagtttatataaatacaaatttaaataaccacatgtggttagtggctaccatattggatagcccaagttcatatggctagcaaagatcagaagtaaggatccaatcccaaaaattatctggctccaaaatcatgctttaaagattaaaataccaggatgggcatggcgactcacacctttaatcccagcggtttgacaggctgaggtgggaggatggtttgaactaaggagtttgagaccagcctggacaacaaagtgagactgcgcctctacaaaaaaactttaaaaaaracaaaaaaaagccaggcctcgtggtgcacacctgtgttcccagctacagtggaggctgaggcaggaggatcatgtgaacctgggaagtcgaggttgc

SEQ ID NO: 100474 - DNA, 568 bp, Homo sapiens
tataaatcttaaatctttcatataagaccttaactaagctgtatgtactaatttaatcattaaatccaatatccctgcagaattctcatctgaatttctgattaaaatgattagaactgaatcaarcttagatccagctttcttccacaccccattatcatcaatttacccacatagcagtctatgatcttttaaaataacaaatcagtgactacataggcacaggattaatttaaaaaatcaggtcacatcatgctccaaattaaaattctctgttgaatgcctttgcattcactatagccttcaacactgcactgacctggcctcttggacttcatctgcctctttactgttctgccaacatgtcaaccttatatctccagcctcaggtcttcatatacctgctagttccttggtctagaatgctcttacatcagatcccttcatggttgcttctgtcttaatagtcaggtctctggtcaatgtcaacacctcagacaggcttcccttcccactctagataatgtgcatgcttatttttatttaacatctgtaattatgtttattt

SEQ ID NO: 100475 - DNA, 508 bp, Homo sapiens
aggtggattcctattactataattggggtgaaggtgtgcagtgtacaaggactggctgtaggtaaatcaaaggagtgttgttttggtgaccaacagttgcattaattaaaagggaatttagaagaggcctaataggcagggcacggtggctcacacctgtaatcccagcgctttgggaggccaagaagggcggatcacttgaggtcagaagttcaagaccaacctggccaacatggtgaaaccctgtctctactaaaactacaaaaattagccaggtgtggtgcttgcctgtaattccagctccttggggaggctgacacatgagtactgcttgaacccaggaggcagaggttgcagtgagcccagatcacacaagtacactccagcctgggtgacagagcaagactctgtttcaaaaaaaaaaaaaaggcctaatgaatactctggtgtcagtctattaatctccattcctgtgcccataacagayattatcaaccaatcacagccc

SEQ ID NO: 100476 - DNA, 553 bp, Homo sapiens
tgtgttctgggaatcgttctgggctgctcccacccagctgtcggtgacccctcagttccaccgtcctggactcagcctccccaagcttgtccccttgggacattaggcctgagtttccatagttccctcagtcagcctgggggctcctccaaggcagggacgggtcaaatttctgccctgtggctcccaggtggtgcggaccgttgygtagctcaagctgtgcggaaagctgggaggaaacctctccctagacgcctccctgcctccagtcctggggtggcctgactgtgtgcagtcaccaggggcctccctgtggctgcttcctatggtcacatttctgttctgtccccgcagacctctcagcaactatttccaccatggaccacaccttcctcctccacaggcctccttccttgtcttcccggcaccactccccactgaccatcctcctgcccctctagcctcctccccttggcctcctctgtaggttctcagcctgcaccatcactcgggcagctcttggcttctgcagctcctctctccccacccacat

SEQ ID NO: 100477 - DNA, 594 bp, Homo sapiens
aatcatatattccagcattaccatctccattttaggggtatgaactatttttttggtcattgttatcttccaaaacctggcactatgcctggtattcagtaggaccatatatgtttgttagtaaacaggggttcagagatgttaaatgcttttcttcacaagggaacgtgttatacatgsagcggaacctgcaaacctaggttttcttagtccaagctccatcaggcatgccacatctgcctctccacgtttctgctgtggcaaacagaagctccccctgattctgatggccaactgcacgcacagctaaatagaaaacctatttccaaccatggactgtaaatagcttgcaagactaaaaggcaactagaaagctaaaaaacaaaaaaaaaagccttgactacagagcctgcccatgataggacaaaatgggaattgtgcaccttttactgctgtgataaactgacatcagatagggaactagcatcccttcctccaggcggcaagcactgtccttttgccctcactacagtatttgcaggtgttattctggaagcaacagaaataatattaaaattgtattttttaagtatt

SEQ ID NO: 100478 - DNA, 622 bp, Homo sapiens
ggccaatggtacataaaaaagtgcgtcaacatcattaatcatcagggaaatgcaaatcaaaaccacgatgagatatcatctcaccccagttataatatctattaccaaaaagacaaaaattaacaaatgctaatgaggatgtagagaaaagagaactcttatacactgtcagtgtgtacagccactatggaaaatagtatggacatttatccaaaaaactgaaaatagaactaccatattatccagtaatcccactactaggtatttacccaaaagaaaggacatcagtatatcaaagggatacctgtaccccttatgtttattgcagcactattcacaatagttaagatatagaatttacctaagcatctattaatggatgggtggataaagaaaatgtggtatatatacacaataaaatactattcagccataaaaaggaataaaatcctgtcatttacagcaacatggatggaactgaaggtttttatgttaagtgaaatatattaagccaggcacagaaaaacwaatattagatgttctcactcctatacgggagcttaaaaaggtgatgtcatggaggtagacagtagaatgatagttaccagaggctgggaaggat

SEQ ID NO: 100479 - DNA, 526 bp, Homo sapiens
tctcatactctacccaaatgtgggactgatgctacttcagattgtttctttgcctttttagaaacttcatttctaattgcaagttaatgycgaatttaaatctctaagcccctgaatttttctgcacttcttcccagttggttctctgattgactggaggaatgaggaggttctgcaaaggacaagggaagctgagagtttgcccctcagtaccctaaatatcaaccataaaactaatgaactgtggcaactgaattgtctaagttcattccaaattatgtcttggtaaagttcatctttgttttcaattatcatcctggaatcataaatgtcgaatccagggtgcagcttctcagctctttgagtcttgtttgcattcttcttaccgttaagcctatgtagtgggtatgttgtggcccactgcactggatacccaaggcaatgggtacaagtcctcttcttaaaaatatcaacttcgttttaaaggaacaaatctgaaacagtctctgaaaaaaattgccgtgat

SEQ ID NO: 100480 - DNA, 627 bp, Homo sapiens
atgtaacaaacctgcacattgtgcacatgtaccctagaacttaaggtataataaaataaataaataaataaaatactcccgtttctctggtcacttttaaaaactgtaactagtatcttttcttgctaataaattttcttgtatctgatttttattatgtatgttcactaagttacattcactaaatctaactgattttgattaggcaaaactggaagaaggttcagatttgatctattaactatgaaacaaattttaagggaaagaattttttttggaaaagtgtatttgaaaaaaaagtttttttctcatataccagtggaaatagctttcatttatcattttctgaycatttattcttaatctgggtctatgcatagctattagcaaaaatgtttaaagataatcagataattttacacattaatatcagataagtggttgagaaataaaacaatacaattcagtgatgttctgaattaagaacctttgttacttgagcaggtagggagctactctcagtacatagacatagacctaagaagaggaagtagacaaggcccacgtggatagtgaagacatagaaggacaattcactcatagtgtgcactgtcaactctcaagctt

SEQ ID NO: 100481 - DNA, 627 bp, Homo sapiens
atgtaacaaacctgcacattgtgcacatgtaccctagaacttaaggtataataaaataaataaataaataaaatactcccgtttctctggtcacttttaaaaactgtaactagtatcttttcttgctaataaattttcttgtatctgatttttattatgtatgttcactaagttacattcactaaatctaactgattttgattaggcaaaactggaagaaggttcagatttgatctattaactatgaaacaaattttaagggaaagaattttttttggaaaagtgtatttgaaaaaaaagtttttttctcatataccagtggaaatagctttcatttatcattttctgatcatttattcttaatctgggtctatgcatagctattagcaaaaatgtttaaagataatcagataattttacacattaatatcagataagtggttgagaaataaaacaatacaattcagtgatgttctgaattaagaacctttgttacttgagcaggtagggagctactctcagtacatagacatagacctaagaagaggaagtagacaaggcccaygtggatagtgaagacatagaaggacaattcactcatagtgtgcactgtcaactctcaagctt

SEQ ID NO: 100482 - DNA, 597 bp, Homo sapiens
aactattattgagcagaaattgaagaatgtatcttttaaggaaattatacataatatggggatatttttgccaagtttctctattactgttggaaatagttggagaccttagacgttttttgtcctccaaaagaaattatcttaaaaccagtttatacaaatacaaatgtatacaaattttcaatccctggatattgattcttttgtttctggggttttttttgtttgtttttttttatgcaccctctcttgtctgtcacccaggctggagtgcagtggtacaatctcagctcactgcaacctccgcctctcgggttcatgcaatcctcgtgcctcaggctcctgagtagctgagattacaggaatgcaccaccacccccagataatttttgtatttttagtagagatggggtttcaccatgtgggccaagctgatcttaaactcctggcctcaagtgatccgcctacctcagccccccaaagtgctgggattaagacatgagccactgtggcagygggccaatattgattctttatagcagtcccaagtgagtttatcaagtcaaagccagaatcaaaatgaatcaggcattatat

SEQ ID NO: 100483 - DNA, 597 bp, Homo sapiens
ggtacttagaatttttagaataaacccccctacagtatgtgatttttagctacatgcctgtatcattttgataaaaacaaatagaaagagagggaaggaaggaagaaaaaagaaagagagagaaggaggaaaggaaataattttagagacctggctaggggcagtagctcatgcctgtaatcccagcactttgagaggctgaggtggggattgcttaagcctaggaattcaagacccacctgggcaacatgacaagaccctgtctctataaaaaatacaaaaatgagccaggtgtggtggcatgcacctgtgatcacagctactcagcaggstgaggtgggaagattgtttgaactagagaggcagaggttgcagtgagccgggatcatgccactgcactccagcctggccaacccagcgagatcctgtcttaaaaaaaaaaaaatttagagacctaatagtgataaaaatgggatgtagcctaatagatcaattgtgagtttttatagaaaatgaaaaccagccagatgcagtggctcacacctgtaatcccagctactgggaaggctgagacaggagaatcgcttgaacacagga

SEQ ID NO: 100484 - DNA, 617 bp, Homo sapiens
ttattgcctgacttttggataaacgccattttaactggggtgagatggtatctaattgtagttttgatttgcatttctctgatgattaatgatgttgagcaccttttcatatgcctgttggccatttgtgtgtcttcttttgagaaatgtctattcaggtcttttgcccatttttaatcagattattagttttttttttttcctacagagttgtttgggctccttatataatatattctggttattaattccttgttagataggtagtttgcagacattttctcccattctgtgggttgttctttgctttgttgattgtatcctttgctgtgcaaaagttatttaacttgaaatgatcccatttgtccatgtttgctttggttgtctgtgcttgtggggtattacataagaaatcattgcccagaccaatatcctggagagcttccccaatgttttattgtagtagtttcatagtttgaggtcttgggtttaagtmtttagttgattttgatttgatttttgtatgtggcaagagataggggtctggtttcactcttttgcatatgggtatctcctttcccagcaccatttattgaagaaattatcatttcttcaat

SEQ ID NO: 100485 - DNA, 617 bp, Homo sapiens
tttttctatgaaaactgatatataattggattattatatataatatatatttatataattggatagaattctaaaaggatcatgcctgccttacacgaatatctggttatgttttaaaaacatcatgagatttcaacagtcctatcacttcttgttgaagagaataatttctcatcaattttgcttcactgctcttcaagagctttacatgtgtatatgtgtgtatacatagatatacacacattttacacacacacatctacatatacaaactatatcggacaaagaaaaagcatcctcctttcacacaatgttttgtgaacagtggctcagtttggttctttggcaactcctcctgtcaattgggaaacagattagcttatataatttgtagaattcaagttggatcagaaaattgcaaaagcgtgagactcattacagaaggatttggtccatactgatttaggaggcaaagaaagtcaaagtttagagactattccagagagagraacgaatgcacagaggagggcccttcatgctgggtaccccaagagatggaccccaataccccaaaagaacaggagctccatgagggcagaagtgggtctcctgtaacc

SEQ ID NO: 100486 - DNA, 535 bp, Homo sapiens
gtgtaaacactagctattctggtttgaacatatataatccttttgcctagctttcatttgaaaatgtcctaagcaatctttggaattcatattttatttagcgtgaatcgttgtatgaactactaacaatktttctattttttatgacttcgctttattcttcagttgttattgataaataatatagcattcacaaaagtataagattaatagcaaacatcttcaactgcagtattttcacattggcactagttggaattgtgatgtttgtgtaattaccttactgtcattattgagcttaagttaattcaatgtatctaaattgacaagggagcatttgcttgaaccggaaaataagtagaatcaccctgatgaatacaaggcatacagaaagtgtttgcaagttatatcaaatcattgtgttttacatctattgaaagtggatggagtccaattaaggcattggggcatcagcatgaatcagtagatcttcaactttcatgtacatcacaattacccaggaatttattttttc

SEQ ID NO: 100487 - DNA, 595 bp, Homo sapiens
ctggtatttgtaggatggagacttagggcaagcaacacgtgctttctgcccctctccagatattggtaagtttctttctttttgaaaataatcttctttaaagaacttcacagctactcaagctacccaattacaaagagcaggagcattccactacagaaagacctccccaggaggctttccttgcttgttctcaaggcctgtatttctcaactttggctgcatattcaaaggaccttgggagctttaaaaaaatacctccagagatagacttaattagtttgagggtatacctgcacaygggaatttaaacagccccttgggtaattttactgagtagccaaagtggacagccactactcaaccttttcctagagtgcctctactagtcaaataattatgatcagatttaattttaaaggcagtcctaaataaaccctttttatatgtctataatcaaaacccagcactgaaatactacagctggaaaataatttcttataaaggacaatgactggctcaatagaaattaagaaacaatgatcagataagtaacttcctgataattaactcgacaagcataatatgaacattt

SEQ ID NO: 100488 - DNA, 595 bp, Homo sapiens
ctggtatttgtaggatggagacttagggcaagcaacacgtgctttctgcccctctccagatattggtaagtttctttctttttgaaaataatcttctttaaagaacttcacagctactcaagctacccaattacaaagagcaggagcattccactacagaaagacctccccaggaggctttccttgcttgttctcaaggcctgtatttctcaactttggctgcatattcaaaggaccttgggagctttaaaaaaatacctccagagatagacttaattagtttgagggtatacctgcacatgggaatttaaacagccccttgggtaattttactgagtagccaaagtggacagccactactcaaccttttcctagagtgcctctactagtcaaataattatgatcagatttaattttaaaggmagtcctaaataaaccctttttatatgtctataatcaaaacccagcactgaaatactacagctggaaaataatttcttataaaggacaatgactggctcaatagaaattaagaaacaatgatcagataagtaacttcctgataattaactcgacaagcataatatgaacattt

SEQ ID NO: 100489 - DNA, 610 bp, Homo sapiens
aaatgatttttgatctatctggggaggcattctttaacaatgcatttatttaatgaagtgtgaatatgttcttaacaaatcagactataatcagcagatttaaaattaattggatcttgttagatggtatatatccttctttagcatctgattataaagcaaggtataaatgctatataattcaatgcatagtaaaatctctacatgaaacaaagtttcaaaatatggttctagcttcaggagargattgtattagcctttgttatagagggctagtatgcaatgacttcttattgaaataggtgtatttcatttaaaatattgagcaattttccagagttagttaaaacagcacgcaatatctggactgaaaagaagctgtggattcctccaaataaagttaaagttgtttaaggtttatcacatgtgaatttgtcatgatactgtcacatataatagcaacaataataacccatacccaaataatattttgtttcttaaaatgatctttcctgctatttaccttcctactttcattaagatatgagaatactgaagggaaatgtgattcaaattcatttacatttttaactcaatgatacatgctaat

SEQ ID NO: 100490 - DNA, 596 bp, Homo sapiens
tagttctagagtaaagactctttagatccacaaaaggatgaagttgctctgcaagtaagtgaactgcctgccaatacaagataattgttaaagaaaaataacaaactccagacactcttgcccaaaaacaagcaatgaagaaaggacaccctattcaataaatggtgctgagacaactggctactcatacgcaaaaagaaaaaaaaaaaaaaacacttaaatgtgagacctgaaactatgaaaatccttgaagaaaacaggaaagcctcttctggatattggcctaggcaaagaatttatgcaaaagacctcaatagcacaagcacaaaaccaaaaaacaggcaaatgggatttcattaaactaactaaagagtttctgcacagcaaaagaagtaatcaacaggttaaacaggcaacctacagatgggagaaattacatgcaaactatgyatcccacagaagacaaatatccagaatctgcaaggatatcaaacaaatctacaaaaaaaaattccattaaaaagagggcaaaggacatgaactgacatttctcaaaagaagccaacaaacatgaaaaattgctcaacatcactaat

SEQ ID NO: 100491 - DNA, 608 bp, Homo sapiens
aatctatgtctggaattgacagatgaaaattttatagcatatgttataaattataaatgtgtttaataattttaaggaaggcataaaaataaaaatagatgctataaggagaaaaaaaggaatttttagtggcaaatatacaattcactgaatagaaatatcagtagattacatattgcagaaaaaaagacaagtgagcttgaagatagggccttcataatagattacatgaatattatagatttttgcatgaagaaatatcaatgccaagaatttttattgcttttctttgtgctccaattaatggttctaaaaaaaaaaaccccaaaataatgattttgtaattcacaaatcatgacagctgagttatggtgtccaatgttaaacaattcatatatacatatatgtctaaattaaacatgtgatcataattatttacatgttaaaaactgttaagatttcaattttaagagtagtgatttatgtgattaaattagaatctttgtattttatgatgataataccttacgtgtatmcctaatacaaagtttgatctctaatccaaaattcgattttgtttttgaatttaagaattgctttaaaaattt

SEQ ID NO: 100492 - DNA, 564 bp, Homo sapiens
aactaagaaactgtggcacaaattattaactatactgcccaaggtcatacactggaaatgggtggtgaaggtaggatatgaaaccaaacttacaacctccaaactctaatcactgtttttagaatactacgagcacctgaamatgcagtctcaagtcaatgaccaaaatattacagatgcaggattgttgatcagaggatgtcttggttaatagaatgccagagactagatccattagttatgagatagatgcagaatccagaatgaatctgaaagactctatacctttcctactcagtgtggactgtggcttggcagccccagcagcaccatgagcttgtcagagctgcaggaggttgtgacgtgccctagaccctctgaatcagaatctgcattttgacaagattctcaggtgagggggtcttgccaatttcaaatccttcgatttcccataggttatgtatttttataaggagtcctggctgggctcagtgactcatacctgtagtagcactgggcacatgaaaagcacttaataacaattataccctgtattacaggact

SEQ ID NO: 100493 - DNA, 587 bp, Homo sapiens
gagctgtttgaattccgtgtagattctcgctattagtcctttgtcaggtgcacagtttgcaaatattttcacccattctgtaggttgtctgtttactctgttgattatttcttttgaggtayagaagcttttcagtttcattttgtcccatttgtctatttttgcttttgttgcatttgctttgtcataaattcttagtcataaattctttgccaaggccaatgttcagaagagcttttcctaggtgtttcttctaggatttttatagtttcaggtcttacatttaagtctttaattcatcttgagttaatttttgtatatagtaagagatatggattcaggttcattcttccgcatgtggatatctgattttcccaacatagggtcccactctattgttttcattcaatgtaattacctctttaaaggccctgtttccaaataatatcatattctcatgtattggaggttaggatgtcaacatatgaatttgggtaggggacaaaattcagcctaaaataagtgatgaaatctatcctgtcaaggcagtaagacttcctttaatctatctgttgttttggtgagtt

SEQ ID NO: 100494 - DNA, 587 bp, Homo sapiens
gagctgtttgaattccgtgtagattctcgctattagtcctttgtcaggtgcacagtttgcaaatattttcacccattctgtaggttgtctgtttactctgttgattatttcttttgaggtacagaagcttttcagtttcattttgtcccatttgtcwatttttgcttttgttgcatttgctttgtcataaattcttagtcataaattctttgccaaggccaatgttcagaagagcttttcctaggtgtttcttctaggatttttatagtttcaggtcttacatttaagtctttaattcatcttgagttaatttttgtatatagtaagagatatggattcaggttcattcttccgcatgtggatatctgattttcccaacatagggtcccactctattgttttcattcaatgtaattacctctttaaaggccctgtttccaaataatatcatattctcatgtattggaggttaggatgtcaacatatgaatttgggtaggggacaaaattcagcctaaaataagtgatgaaatctatcctgtcaaggcagtaagacttcctttaatctatctgttgttttggtgagtt

SEQ ID NO: 100495 - DNA, 587 bp, Homo sapiens
gagctgtttgaattccgtgtagattctcgctattagtcctttgtcaggtgcacagtttgcaaatattttcacccattctgtaggttgtctgtttactctgttgattatttcttttgaggtacagaagcttttcagtttcattttgtcccatttgtctatttttgcttttgttgcatttgctttgtcataaattcttagtcataaattctttgccaaggccaatgttcagaagagcttttcctaggtgtttcttctaggatttttatagtttcaggtcttacatttaagtctttaattcatcttgagttaatttttgtatatagtragagatatggattcaggttcattcttccgcatgtggatatctgattttcccaacatagggtcccactctattgttttcattcaatgtaattacctctttaaaggccctgtttccaaataatatcatattctcatgtattggaggttaggatgtcaacatatgaatttgggtaggggacaaaattcagcctaaaataagtgatgaaatctatcctgtcaaggcagtaagacttcctttaatctatctgttgttttggtgagtt

SEQ ID NO: 100496 - DNA, 465 bp, Homo sapiens
ggattccagctaggtcttgaagtagaatcattaggatctactgacagcttggaagtagaggaggaaagggtgaccttaagattttaggcccataataactagaaatctcatgctaaagtggctagaaatattatcaaaaggcatttttagtcaaatagactttagrgtctctgacactcaaacatcattcccgtaatctattctataagtactgaagaatgtaccatgctaaaatcctccagtctagcttcacagtaccggatgccttccacccattcattcattcattcattcatttgttcatttattcactcattcatccattgtcttattcattccacccatcaactctagctcagctgtcagccagcaactccctgttccttgcgatatagaggagatttatttgaacagcccctttccatggtatgtgaaagtccagcgtctcccaagcacttcctccaa

SEQ ID NO: 100497 - DNA, 555 bp, Homo sapiens
tgagtttcaaactagactttttattaaggtaagtaagaagaaagtctttgaaggaaccagagcttggaagattgacggtggagtttatcacagaaggagatacttgagggaagttcctgcctaactagaaggggaaagcctttccagtgctaagagggaatctgtttttctcctttgcacactctaaaattcagcattatcagtgatcatggaacaatgaagcttatgatatcagccttcatcctaactaaattcataaaagagcagtgcagaaagtacaatgtcccttgttttataactgattcactcatttaacaaggaaatgcagcacaagattaagaatgccagctctggagtcaacagcaggtgtgactggggccacaggactcagtcagattttttatttagccctttagcgcacacctaagattttctctccaatctatagagtytcaatcctctattctctttgtatatataagatccttagattagcacatagaacataagaagagatctagaaatatcagccatacaagctgagagccgaatcac

SEQ ID NO: 100498 - DNA, 538 bp, Homo sapiens
gcctggtacacaataagaatttatgtctgtggaaactctagattttactagaaatcagagcctggtgttttcacagactaagagtaatcattgacatgcaggagacagactctggaactctgcagaagagtttagttgtctacatttctgaaacatgaggatgccaccaggagaggaaatataagatattttttcccaatttcagttctcctcagatttcatcagtctgatcatccagactcagaattatctgaagttatttcattcagagacaatagaaaccagggcatttaagtatgcagagagcaattacattctgagaagaaacctctgaatagcacaatcactggcagctatttaaagagaatagaagattgagactgcataggtgggaaaaagatcttaggtttgacctaaagggctgaataataatcctaaaggacacttayggccccagagctggtgctctctgggggtgtgaggcctggacagttggagaaccggcagtagtgactagaaaaggatagtatttggacag

SEQ ID NO: 100499 - DNA, 499 bp, Homo sapiens
cgtgtcctacatagaaaataaaatacaatgactttgtttattttctcttctatcttaacaattcaatgtatgtaataagcaagcagaagtagttgttaaagtatctttcattttaagttagttttactatttcccctctaggtttggatgtagcgtgtgtagaatgaacaaatgtgtaggcaaaataaaaatttactaatatttttgaacgaagatttaaagtacttaaaatggactccaaatgagcaactctttataagatcagggaatktctagtgattaaaaatcgcaatggttcggcccatttattttaatagcattactattaactcaaagatgtattgatatggactcacaccaaggttgtgattataccaacctaagctctccaacttagagtacctggtgcagttcacatgtgtgtgtttaataaacgcatgaactaagaaagaagaacatggagagatttttcctgttgtcagtttgatgttgaagggca

SEQ ID NO: 100500 - DNA, 564 bp, Homo sapiens
cattagttccaggaatcccactactgtgtatctacccaagggaaaataagctgttgtatcaaaaagatacctactctcgtacatttatcacagtgctattcacaataccaaagatacgaaatcaaagtgttcatcagtgcattattggataaagaaaatgcttatacacacaaacatacacacacaatggaataatattcagtcataaaaaatgaaatcatattctttgcttagcatggatggaactggatgccattatcttaggtgaaatgactcaaaaatagaaagacaaatacatgttctcacttataagtaggaaataaacaatgtttacacatgaayatagtgtaggatgatagacattggggactgaaagggtgggaggggtgtgaagcatgagaaattacttaatgggtacagtgtacattattccagttatagttacactaaagtgccagacttcactatacaatatatccacataacaaacttattctcataccccttaaatcaacacccccaaaaaatctgatgatctgatttactgattcaactggtcttggg

SEQ ID NO: 100501 - DNA, 564 bp, Homo sapiens
cattagttccaggaatcccactactgtgtatctacccaagggaaaataagctgttgtatcaaaaagatacctactctcgtacatttatcacagtgctattcacaataccaaagatacgaaatcaaagtgttcatcagtgcattattggataaagaaaatgcttatacacacaaacatacacacacaatggaataatattcagtcataaaaaatgaaatcatattctttgcttagcatggatggaactggatgccattatcttaggtgaaatgactcaaaaatagaaagacaaatacatgttctcacttataagtaggaaataaacaatgtttacacatgaatatagtgtaggatgatagacattggggactgaaagggtgggaggggtgtgaagcatgagaaattacttaatgggtacagtgtacattattccagttatrgttacactaaagtgccagacttcactatacaatatatccacataacaaacttattctcataccccttaaatcaacacccccaaaaaatctgatgatctgatttactgattcaactggtcttggg

SEQ ID NO: 100502 - DNA, 637 bp, Homo sapiens
caaaaccacatctcctaaaaatacagaattagccgggcttggtggcacccgcctgtgatcccagccacttgggaggctgagacaggagaatagcttgaacccggaggcagaggttgcagtgagccaagatcacgccattgcactccagcctggggaacaagagcgaaactgcctcaaaaaaaaaagaaaataattaatttaacatgagacaaaaaggaatgattctctaaatcttccctacctacttttgaattattcttcagtttagatttttacagcttttattcctcaagtaacttctaaacttttcccaattgtttttaaaawtccacagtgactatttttactgcctaaggttttgaatggctattgccaaacttgctgttttagatatttcttgaggccacaagcaacctatataacaagcagtcccctgagataggccaacccagtttacaaggtagaagaggtatgtgttggaagtgtccctctagcatatcctgtgtattttattttttgaataatttccaggtcttgggagtgtgctgactttggcatcttacgtggtatcagggacaatatgagggatattgaagaaaggatctttaaaacttgcatcctcctgacttctgttttt

SEQ ID NO: 100503 - DNA, 432 bp, Homo sapiens
ctttgaatcccaccagcatgtatataatgcctttgtgctagcacttcactgggccctagaagacggaactcatgcccttagcctttggagactatagataacatattatctgttgggcaggcagtggtctgggattagggggtcttgcctctgctgaagtcttaagtttgcatgttttctgttgttggtaacaggtagagaatccaactcagctgtttcctgaggtagctgcagatatgctgactttactctgcccaagctaatctggaactgtgggttctactcagaggcctgtgttgccacactattcacaggccataaggccctacctagtgggrtcaggaaaacattttcctagcttgggaaaggctcacatccctattttgttgccagctctgatgccaacctaataatttttaattacctgtggca

SEQ ID NO: 100504 - DNA, 567 bp, Homo sapiens
actttttttctgaaccaatttttgctagtatcatcacaaaatgttgattttttaaaaaaaataactccagcactccttcatttatcagtttacatggtgctataaggaagagcctttgttggcttctctgtctttccttccctccccttttatgcccccctccctttctcattctatcatcagtatggcctcagggactcctattttattcaatgggttataatttattactgaccttgtattgatgtctgagatttggacagaggatgtcccttcaagctgccttgtgtgtccttatgacataggtattttagtttttgastggatccttactttctgtcataaaaagatgttgtagccccacctgtaccttttctatggcagtcctgaaatcagtaatttttccaaccaaggaatgaaatttagaagctaagatctggacattacatgctgaggttttctgctgaggtgtaattgcttttagaccttttaagcagatagagctacaaaacgtatctatccagtggtgagctggaaaagtttaacaactaggtctgggggaagggg

SEQ ID NO: 100505 - DNA, 562 bp, Homo sapiens
cttacaaaagttagaaagctaaagtccttacaagtgacctgcaaagccctctatgatctggctccccactttctctctccctctaacttcatcttctctcctgctagctcactccattccagccacatgagcctccctgctgttccttgaacctgccaagcatgccttggagcctgtcctctggcctttctctcygttcatatgctctaccctcagcccatttagtggctacattttttccacctccttcaatggcatcttctccaagagacctgccctgtccaccctatttaataccgaaactctcctgctgctgcccccacactcctaatccctcataccctggtctacctttttctttatttcacagcacatcttctaacatacttctaacatacttaacatttgcttatattaattgtttattgtctatctccccactgcgagaatagaatcttcatgaggtcaatacatttaatacactatcttaaatgcatagaacaaagcctagcacattgtaagtactcaaataaatgtttgctgagtgacatggggctcatgt

SEQ ID NO: 100506 - DNA, 582 bp, Homo sapiens
tcttctccacttcttttggacaaggagaattaaaaaatcacctgtcaccttttcactattaccatgtacgtcagatatttttagttctgcaggtggaattgttaaggtgattgagaatgaggtcttttttttctttttggagcagcaatagagcagaatgaaaggtgagatggtcttaaggaatctgttaagggaagaaggtggcctaggctgtgtggaggttcaggggcagcaggagagatctatattttagatgtattatcagtatgtgttgggtgtctttggttttttgataaacttgtttttctaactagactgtccactctttrtgccttttctggttatatatatatccttttgtttggagacagggtctttctctgtcacccaggctggagtgcagtggcatgctcatggctcactacagcctcaacctccgtggctcaagcgattcttccacctgaacctcctgagtagctgggactacgggtgtgcaccatcacatccggcaaagttttgtaatttttgtagagacaaggtttcgccctgttgaccaggctggtcttgaactcctaacctcaa

SEQ ID NO: 100507 - DNA, 565 bp, Homo sapiens
tatcctgtgcctttctggagtttccttccctgattgaagacctgcaagactccatctctggagaaggaaagagacctggtactgcagggcctgccgcaacctccttctgagttctcaggactctgggaaaggccactactgaaatgtacctaaagcagggccataccttaaagcagggscatggggtctgggactggggtaataaaacctgtatgggacccacactagaaagtctcacttggaatgagtccactctattctcattattcaaagcccacttgggacagaaaatttgagagagaagttagtggtattcagaaaagagaatatggtgcagtaccctaaggctttcccaacccttgccccttaaatgtagggtccagagcctctgcctaacttgtcctacctaagggataggcctgcacaggaacatgcagggtttatgtggtgggtccgtgtgatttccacttggctggaggttttgctgcagacactcacatggtgatcctgaagcagaagatctggatcttggaggcaatgtactcagatgggatctgatcttggt

SEQ ID NO: 100508 - DNA, 605 bp, Homo sapiens
aagcctccatgaacatctttaaatttctcagtaatttttatggacctgataacattttccatatcagaaacacccactaatgattggattacatgtatatatacattgtatattatatatataatatatatacacatacacatatacattacatatgctattaactgaacacctgctatgtgacagagagcagtatacatatttattgcaaattctcatgcctacataattagttgatattattttcatttatttaacrtgaaataattaaatttaggtatattaagttacttgactaagttcatgcagcacttaagttatattgcttatatttaaattcaattacatttggcttcaaaatcttactctttctttgatttcatgctgcccctatgtatagtgaataagctcagataaaattaagtcctctggccagtcaagatgccacaaaaaaacatgtgtaaggtttgcaaattttggacatgactagtcctttaaaacgcagaaaaattaccaacattccttggaaataacatagctgcatatttaccactgcttgttagaacttccttctaaagaaacttgttccttgaagcagcttatgg

SEQ ID NO: 100509 - DNA, 605 bp, Homo sapiens
aagcctccatgaacatctttaaatttctcagtaatttttatggacctgataacattttccatatcagaaacacccactaatgattggattacatgtatatatacattgtatattatatatataatatatatacacatacacatatacattacatatgctattaactgaacacctgctatgtgacagagagcagtatacatatttattgcaaattctcatgcctacataattagttgatattattttcatttatttaacatgaaataattaaatttaggtatattaagttacttgactaagttcatgcagcacttaagttatattgcttatatttaaattcaattacatttggcttcaaaatcttactctttctttgatytcatgctgcccctatgtatagtgaataagctcagataaaattaagtcctctggccagtcaagatgccacaaaaaaacatgtgtaaggtttgcaaattttggacatgactagtcctttaaaacgcagaaaaattaccaacattccttggaaataacatagctgcatatttaccactgcttgttagaacttccttctaaagaaacttgttccttgaagcagcttatgg

SEQ ID NO: 100510 - DNA, 605 bp, Homo sapiens
aagcctccatgaacatctttaaatttctcagtaatttttatggacctgataacattttccatatcagaaacacccactaatgattggattacatgtatatatacattgtatattatatatataatatatatacacatacacatatacattacatatgctattaactgaacacctgctatgtgacagagagcagtatacatatttattgcaaattctcatgcctacataattagttgatattattttcatttatttaacatgaaataattaaatttaggtatattaagttacttgactaagttcatgcagcacttaagttatattgcttatatttaaattcaattacatttggcttcaaaatcttactctttctttgatttcatgctgcccctatgtatagtgaataagctcagataaaattmagtcctctggccagtcaagatgccacaaaaaaacatgtgtaaggtttgcaaattttggacatgactagtcctttaaaacgcagaaaaattaccaacattccttggaaataacatagctgcatatttaccactgcttgttagaacttccttctaaagaaacttgttccttgaagcagcttatgg

SEQ ID NO: 100511 - DNA, 605 bp, Homo sapiens
aagcctccatgaacatctttaaatttctcagtaatttttatggacctgataacattttccatatcagaaacacccactaatgattggattacatgtatatatacattgtatattatatatataatatatatacacatacacatatacattacatatgctattaactgaacacctgctatgtgacagagagcagtatacatatttattgcaaattctcatgcctacataattagttgatattattttcatttatttaacatgaaataattaaatttaggtatattaagttacttgactaagttcatgcagcacttaagttatattgcttatatttaaattcaattacatttggcttcaaaatcttactctttctttgatttcatgctgcccctatgtatagtgaataagctcagataaaattaagtcctctggccagtcaagatgccacaaaaaaacatgtgtaaggtttgcaaattttggacatgactagtcctttaaaacgcagaaaaattaccaacattccttggaaataacatagctgcatatttaccactgcttgttagaacttccttcyaaagaaacttgttccttgaagcagcttatgg

SEQ ID NO: 100512 - DNA, 626 bp, Homo sapiens
atagttgggagattaatatcatggtgtactggcatgttggttaattctagccataatttaactgtaaaacctacttaaggaagcaggaggctgaacggcatgtcaaacacaaggcacccacacatagagctcaacacaataacaaattaagcactgtttatgtacagacatagttggccttatgttttttttcttaatctgtgatttaggtaataattgcactataattttaactctctatgcagtttgaatgtctgcttaattgttttattaccattgtattcagtgatactaattgatggtgccagtgaaatttagctgtgtgtccctaagtctttatgcacataagactggcattgatttagtcttgatagcatatatcctgtttctrctagattactctaaaattgtttgaccaaaggctatggggaaattttggcccaagtgaaaatgtataatttaatttgtgaagagttttcatatactctaagcttggcttttcttttccttgaacattttgccaaattccctaaatgagaccaaagtgccttttgcttaaattttggcataccatgaaatgtctttctgtattagctatagattatgtgaacctgttgctgtacaaa

SEQ ID NO: 100513 - DNA, 535 bp, Homo sapiens
gcttgatttcttgcaccttgttttctcacaaaagtagaaatgtttcaataaactcagcaacacagcatgaaaagtctcaaagtattctaattccttctagatcctcaagcagacggattacttggccttcatactgtatcatttaagtttggrtttccagatttcaactttgtttctgtttgtagacaagaggggaaatataagcaaacagagatgcttcattgaagagaacggttgggatgaaggatcatttagagggtctgtataatctcttctgtgaaatgtcacatagtgaaggactttagtgttctattcatatctctaacacattggtctgtaatcaccaaatgctatgcactattcagactcagaacttaaggtcaatgactgaagtaaattctgctctgattcattcatctagcacaaagtaggctctcaatttatatttgttgaacaaatgtataattttaaatagatattgatttttatcttaacagccccaaggtctaacaccctgctaaggtgattatatact

SEQ ID NO: 100514 - DNA, 535 bp, Homo sapiens
gcttgatttcttgcaccttgttttctcacaaaagtagaaatgtttcaataaactcagcaacacagcatgaaaagtctcaaagtattctaattccttctagatcctcaagcagacggattacttggccttcatactgtatcatttaagtttgggtttccagatttcaactttgtttctgtttgtagacaagaggggaaatataagcaaacagagatgcttcattgaagagaacggttgggatgaaggatcatttagagggtctgtataatctcttctgygaaatgtcacatagtgaaggactttagtgttctattcatatctctaacacattggtctgtaatcaccaaatgctatgcactattcagactcagaacttaaggtcaatgactgaagtaaattctgctctgattcattcatctagcacaaagtaggctctcaatttatatttgttgaacaaatgtataattttaaatagatattgatttttatcttaacagccccaaggtctaacaccctgctaaggtgattatatact

SEQ ID NO: 100515 - DNA, 567 bp, Homo sapiens
cgtctgcagcagggaatgggaaggcaaayctttctatctttcttttccaggagcaaagggcctgtgttcacaggataaagtgacatgtacatcttataaggtgtccgtgatgataattccttttactttatgttggtacactgaatgtttccagaaacaaaaagatagatttggatacctcgtcacacttgaattgtcagattactttttaaatttttcacaaagtaaaatatgttttttcctagcatcttccatattattcctctcacatttcaataagaacaagacatatgtcctgtaatgaaaacttgccacttacaaattgctgaatttatgacgaatatgcaagtaagaccttacgtacaatcgagactgattattttctttatccctattgtatttttctaatttttaaagcatttacccaaaacttccaagaacttcagatttgttcatctgacaagatcttccctggtttttatggatgaaagcataagcgaatacatctaatttggggcttactatcttattttgttatgtattataactctcttgacaaatttatct

SEQ ID NO: 100516 - DNA, 567 bp, Homo sapiens
cgtctgcagcagggaatgggaaggcaaacctttctatctttcttttccaggagcaaagggcctgtgttcacaggataaagtgacatgtacatcttataaggtgtcygtgatgataattccttttactttatgttggtacactgaatgtttccagaaacaaaaagatagatttggatacctcgtcacacttgaattgtcagattactttttaaatttttcacaaagtaaaatatgttttttcctagcatcttccatattattcctctcacatttcaataagaacaagacatatgtcctgtaatgaaaacttgccacttacaaattgctgaatttatgacgaatatgcaagtaagaccttacgtacaatcgagactgattattttctttatccctattgtatttttctaatttttaaagcatttacccaaaacttccaagaacttcagatttgttcatctgacaagatcttccctggtttttatggatgaaagcataagcgaatacatctaatttggggcttactatcttattttgttatgtattataactctcttgacaaatttatct

SEQ ID NO: 100517 - DNA, 567 bp, Homo sapiens
cgtctgcagcagggaatgggaaggcaaacctttctatctttcttttccaggagcaaagggcctgtgttcacaggataaagtgacatgtacatcttataaggtgtccgtgatgataattccttttactttatgttggtacactgaatgtttccagaaacaaaaagatagatttggatacctcgtcacacttgaattgtcagattactttttaaatttttcacaaagtaaaatatgttttttcctagcatcttccatattattcctctcacatttcaataagaacaagacatatgtcctgtaatgaaaacttgccacttacaaattgctgaatttatgacgaatatgcaagtaagaccttacrtacaatcgagactgattattttctttatccctattgtatttttctaatttttaaagcatttacccaaaacttccaagaacttcagatttgttcatctgacaagatcttccctggtttttatggatgaaagcataagcgaatacatctaatttggggcttactatcttattttgttatgtattataactctcttgacaaatttatct

SEQ ID NO: 100518 - DNA, 567 bp, Homo sapiens
cgtctgcagcagggaatgggaaggcaaacctttctatctttcttttccaggagcaaagggcctgtgttcacaggataaagtgacatgtacatcttataaggtgtccgtgatgataattccttttactttatgttggtacactgaatgtttccagaaacaaaaagatagatttggatacctcgtcacacttgaattgtcagattactttttaaatttttcacaaagtaaaatatgttttttcctagcatcttccatattattcctctcacatttcaataagaacaagacatatgtcctgtaatgaaaacttgccacttacaaattgctgaatttatgacgaatatgcaagtaagaccttacgtacaatcgagactgattattttctttatccctattktatttttctaatttttaaagcatttacccaaaacttccaagaacttcagatttgttcatctgacaagatcttccctggtttttatggatgaaagcataagcgaatacatctaatttggggcttactatcttattttgttatgtattataactctcttgacaaatttatct

SEQ ID NO: 100519 - DNA, 650 bp, Homo sapiens
gttgttgggtcacgtaaagctagaaaaaaatattttactgccttaagtccaagaaccatatattagatttttttttcctctgtgcactagcatagctgccagccttgttaagcattccatatattcctgctagcttaaaatattttttctgsttaatgtttttaaaaatcaatccacggtggctcatgcctgtaatcccagcactttgggaggctgaagcgagcgaatcacctgaggtcaggtgttcgagaccagcctgaccaataaagtgaaaccccatctctactaaaaagacaaaaattagctggacatggtggtgggcgcctatagtctcaactattcgggaggctgagacaggagagttgcttgaacccaggaggcagaggttggagtgagctgagatcatgccactgcactccagcctgggccacagagtgagattccgtctcagaaaaaaaaaaaaaaaaaaatcaatccaattgtatttgttttccttgattttcctctgagcccaaaatgaccaggactagaggaccaaaagcagtcttgtcctagctcaccttcttctgtaaacacagcacagatatattattcatccctaaattttgcatctgccaccagtacaattccagatgtcactgagagacaca

SEQ ID NO: 100520 - DNA, 629 bp, Homo sapiens
tttgagggtaaaaaaaatacactaagaatttttagattatatctgctatttctttttattttttatttttatttatttatttttttattatactttaagttctagggtacatgtgcacaatgtgcaggtttgttgcatgtgaacaatgagaacacttggacacargaaggggaacatcacacaccagggcttgttgtggggtagggggaggggggagggatagcattatgagatatacctaatgtaaatgacaagttaatgggtgcagcacaccaatgtatctgctatttctgtgtgaaaagtctaattataaatcaggaagcattcctacattaaattaaagtggtgttatcaattgatatttctttgagtgacattgtgccaaatataaaccaacagttaagaaaagtgatataacctaggacttcaggatgatggatttatgcagaacatgaaaagtgtacagcagacttttacatagaaattaagatatgcctcatacatactgagcccctggttatggagttgctcagcaaaaattcaggcccagattcacacaaatatctgagttccggccaactgcttcctgattctgaagcttaatttaatcatcttagtgcaatgcacta

SEQ ID NO: 100521 - DNA, 629 bp, Homo sapiens
tttgagggtaaaaaaaatacactaagaatttttagattatatctgctatttctttttattttttatttttatttatttatttttttattatactttaagttctagggtacatgtgcacaatgtgcaggtttgttgcatgtgaacaatgagaacacttggacacaggaaggggaacatcacacaccagggcttgttgtggggtagggggaggggggagggatagcattatgagatatacctaatgtaaatgacaagttaatgggtgcagcacaccaatgtatctgctatttctgtgtgaaaagtctaattataaatcaggaagcattcctacattaaattaaagtggtgttatcaattgatatttctttgagtgacattktgccaaatataaaccaacagttaagaaaagtgatataacctaggacttcaggatgatggatttatgcagaacatgaaaagtgtacagcagacttttacatagaaattaagatatgcctcatacatactgagcccctggttatggagttgctcagcaaaaattcaggcccagattcacacaaatatctgagttccggccaactgcttcctgattctgaagcttaatttaatcatcttagtgcaatgcacta

SEQ ID NO: 100522 - DNA, 622 bp, Homo sapiens
gtcttttcactctgttgactatttcctttgttatacagaagctgttttagtttgatgcaaccccatttttctattttttggttacctgtgcttttggggtgatatccaaaaagtcactgcccaggccaatgtcaggaagctgtctctttcctcccttttcatattgcactctttggaaggaagtcactaggcacagctcagacttaaaagatgggcagtgggctgggcgtggtggctcacaactgtaatcccagcattttgggaggctgaggcaggtgaatcgcttgagcccaggagttcaagaccagcttgggcaacatggcaaaatcccatctctataaaaaatacaaaaaaaaaaaaaattagctgggcatggtggcacacacctgtagttccagctactcggaggctgaggtgggaagacacccttgagcccaagagacagaggttgcagtgagctaagattgtgccactgcactccagcctgggtgacagatggagamcctgatcccccccaaaaaaataagaaagaaaaaaaaaaagattggcagtgatgttccatctccttgagagatgattatctgcataaatcatttggagttcttttatattaaagatttat

SEQ ID NO: 100523 - DNA, 546 bp, Homo sapiens
gcaaaagagttagttataaaagataggaagcacatgtgatccaccagcatacaaatttatgcatataattcatgcacattcatgaatgcatttctagtaacctgagaaatattagcagtagattaatttgggtagggatgaggcaagctatgaattattctgagggttggggctaaaaacaggagaggggggaaaggawtatcttctaagctgtagttgctttacatatgttctctaatataatttacaagtatcaacttattaaagaggtattattcccattgtgttgatgagtaaactgggcctagcatcacagacaataagcagtagagcccagattcaaatctaggactgttctgtgtttgaagccacatcctatccattagcaccataatctactttcctttaaaaatagtaaaaaaacctgctgtgatatcaagctaaatggaagttttgtatcagtaagttgcactgagataacacagtatgcccactctcgtcatgctcactgaatgataattctgcaggttctggcccctcctatac

SEQ ID NO: 100524 - DNA, 578 bp, Homo sapiens
acctaactcacttctaggcactaaatatacagcagtgaataaaacagagrttggctgtcctataccttacattctagtggagtcagatcatccacaaacaagaaatatatatctcatcctcccaactgcccctacctaaacatataatgaattcttagaaggtctgagatccaaagatttgagctttgtaaagaaaaatgtttagaagatcaaaatatgtgtgtagcagcccatacttgtgctgctataaaagaatagctgagactgggtaatttctgagaaaagaggtttaatttggcttacagtttcacaggctatacaggaagcatagcagcttctgctttgggggaggtctcaggaagcttccaatcatggcagaagccaaagtgggagcagcgtcttacctggcaggagccaggagcaagagcagggagggagatgctacacacttttaaacaaccaaatgttgtgagggctcactatcacaaggacagtaccaagagggatgctgcctaaccattcataagaagtccacccccataaaccaatcacctcctaccaggccccacctccaacat

SEQ ID NO: 100525 - DNA, 559 bp, Homo sapiens
tagctccatatatatgcatgtgactcactctttttaagggctacttttagagtccattgggggaatagtgagagttaaatatgagggtgacctaatagcaaaggccaaaaggccaaaaataggttcaaggtgaggggatgagctaggaatttggagtggtagagccaggtcagggtgagactggctgaggaatgtagaaggatggtccatggctcattcatcagtaggtgtttacagggtatttagagcatcaagctgccctaagggaccagactttccatgcagcttaagttattgatctagctaattcttttaaagagctgcattcttagcttgaatgtactatgattcattcaacttctctcctatgcaggttgttgtaagttttgccaactttctcagtgctataacaaacatacttatatatatacttgtaggttctgaagtttttgtctctataaagtaccagaagcaggactgagaggttaaagtccatgtatatataaaatttatttctgttgacaggctacactccagrtagctgcagaaattctcatcc

SEQ ID NO: 100526 - DNA, 617 bp, Homo sapiens
tctcttttgctataccaggagctcctttcaggtaggagttatgtccatgtatagatctagttgaatgctttgcacactatggtttctcattaaatttgagttgaataagtgcagcctataaaatgaacaaataccagtgtccagtgagtagtatgagatggcaaaatttggttaggactaaggcaaaggttggccagcttacaatgatcagtcatggaaactgttcacttctggcacagtccataattgggcagctaatagatatttcacacagagctaagaccatacagacttggatttcacccaagtgataccagctggttgcttcagcaaataatggtcaccattttatagagagatactttagtrtagtcagaaagatagccgtccttgacactataaacttcttaatatctgggctaaggatgagtactcactgtaaaatatacagctatatcattttagccaattattctgcttcctaagcttggtgctgaacagttagcctttcctcacatttaaagcttgtatcttctggtactcctcccacaggaatcctggtgaggtttcagatcttcccctttgtcaataatataatttatagttacatgtacact

SEQ ID NO: 100527 - DNA, 601 bp, Homo sapiens
attttatttattgtaggcaattgctaccctaagtttagcttatcagaatcagtatcttttttatattcttgcttaggtctacccccctttggcaagtgcatttccaaaggatctggtacctttataactaaaatattaaagaacttaatagaagagacaaattaaagagcaatcattaactcttttttgagacagagtctcgctctgttgctcaggctggagtacagtggcaygatctcagctcactgtaacctctgactcctgggttctagtgattctcctgcctcaacctccctagtggctgggattacaggcacctgccaccatgcctggctaatttttgtatttttagtaaagacgggattttaccatgttggtcaggctggtctcaaactcctgacctcaggtgatccgcctgcttcagcctcgctgggattacaggtgtgagccactgcgcctggcccttttattaactctttagttaaaaaagtaagcagacaaaagacaagatgaaggaatgtgttgtggagtcacatgactcatattgttgaggccattcattcattctttcatagcttttattaaattgttactgtcacct

SEQ ID NO: 100528 - DNA, 601 bp, Homo sapiens
attttatttattgtaggcaattgctaccctaagtttagcttatcagaatcagtatcttttttatattcttgcttaggtctacccccctttggcaagtgcatttccaaaggatctggtacctttataactaaaatattaaagaacttaatagaagagacaaattaaagagcaatcattaactcttttttgagacagagtctcgctctgttgctcaggctggagtacagtggcatgatctcagctcactgtaacctctgactcctgggttctagtgattctcctgcctcaacctccctagtggctgggattacaggcacctgccaccatgcctggctaatttttgtatttttagtaaagacgggrttttaccatgttggtcaggctggtctcaaactcctgacctcaggtgatccgcctgcttcagcctcgctgggattacaggtgtgagccactgcgcctggcccttttattaactctttagttaaaaaagtaagcagacaaaagacaagatgaaggaatgtgttgtggagtcacatgactcatattgttgaggccattcattcattctttcatagcttttattaaattgttactgtcacct

SEQ ID NO: 100529 - DNA, 515 bp, Homo sapiens
atctatattcatcagggatattggtctgcagttttcttatggtgtctttgttgggctttggtgtcagggcaatgctggtttcataaaattagtttggaagcgttccctcgtcttcaatttttaagaagagcttaagaaatatttgtgctaattctttaaatgattggtagaattcaccaatgaatccgtcaggtcttgggcttttgtttttttgattgggaggattatcgattcaatctccatactagttataggtctgctcagattttgtttctttrtgatttagtcttggtaggttgtatgtttctagaaatttattcatttcttttaggctttctggtgcactggcatgtaattcttcagaatagtatcttatggttcatttatatctatggtattaattgtaatgtttcttctttcattgatgattttatttaagagtcctctcttttttttcttagtttagataacgggttattaattttctctcttcaaaaaaccaagtcttagtttca

SEQ ID NO: 100530 - DNA, 554 bp, Homo sapiens
aacattttttcatatgttttttggctgcttgaatgtcttcttttgagaaatcaaaagaatttttttcgccctttgcccttgcccttgttaacagagttatttgtttttgcttattgaattgtttcttatagattctgaatattagactatttttaggtgcatagtttgcaaatattttctcccattctgtaggttttctgtttactctgttaatagttccttttactgtgcagtagctctttagtttgattaggtgccacttgtcaatttttctttttgttgcaattgcttttgaggacttagccataaactatttcccaaggctgatrtccagaatggtgtttcccagattttcttctaagattgttatagtttgaggtcttacattcaaatctttaatccatctcgagttaatttttgtatgtggtggaaggcagtggtcaagtttcattcttctgcttatggctagtcagttattccttgtcatttattgaatagggagccctttcctaatggcttacttttgttgattttgttggttgtaggtatgcagc

SEQ ID NO: 100531 - DNA, 554 bp, Homo sapiens
aacattttttcatatgttttttggctgcttgaatgtcttcttttgagaaatcaaaagaatttttttcgccctttgcccttgcccttgttaacagagttatttgtttttgcttattgaattgtttcttatagattctgaatattagactatttttaggtgcatagtttgcaaatattttctcccattctgtaggttttctgtttactctgttaatagttccttttactgtgcagtagctctttagtttgattaggtgccacttgtcaatttttctttttgttgcaattgcttttgaggacttagccataaactatttcccaaggctgatgtccagaatggtgtttcccagattttcttctaagattgttatagtttgaggtcttacattcaaatctttaatccatctcgagttaatttttgtatgtggtggaaggcagtggtcaagtttcattcttctgcttatggctagtcagttattccttgtcatttattgaatagggagccstttcctaatggcttacttttgttgattttgttggttgtaggtatgcagc

SEQ ID NO: 100532 - DNA, 537 bp, Homo sapiens
ctttatttctgagttttctattctgttccattgatctatgtgtctgtttttgtaccggtaccatgctattttggttatgtggctttacagtaaactttgaagtccagtagtgtgatgcctccagctttgttctttttgcttaggattgctttggttatttgagctcactctttcttgggctcataggaattttagaatagtttttmtcattctgtgaagaatgatattattagtttggtctgtatattgcttcgggcaaagcaatttctcaaagaaattaaaacagagctatgatttaaccccacaatgctattttataatattgattcttccaatctatgaacatggaatgttttttcttttatttgcataatctctgatatttttaaacagtgttttatagttctcctgtagagatgttcaagatgtttcacctccttggttagctgtatttctaggtatttcattttctttgtggctatcgtaagtgggattgtgttcttaatttcactctccgtctggatgttgttggtgtat

SEQ ID NO: 100533 - DNA, 545 bp, Homo sapiens
tgtgtcttcattttaacagtatattatgaaatagcagtatatttctttaatcaaaatggtgtaattttaggctggtgaagagtaattaaatcttcccccagttgaagatacagtaattacaactgtgaagataacttgttgttttatttaactacctatgtcacaaaactaaatgttatcaggttacaaaaattattcaaaagaaaatartctttgttactataaaactttactgaataagaagccaaatcactaggcgtgttttatatcaccaaactacagatgctctccttgttataccctgcagcaattttttaggcattccatatggctatcagaactattagcaaaacatgcaaaaaattgttgtatgaagaaaaactgagtaactcaggcagataatttacatgtcataagtgtcactcaaataagaaattttatgacatgatttcaattaaataattgtatggtgaattttaattccagttgcaaaattcattgagtgattttaattttgaaattagattaagaaacataaaaactca

SEQ ID NO: 100534 - DNA, 624 bp, Homo sapiens
gacttcccaaaggccttacttccaaatactattgtatttggagattagggcttcaacatatgaatttggggagctcacagactttcagttcatgacaccagatgtgtacatttcacagatcagtaaactaaatttaaaaaaattgggagggtaccaacatggcttttgctgagtactctctgttaagtaaggacattaaaacagttagctacaatttattactacaatcatttaattccccaagagtaatattggcaaaattccagaggaaattagggccatccgcatgaaagaacagttgacaattttacagatacctctctccctctgtctctcaaacacacacacacacatacacacacatgcactcatacacccaaacataccctttacattgttctcaatattagtttttgcttttcaatatagtctggttaaatctttgccasagactgacattaagtccacagataagcatttgggatctacagattttccaaccttctatcttataaaaagcaaaaagtctagaaagctagactagtctagcaaatagtctagaaagatgtatgtatatttcactcttaaaatctttatggattttatgggtattttcaaaaatgt

SEQ ID NO: 100535 - DNA, 635 bp, Homo sapiens
ggaacaaatgatttaaattagaccgaagtataaactgaaatgtactttagaaggtttgtttttggcaaattttctgccatacataggactttttaaaattggtcattggtgtttccttaaatatctgagtactaacaggtactaatttttaaaccatgatggtgaaaatgttgaatgtatttatgcctagagtcaggaaacatgcgttgtgttatgaaattaaatgaaaactgagtgtgtttaaatgtgatttcccagatagctcatttgacaatacagtgaaattttggctttaaggcatcattgctccaaaaatgatcartactaaataggttgaagacaagacaggagatgtgttgatatttcaagatgtaaaatcctgcaggttgttccaaacaaaaattagatgcagatggattgcttgacattcttaaactttattatgtgtggtacaggatgacaatgggtacaagagaccaaatagaagaatatcagatgggaatctccaaaatcctttcctagaggaaacagaaacagaaaatccagttaatttgagatgacgccatcacaacactgatggttaacatttgaacggctgttgtgccaaattctgatctaagccctttacctttatt

SEQ ID NO: 100536 - DNA, 381 bp, Homo sapiens
cttgcctagatcagcaccagacaccagaaagaggtcagaccccagcctgatgaacwggcatggtgggtagaccaccaggagatgcccagccctgcccattgagctgacctcaggcaggtgatggcctctaaccaccttggggacgcatatcctatggtcaatggggcctgtctgctactaaacctgaagagaccatggtaccactccccacctggagaagcccagggatctccatcctctgcccttggggggatggggagaaaatatctttatagggtggaggttggggtaatagggcagtcagcaatttcactctttacttctcccatgtgttttaaattttccccaataattatatattccagttatgttaaagtgggg

SEQ ID NO: 100537 - DNA, 584 bp, Homo sapiens
atctcacaaaccttacaacatattagttgttgtactaacattaactcttatgtcatcttattttcctattttcttgtcttctcccctaatttccttgtctatctttacttgtatttactattgtaattattggatttctgagagttaccacagattctttttttgaacaatgtagattttgaaaaatatattttaaggccgggcgcagtggcttatgcctgtaatcccagcactttgggaggcccacatgggtggatcacgaggtcaagagatcgagaccatcctggctaacacggtgaaacctcgtctctactaaaaatacaaaaaaaaaattggccgggcgtggtggcaggcgcctgtagtcccagctactcgggaggctgctgaggcaggagaatgacgtgaacccgggaggcagagtttgcagtgagccaagatcgcactactgcactccagcctgggtgacagagcragactctgtctcaaaaaaatatatatatatatatatacacatatatatatattttaaaagttgattaatactacaaagctatagtagtcaagactgtcatgaggatagatgt

SEQ ID NO: 100538 - DNA, 641 bp, Homo sapiens
aactattatattcttctcatttctttaaaataggagcaacttctattttaaagactgtactaatctttcatataaagacggatgctttgtttacaacagggtcaaagaattgagaggataagggagggcagtagtactgatttgagcgatgaattagcgtaattatgtgcttaagggccttgaatytagaaggagcagatataagtttgaacactatttgcacaatttacaagctatatgtgactttgggaaagtcgctaagcatcatttaactcacctgtgaaaagaagaaaataatgccttgctcagacgtttataagttaaaaacaatgaatataatcagttatgacagtagcttgcctcatattcagttcttaaaaaatagatgctattagactaaattgtagagattagggtatatacttaagatcctcagggtcttaaagctgcactttaaggtttacgttggatggagagaaagttagagcttttataaggagagatctaggtttctggggatttggccattcgctgtcaagaaaactaattgttttaaaatgagtaaattcactcacctaagattgccagtcttgctgagaaactaagtccagattctctacagtcattaaagattttgtagg

SEQ ID NO: 100539 - DNA, 641 bp, Homo sapiens
aactattatattcttctcatttctttaaaataggagcaacttctattttaaagactgtactaatctttcatataaagacggatgctttgtttacaacagggtcaaagaattgagaggataagggagggcagtagtactgatttgagcgatgaattagcgtaattatgtgcttaagggccttgaatttagaaggagcagatataagtttgaacactatttgcacaatttacaagctatatgtgactttgggaaagtcgctaagcatcatttaactcacctgtgaaaagaagaaaataatgccttgctcagacgtttataagttaaaaacaatgaatataatcagttatgacagtagcttgcctcatattcagttcttaaaaaatagatgctattagactaaattgtagagattagggtatatacttaagatcctcagggtcttaaagctgcactttaaggtttacrttggatggagagaaagttagagcttttataaggagagatctaggtttctggggatttggccattcgctgtcaagaaaactaattgttttaaaatgagtaaattcactcacctaagattgccagtcttgctgagaaactaagtccagattctctacagtcattaaagattttgtagg

SEQ ID NO: 100540 - DNA, 559 bp, Homo sapiens
tgagtgaataaataaatggtaatcataacaaataatttactaagccttgtatattaggttctatgacaaaatttatttgcttattatatcctcacaataatattatgaggcaagtttattaagaacatgatttatttttatttttttagggacagggtctcactctgttgccctggatggagtgcagtgatacaatcatagctcattgcagcctcaaactcctggcctcaagcaattctctagccttggccttccaaagttctgggaatataggagtgagctgccatgcccagccaggrcatgatttaataattcttgaggcaaaagcttgtcccgcatacatttcactgtaacatcaattaagtttagcgccattctctgtaggttatggagcagtgggagggggtagagttacaattagttcacagctaagtttagcttaatcctaaactcatctccatttatgtaaaaactattgttgaacttccacgatggtgctatatatcatgtgtgagcattacgtaatacacgtgttccacctgcaggataaaagaggttg

SEQ ID NO: 100541 - DNA, 538 bp, Homo sapiens
aaaattctaattattcatcccgcaggactactgacttcttgaacgttaaattctcatatttgataaattcccatatttaattcaaatgtactacccctgaattttctcatttctaatatggcctggttgttttactaaagtgagaagcagactgcttaagggtatgtaaactatacctgactgttgatagctttcatcccttagagtgtataygtttcagcttaaaaaaaaaagtagtggttaatttttttactatcattttcttacattttctctcctttggatttttgccacttctctcttttatttcttttttgttgttgtttatttatttatttatttattgggctggggtatttatttatttattgagcctgctgtattgcccaggctggagtgtaatggcatggtccaatcctagctcactgtagcttacacctcccaagcttgaaccatcttcccacctcagcctttcaagcagctgggactataggtgcatgccaccacacccagctaattttttaaattttgtatatag

SEQ ID NO: 100542 - DNA, 538 bp, Homo sapiens
aaaattctaattattcatcccgcaggactactgacttcttgaacgttaaattctcatatttgataaattcccatatttaattcaaatgtactacccctgaattttctcatttctaatatggcctggttgttttactaaagtgagaagcagactgcttaagggtatgtaaactatacctgactgttgatagctttcatcccttagagtgtatacgtttcagcttwaaaaaaaaagtagtggttaatttttttactatcattttcttacattttctctcctttggatttttgccacttctctcttttatttcttttttgttgttgtttatttatttatttatttattgggctggggtatttatttatttattgagcctgctgtattgcccaggctggagtgtaatggcatggtccaatcctagctcactgtagcttacacctcccaagcttgaaccatcttcccacctcagcctttcaagcagctgggactataggtgcatgccaccacacccagctaattttttaaattttgtatatag

SEQ ID NO: 100543 - DNA, 503 bp, Homo sapiens
gttttctatttttcaacagtttgcatttcaacagagaataatgcctctgctcacaagtcacacacatctaggcaaactgtcaaagtgaaaaaagtgataactttacaaaagtgggtgtcataatctccatgttataaatgaaaaaatgtcagacccttagaattttgaagatgttaccagaggttaacccactcatgagtggcagagctgagaacccagtgactgtcaactctgtactgccttgccctgctcctctagatcagycactgggaccccaggtccttcattctctcccttcccccactaggagcatcctgtttctccaaacatagtagccagggggcttcactgtctttctctcctctcaaatcaaagcctgccctccaatgctcttttcctgcaagtgtgttaaatactagtagatattgtctgtccagcaggttatataaaagagttatattatttagctcttttatatattaaagagctaaataatataactc

SEQ ID NO: 100544 - DNA, 570 bp, Homo sapiens
ttccaacagagaagataaccaagtccccagcctagagccattgtaagtatagcttgtctttaatagactcattgccttattcctatacggatatagtatttgtgagttgtttaatggagtaagtttttgtgagttcttatctgggcaaggcactgtactaaatgtgtttgattaattggctcatttaattatcaaaaaagctgtatatattggggctgtttttatttctagatgaggaaattaagtattacaatacttaaataacagaatcaggtagttagtgaaggagtgtgactccagaagcaacccttaactgctctactaactcactcttctgacccacacttgaattatgtgttgtcccaaggttaatgcatctttttatattaatttctctaggatgcatagttaaatacatatcagttctttttgaaaaccttgctcaccttgctgttcagggagtgtggtggggcttaggtgkttaagagaataatgatagggatcatgagagggaatactgagtacttgccatgtgctagcctctgggctaaacactttatttaaaatatg

SEQ ID NO: 100545 - DNA, 571 bp, Homo sapiens
atcaccattaccatattcactcatctatttgttacatgtcaattacatacccactctgtttttctttaacactgttctgtgttttattcacagtattgagtaaaatagtttatttcccttggaagatatttttttaaatctaatgggggaagcatatattattcaactcatgtaaatatgtaattggagggttaatcaaggactgatctagtttgaaatggggtgattcctggaagctattcctaggacagtggcattttagctaagatgtgaaaggtgtatagttcaaagataaccagtgaaatktagaaagagactgttccagtcatcccaagtagatttttctattaacccctgaacaagtatttgcacaaacctttccattggctgatgagggtctattttacagtggcattttttgaaaaaaaatctcgtggtttagtcacgtaaatatctctagctaaataggcatctaatagttatgtgcatgacattttttattcagagtccacttatccaacaacctcaattataagatgtcagtccatttgggtcgctataacaaaatacc

SEQ ID NO: 100546 - DNA, 571 bp, Homo sapiens
atcaccattaccatattcactcatctatttgttacatgtcaattacatacccactctgtttttctttaacactgttctgtgttttattcacagtattgagtaaaatagtttatttcccttggaagatatttttttaaatctaatgggggaagcatatattattcaactcatgtaaatatgtaattggagggttaatcaaggactgatctagtttgaaatggggtgattcctggaagctattcctaggacagtggcattttagctaagatgtgaaaggtgtatagttcaaagataaccagtgaaatttagaaagagactgttccagtcatcccaagtagatttttctattaacccctgaacaagtatttgcacaaacctttccattggctgatgagggtctattttacagtggcattttttgaaaaaaaatctcrtggtttagtcacgtaaatatctctagctaaataggcatctaatagttatgtgcatgacattttttattcagagtccacttatccaacaacctcaattataagatgtcagtccatttgggtcgctataacaaaatacc

SEQ ID NO: 100547 - DNA, 571 bp, Homo sapiens
atcaccattaccatattcactcatctatttgttacatgtcaattacatacccactctgtttttctttaacactgttctgtgttttattcacagtattgagtaaaatagtttatttcccttggaagatatttttttaaatctaatgggggaagcatatattattcaactcatgtaaatatgtaattggagggttaatcaaggactgatctagtttgaaatggggtgattcctggaagctattcctaggacagtggcattttagctaagatgtgaaaggtgtatagttcaaagataaccagtgaaatttagaaagagactgttccagtcatcccaagtagatttttctattaacccctgaacaagtatttgcacaaacctttccattggctgatgagggtctattttacagtggcattttttgaaaaaaaatctcgtggtttagtcacrtaaatatctctagctaaataggcatctaatagttatgtgcatgacattttttattcagagtccacttatccaacaacctcaattataagatgtcagtccatttgggtcgctataacaaaatacc

SEQ ID NO: 100548 - DNA, 535 bp, Homo sapiens
ttccacataaatgaaagtctagcacttacaaagtgtttccatagctttagattttatcacttccatttgaataaatgtattaccaataaatttttaaggaggactaagaagattacatcttttgtactttgagattcttttaaggaagtttctataagaatttttactattctgcaaayatagtaccagataattgaaaattaccatacaaggcttatatggccatattagagtatttctatgaatactgatgcctaaaagtgtgagaaatccatgaaaaatatgcctgagagccattttaaacaaatataggcaaaaataagggccccgataattaatatagttttagctataatttatcaccactaaacccaatattaggggttttgtgtgttatatttgcctccaaattgaaaataaattgtttatggataggaagatttcattgaatctgtgtttcctaacattagcagaattttgattctccaactattcacaccagttcctgaatgaattattttactttacatggttt

SEQ ID NO: 100549 - DNA, 591 bp, Homo sapiens
aataaaacatctcccagcaaagaaaagcccaggacctgatggcttcatgctgaattctaccaaacacttaaaaaggagctagtaccaattctattcaaactattgcaaaaaatagaggaggagagactacttcaaaactcattctacgaggccagtattaccctgataccaaaaccagacaaaatctatacatcaattaaaaaaatacataggccaaccactgattaatgttgatacaaaaatcctcaacaaaatactagcaaactgaatttaacaacacattaaaaagatcattcatcatgaccaagtgagatttatcccagggaagcaagaatggttcaacatattaaaatcaattgatgggatacatcaaataaacagaatggaggacaaaaaccatatgatcatttcaattgaggctgaaatagcttttgataaacttcatcatcccttcatgataaaagcccttaaccaattgcgtatagaaggaacatacctcaatataataaaaggcatatacaacagacacatagtatcatactgaatgggaaaaaactgaaagtctttyctctaagatcaagaacacaacaa

SEQ ID NO: 100550 - DNA, 362 bp, Homo sapiens
gaattccttttttcttgggggacctgagtctttttctcttaaggccttcaattgattggatgagcctsgcccacattatgaaaacagatccatttcactccatctactgatctaaatgttagtcacgccttaaaaaaaataccttcatagcaacgtctagcctggtgtttgaagaaacaactgaacaccgtagcctagacaaattggcacataaaattaactatcgcaatggataaaagattcattcaagttgaaggtagaccagtagattcgacatcaccaataagcttcaagaaactaccacttgttgaatattgtagtatcaaaggatgtctgcaattatctggaaagctgttaagata

SEQ ID NO: 100551 - DNA, 545 bp, Homo sapiens
caatttttgtttttgttcccatttcttttagagacttagtcagaaattctttgccaaagctgatgtgcagaatggtatttcctaggttttcctctagggttttcattgttttaggtcttacagttaagtcttcaatctatcttgagttaatttttgcttatgtgaaagaaaggggtccaatttcaatcttctgcctatggctagacagttatcctaccaccatttattgaataggatgtcctttctttactgtttgttattgtcaactttgttagagatcaggtggttgtaggtgtgtggcttcatttctgggttctccatgctgttccattggtttatgtgtctgtttttataccagtaccatgatgttttggtttttgtagccttgctgtatagtttgaagttggttggtgtgatgccccckgctttgttctttttgcttaggattgctttgatggtccgtgctcctctttggttctatatgaattttaggttacttttttctaattctgtgaaaaatgacattggcagtttgacaggaatag

SEQ ID NO: 100552 - DNA, 545 bp, Homo sapiens
caatttttgtttttgttcccatttcttttagagacttagtcagaaattctttgccaaagctgatgtgcagaatggtatttcctaggttttcctctagggttttcattgttttaggtcttacagttaagtcttcaatctatcttgagttaatttttgcttatgtgaaagaaaggggtccaatttcaatcttctgcctatggctagacagttatcctaccaccatttattgaataggatgtcctttctttactgtttgttattgtcaactttgttagagatcaggtggttgtaggtgtgtggcttcatttctgggttctccatgctgttccattggtttatgtgtctgtttttataccagtaccatgatgttttggtttttgtagccttgctgtatagtttgaagttggttggtgtgatgcccccggctttgttctttttgcttaggattgctttgatggtccgtgctcctytttggttctatatgaattttaggttacttttttctaattctgtgaaaaatgacattggcagtttgacaggaatag

SEQ ID NO: 100553 - DNA, 502 bp, Homo sapiens
cacttccagaggatggggcgacgccggtcccaaggcggaggaatctccttgtaccccctcaattcacctttctcttttctgcttcccgtttaacggagacaaggtgaccaggcagaacgcggggaaccacttagtcggctgagctgacagaataacggagsttgtcactaccagaagtgcggtgtgatagactagacagtcgccgcaaccctccgtcagggcgcctgctgctgctgcaaagataatactatcgtgcagccatgcttttgttcatccctgcagcagacttcccgcgctggtggctctccactcccaggaagaaaacgtccttgtctaaagttttaataattgtgtatctatgtatacacatgtttttaaatccacaacactctcacctcattttccataccttttcaaatatttttataaagacattaaaccaaacaacatcgtgccgttcaagaattgccctgctcttaacacacctaaatatttatttaaa

SEQ ID NO: 100554 - DNA, 543 bp, Homo sapiens
taatgggcttccctgtgaaggtggcctgacccttctctctagctgcctttaactttttttttttttktttgtttcaaccttggagaatctgatgattatgtgtcttagggtgatctgcttgtgaatcatcttactggggttctctgcatttcctgaatttgaatgttggcccctgtagctaggttggagttctcatggataatatcctgaaatatgttctccaagttgcttaaactctcccaatctctttcagggacaccagagggccataaattttgtctctttacataatcacatacttctttgaggttttgtttgttcctttttattcttttttctccattctcatctgtcttatttgagaaagccagtcttcaagcttcgaaattctttcctctggttgctctgttctgcttttaatacttgtgattgtattatgaaattcttgtagtgtattgtcatgtatttttcagctctatcaggttggctacatgcttttctatacggtctattttgtctgtcagctcctgtgtcattttattt

SEQ ID NO: 100555 - DNA, 546 bp, Homo sapiens
caacaagtcaggggttaaatctaaaatggttttggtgcatggccctagactagaagactacatgattgcaataaggaatggagatctgttcactgttttataattttccatttcatagacttgaagtcccatttgctcataggtagattttatttattggtttcttctgaattggatgtggtgggaaatatttttcccagggaatttccrcttggcagtccaaaagatcttaagatcttgaaagggagtgaggtgagttggtagaaaaatgcagcaggcccatttttattccatcctctaatttagccttgtcaggaaaacaagaaaaagaaacaactgatattttattttctaactgactccagcgtgaatttctcagttggttaaatacttggagttgaaaataatgctattaattagcactcacaaacctagcataacattctgtcttcagttacatttataattatgggaattatatgttttttcctatagttacaatgctttatgctgtcttatttgcatttatctccaataacaactaac

SEQ ID NO: 100556 - DNA, 546 bp, Homo sapiens
caacaagtcaggggttaaatctaaaatggttttggtgcatggccctagactagaagactacatgattgcaataaggaatggagatctgttcactgttttataattttccatttcatagacttgaagtcccatttgctcataggtagattttatttattggtttcttctgaattggatgtggtgggaaatatttttcccagggaatttccacttggcagtccaaaagatcttaagatcttgaaagggagtgaggtgagttggtagaaaaatgcagcaggcccatttttattccatcctctaatttagccttgtcargaaaacaagaaaaagaaacaactgatattttattttctaactgactccagcgtgaatttctcagttggttaaatacttggagttgaaaataatgctattaattagcactcacaaacctagcataacattctgtcttcagttacatttataattatgggaattatatgttttttcctatagttacaatgctttatgctgtcttatttgcatttatctccaataacaactaac

SEQ ID NO: 100557 - DNA, 548 bp, Homo sapiens
acaagcaaatgctgagggtatacgtttccactagacaagcctcacaaaaggaccttaagggagtgctaaacacagaatcaaaagaatgacaccttctactacaaaagcacactaaaacacatagcccacaggcactataaagcaaccacatgatcaatcctacataacatccagctaacaacacgatgacaggatcaaattcacacatgccaatattaactttgaatgtaaatgggctaaacccctcacttaaaagacagagagtggcaggatagaaaaaaagacccaatcatatgttgtgttcaagacacccctctcacatgcaattacacccacaggctcacacgaaaatggtggagtaagatctattattrcaaatagaaaacaaaaaagagcgggagttgctattcttataactaataaagcagactttaagacaataaaattaagaaggacaatgaagggcaccgcataataataaagggtataatccaacaagtcttaactatcctaaatatatatgcccctaacactagagcacccagatt

SEQ ID NO: 100558 - DNA, 479 bp, Homo sapiens
cttctccctccaattctctctttttcagtatttcttctcctcgctttccaggtgctatggtggttccaaactctatttcttttaaaccagtgacaccatgaacattatttatataaattgaaggcartggagacagaccaaaagtaaacagaaagtagaaaaaaattaaaagtcaaaacctagaaaatgaatggccctaggtgagtttgggtgagtttcttgtttttacaggattttgtctgaggaccaaataaataactaaatgtttgtacaaaatgtactatatatacatatttattccacaatttgtagcttagaatttgtatctgtagggaagttggtctatttggaactctgaaagcagaactccactccaaactttttaactgctgttatcaccttctggaatatgtccttttaatatccctcaaatttatttcatattatcccagtttatcaaacatttaggacccaattgt

SEQ ID NO: 100559 - DNA, 479 bp, Homo sapiens
cttctccctccaattctctctttttcagtatttcttctcctcgctttccaggtgctatggtggttccaaactctatttcttttaaaccagtgacaccatgaacattatttatataaattgaaggcaatggagacagaccaaaagtaaacagaamgtagaaaaaaattaaaagtcaaaacctagaaaatgaatggccctaggtgagtttgggtgagtttcttgtttttacaggattttgtctgaggaccaaataaataactaaatgtttgtacaaaatgtactatatatacatatttattccacaatttgtagcttagaatttgtatctgtagggaagttggtctatttggaactctgaaagcagaactccactccaaactttttaactgctgttatcaccttctggaatatgtccttttaatatccctcaaatttatttcatattatcccagtttatcaaacatttaggacccaattgt

SEQ ID NO: 100560 - DNA, 232 bp, Homo sapiens
tccaatgacacatgggaattgtgggagttataatttgtgatgagatttgggtggggacayagccaaaccatatcacacctggttccaaccatctttacactccactgagatctctgattttgaatttgtcactcttctcttcaatacctctctcctctccttttcctgcttaaatttcatagtcattgtcaccattttttttgcatataccatagactcttgtccctgtatt

SEQ ID NO: 100561 - DNA, 605 bp, Homo sapiens
actttggtgaactctcggcattaccattttctgtattagtctgttttcacattcatataaagaactacctgagactcggtagtttataaagaaaggaggtttaactgactcacagttccacaggctatataggaggcatggctgttgagtcctaaggaaacttacaatcatggtggaaggcaaaggggaagcaagcacttcttcacatggcagcaggaaagagagggagagagaaagagagagagagagagagagagagagagagaaccaagggagaagtgctacacactttcaaacaaccagatctcatgagaactcacccacaatcataactaaggggaaaatccgccctgatgatccaaccacctcccactatgcccctcctccaacacggaattacaatttgacacgagatttgggtggggcacagagccaaaccatattacacactaacatccatccccagggaggagcttattcaccatttactatatatgtgatgtgtgaagaagcatgatccatgacggtgcctgtgctgcctttacctttcctttacgtrcaatgactcagctgaacaacacaataaatacctcactttcatcttc

SEQ ID NO: 100562 - DNA, 511 bp, Homo sapiens
acagcaaacccctgttatatgtgcttatctatgtaacaaactttcatatgcacccccaaacctaaaataaaaattaaaaaaaaataacctatatcctaggctgggtgcagtggctcacaactgtagtcccagcactttgggagggtgaggtgggcagatcacttaagcccaggagtttgagaccagcctggacaacatagtaaaaccctgtctctaaaaaaaatacaaaaattagccaggggtggtagtgcttgtctgtaatcccagctactcggaaggctgaggtggtaggattccttgagccyggaggttgagtttgcaatgagctgtaatgatgccactacactccagtctgggtgacaaaggaagaccctggctcaaaaaaaaaaaaaaaaaaagaaaaagaaaaaagaaaaaactattaaattaaatttaaaaatactgtatattacaatgaacaatggttacccatggggaacacaagaaataattttatttagtaaaaaactta

SEQ ID NO: 100563 - DNA, 511 bp, Homo sapiens
acagcaaacccctgttatatgtgcttatctatgtaacaaactttcatatgcacccccaaacctaaaataaaaattaaaaaaaaataacctatatcctaggctgggtgcagtggctcacaactgtagtcccagcactttgggagggtgaggtgggcagatcacttaagcccaggagtttgagaccagcctggacaacatagtaaaaccctgtctctaaaaaaaatacaaaaattagccaggggtggtagtgcttgtctgtaatcccagctactcggaaggctgaggtggtaggattccttgagcccggaggttgagtttgcartgagctgtaatgatgccactacactccagtctgggtgacaaaggaagaccctggctcaaaaaaaaaaaaaaaaaaagaaaaagaaaaaagaaaaaactattaaattaaatttaaaaatactgtatattacaatgaacaatggttacccatggggaacacaagaaataattttatttagtaaaaaactta

SEQ ID NO: 100564 - DNA, 553 bp, Homo sapiens
ggagcataagtttgactgaggaaagagagaatttttagattaatagaaagtatctgatctaacccaggaggtgcagcttgcagtgagccgagatcgcgccactgcactccagcctgggtgacagagcgagactccgtctcaaaaaaaaaaaaagaaactatctgatctaaagaataggcaggctgggcatggtggctcacatcccagcactttgggagactgaggtgggaggcctgcttgagctcaggagttcgagaccagccatggcaacatggtgagactcttcctacagaaaacaaacaaacaaaaattagctgggtgtggtggtgcatgcctgtactcccagctactcagaaggctgaagtgggaggattgcttgagcctggcaggtggaarctgcagtgagccatgatcatgccactgcactccagcctgggtgacagattaacccttacaaaaaaaaaaaaaagaagaagaaaaagatgagggagagagagagagaaaggaagattgactaaaagacacatactcaggaacctgagagacagtatca

SEQ ID NO: 100565 - DNA, 562 bp, Homo sapiens
attccaaatgccaaacattccaaagccttccaagatcaggccccaagtctcctttcttgcctgctacatcttcacaaacccacacagatttccagctgggtccaaagcattctgtcaactcctagggttccaagtctctgctcactctgtgttgtgaggctgarcgattcatccctctcctctctgcccatcccacatctgcaccaggctcatctcaaaaactcccctgcctctccccacccctttttccgttgtgctttcaaactacattattcaacccattcttttgctttggagcatagtcatggattttttctatttgtctttctattagaaggtgagcttcttggaattcggggctggggtgattcacatcatagctcctccctccagtgcctttgcacagagaagaaatcagcaaacatgtgttcatttgttcaacaaatattaactgaaggcatactgtgtgctgggcactgatctacgtgctagaatatagcaggaacagtttctgttcccatggagtagacactagactaggagaagaggatagatgataaat

SEQ ID NO: 100566 - DNA, 632 bp, Homo sapiens
ttatagtattcagtaaatcaacaaacacttaagtacttttttttctgcatttatattgcttaccattgagttcccagcttctgacatagggtctggcatgtagtaggaaatgtttgttgactgactgaaagaaaaggaaaaaataaaagaagaaaaggaaggaggaggcaggggaaaaggaactaaagctaaaagcaaaaaacaaagagtggcctactgttttgctaccagcagagaatatagagctgggagggactccagagtgtatatggttgaaacttctcatttcactgctagggatgttgatgcctcataggaggaagtgactctcccaaagtcacactgttggtaggaggctcagttggacctgaacccaggtcttctgatccctggcatggggttctctgtgttataccagaatyttactgggtttctgcacatatactgagaggttactccttcccagacaactgggttaagggctgggagaacaaaatgcagaatatgtgattcctgtcccagaggagctcacactcgtgccagtggctgagcagtctctgcattgtagctgcaaagccctctgagaaagtgaggtaagagaccagcaggacttgttttctggtcaccaccct

SEQ ID NO: 100567 - DNA, 590 bp, Homo sapiens
aaattaccaccccctttctagaaatttctgaataacctgccccttaatttgcaggtaattaaaaatggatataaatacagctagccagcagcccacaagtaccaactctgggtgcattgcccatgaaccctgccctgcaaggagcagtaccattcaataaatgatcactgtctaacaccactggctcacccttgagttctttcccaggtgaagcaaaatccctcctgggctaagccccaattttggggcttgcctgtcctgcaacatgtagcaaccacaaagggatgaatacagcgatcaggaggcagtgaccarttcagcaataagacggtggggacagtggcaatagagattggtggagaggcaagatgacgagagatggtgagagatggtgactgacaaggaagtgggagccagcaatcagcggtcagttggatagtaggatggcaaaatggagaaatggtcatcagcactatggtattcaaagctgcagagccaagggctcttttaagagccgtctttcctgggaaaagccaaaaatgctcctgggcaattttggggcttgcttgtcttgcaacaaaaagaagtga

SEQ ID NO: 100568 - DNA, 590 bp, Homo sapiens
aaattaccaccccctttctagaaatttctgaataacctgccccttaatttgcaggtaattaaaaatggatataaatacagctagccagcagcccacaagtaccaactctgggtgcattgcccatgaaccctgccctgcaaggagcagtaccattcaataaatgatcactgtctaacaccactggctcacccttgagttctttcccaggtgaagcaaaatccctcctgggctaagccccaattttggggcttgcctgtcctgcaacatgtagcaaccacaaagggatgaatacagcgatcaggaggcagtgaccagttcagcaataagacggtggggacagtggcaatagagattggtggagaggcaagatgacgagagatggtgagagatggtgactgacaaggaagtgggagccagcaatcagcggtcagttggatagtaggatggcaaaatggagaaatggtcatcagcactatggtrttcaaagctgcagagccaagggctcttttaagagccgtctttcctgggaaaagccaaaaatgctcctgggcaattttggggcttgcttgtcttgcaacaaaaagaagtga

SEQ ID NO: 100569 - DNA, 590 bp, Homo sapiens
aaattaccaccccctttctagaaatttctgaataacctgccccttaatttgcaggtaattaaaaatggatataaatacagctagccagcagcccacaagtaccaactctgggtgcattgcccatgaaccctgccctgcaaggagcagtaccattcaataaatgatcactgtctaacaccactggctcacccttgagttctttcccaggtgaagcaaaatccctcctgggctaagccccaattttggggcttgcctgtcctgcaacatgtagcaaccacaaagggatgaatacagcgatcaggaggcagtgaccagttcagcaataagacggtggggacagtggcaatagagattggtggagaggcaagatgacgagagatggtgagagatggtgactgacaaggaagtgggagccagcaatcagcggtcagttggatagtaggatggcaaaatggagaaatggtcatcagcactatggtawtcaaagctgcagagccaagggctcttttaagagccgtctttcctgggaaaagccaaaaatgctcctgggcaattttggggcttgcttgtcttgcaacaaaaagaagtga

SEQ ID NO: 100570 - DNA, 656 bp, Homo sapiens
tgaaacctggaactggagtcagctccaacatcccagccagacaacaggtcatcttccccaccctaccccagggtaggccttccctgaagccagcttcccattctacacagagatggccagtcagaaataatagggtatattcatttgctagggcttccataacaaargaccacaatttattgtctcacagttctggaggctacaagtctgaaatcgaggcagggccaccgtccctcttaagatgccagcaaaggattcattcctgccctctctccttgttctgcatatggtcatattctgcctgtctcttcacatcttcttcctctttttagaaggatgcagtcttattggaatagggcacatccaaataacctcatcttaactcgatcatctgcaaagatcctgtttacaaataaagtcccattcccaggtactgtggattaggtccctttgcagggaacacaattcaaccataacatatagtgaatgcctggaagaaataacttttaaaaagtcatatgggccaaagaattgaaagtaggcatcacaaaattaaacatcaaaaaaggaaacttgaaaagtttaacctaaactgtgcaattgtcagaatcacaagcccctgacacattctgcaatgtatcagaaaatccagaaac

SEQ ID NO: 100571 - DNA, 656 bp, Homo sapiens
tgaaacctggaactggagtcagctccaacatcccagccagacaacaggtcatcttccccaccctaccccagggtaggccttccctgaagccagcttcccattctacacagagatggccagtcagaaataatagggtatattcatttgctagggcttccataacaaaagaccacaatttattgtctcacagttctggaggctacaagtctgaaatygaggcagggccaccgtccctcttaagatgccagcaaaggattcattcctgccctctctccttgttctgcatatggtcatattctgcctgtctcttcacatcttcttcctctttttagaaggatgcagtcttattggaatagggcacatccaaataacctcatcttaactcgatcatctgcaaagatcctgtttacaaataaagtcccattcccaggtactgtggattaggtccctttgcagggaacacaattcaaccataacatatagtgaatgcctggaagaaataacttttaaaaagtcatatgggccaaagaattgaaagtaggcatcacaaaattaaacatcaaaaaaggaaacttgaaaagtttaacctaaactgtgcaattgtcagaatcacaagcccctgacacattctgcaatgtatcagaaaatccagaaac

SEQ ID NO: 100572 - DNA, 656 bp, Homo sapiens
tgaaacctggaactggagtcagctccaacatcccagccagacaacaggtcatcttccccaccctaccccagggtaggccttccctgaagccagcttcccattctacacagagatggccagtcagaaataatagggtatattcatttgctagggcttccataacaaaagaccacaatttattgtctcacagttctggaggctacaagtctgaaatcgaggcagggccaccgtccctcttaagatgccagcaaaggattcattcctgccctctctccttgttctgcatatggtcatattctgcctgtctcttcacatcttcttcctctttttagaaggatgcagtcttattggaatagggcacatccaaataacctcatcttaactcgatcatctgcaaagatcctgtttacaaataaagtcccattcccaggtactgtggattaggtccctttgcagggaacacaattcaaccataacawatagtgaatgcctggaagaaataacttttaaaaagtcatatgggccaaagaattgaaagtaggcatcacaaaattaaacatcaaaaaaggaaacttgaaaagtttaacctaaactgtgcaattgtcagaatcacaagcccctgacacattctgcaatgtatcagaaaatccagaaac

SEQ ID NO: 100573 - DNA, 354 bp, Homo sapiens
tgtgactctaccacctgctggtgtgtcagtttgactaattctctcagtttgtcttgccttgctttcttcatctataaaatgggtatagcaatacctacctcagaggtctgtgctcagkattaattgagttaatatatttaaagtccttagtgcaacatctcccagagtaacaggcacatattaggttctcagtaaatgtataattgaacacatagaataagcaaatagacaccagctacttttgtcagcccatgtattagttttctggagttgctataataaagtaccacagactgggtggcttaaacaacacaaatgtatttttcttacagttctagaggctggaagtttgaa

SEQ ID NO: 100574 - DNA, 312 bp, Homo sapiens
gaaaggaagaaagacacaagccagtcactatctcctgagatgaggctgttagagacccagagagagacccacttcccctctggaaggagtttccacagggatgaaatcctattcacatttatgcctgtgttcttgcccagcgtagtccttatcscagccattagtgggcactgggtgactggagcattctccctctgctccttcagtccttcaaacttgcaaaaaaaaagatagattacatagatgatagatagataaatagtgatagatagatagatagatagatgatagatgtagtaggagtgattgata

SEQ ID NO: 100575 - DNA, 556 bp, Homo sapiens
ttgaccataaggtaagattttcataaacttcttataactctttacaattttctgttaaacagatcaatttttttaaaagaaaaccctgctattcagacacatgggcccagattctggctccacatcagtgtgcttttattttaatgtttgagctatagaaaaatactaaacaattcccttcaactcttagccaacttgctgcttctcacagaacttcctttatcagatcaacccttcacaaacctttctaacttgcttaaaccttcaattttgtccctttactcttttagtttaagacattctttaaaaccctcttaactagacaaaattacattccctttaacaaaaaccatattcccatgccttcttataatttcccaccaaaaccacattctactttccttctatacctygcaaccttgcatgtaaaactctttttccagtggactcaagtacatgttacactattaactttttgcatctttcatttttggtgaaaagcctgataagtaaatgattttaatatatactagctgtggagcctaggacaccagac

SEQ ID NO: 100576 - DNA, 556 bp, Homo sapiens
ttgaccataaggtaagattttcataaacttcttataactctttacaattttctgttaaacagatcaatttttttaaaagaaaaccctgctattcagacacatgggcccagattctggctccacatcagtgtgcttttattttaatgtttgagctatagaaaaatactaaacaattcccttcaactcttagccaacttgctgcttctcacagaacttcctttatcagatcaacccttcacaaacctttctaacttgcttaaaccttcaattttgtccctttactcttttagtttaagacattctttaaaaccctcttaactagacaaaattacattccctttaacaaaaaccatattcccatgccttcttataatttcccaccaaaaccacattctactttccttctataccttgcaaccttgcatgtaaaactctttttccmgtggactcaagtacatgttacactattaactttttgcatctttcatttttggtgaaaagcctgataagtaaatgattttaatatatactagctgtggagcctaggacaccagac

SEQ ID NO: 100577 - DNA, 615 bp, Homo sapiens
aaactgtttcccaaatccaggcttatatgtggctatcatggtcctctgggccccatggcatgagcacatggtggcttttatggctcggcttgctattggcagcctgagaggtgtaagctctggtttctgactcatccgtcccctctctggctcttcagtcactctgctcttctgcaaatggcagtgtccactgtgggtgcgggtgccaggctgggctccttccctcatttgaagctgcatattcctactcgaggctctggaagaaacaggcccctgagctccaggagccacaagaaattagagacagaatgagagaaatagccaggctggtagactcagcagcagagagagwgataggatttcacatacagctgagcttgaaggaaactcttaaataaaacagctgcaacctcttgaaagaagtccctcctcggaacctggctccaagtaaacttctcagaactcttagaccactgtagaagcctgatgtcttcattcaaaacgaaaatagttgggcggaaagagtgctattaaaatgcaaatgttaacttttaacaccatctcctaggaattctaagctctacaacttcaaagccccaggaagagggatgcaat

SEQ ID NO: 100578 - DNA, 604 bp, Homo sapiens
tcagcttcctacatactcccctccttggccctgccaaaaacacagatgttatcacaagataacaatagctctaacagtgacggccatttctcttctgatgctctttggggagagtgcttttcccagcatcagcagagactctgacgaggctggcagggtgccttccttgagcctgtgaacaggcattttaagccactgcagctgggaaccactgggcacatcatgtgatgcrtgcagagcagagttgctttaaatgctgctaccagaagagaaagcaaacatcgtatccagacagcctgaccctactttgtaacagaaccaagtttttggtgtataaaactgcctgaacttttaaactctttcagtgcaaggttttctcctagccttttcaaaaggctgtttaaaaggctgtttcctttagcatcatcagtgggttggcaatgattaggtggttgtaatttcctagaactaaatttcccgctatttgcctacgtgtgcaggacaactatatttaaactgggatatttctttcattcacttacttaactactatttgttaagcacctactttatgctggggctcccacggtaaacaatgagattt

SEQ ID NO: 100579 - DNA, 359 bp, Homo sapiens
tgggtaggacatagttataaaaggacagagaggtgagaagaggaggacaggaatgggaggcagaaaagaggaatggggaggggaatcagggtagatgctggtatttcagactctgaggaggacctyaatatgctaaggtaaataaaatatttaagggcaaaaactgaattgcaatgtctaacaaagatccaaaatagataccataaagtactatgtggagagaaaaataatccccttcccttgtactagaatttcccaacatccagttaggaaaatcagttccaatgccatgatgtgaatatgaatgacaatttcaatacatctgaaattaataaaataatcaaaaatgtcttttattg

SEQ ID NO: 100580 - DNA, 359 bp, Homo sapiens
tgggtaggacatagttataaaaggacagagaggtgagaagaggaggacaggaatgggaggcagaaaagaggaatggggaggggaatcagggtagatgctggtatttcagactctgaggaggaccttaatatgctaaggtaaataaaatatttaagggcaaaaactgaattgcaatgtctaacaaagatccaaaatagataccataaagtactatgtggagagaaaaataatccccttcccttgtactagaatttcccarcatccagttaggaaaatcagttccaatgccatgatgtgaatatgaatgacaatttcaatacatctgaaattaataaaataatcaaaaatgtcttttattg

SEQ ID NO: 100581 - DNA, 542 bp, Homo sapiens
taagacatcctgttcgaaaatgacaatgatcctcttacacctcacagtctcttactctctctcgttcatagccgtgcccgacatgtaatatggtatgcattacttctttgtataattgtgctgtttgtccccctttactggaataaaaacttcaggaggaaggggattttcatctgttttaagcattgttatattagcagggtatctacaatatgcctagcacattaagtattctcaataaatatttgctggttggaagaggacatcagctttgggagtatccatccagtggaattttccactctcaagaagattgatcagtttcatgaaataatcttcactgacctcacctattatttarggaacctgatgcgatagaggtttatgagaatagatcttggcttaagcaccaggttgtggttagggatctctgtaatgttgagagcagaaatggtacaatgggatctgggaatctctcacatcttcataatcattctttgaaatgataaaagcaaacctaacccaaattgtgtttgcttttc

SEQ ID NO: 100582 - DNA, 528 bp, Homo sapiens
aggctagcctcgaactcctgacctcaggtgatccgcccacctcagcctcccaaagtgctgggaatacaggcgtgagccaccacgcccggccaataacatttatataatgttctaacatatgcaaaactgaacaatatgatatagagacatacatctatgataaaactataaagaaagcaaggtttatcagttatttgtgttcaatgataatcacaaaatataggactatgggtacttctgagtacaggaaatgtgtgtctcacaggcatctttcacatttcatttctgaagctggatgagggtacccagatttttttaaaatattctttataccttatatagacactatatrttcttttttgtgtataaaatattctctcataaaaaggacaaatcttataagtgaattttacaggcaagagaagatactttttaaaatcatcaaattagccaagtttttttctttaaaactcacagtgaagttttttttaaaaataagaccagattaaccaaccttaagagttaaat

SEQ ID NO: 100583 - DNA, 589 bp, Homo sapiens
aggtgaccatcggccaaacttgaagggcagcaaagaagagaagtcatgattcagtaatacaagaatcaaggctactaagcagtaatgccttcaagggcaaagacctttctgatatcgatggtatttcaaagcagaacagccttctctatttcacatctaaagaatagcagccagttgattaaacaaacaaaaaccttatctttgagctagcttcatttgtagaaaaactatgtttaccatactgaatgagtaaaaggccaagtcacagcctaccccccagctgggtagtaaatcttgcatccaataggcaagttacagagaggatggcaattctscaggcttaagacactccatccaacttcaagaaaaattcccttgtttaatcataatgctggaatcctatacttgaaaaggaccctaagacttctttttaataattgattccttaagtttcaggaaaacggtaagatgcaatgagatttttcagctttttttgtgagaaagttctcatttccaggaagtactgaagttatttggggacaggcatatgatgaaggaaaaatcctttgagaagactgcgctgatgggg

SEQ ID NO: 100584 - DNA, 575 bp, Homo sapiens
tgaactaagcaaccacagtaaactttaagtccatgtgaagataactggtaggtgtttggggagaacaaaccagggcacattagctagtctgggctaatgggggaagacttccaggtgaaagtgaagtttaaaagacagaaacaggccaggcgtggtggctcatscctgtaatcccagcactttgggaggctgaatcacaagttcaggaggttgagaccatcctggctaacacggtgaaaccccgtctctactaaaaaatacaaaaaattagccgggcgtggtggcaggtgcctgtagtcccagctactcaggaggctgaggcaagagaatgatgtgaacccaggaggcagagcttgcagtgagccaagattgcgccactgcactccagcctgggtgacagatcgagactctgtctcaaataaaaataaaaataaaaataaaaataaaagacagaaagagaagaagcaggggaagagaacgacaacccactacctgcaaaggtctagaatccagaaagaacttaactcacagggatccactataaagcctaataaattttttaaatctagaaaaat

SEQ ID NO: 100585 - DNA, 575 bp, Homo sapiens
tgaactaagcaaccacagtaaactttaagtccatgtgaagataactggtaggtgtttggggagaacaaaccagggcacattagctagtctgggctaatgggggaagacttccaggtgaaagtgaagtttaaaagacagaaacaggccaggcgtggtggctcatgcctgtaatcccagcactttgggaggctgaatcacaagttcaggaggttgagaccatcctggctaacacggtgaaaccccgtctctactaaaaaatacaaaaaattagccgggcgtggtggcrggtgcctgtagtcccagctactcaggaggctgaggcaagagaatgatgtgaacccaggaggcagagcttgcagtgagccaagattgcgccactgcactccagcctgggtgacagatcgagactctgtctcaaataaaaataaaaataaaaataaaaataaaagacagaaagagaagaagcaggggaagagaacgacaacccactacctgcaaaggtctagaatccagaaagaacttaactcacagggatccactataaagcctaataaattttttaaatctagaaaaat
